United States Patent Application Publication US 2013/0034624 A1 - sequence listing, part 9

SEQ ID NO: 35930 - DNA, 1937 bp, Bovine  19866880361724
  misc_feature (1)..(1): n is a, c, g, or t
nattatgtatagatatatgaatgaatcaaattaaaaataaatttggtttaataaaattatgtgcattcatcatatattgaacatctgggatgctatttatattgatggtagagtatttcagattccaatccagtgataatccaatgataaatttcaaagtttgttaaagtattttaggaaacattggtttcaatgggggcattactttatgggaagtaatctacatttgtagtaaacgcatcaaggaactagtatatgtgagaaggtcttggcatggattatctgtgattatcagcttctcaacaatgttcccctggctataaatatggctcactttccatagtcaatgatttaatgagagactgtagtcaaatggagtctgagattttaagaagcctaggctatacttcatctgttgtgtgaccttgggaaaattatttaacctcattgggtctaaaaaaatggtaacaacagtgggttaattgtgatgattaaatgaagcctaaaatttttttgagagcagggactttctcttcagtaagtatcacatatgaacagtgtgttaactacagtatattcaataaaacaaatacttgttgaatgaatgaataatgtgtgtaaaatacctagaccagtacaggcaaccaataaatggtatctaaataacaattattagcaaattagctatatatctttatatatgtgttatatagaacacatagaaatttgagagcatatagtagatcctagttgactttaactgtttattttttcattggacaggattgaagatgtttgattgagtttactgatcagaatttttttttccctttttatcatttgttttttctttttgtttttggccatgcctcttggcatgtgggatcttagttccctgaccagagatggaaccatcacctccagcattggaagtgcatagtcctaatcactggactgacatggaagtctgagatcagaattttaaatgctagagttagaaagtgtttttatttgcttttcttttgatgacaaaaatcatttaatactgaaactgtaggtggggttaaaatagaagcctaatacattttggttaacagtatatcaaagtaaaatttccttgtttttttctatgaatttgatggtagacctataagttaatggtcctgatgcttttaactgagttgatcacccatggtctccccatacggtgctactacagcagaacctagatgtagcacttattcagttataccaccttgtaggcagatttctgctgatgtgttcattggctgccagcacagcattggccatctttacttcgaaacacagaagagttaatagcagaggaactgggattgaaatattagggttacagtaagtaatcacatactgttaaattatttgactcagttcctaatctgttagtgaagtcactcagtcatgcccgactctgcaaccccatggagcctactaggctcctccgtccatgggattttccaggcaagaacactggagtgggttgccatttccttctccaggagatcttcctgacccagggattgaatccgggtctccagcattgtaggcagacactttatcgtctgagccaccagggaagtcaatctgttaaaggtggataaaaagcacatgccttattcatttttaacgtaatttagaagggacaagtacttatttacccagggatgctttgactgcaagcaacaaaataacatctgaagtttgtttaaatacagggagacttttaataagatatccagtcatatctcatgaaaccaaagatgcgatgtgtcactagacatgagtgaggttttggaacagagaactggaaagccctcagaagccactgctccttaatcaactgtctctcctgtgtaacacttatgttcattatgtgtttctgattcattttgtaggtt

SEQ ID NO: 35931 - DNA, 2304 bp, Bovine  19866880367586
  misc_feature (1)..(1): n is a, c, g, or t
ncaaccaatgcataaagcaagtttttgatgcatattaagcatatttgtcatcatcttgtgtttatctttaaaaaaccactagaaagcaaagtgtcaattaggtaatagctatactatcataacttttttccttaccatgtatcttgttgttgttcagtctctaagttatgtctgactctctgtgaccccacggactctagtccaccaggttcctttgtccatgggatttcccaggcaagaatacagtttcccaggttgccatttccttctctaggggatattcgcagaccagggatcaaacctatgtctcctgcattggcaggatttttcaccagttagctaccagggaagcccaccatgcctcgtactttagtgctaaatttaaagtgagtggagacagctttttattgtggtgctattatcacattgccaaaatagttagaagagaaacaaatagaaaaccacctggcaaaggaatgcatttcagtaactttattgaaaggtatatcccttagtaccaaaacataatgggagttggttaggttacctctggcaactcaaaattaacactgatgtattcaaaatattgaaatgtatcagtattttgggaaaactgtaaagttatccataaaacatggtttaccaagtatgagatacactgtgggtctttggttcattttctgatgcctctatagccataaaatgatgtcaaaactggtgcagccatcctggatggattcaggctacacactgcactgagaaactctctgcaacactttaaccctgtagatctccaaacactacacctcagcaaccttatacttatgaagatgcctacttatctttcctaatacttgcttttggcacacagtaggggcaattaatataagtatattctcttccttttaagcaaaattctaagttagaaccaagttttataaaaacagtcctcagtaaaaactgatggagtgttaaaaagttttcagagtgacgctaatttgttttgagctactagtacagtaaaaactaattttcttgatgggactagactgaggcagtaaattttgtataaaacttttaaaatcatggatacaaacatcacctgttttctagaaaaatattaaagataacatgccaaaattaacaagttggtagttttgctttacataaatgccctcaaatttaaatgtgatttctatgtagcagtaaggtccacatctctgggttaataattacttgcatcataggtgccgagaaactaactattctcactgtctagaatagtgacccttattgtgccttaaaaagtgcatttgtgaaatggtggttttgatgtaaacttcatagtttaaatttaagtaggttaccctttttaaacaccacctaaatacaatatattgacccaatacagaaacttggatcaatgttagaaatgaagattcacagtttacctttccaggcttgtcatttgcatttcacatttatactgttactttgatttgtatgtttcataggtgaactcaaatttgagtaattccactatagggtaattttaattaggcagttttcccaaatctgagaacaccgatgctaatctagttgtaatgttttgaggcttcacagcttaaatccgttataatattatggaatccacagctcaggattgtggagaaaggcttcagaagttttttgttgctgtaatcatccaattaagggaccgtttcgggaattgttggaaggtgggttatcctgtagtaactatgcctcagttgccgtgcagtacgcccagaaacaatccatttcaacttctgaacatttggtttggcacacttgttcgatgaatattcagctaaacacttggatacaagctcctgccagaaagtcaaatctctgccactgatcttggaatgtttctgaagacgttctactccttctgttaactctatatacttctgtgcttggatctccaatgcgatgacagacaatgccaacacagatggctttgctttagaaaatatgatcctgcagtagcatgccttaagttgggcttctagtctttcaaaattaaggctactcttcctttcatgtggcacgttctcttgaaggagtgagtaatagagctgtagaaactgaaaggcagtagtagctttgactttccaacacaccttctccaatacgatcttctccattttcatcaagtctgaaaccgtgaacctgtactggcttattcggatcaagtcagttgccaatgggacattcctttcctcttctggtgattttacagccagatagaagcagcttagt

SEQ ID NO: 35932 - DNA, 1899 bp, Bovine  19866880411712
  misc_feature (1)..(1): n is a, c, g, or t
ntgagtacagatgagtatgttcttcacatagcacgcaggctaaggtaagaaagggtgaaacaagttagaggaaattgacatggctgggtgttaaatgtggtagcaaggaaggtaaacaaactattgcccaaagtcctgaatgtgcctgcctctcagtaacccagctgggtcatcagaatgttctcggctggctgggctctcaggagctcgtctcgaattcttttgtttctactccagttttgtgatagtgccaaacagttactgccacccagttttgcccacgaatgttgatagaaacaagggattcagaagtagggtagaaaggtggacacattttgtgaataagactgaagactaggtaaggggtagttggcgcactacttggtttataacagacaatgaaaaacttagatttcccccccaaagtctgaagacagtcattcagctaaaaacgttctcagggttagagtcaaaagtaagtaatggtttgaaataaaaatttttcttctgagcctttttaaagctcattttttaacctgtgtttcatgccaatcatatcttctgggagcctttttccacttaactgattttcatctgtctttaaggaattattttaattgatacatttgctttgttacctgtctctgatggagctgtcatgttggacacctctggattcagttgtccgtgagacatttattaagtatatcctgtgaattgtgcttggccctggagatcctggctattgagattttaaatgaaaaatatatttcatgagagaagtatgaaaatgctatgggaatgcagtgaagagaaataaactttgccttgggcagttggggaaagcttcatggagcaggtgatatttgagctgaatcttgatggatgggtgggagcctgctagttggagagagaggaaataacatgttcaaatgtccagagttgtgaaaaattcatgatatgtcatgtgatagagaggtttgaagagctgactcagggggagtaatgtgattggtgaggtgctctggtcattttttttttttttaatctagaatgaggagaaaaaattccagagaactaaagcactctgcatcacagactagcaaaacatcagctccagtaagtaacccccatgcccatcttgggtactgtaaagaaccacataggctgcactagggaatttgacttttcacttataggcaaaggagagccaatgggtgacttaaaacaggtgaaagaaatgatcatgtgtgttagacaaggtggtggttaagaaggtatatcgatgtgagaggaatggaagaggcagagtcaacaggatttactgttttattggccaaagacatgaatgaaaatgataaagggaggcattgagtttgggtacctcgtactatggtgatgtcatttatggacaaagaggagctttttggaggaggggacagtgaaagaaatgagttcaccgcttggctagtgatatctgaggagcctaaagtacatccggatgtcgttaaatgtcagatgcccaggagaggtcacaatgatgtttgtgtgcagtagggaagtagctgtggaagtcgtggaaatagatatcctttaacattattttccttccaaaacagtttggacttaactccttcattctatagaatgtaattcttatgtacttcatatatatttctggacttaaaattgagctttaaaaggattctgtacagtttgattaatttggcactacaccagtattttttagaaccttacttcctaacaactctattaatatttaaggtggtttggggaagtcacatccttttaaaggttatattctctcatcttaatccccaggttcaatggttcttcactgattcttacctcattcccttgacaaactattttcctcca

SEQ ID NO: 35933 - DNA, 1843 bp, Bovine  19866880421856
  misc_feature (1)..(1): n is a, c, g, or t
ntggagtgtgttgccgttgccttctccttgtgtgaaagtgaaaagtgaaagtgaagtcgctcagtctcatccaactcgtagcgaccccatggactgcagcctaccaggctcctccatccatgggattttccaggcaagagtactggagtggggtgccattgccttctccgaaatataacactacacactatcaaatgaacataacaataggtggtttcccctctttatttattttcttttgatgtttaactaaatacttacagctgttgcctcaattcaggtgaatcttgaggtgttccaagttgattcagggtcctctgtatttccgcagctattatgatagaaagtaaatgtatagtaattattacaaatgttaggccattagaaattaacacaaacaatgggacagttagaaaaagacaggaaaaacaaagggataaatatagaaaatattagttgagaaaaaaaatcaatgacttattcaaacataattagtgacaatgtattgtgtgggtaccttaacgtgtgaaactgtaactatgatccaaaaatgttatcttcttccctattccatcagcacatttggtacaatggcacatggactgtcatgtaaattctactggcacaaaaattgtgaggaaaatatgattcactgggatataaagtgaatgaattatggttaataaacgacggaggaataacaaaattagaataaccatttttcaactgtctacgtaataagtaattcaagcaagaatcaaaggatgctaaaaccatgagaatactcacatgacctcaaattatcatcacatacgtgtcattaacttgggctaactttatagaggattaatctgttgcttgaaacaaatgaccaaatttaggatcaccagtcgtacaaactagcattatgagcctcctgacacgatgcaaccagaaagtcacaaaatgacctatgtatttttcttgccaaaatatttaactggaatctatgtgcaactgagcacacatcacacacaatcatgagaaagaaatcagaccaatctagattatgtgataatcttcacaacaactgatctgtacttcttaaaatatcaatgtcacaaaagaaaaaaaaaatatgtaaaagcaggaaagctttctaaattaaaaacacaaaatactttctaaattaaaaacataaaatactaaaacacccagtatacaatttttgactgtcttctgattcaggaaaaaagaaaaaaacctacaaaaactatttttaaaaagttatagagacaactagagaaacttgaatctggagagagaaagactaaacaaaaattgaaaaatgtcagcaactggtgaacccaggtaaagtgtatataaaaagatcactgtactatatacttctactcttctgtaggttttaaatatttcatgctaagttcaccattcagaagtctaccactgtaataatagtaattttttaaaaaaggctctttacaaaggggaaggttctcgttttatgtatttatgtacacaaataaaatggcaagcagagataagttgaaaatccatctcaaagtaaagcactttcacatttccaagaactagagaaaaatgatccaacccatccattctttttcatttaaaagaagtcgtttatttatatagcttaaatgcttttaaaaaagtcatttgtttatttatgggatcaagggaatgattgtattccaaaacacaggattacttttgttcactcaggatgatgtaatgaatattgctttcaagtcaaagatggaaaatataaatactggagaggaaatatatagcaactgttaaccactcagctagttacaaagga

SEQ ID NO: 35934 - DNA, 1716 bp, Bovine  19866880428729
  misc_feature (1)..(1): n is a, c, g, or t
ntgaaaaagagggagagagaacttgtttttatataattcacgtgtattggcaggaattcaagaagcaccaaaaaagatggggaaagacctctttttctttattgccagaggaaaaatatcatccatgttacctttaagcctgtatgaacatgacaatgttaaactccccctgccctttttctaacatgcattccattaggccatcttaaaatttattctaactacagcactatactttgaggcattattgtgtatttgtaattaaagggtttactgctttggcaattatagggagaatctgagcaaaaaactatattctacagaagacacaaattatagtagtgaccacttgtacattgatttaatctagacctcaagaagagcaacagactttaaaatatcaaactttttttgcatagtaaggaagatcaaatatgcactgtatacaataaaatctgagaagatgttagtataatgttggcaaactatagctatgatagtgacaggatatagctactatttgtaagaataggttctatattcttttaattcgtttatttttattgggttctatgcagcttgtcatcagcagaatatcagtaaatggtaagaaaatgacatcttgccatataattaagtgtcattctaaattctactcattgctagatggaattctttcacactggaaagcatttaatagcatctccttgatctgtgtgtaagaaaatatggcattgagtagcttatccaagaaaacatacataacaagtatctgagccagacctaaaccaggacttctgatttcaaatcctgagtgctttcccactgcagctgctgctgctaagtcacttcagtcgtgtcagactctgtgcgaccccattgatggaagcccaccaggcttccccgtcccctggggattctccaggtaagaacactggagtgggttgccatttccttctccaatgcatgaaagtgaaaagtgaaagtgaagttgttcagttgtgtccaactcttagcaaccccatggactgcagcccaccaggctcctccgtccatgggattttccaggcaagagcaggctcatgtaaaacttcaagatacacatttcaaacaggatatgcaatttggaaaatttactttaaattataaccttatgctctgattactttccatcagtatttatctttgtatgtttctctgtcctgagcgttgcctcttttggatcactgttatctgatttttctaagcattcctgtgtctttcactctatctctataaagcctttccacttttagaccttatctctacttttattttattctaagattttttttttcttttttgcttttcggaaaattttaagtaacctggctttattatcaagaacttggatgcttcttacatattccagatacttagaattatctttgaacttgatttcctctttataatttttatcaagttacctaagccctttaatccttgtgaatatctgttctgaaattttctttgtaggctgtgagaatcctgtaggcaaaaaaaaaggtgggggtggggatgagtgtggttaggataaagaacaagactctggcatgtaatcaataggattcagtggataagcagaatttccgattgttatatcagttttaaaccaagttatgtgttgcccagttcggaagtttcattcttccaacatgtttaactcttctctagcac

SEQ ID NO: 35935 - DNA, 937 bp, Bovine  19866880491484
  misc_feature (1)..(1): n is a, c, g, or t
nattttctttttgttttttaattttattttatttaactttacaatattgtattggttttgccatatatcaaaatgaatctgccacaggtatacatgtgttccccatcacaggtatagtagagcaaaaccttcctaagaaatcatcatgattacacaaccctataaacaaatattttctcaattccttaggggattaatccctttattttttatttgaaatttgtgaaattttcatttaaactgcatcccaggatgctgttttattcattatacttttgagaacctattatgtgcctgtacttctaaatgttggagatactgctgaacaaaacttatttaaaaatttctatcccttcatggagcttgcattttagtgattagatcaggaagcattagaagaagaatcaaattataggtagtcaaaaaccagacaagtttttgaggtggataaaggacacatttttctttagtataaaaccatttgtgaaatattgtcactttcttattttgagttccatcaaaaggaagaacaaaataaggacctccactctcctgaataaattgtgctgaaatgttttgctccatgtggtaagaattatcagaacatgaagagcaactaaaacaaagcaaaaattttggggaagagtatttacataagagagaactgcatcaagagactcttagtggagccaagacacaaagtaaaccaccataaagaaacaatgcatctaaagaaacaaacgggagatgtgccattctgagcaagattagaggagagtgagaatgaaatgccagtgcatgtctttatgtgattaccccaaagtagagctgtctaaacttatcaaataaaccttactaggaagcaaattcaatcaaccgaatgaatgtttaggtatgacatttttaatcattaactgggtaaatatttttatctcct

SEQ ID NO: 35936 - DNA, 2147 bp, Bovine  19866880551959
  misc_feature (1)..(1): n is a, c, g, or t
nttctagcagttgctgagagaagatgataatctctcctattgtaaccgtggaattgtctatttcattctgtaattctgttcacttttgcttcctatatttggaggtctatttattaggtagacacacaattgtggttttgtctttctgttgaattggccctattgtcattatgaaatgtgtttgtcttttgtgacaacctttgatttgaattctcttttggctgtttaaaaaaatagccatattatatgtcagttatatcacagtatacgtaggtaaaggcaatggaatgaagtataagatcgcagcactggccttctcaagcttatcgtctacgtggcatttgttttttttttcattcatttcatttcagttcagttcagttcagttgctcagtcctgtgtgactctttgcgaccccatgaacagcagcacaccaggcctccctgtccatcagcaactgctggagtctacccaaacccatatccattgagtcggtgatgccatccaaccatctcatcctctgtcatccccttctcctcctgccctcaatctttcccagcatcagggtcttttcaaatgagtcagctctttgcctcaggtggccaaagtattggagtttcagcttcaacatcagtccttccaatgtacacccaggacttatcacctttaggatgggctggttgaacctccttgcagtccaagggactctcaagagtcttctccaacaccacagttcaaaagcatcaattcttcagcactcagccttcttcacagtccaactctcacatccatacatgaccaccggaaaaaccatagccttgactagatggacctttgttggcaaagtaattttattcctccaattccagttttggataaatttagattcttatgtggtcttgatctaaactatcagcccagagggagtgagaagagatgaaaaggaaagtagattcctggaattctaagacttcttgctatttcctagcattttcccaatataataacagcttattcactgataaccagaatttactttgttcttctgaactctctctcctcctctttttatctttgtaatatgcaagtatataacataatgttatatattacacataatatacattaaacatatactgcaaaatatattgcaagttccccacaatttagctgagtattacagaatcatatatgtcaaactaatgattcagctttacatttccaacacagtgactaacatgaagtagatgttaaaaaaacttataggaactgaacttactgaactgaacttggaaataaaacctcttttcaaaataatcatttttcagcaagaagtaacaggtaaatgcattaaaagtgagaagaatcaaactgttgataatttccttttttccccccacaggtttctgggatatatatatatggaagtaagagaaggaactctaacctgatcatggatttcgaagagagactcctcaaaccactaaggaaaagataacaaccagtgcattgtcctaagaaatgatgtccctttgccacaataaaattaatatttcctgtgtgaaaagcagctggtcaaatgacatccgggcttccctgtacagtttaatggtgctcataattctgaccacagtggttggcaatctgctagttattatttccatatcacacttcaagcaactgcataccctaaataattggctcattcagtccatggctactgtggactttcttctggggtgcctggtcatgccttatagcatggtgagatccattgagcaccactggtcttttggagaagtcttctgtaaaattcacaccagcactgacattatgctgagttcagcatccatttttcacttgtccttcatttccattgaccgctactatgctgtgtgtgacccactgagatacaaaaccaagatcaacatcttggttatttctctgatgatcttcattagttggagtattcctgctctttttgcatttgggatgatctttctggagctaaacttcaaaggagctgaagagatgtattataaacacagtcactgcatagggagttgctctgtcttcttcagcaaaacatctggggttctggcctttatgacttctttctatatacctggctctattatgctgtgcat

SEQ ID NO: 35937 - DNA, 1677 bp, Bovine  19866880567240
  misc_feature (1)..(1): n is a, c, g, or t
nattgaaatttgaattagcatgattttgttatgtgataattgagaaactcaagaattgatttgtataaacgttgaacccaggggaagagacgtatggatttagaaactgttgcgtgtatatgttgaagtatagtttgtatctatatgttttccaatcagacggttcattctgaaccacagtcaactcaccacttgtcactcactcattaattactactcacggtagtagttttattttaaaaatacaaaaatggaataaagcatatgcttggtagttttccaagaagaaactttttctgacaaaattaatatatatatatatatttccccccaccctttggcctacaagattcactgaccattatggcatcaaagtataatcatcattgcctaaggctccagcactgaataagtagagagtaagctggttttgaaccagactgaacagttagcaagatttgtttacttctacttcttagaacaagatcaaatgaacaaattccaagcaaatggtataatagaaggagacaagggaaaatgagtaacaatataccctcgctgaccttttcccctatattaagatgtgatgttcaagatttcacagtttgtctcatgctcctgattcatacataggatacataagattttcccaaagaaagcagcagagtgtcacaatgttacaaatttatttttaagcccttaagtcttctataatgtgcttgattatcttcataataaagacagcaccacactaaagaacttctccaggctttaaataataataaaagatgttgagtgggttttgttcatgccctttctatgtgctacacaaatttaaatacgcagtttgtttaaaacaatgctaaaaggataaattaaataatctccaataagatggaaacaccttaaaggcagaaatttggaaagaaccaaagtctcaatctatgcacatttcccaatctccctctgccttgtttttcaaaatccagctctattttaggatttaagagtattatatctaaaatgttcctttttcccatgtttctttccatttttttttcaagcttcacactgttgagagtttggtctaaagtctggggtggtttatgggcaccatttgttttagtctgctaatctttcccaggctctccctacttttaagacacattctaatttggggtcacatggatcatttataaggaaatgcctttttgtaattcacttgcccctacatatatttttatctgtaatatttacacagctaatttgaccagaggataaactgctcttggaacatgagtaatttctgtacagagaacaaatatagttgcaatcaagatctgcatgattaggaacgggtgtgcagagtaatttggaattcagggcagttaccagtgcagcacacgagtagatttttagatgtggtggtgaactgttgaaaagaaattggctgagatttgagcgtcatttgaagtggaaaaagaaaaacagcttgttttggagcttcatgcccttttcttcctttggtatctgaaaaaaaaaatttttttttctggtttggagaaaactgaggcaccaaagactctaatcattaataaaaaatggttcttctctgtgcaaagattatctgtccaatatacctcagaaaaaccagatctacgaaattatagatggatt

SEQ ID NO: 35938 - DNA, 1978 bp, Bovine  19866880640615
  misc_feature (1)..(1): n is a, c, g, or t
ncaccctgtgcgaggactggacgtgacgtcgggaaggctgtggtcaggtgcgcactccagcagtctcactgtaggcatgcatggaaagtgttatcccatctcaggttggtagggccacagcacgttccagtagagactcagcgggccaagcccctcacctaccccaattcatgcacggtgtgggtcctgatgtggaggctgcagtcccagggggttgtctgtctgtctttggttgaggcggcaggcccaggagaagggtagatgcctggctcagcttcctcaccccaaacagagcctggactattgtttcagtggttggtggaagggggagcctggcagtgggggggccactgagttgcagaacagggtctccaggcacctataaggacctgcacttgacctgctaatatctccacgtccaagagagcgaggcattccacagcaaaaatcaaataatcttggcaagtcgagagaaactgcagagaaggggaaaaaacttgtgaatgtgagggcactatttttcatatttttgaacaaagatctccagattgttgttttgtcccagatcctgcaaattgtgtagccagtcttataaatagggaataggtaacattattgccaaatacaaaatgaggctattttggaacagttgaattaaaatcgatttctttggatgttaaaatcgtgttctgataaagtaaaagggcacagagaaatatgttttgcagaaaaactttttaattataatcaacaaaagtaagtttcttttcatcagtcacaccttacactacagggattgcttgtgaggaatttataatgggcaaagtttattggctggctttctaaagcaccctagatgttaacgtttcagacaacatgaaggctgaggtccattgagaggtgactttttaaatgtgcaattgttgcatgtgattatcctttgcaaggaagaagttcacaggtgtaaagggccaggtatttaaattaaatttcttcaattaatcagataatgtgatttctgaataaccatagtagatttgcttaaagttcactacctatgagatttagatacagagaaataattatataaacacagaaggactaaatttcagaattttaaaaattcttttaatttctttacctaacaaaatggaaaatagatataatatgaggaagttttaaaagcattattcaagtatgcagttttatttatttaattttcagaattgaaccattttttccgaagggcagaaaaaaagcaagcatccaactgcagaaccatgaccagcaatctttcccaacctgataccgtgcagttctgctatgagaatgtgaacagatcttgtattaaatcttcctactcacctgcatctcgggtgattctgtacacagtgtttggctttgggtctttattggctatctttggaaacttcttggtgatgatgtcagttcttcacttcaagcagctgcattcgccagccaatttcttgatcgcctctctggcctgtgcagactttctggtgggagtgaccgtgatgcccttcagcatggtcaggtccgtggagagctgctggtactttggagccagattttgtgcccttcacagttcctgtgatgtggcattttgttactcttctctcttccacttgtgcttcatctccatcgacaggtacgttgctgttactgaccccctggtctatcccaccaagttcacggtgtctgtgtcaggagtatgcatctgcatctcctggatcctgcccattgtgtacagcggagctgtgttctacacaggtgtcagtgacgatgggatggaggaattagtaagtgctctcaactgtgtaggcggttgtcaaattgttataaatcaaggatgggttttgataagcgttctcatattttttataccttccctcattatggtaattctttatggtaagatttttattgtagctaaacaacaagctctaaaaattgaaaa

SEQ ID NO: 35939 - DNA, 1098 bp, Bovine  19866880659246
  misc_feature (1)..(1): n is a, c, g, or t
nactcatgtatctaaactagatgtttgacacctccatttagatgtttaaaagacacctcaaaatttacttggccaaaacaaaattctcccacatctcctgaaccgttgttcttcccatcttagtacatattcaccaccatccacttggctgctcaatgcaaaaaccatggcatcacccagatctccttctctccctctcgcccccaccccaccccaagcattacaagtcctgctggctgtgcctccacagtacatccaagcacttctcgccacctccccagataccactctggggcaaggcaacacctctctcttcaaaacccttccatagccagggtgtcctctttctatttcctcaaagtctatttactaagcagcagccaaagtaatctttccaacgtgcagatctgattgtgtctcttccctgcctcttggactgaaatctaagctccacaaggcctcacatggcctccacagctctaggtgacctgactggcctcctctcccagttctgtctcttgccactcttgcctcaagtgctgtgcatcagccacactggatttttctttttttcctgttttctgaacaccctaagctctggactgctttttaaaactaccagctgttagtagttttccagctgttagcaggcttccaactaattgctcttccccagtatcttctcactatcagcccctcctcttctgcattcagaggattctctaagctaaggcagcttctccctaatcacctgctctcacatcactctcattattttttttccttcatgggaaattaagttgctcattaattaaaaaaaaaaaaaaaaaaaaaaccactggtttctcctcacactggaaactacagaacaggaccgtttggatcttgtttactgctggatacccagggtcttaaacagtgatgagcaagcagttggagctcaataaattatttgctgaatgaataaagacttaatatcaaaactttaaagtcactcagtctgaaccattattcaggtatctaaaactctgagtaacagacctgagaaatgtcttaccacaatagtgctgctcagaactgcactgcttctgaggtaga

SEQ ID NO: 35940 - DNA, 1009 bp, Bovine  19866880715682
  misc_feature (1)..(1): n is a, c, g, or t
ntgaaagggtgtgatccacatttccttatgtgcaattgcttggagcctttaaaataatgaagcaggcagttcataggttatggttcattctgtcttttgaagaacggttctaaaaactaacaaagccacacaggaaaaaaaaaaaaaaaaacacttatgaaaccaaaatacgacctgtacacacttaaattgtctatttacttttctcataatctttaaaagatttaaaagaatgtttacatcctagcttctgggcatacatattttttcaggagtcttcaagcagaaggaaatattttgaagaactgtgcatataatttgatatgggatgcatttaacagctggaaggatttcacacttagaacccaatttataaaagtttgtagttggcattatttcagctctagtcctggaagtcataatttcccaaagatattttttctcaatttgaaaattatttacataaggaacatatatcatttcaaaaatgaagttatcatagctgactttggccaggcataaatgaataacttcaagaagagacatctgagaatattattcacttccactgaaatcctacagtcaatttcagttcttaatgttcaaaattctttctttgcaagtaaacaatctattctttcacatcccctagcagaatgaagccaaccattttgttaaaaaatcaaatacagaatttcaatatgataaatagcagtaataaagaatagaaatgagcccaattttgttccaagtgtgtgtgtgttctgggggtggtgtgggggatggttagaataataatgagattaagatgaagagattcagaggacctggaagtgggtttgttttcacttgtaagaataaggaaggaaaagaatggtagggaaactatagtcaatatcttgtaataacctgtaaggaaaagaatttttaaaagaatatatgcattctgaatcactttcctttcaaaggaaatgtgttaatgtaaattaacacatgtaaataactatgc

SEQ ID NO: 35941 - DNA, 2692 bp, Bovine  19866880737397
  misc_feature (1)..(1): n is a, c, g, or t
nctcttagtccctatagagaacagaacaatctgatgtcacatggttcaagtccatggtgagcatcacaaaagtagcaacatgagtaaggatacattttggagaagtttatagactgatgttgctttttcttcactaccaaactccagccagtcaaatattcatggagaggtgatgataataaatcattttttcattttcttggcatctacaccctccaaccttaataccgccttcactgttaaatttatttagcatgtcctgtgatacttacatgatacttatgtgcaaaataggattaacaaacagactatcacaagttcacctgtgtcacaagagctctaaaggagaagccatctatggagggtaaataagaggcacttacatggtcagaggaacttaaacagaagggaaaaaaaaccagatgctgcagaacctgggggcaggtttttatatcagttctacaagggtagagagaaattcaggagaaaatctcatattcacctgtgatggggaaagcaggaggctgggcactcaggggatcataggattagtttttcaaccgtgtgtgtattggccttgtgtttgtatttgcaagtatgcacagagctcatagactgaacataaagaacaaattgttctttattatgggactttcctggggtccagcggttaggattctgtgcttccattgcagggggcatgggttcagttcctggtcagggaactaagatcctgcatgccacaaataaaacaatttttagaaattataaaagaacaaagtgttttttattataattttaacttagtgcagcacctaacaaagggctttgcatgttaaaaatacaagcactggttgaatgagtaaataaaaatctgaaaaatgagcactaactatagtatattaatgttgggttggccaaaatattcatatgggttttcctgttacttcaaatggaaaatcctgaaagaactttcagaccaacccagtaagttaacacttggtctcagtgtaatgttttgcttatttaatgctgtcttgattagaatttgttaattgaaaacagccagttattaaatctacccaatagatacattgagatacatatctgtttactttgctaaaagttaattgctgtgattttatacaccttttgaatctaccgctaaaggagttacagaaaaatctatattaatctgtcaatcattaatatacagccattgtgacttacgtgtataaatttataaactagatgctcatgttgtcaagttactgcttatttataatttgcatcctgtatttccttggccacttctaacctgatcaaaagtacagaccagtgaaaatcctgtgcctctactgggtgaacaaataaaagatgtgtctgcaaatggaggatcagtagcatcattttatgcatttatgaatcataaatgaaagagttcagctttaaatcaaattactagaattttatcaatgcctctatagttacttcaaaagctgattttgtgccattgaatgtcactaggtaagaggaaaatgaaaaaatgcagttcatatgttagattcatatatacattgaggtgcagtgttaggcttcagatgaaacacggggctcctatagaattttttacacactgtaaaataagcgtctgcaatccgatacttcacacatttctattaacctttgacattgaatttgttctattctgattgttttttcattgatacaagtgtttggtgaggaattaaggagctttccttcacaaatgttttgtttgatttatagcatttttcgctgtgatattcctggttagaatactttactgttgaaatctttaaaaaaattagttaaattcccaaaggataatgtgcatcagttctatgttaagctctttgttcagacttattatttctgcctccaaaatgtgttttcactaacattatagcatgataaatgaaaaaagtgtgtgcacagcttaaaacatttggaaaagcttctataagttgcttttatactgggaagtttactttttccgtagagatatttcttttttaaaaacgtatttattcattatttttggcagtgttgagtcttcattgctgtacagtcttttatctagttgtggtgagcagggactactcgccagttttggtgtgcaagcttctcatcatggaggcttctcttgttgccgagtaccgactctagggaacacaggcttcagtagttgcagcgtgtgggctcggcagttttggttcccgggttccagagcacaggctcagtagttgtgactcacaactactagttgctcccagcctgtggggttttcctgggtgggggattgaattcatgtctcctgcattggcaggtggattcttattcactgagctaccagggaaactcccataaagatatttctattccatactctactgtcccacatgtttctgaaacatgagcatgaactctgtaggaattttatttttggactcaaaaactagagttgtatggtagacagtttttgtttaatagaattctccaaccttccccttcttccttacatagacattagttttatttcatttttctgaatatttatgttctcttccttaacttacagtacaaaaaccttccagttaacaaagagctaagtatcatattcatccttcattttccatactatttcattctc

SEQ ID NO: 35942 - DNA, 1547 bp, Bovine  19866880744550
  misc_feature (1)..(1): n is a, c, g, or t
ncctgtgccctagggccctaagtcccttccctttaactgtgatgtttcattcagtcttgaagaaattcctgtatcaatatataaaaggaagtcataagtacacccaagtaaagaacattaattttaattatttgattctctgtaaacaagagcaaacaccatgtgataaaatgtttattatttgagggggtaaagttaggcacactgataaactatatggtagctatttcttaaggcatagttatcatcaattctgaattaagaattggcaaatcttaattcagaattaagattaaattctgaattaaactgactcttaattcttaattaatctagaaaagtaagtgattccttttatatgaaataattacctgaaaagtatttgtctaaggtagtgtgaattctgtatgtttctttgatggctgaaaatgcaagaagaaagattagaaaaagcaacagattgaatcccactgaatgagtcagaagagtgagcaatgtgtaaaaataaaaaggacaagagtgtgacttccctgaaggttcagtggttaagactccatgcttccaatgcagggggcgtaggttcaatccctggtcagagaactaagatcctacatgtcacatggtgcagccaaaaaaaaaaaaaaaaagggacaaggctgacgaggggaataccaaagtcctgccaacatcattccatggcctcagtccacatgatcaccacctctggttagtcaccaattttaaggtaactctccatccatgatagccattgctctgacttggctagttggtggtatgtcacaatagagcttctaaaccaggacagcagaagcttgggatgtcccaacaggtgatccaagatagctctgcccaattaacataaatcttaatgagagagaagatgagttggtgcagacatgactgtagcagtagatcttatctaaacatccagtctgaaaaggaaagttaagattaaaataaaattcaagatatatataagatgtgatgtccaatttgtgaggagtcctctatgaagttttggttagaagaaagatttccattgatagaaaaaaatgttaggttgaggagcaccagaactctaaagtcagaaagcttaacaaaattgtgatttttatagaaggaacattttattataaaatcaagaaattccatttgagtcagttctagtgaggtagatgaaccttgagcctgatatacagagtgaaataagtcagaaagagaaaaacaaacgtcatatttcaatgcataggtatggaatctagaaaaatggtactgaggaacctatttgcagggcaggaatagaggtgcagacagagaacagatttggacacagttggcgaaggagaagataggacaaatcaggagagtagcaatgagacatatacattactatatgtaaattactgatagatagctaacgggaaggtgctgtgtagaatagggagctcaacgtggtactctgtgacaatctagaggggtggggttgggtggaggtggggagaggttcaagagggagggtgcatatg

SEQ ID NO: 35943 - DNA, 1261 bp, Bovine  19866880746951
  misc_feature (1)..(1): n is a, c, g, or t
nacttgcttatggtggatgaaatacttgcaaacatggtccaagcagagacttgaaaataacttgcctattgtgtctttctctattcatgctcttggactttttcatttaacatgtggacaagcccaggctttctggaagataagggaccacagaatgtgcctccagtcatttcaagacatggccatcacaaaccaaccaactccagccaactcacttgctagcagcagatgcatgaatgagcccagccaagatcaactgagccccttctagtccagtagaacagcttagttacacccagttcacagcaccaaccacactatcagggctaaagaaatggttattgcgtaaagccatgaaattttgaggaagtttgttacacagcaaaggttaacagaaactgttttcttagcctgttttgtttgacttcaaaaaacagataaaatgaagaaactcttaaaattctcctacctcaaatttttcaggtgccagcttgattttagtaagtagcacttcaggaaaaacatactctgttccaaatgtgccacttagagagaacatttcaaatctcgtcaaagcagtttctactggctgtccacaagttgtcacatcagtagatctgcatttcagcattgtgcatacctgtgtagaagagatgcagataaaatccaacaccttgaatctaagttacttgtactagaactgttgactcagtttacagcaaagaaaatattttctccatttgctaaagggatttggatcatacaattacttgatttattggaaatggcaaatgattaagagccaacccacacatcctgggcaaccagtggattgaaagaaagaagccagttttcataataggaaagaacaaatccgactccatattggatctggttcttttactttaacctttgtattctattgtttttgctataagtccatcactaaatggagattggtgcactcagttattcagtcatgtccaactctttgcaactccttggactgtagcctgccaggcttctctgtccatggaatttccaggcaatattactggagtgggttgtcaattcctcctccaggggatcttcctaagtctcagatatctcctgcattgccaggtggatactttaccactgtgtcacctggaagcttaaatgggagggtgtctataagcttaaattatacataatgaactgtctctgagaatagtgcctttcatgtaataagctaaaataccctttgtttagctcataggga

SEQ ID NO: 35944 - DNA, 930 bp, Bovine  19866880773240
  misc_feature (1)..(1): n is a, c, g, or t
natgcctttttccttattattactcatctcttgaagcatccagcccctacttcctttctttatgacagtcagcctacagtactttttgttccaacaggtgtataatgatgtatctgattacttatcacaaggcattttgtgttccaagacacaaacagaatgccagtgtaaggagtctagtcctacttcaacatggactgtttttaaattccttaactgagaaatttttttggtagatgtgttttagtttattggtgatcttgtgcaccaggcatattctgtctatggtgactgcaaaatcagcttacagtactgactgacactccttgtttaagcttgaataagaactatcagctttccacctacttgactaagcaataaaattatacttacatttcattgtgtgtaagtgaaaaccaattacttcatgacattattcttataattcagaaaaagaagccctctccatcagaatttcagtgtaatagcagtagaaacattttcttacgacaatgcagtttccgtatcctatgtacaaaatttcagtaaaagaaatatctatagaaatatgaaatcaaaacttagaatagcacatgaatgggacgatccaaacacctgtcttcagagatgagatacaatgcctgattagagactttatgttaatgattcgacaatatccactgtgtgtttcgttaaaacgctgcactgatctcttcccaattcccatcatgtatacaaaatgacatttgtgatttttttaagcagtagagcaatatattctattcactaatactgtaacaaaaatgaagaatatattacttttaaaattataaacatccataaataacattgactcaattttacagtgccaaataggctactttggagagcactcacttagccatctacattaacactaaaatcaccatt

SEQ ID NO: 35945 - DNA, 1665 bp, Bovine  19866880777483
  misc_feature (1)..(1): n is a, c, g, or t
nctccactcccccaccaacttcctgatcctctccatggccaccactgacttcttgctgagctgtgtggtcatgcccttcagtatgatccggtccattgagtcctgctggtactttggcgatctcttttgcaaagtccacagctgctgtgacatcatgctctgtaccacttccattttccacctctgcttcatctcagtggaccgctactatgctgtttgtgaccctttgcattatgtcaccaaaattaccatctctctcataggagtctttctactcatcagttggtctattcccatcttttttgcttttggcctggtattctcagaattaaacataattggcgcagaagactttgttgcagccactgactgtacaggtttatgtgtgctgatatttaacaagctctggggggtgctggcctcctttatagccttctttctccctgggacggtaatggtgggaatttacatacatattttcacagtagccaggaagcatgctaggcaaattggcacaggttctatgatgaaacacattgggtcggaaagcaaaatgaaggcatcaaccaaaacagaaagcaaggccaccaagactttgagcattgtcatgggagtatttgtgttgtgttggctgcccttttttgtcttgacaatcacagaccctttcattaattttacaacgcctgaagatttgtacaacgtctttctctggttgggctattttaattccgctttcaatcccattatatatggtatgttttatccttggtttcgcaaggcgttgaggacaattgtctcaggaatgatcttccaccctgactcttccaacctaagcatatttcctgcatgtgcttaggtaatgctctccattttctacaattctttcctactaaggaaactggatgttctttctccctagaggtaagggagtggattgactagacaaggatattcttccatttggtgtaatagacacccatgtattagtcactcagttgtgtcagactctttgtgacaccatagattatagcctgccaggctcctctgtccatggaattctccaggcaaggttactggagtgggttgccattcccttctctaggagatcttcctgacccaggaatcaaacactgcattgcaagtggattctttaccatctgagccaccagctgatgtaatagacacttaggtagaagcaaagatctagccttctggttataccagagttcccaaagtggtcaatttctggggttctgggagacacctccagtaaaaagacactctctcccaagacttgttgactcccgaatttacaaaattagagatttagattttcactcctttggcatgtcagatggggatcttctttttatcctgtaaacatcaaaagaggagacagttggacttcacacttttaatagccatgtagagtttatctaagtctttcttgagattattacattttgggagagtggggagagcttgagaacactgtgaggctgaagtacagagcatgtgaggacatggaaaaggagaaggaagcagctgcagttgcttccagttttactgattctgatttaatctcttaaaaaagatttcaagtggcttttgcaatagtttgataaaactggactgtctcattaaatgagcagaatggataaagaa

SEQ ID NO: 35946 - DNA, 1468 bp, Bovine  19866880859638
  misc_feature (1)..(1): n is a, c, g, or t
ncattggagaaccattgctttaggagacagttaaaataagttaatgaagacattgagaccctgagctagataaacaacaggcaactttctagagcaacacttaaactacgatggcctcccttctagaaaaatgcttagatttgggccacccaggttatgatgttttcccagactttgaaatctttttcacacagtctaacgagaaacttggaggcatgacttgccaatatttgatcaaaaataaatgtgctgttttcagataggtccttcagggttggctgatattagtccactatgtaacagttatgggagagagcaagaaatcttgacttacgcacagcgctgccgccaacgtaagcagtgccgaaaaccaaggaaatttaaagcacacggcttattgtcaggtttaacttgttttacaaacccaaacagtcatccaacttcaaaaaacccatttctgttttgataactaatgtttaaccataaaaacaaaagaaatgcatttttgcatataaatatatggtaattaaaatttttgccaaagaatttccaatgcctgatatgggaaatctttagaggaagtgatgaaagtgacagagaatcatcacagagaaatgttaacaaagcagtatcagtaaggaactaagacaccatctaatttctagactagagatatacatatatggacatgaaatacaaggtgatattgtcagcatactgtctctttctacagaccttctatactgctctccttacttaaactgtataaatctttggttgaatacagacttggagcatgaagaagatggattcagatcttaaacctgccacttgctaaatggcatgctccctcacaggaatgttttgaagacggtgtctggcattcttggaactcctgccactccatcatttggctctgactttatcctatcagggtgctatcaagttaaatattagaattgtttatctctggccattaggctgcaagctctgtgtgagcaagaagcctgtccatcatgtgccacatcatatcctcaaccctgcatgatccctggctcttaatagccacttatttgttgaatgaattaataagatgaatgagtgacatattagcattgcttctcagccttttcgttcctttcaaagcccacttgaaaccatctttacatgaattttttctatactgacatgaccactgtattttttattattgttcaaaactacttggggttcattattgaggtattggtttggacacttggacctatccatgtgagccattctacttgagtaggaaaatcaagttgttgactttgaaaatcaggagcagagcatttaaaataacatgcaaaaaaaaaaaaatcatttcactaccaggttaggaaaagaaattgaaaaaagatagcattttgctctgggacattttcaaagttttttctttttgagcttaatgtcaatctccagtatt

SEQ ID NO: 35947 - DNA, 867 bp, Bovine  19866880970633
  misc_feature (1)..(1): n is a, c, g, or t
naaatgtatttttagacatggcatcagtcatttagagcttgcaacagagattgaaaacatgaaattggacaccttatttcccgtggctatgtaaaatttatttacaccccaaatcataatataaataaaaaggaaactttcagaaatggaggtcttattcttctttttgtttaactcaaagaggtttttgaaagaaaaaacaaattatagcaaaatgatgaactactgatcctccagtcttccctcacaaaagaaactttgacaaaagataatatttttcaactgacttctacaaatcctccagaacgcagtatctgtatttcttaataggaataatgattgcttttatacaaaattctttttatacgaatctcagggtttttttttttaatttttaagcttgaacataatacttattctctaaatatgtgcatatataaatttttattgtgttaaagagaaattaaatctctaatatcctgtataatacttattcataaaaaagaataatcaagtaaatcttttaatttcagttataattgtgaaacaattgctaattatggtgatcttaggttgacatgtactattttcagataactggcaaaggaaaactatctcttgaaaacctattattttagacctttacctattattaaaggcaaggatacatccctaataatcaggggggaaaaggaacagttttcagataatctaattacattactttcaaagctgtaactgtcaaaggttttaaccctcacctacagccatttctggaaaaaaaaaaaaaagttatttgactctgaatggctcacaacttttaatgaggcggaacaaactatttttatggtttataataacaataaa

SEQ ID NO: 35948 - DNA, 1349 bp, Bovine  19866880990088
  misc_feature (1)..(1): n is a, c, g, or t
ngtggaattccatgggtttgtttccatctgattagaaagcaaatcacccccacaatcattagcacagaaaactgaataaattcaaattgtctttaatgtcaaatggaattcagtcataaatctctcagttcccctcattcccatcagtacttctctcttccaaggccatcattacatttaaaatgtctctgaatctcttctgctcctgctaacagacacacaagtagacacatattatatggcaaacaaggctggagccagaatttgatccacatccatctggcccaaacatcaatcataccattataccatactgtgacatttcagcatagccaaataaaaaaggcaaaattactgtagcccttaaaaataatccttgatgaagaaaaaatatttggaaatcattggtctatactagtgagctagtcattcaatatttcttagtaaatctgagatgaatcaatgaatatgataaagcaatgttctacagcatcacagcatcccgcaaggttatgatcattaataatgtgggaatcatcaggtacgctgttgctgagttgctggtcccgcctgagatggaatgtgcgtccttggcgtaccatctcccaaagagcgacactgttaggacaggctcagataatccattcttgtttaccaaacgcccatcttctagtacctaaagaaaaagtgggaagagtatagccaacttaattaaaatatacattacaagcagactcatgattctgaaaccatcctagatatcacagttgatcaagtaggttactaggaaaagggcctggggccagggcttggggagcaggtgggaagggtaggggacagctattttatatgtaaggaagactagagcctttctataaggttcaataattgagtttacacaatcaaatgtaacacaacctttaacagagtcagaaatcatcagtagcaaaaatttatcaagtccaattatattcaggataaccaggagccagaagagtacagatagcactcttccctcaagaagcttaaaagttaatggtaaaactgagcagattccaaatataaagagagaaatcagtataatagtatcttggcaagagaagcaggtatgtgcttaggaagtctgagagggaatagctgaactggtcagcttcccaaattgggaaacaacttgctacaaggagggagcagttgggagtttctccctggggttatattatggaagactgtgccaagtggaaatcaagcagcaaaggctcattctaaaacaaatatgtttttccttctggcttacttcactctgtataataggccaatacagtatactaacgcatatatatagaatttag

SEQ ID NO: 35949 - DNA, 3195 bp, Bovine  19866881199483
  misc_feature (1)..(1): n is a, c, g, or t
ngtaccatatgaatgtgagagttggactataaagaaagctgagcaccgaagaattgatgcttttgaactgtggtgatggagaagactcttgcgagtcccttggactacaaggaggtccaaccagtccatcctaaaggagatcagtcctgggtgttcattggaaggactgatgttgaagctgcaactccaatactttggccacctgatgagaagatctgactgatttgaaaagaccctgatgctgggaaagattgaggggaggaggaaaaggggacgacagagtgcgagatggttggatggcatcactgactcaatggacatgggtttgggtggactccgagcattggtgatggacagggaggcctggcgtgctgcggttcatggaatcacaaagagttggatacgactgagtgactgaactgaatcgaataaatgcagagctctgtcttcggtctactgggaacagaaaaggtattttcttttctgtttaaaaggtatttaaaaggtatttaaagtgtatttcctaagacaaagcattcaatctgaaaatataataaaaactgtcagttatggaagacaacttttactaacttttaaaaagtgcacatgaaatattcagcaaatatttgttgggtcctacaactacacaaaggcttccctggtggcttagtgccaaagattctgcctgcagtgtgggagccggagaagacatgggtttgatccctgggttgggaagatcccctggaggagggcatggtaacccactccagtattcttgcctggagaacctcaaggacagaggagttggcagactatagtccatagggtcgcacagagctgaacacgactgaagtgacttaagatgcacgcagaggcatgcaccactacagggaacaccatgctagatatgtgggcgtctggggaagagacattctatgcagagctgtccacgcacagggtgggagatacagggtaaagcagggctggtgcccttcaaaaccctcttcaaacttctaccatcttcatccaaacagcagcatttctttgcctagcttaccttcatagcttttaaattatctcctgcatttttactgatctttctgaaggcttgtctccacgaggacacaggaatgatccttataaaactgaagtcagagcatgtcacttctctgctcaaaactcaccaatggctactttctcacctaagtaccaaggtcattagcatggcccatgaacccttatgctatcagggccctccaatctgtctgcctttctgcctccatctcctacttttctcctacttcttcacatcatttcaaccacactaactttgttgctgtttctaatatgctagatatgcactctgaccatggaaccttggtatttagaattcccttggcctggaaggttcttttctcagaaacccatatgatttcctccctcacttcctttaagttttgcttagataccaccaagaagccctctggtgacataaaaatttaaacctcattctttccaccatattcatctttcctgttttattttttcctataatatttatttctaccccatattgtagataggttgacaagtgatagataattaaacaaatatctttttttttttatttcaattggctgtttccacacttgaatataagctccaaaggacaaagatttttaattctttttgttcactccactgtccagaactgtgcttggacataataggtattcaaaaactgtgttaaataaaagcaagaacagagatgtcattggttgatgggaaaaaagaaagactaccaaacttcttgaaatggaacaaatgcaacatcctggtgggaattctcagaaggccctaggaaatttggttctagggaaaagtcattcagaaagaaagaaaggcaattcctaatggaagtgagaacagaaggcttgtcatttagaactgaaccttgagcatgggacatggttaaataagaaataattatgatgcgatgcaatgcaattaaaatagtttgttaatattaaggtaaataatattgaactttgtcaaaaatcaaggtgtccctatatgcagacatagttgttagtttgtgtggttttgagagcttttccaaaaaaggaattcctacaattttagcaatagtgcatttggaaatgtgagtcaactgacatgattctcttaaatgtatagttcatatgttttcctttatattataagtaatagcgtacttttatcagacttcatatttcttattctagatttgatttaaaccacttatatgggacttccctggtggtccagtggttaagactccaggttcccaatgcaaggggcccaggttcaatccctggttagggaacttgatcctgcatgtagcaactaagctccagaacagccatataaatttaaaaaataaaataaccaccgacacaattctgctctatccacctcctaggtcctcatcttaagctttaagaatttcatatacattcatgttatccaactatcttattgatgagaaagggaaaattttaatattaagctgacatgtgactctgtttcactattttctcacactgttttaaaagtacagacctacacaggaaagcaattttctgctcactggtaaggagtcagaagagtagagtttggatatggttcttcctctagccaaacaccctgtgaccttaagtagattatactatcatctctccagattcattccctcagtggaaattcacattggaattagattctgatgtcatcttatagcactaacttcatattcactttcttaatacacatatttgtaggagatgaaaaattataaaactatcctgaaacttacagatgatagtgaagcttatacaatgatctacaaagttttctcagattaagttcatgttcatggttaaattctccataatacatttccttacctgtcaggattattacaagggatccagttcacttgagggtctgggatatcctccaagtatgggtagatagattccctggtgaagttaaaaccataaatgccatcttctggggtcacaatgatatgtgcaccctgttacaaatgaagcagaatcaatatattattcaaataagcaaacaataaaagaggaggcctgcaagaggacctgagggcgagaaaattgcttttttttttcatctattcttcgtttt

SEQ ID NO: 35950 - DNA, 3805 bp, Bovine  19866881222071
  misc_feature (1)..(1): n is a, c, g, or t
naaaattttcttgtttgggaaatactgttcagaataaaagttccaaatgcccacaaccaatgctcttaactcaacacgcatgttatctatggaggtacaaagccagttgagagctgaagccaagaatagaagtctgaacagacataaactcccactgggcagaacagttttctataatctttttaaataatcttcagaccagcttctatgaatcccttaggaacaggaccctaataaagtccatggcctatgaaagctatttataaaacttttctgagaaggttacacaaatatattgtctcaagcactgtgtaacgaaaagttataacctattccttagaggatatccaagtttttaacagatcttaaagctatctttacgtaggttagggatttgcaaagaaaaagtagtctgattatactttttatatgtattcaaatctgctgtgataattctttatcatcataataaccaccatcatttatcttctagacacttacatatattttctcagttaatcttcatacacacacatacacacaaaactatgaaacagtaatagtatttctattttagagaaaaagaatggggatttaaataaactaaatgacttctctagcatcttattatgataactaaccaggaaaaccaggattcacacctaagcctccaccccaattactgaccataaagccagtgtgggctgagcaatcattatatgtgtgtgtgtgtgtgtgtgtggcgcacgcgcgcgtgcacactgaaatacccttatcaagtagattggtatggacactataacaacctatactgaccaatctgatgcccagacatcagccttacaaaaaccaaaaacctgtcaaatcccatttttaaattcttcatctgtaaaaagggatgaaaattagtaccagtgtctttgtttacaattatttaatggggagacccagcatattgaaaaagaaatgtggaatgggttttaaaatcagatattccctccctactaagtataggctcagtggtaaagaatccgtctgccaatgcaggagacgaaggttcaatccctgtcagaaagatcccctgaaggaagaaatggcaacccgttccagtattctggactgagaaatctcaaggacagaggagtctggtgggttacagtccatggggttgcaaagagtcagacacaattgagtgcacacacactaagtatggaagccaggataaacctctgaccacattatgattaaatgtctatggttttcatgtattcaaattcacacttaagtcattatttctgataaagtaatcctgccaatgatattagctgccaagtggtaagctagatttcaagttcacctgctgaatccataaatgctatatttatgcatttgttaacccaagattttaatggaaaaaaatgaacatattaataaaatgttctatttagaatacacaagtcaaatttatgccattaaggaagggttgctttctcaaaatggggccggggtcggggaaaggcaagcactacccaaagcagattatatgcagacatgaggaaattaaaaatgaaaatgagcaacagaaatccatatttcagaggtaaggtttttgggaaatatctcctaaatgaaactttaaataatatagaatttttaaatgaaagttgaggctggaatgcaactcaccaatgtaaaataatcctttgaatcttttcttttctaaccagagtaaagacctaacataggtagcaagaaaatttctcaatttcggccctcattttctcctctttttcttaaaaccaatacatggtaattcgccatggttaaatttcctgaaagaagctaagaaagcatacaagttctttacacacatgcaaatttatgtatatagatagatagatatagagatatagatattgatatatgtgtatttcaccaaaatatatcccagttgcacactgaaggcttgtattccctggaagctgccccctcaaggaaagcaaactggatactaaatagaagttgaggtcttaagatcttgaggtccatagatttaccaatctaatcttttctctcctgtactaatattgcaacaaaacagatggtaatagttcagatgcatatatgtaattttttctgcctgagatctgggttccttattccttatcattaagatcactttagaaatttgagaagaaataaggaagatgagtctactgttcttagaaaatcacgactccataggaaaaataaaaatagagattagaaatcccccagctggggagtcaaggtcttagttaggcatgtacagctttctaaatcccataaaaatctcaacatctgacccatttcatttttacaagggaaggggcgattgctctggaaaatatgcgtaaaaatccgcagcattcagaggcattaaacagttttatttcacatttgtttcctgtgtatcctgcttgatagacacactgcagcacctgctgctgtaagtctgctcttcgtcagcttccagccttctcagttcagaaagcactggtttgagcagcttttcccacagctgaggtcatgctgccctcttctggtcactgcacagaatgtcctgaaatgaccctcgaaaggaatgcaaagtggagaactagagattgttgtctcgtttataaagtgtttttcagccagtaaattaaaaccaattttattcaagatggcaatgctataataattttaaatttggtatgttttagatagaagctattcctgagaagttttgaagtctttatctacacattaaattgatagctctgatgtttttgaatatggttttcatattacctaaattttaatgatctattttgtacaatgtgaacataaataaaacatttaaaaatattaaaaataacaatcatgtatggtaaactgtaatattggctaaggcattctatttctctccaatgaatccaaatttagaaacactcaaagggaagcaaggaagtggaagacaaaagctaacaacaacagaaattacactggaatttcaccaaagcacaaatacaagaaaatacaggcacttttcaaaaggttctttttgtctctaattttcagaatctgaaaacatatccactagcattccatatctcaaaaaaatagtttttcttctgctcttgttattactacaaatcaataactggcatgttaatgcaattgtctttccagatttttgtggacaggaactgcatgttagtctagcatgagaatctatgtcttaggctcattcatcttaaagagatctttaaaaagcaggttcttctctgcaaatattagcaacgttctgtcaacactatggaatggatacctaattctggattattttttaaaagtccaattcccctaacaaccaattatagatagcaatattcctttatttataactgcttccaaaaattacattaattttttactttatttgatggcaaggcaaagaactagctgtaatcttttgtaaaatactctttcatgatttcaccttcaggcaggttttcttcacatcactcatttctggacaaatggctcccctcgtctttccttctctttaaaggcacatccttgaatctgctagttcacctgtgtattaagggcccagcaaggattctgttgttaagtccctaattcaggagactccattgtcctacatcactgctggtggcctaaattaaagggaacaagtgcagatcaggaaaatactgcacaaactcaaagtgtatagtgcaaatgatggcctgagggagatgatgcttatacatattgg

SEQ ID NO: 35951 - DNA, 971 bp, Bovine  19866881278437
  misc_feature (1)..(1): n is a, c, g, or t
natcatagcacttcatctttagatacctacttactaaccatgtaaggacgctttgatgtttaacattgccacaataccactatccctctgaaaattttaacctcatttccttaatgtcatcaagtacacagccagtgcttacagtctctggttgtctcataagttttttatagataacatgtttgaattgggagtcaaagtccatgaatcatatttggttaatatgtctcctcagttttttaaaatttatagtttttcccctccttattgtccccttttgtaaatattgctcaaaaaactgagatatttgtcctgtagtttcccacattctggatttttctgattttgttcttgtttaataattcttctgttccccttgtaaattgacaatatagtttaaaggcttgagtaacaccacattttcaaagaagatggcccaaaactatcctcttaacccttcactcacaaagagggtagaaagagtaagagctagaaatggagatgatagttgaagagagggattgttatgctgtcggtattttcacctcaaatcaagagaaaaggacctgttagctacaaacaatgaaaaaaggtacaaaacaaatgatcccattaatattaacaccaaaaaattgtttataagaatatgtttaatgaaagatatgtaatatctctacactgaaaattataaaacacgttagtcagtgttaaacagatggttatcaaattaacaccaaatacttgtatctagaaaatatgctccagtaatttttggaggtgttatatatacttaaatcaaagtagaagcacaaaaggtggtgtcaatttacttgcacatacaaacgtgctttgctcatcctcagtaaaatagactcatactcttatggggatttcacatcattttaaaatatcttagtaacagtccacacattaaattttcttttcttttgtctccataaagagtaaacgcg

SEQ ID NO: 35952 - DNA, 1338 bp, Bovine  19866881292343
  misc_feature (1)..(1): n is a, c, g, or t
ngctgttgtggtttgaaaataacagaacaatgtgctgctgcttcaccagccggttaatgacttgccccgtggttaaaggccccaaaccacacggggcaagctgagctgagccactcaggccagggctgcccggcggaacagcacaacaataggaaaacattttgtgttcattatccaattcgtgctgagctgatttttttgaagctttattaataatttctccatagtttatgctctcctgtttgttttacaaaaagaaaagacactgtaaagctgcggagtcagcaaagagcaatgcacagaaaaaagttaaaaggccagacctaaccccaaaaaaccttaagctctggactgaagatcagctgcgggtggtgcggggacttaaaaaaaaaaattgtgccactctgttagaagaagaaaaataagagaagaagaaggagggagggaggaatcaagagacaatctcaactccacagtgtctgtttctcaattcataaatacatgacctggtaaagcatgaatgcagggtttacactgaagaacacaatagtcagtgaacacatgcctccaagcctcagagaactggataaagatagaggctgacaaaagtgcattttagtattttacaatttttatttcatattggcattttaatctttttaaacattgtttctactgtacaatccccaaggaaatacacatgcatctgcaacagttatttgctgtgatctaatattacacctcttcatgggaaatagatgtggaaacagtggcagactttgtgtttttgggctccaaaatcactgcagatggtgattgcagccatgaaattaaaagacgcttactccttggaaggaaagttatgaccaatctagatagcatattcaaaagcagagacattactttaccaacaaagatccatctagtcaaggctatggtttttccagtagtcagagttggatcgtgaagaaagctgagtgccgaagaattgatgcttgtgaactgtggtgttggagaagtctcttgagagtcccttggacttcaatgacatccaaccagtccatcctaaaggagatcagtcctgggtgttctttggaaggaatgatgctaaagctgaagctccaatactttggccacctcatgcaaagagttgactcattgcaaaagactctgatgctgggagggattgggggcaggaggagaaggagacaacagaggatgagatggctggatggcatcacggactcaatggacgtgattttgagtgaactccgggagttggtaatggacagggaggcctggcgttctgcgagtcaggagtgcaaagagtcggacacg

SEQ ID NO: 35953 - DNA, 1697 bp, Bovine  19866881360922
  misc_feature (1)..(1): n is a, c, g, or t
naaaatcccatggacagaggaggctggtgggctacagtccacaggtctcaaaagagtccagtaagacttagcgactaaacaacaacaatcatgaactagatttaacactgttttctctactactttgccaataacagaacaaataaagataaaacatgattgcccagaagtctaaagttctgtgcttctggttttctaaaatctataaataaacacattttctgagtaattttgtgcaaacagatcaagcttaaaaaggttttctactggtttgtgaaagtgaggaaattggatctgcaggggacctgtcgggtcattctcttgtgctgggctctctgctaaacttcctcattcttggctgagtctctaaagaaaaggaaacgcacactctctgggagacagcttcattatatttacttttcaattctctcttgaaattttttctcaagtcaatccttttagtaccatattatgcaatcttactctatctttcatgtttacacccaaccttcagctgtttataaacagataccatgcccacttttagtcatctgttagccacgttaaacaaatgtaaggccttttaatctggtttcagttcagtctctccaagcccttaatcatccttattgcttgtctctgaactatttccagtttcctggatgttcattttcattagacgaatcccacactgaatgagttattacaggtgtggtctcattaacatagcacaatgaatcctacatttattttttctcttgtggcattatgttctgacttccgggcaaattcccaggagctctgcgacttccatattctgacgaacttagtgtaatgtttttttcctcattttcacctcacacagtgtttcttttagcaaactgtaacaacctgatttcttctccagtacttcaaacacccagttttaaatgatagtagaagtcaaaatatgagtaagattacttcattgtgcttttgatttcattggcttatcaatacctacatctcaaaataggaaatgtccagtcaatttctttttgcatacaactcttcatcatatcggagaaggcaatggcaccccactccagtcctcttgcctggaaaatcccatggacagaggagcctggtaggctgcagtccatggggtcgctaagagtcggacatggctgagcaacttcactttcacttttcactttcatgcattggagaaggaaatggcaacccactccagtgttcttgcccagagagtcccagggaagcgggagcctggtgggctgccgtctatggggttgcacagaattggaaacgactgaagcgacttagcagcagcagcagcttcatcaatatagtcttatgatacacatctgcctgtgaaaaatgtccactgattataatctgaaagtctccaaatgcacaattcaatgattggtggaaggaggaagattacagatggcaaataaactgatttgacaattttaaagtaatgtatttggcatagtcaattccagtatccattcattttataaaatcacaaagttaggaagattgctaaattgcagaaatccatttaaactgaatatttttgagtgaaactattataacaccactgaaaactataccaaaagctttataatgtccattccttccactatattttatagcacatttagaaactatttatacaatgtttttcaatt

SEQ ID NO: 35954 - DNA, 2408 bp, Bovine  19866881406298
  misc_feature (1)..(1): n is a, c, g, or t
naacctgcaagctccagcaagctgtaaattttatctccgtgtgaactagtttcaggtttgaaatgacaacttgattttttaaaaaaaaatcagtaatcctaactgtaaatgcaatatttatcagagtggtatgctggtaaatgttttaacaacaggttctctgggggaaacagccctgatatgtaatatgtcccagtttccaccgtgtcagtatccccaccatgatcaatttcaagctttccgtgtgacattactgaatgcagagaagggaagaggtgaggagtgtcacatcattatagaataattccacagtcaacataaaaatgtcaagagcatcagtaattgagaaatggtgaaaaatgattatcaaaacgtgagttatgcatatttattgcctttgtttacagctatgtttgattgctgggagaaatgtcaataacctcagatacgcagatgataccagccttatggcagaaagtgaagagcctcttgatgaagatgaaagaggagagtgacaaagctggcttaaaactcaacattcaaaaaaataagatcatggcatgcggtcccattacttcatggcaaaaagatggagaaacaatggaaatggtaacagactttattttcttgggctccaaaatcactgcagatgatgacttcagccatgaaattaaaagatgcttactccttggaagaaaatctatgaccaacctagacagcatattaaaaagcagagacattactttatgataaatgtccatatagttaaagctatggtttttccagtagtcatttatgaatgtgagagttggaccataaagaaagctgagcaccaaagaacggatgcttttgaactgtggtgttggagaagactcttgagagtcacttggactacaagaagatcaaaccaataaatcctaaatgaaatgaatcctgaatattcattggaaggactgatgctgaagctgaaactccagtactttggccacctggtgtgaagagtcaactgattagaaaagaccctgatactgggaaagattgaaggcaggaggagaaggggacaacaaaggacgagatggcatcaccaactcaagggacttgagtttgagcaagctctgggagatggtgaaggacaaggggtcacaaaagttggacatgactgagcgactgaactgaacgatgacagttatgttaactggacatttatataatttgttgataacgactgtgcttaacaaccagcttccaatatttctgaaaatttaacaattggctcttacaagctggtagatactggctccagcacatacggtccaccagcacattatgaatgaccacttaatacttttctactctgtctgtggtcctccgtccagtagcaacagcatcacactggtagccccctaccccacccctcttccagaatcagcttctgcatttaataaaacccccaggtgactcttgcacacattaaagtttgagaaccactgagctgatgaacaacttgagaggatgcaaagttacatagtagagaaggaaaatatatacacaccttcactttttaaaaggctaaaaacaaaagccttttagacaaaaccgccaatcatcatgatgtttcaaagcgactgcaaagaactgttgcaaaacccataatgttccaagattcttgttcaggtaatttcgaatacaatgcgtgttgtcattgctgtagatttgggaggcagggattctgctgttaaaacctttgagttcaaatcctagctttctgcaaaattttccaggagaggaacagtgggaaaatgatttaaccactttgtaccttaaatatcttatctgtaaagtggggtgatagtaatagcacctacttcattgagtgattgtaatgaactgtgagattaaagtacttacacaacctcctggtacataatgaatgctcattaaactttagtaattattactttttccttaaggggaaaaagttccaaaccattctctatgcatcaaccctcaaacatgtttaaaataagaattatgaactgtttttctcactacatcatctaaaacttgattttgatccgtaacttttatattattcttgttccctaagactcataagaaaatataacaattacaattatttctaaaatatgtccaaatttcagagtgattcattccaaccttagaagtcacctgggattcttctgggaaagtgtcttgcattctttaaaaagagaccaaagaagagaagctgtcttctgcttcgttttgtctcacgtgcagatgctgttgtgaactctgtgaccacagggaagtcctgaatgacagagagaaggggggaaggagcctgactgggaggcagggagcaggagatgacatgagctttcttcctgcagactggagaagctcca

SEQ ID NO: 35955 - DNA, 1633 bp, Bovine  19866881514365
  misc_feature (1)..(1): n is a, c, g, or t
ngagaaaattttaagaaaaaagtccctgaagaaggtggaccaagaacaatctggagtaaaaaaattgtcttagaagtaaaaatgaggagttaactcagtttaataggagggaagacaaagactacaggtgtaagtaagtaggttggtaaatttggtggctataaattacagttttcttctaactggttctattttctcagtggaataagagactaactaactaagatttattagcaactccttataagattggggttttcttaagcttggattcctcagctgtgatacagactcactttgcgtgcagcagccacctacatcattcccatgggacttgggcacaaggtgatccaaaataaacacaaagtccatgctacctgctatgctgtgagtcatgaagtcttttgtctctgattcaggcatctcatgtcttctggtagcattttgaaactggggccagctaacacatcaacttacaagtaaatatctcagacatttcatagtttctagttcaaaaggtaacatcagcttaaccatttaagatcacttaagagtacaaagcacatttcctttattttttggaattctacttttgcccccaatcttttccctttctctcttttcttttattgtttttaattttcaagattgggtttaagcacttaattatctcattcaacatttaagacgcatatgttttaaagtctttcagtaatttttaaatgcttgacttttaaaaatgacaatttttcctattttttttttttttattaaaggacggttatttcagaagttttcttttgggtgggaatagtaattgcttctgagtcatagtaagcaattgaattttagaccttgaagaccaccttccagccaagatatttcccaaagaatagaagcttgtgtacctccctaaatattaagtaaataacagcaataattagtaggggactgctttgaactgatgatgcagggcacctcactggggtttaccaaatttcagcttggtaaaatgaaacctagtaggtgcaggcacagcggacaccagggtctgtcaacgtggcaggtcagggagggcccagctggcttctttcaaaggacgcaaccaaacagagggtcttggaagctgtcaaaaagtgagagacatgagcagaataaaatgctctggagctggcaagggataattacatcctgtgcttttaggactgtgggatgtgggttgacagaatcaagcatggaactttcctactcaaaatgagtcaggggataagagtggtgatcaaaggcaggaagtaagtaggtcccaatgcaacttggacctgtgatgcacagtgaaaccccaatgaactatttcccaacttgtaaagacacatgatgaaacaagtgagcatttgtttaattttggaaaacttggtgggtcttatttgggacccttgaattgcccaagttaaaactttattaagtgtaattaactaattatttgaatattcaaatatctatctattttaaggaatttaatataaatttatggagttatagaccattaaagcattcttattgtaagaggtgtgaattcagtattcagtgtgttacatttcttcctaaactcatttaagtaaaaaaaaacatagaa

SEQ ID NO: 35956 - DNA, 687 bp, Bovine  19866881515274
  misc_feature (1)..(1): n is a, c, g, or t
nctttttaatttgatctttcttgcgtttgaagtactcttcaatgacatccttggcctgagactctgcaatagtcctaaaaaaattatatacgattttactaatatgtagaaactctaagttgttagcattagttatactgaagctttaaatacttccatcattaaagtttcttgtggctatctttagggaccttaatgacttcagtatcttttaagcaataacatgacaggaaattctttttttgttgttgtggtaaaaactcgttttaaccttttttaaacatagagttcactgatgttaagtacatatgccttgtaatatagccatcactaacatctgtctccagaagcttttcttctttccaaactgaaactccactcactaaacaataattcactatcccccaccccccaccctccagcacctggcaaccaccattctatcttctgtctgtgaattggactactctaggtacctcagatttggccttatacaatatttgtccttttgtgaccagcttacttcacttagcatagttaagtctttgaggtttatccatgttgtagcatgtgccagaattttccttttaagggtgaatggtactcattatgtctgttctacatttcgtttgtttattcatccatccatggacatgggatgtttccacacttttactggtaatagtt

SEQ ID NO: 35957 - DNA, 1799 bp, Bovine  19866881525396
  misc_feature (1)..(1): n is a, c, g, or t
ncttgtgacctgaacagggagcttatcttctttcatgagtgaaagaactgatgtgcatggtggggaggaaaatgaaggatcttttaaagaatgagtcttgagctgagaagctgcaggtgaagccggtgcagccggggccaagcactctggtttactgtgctcgccctcctggcactccaacacccgcaggcaagtcctgcttccatgaagcagtctctcatctagaacacatttaattttaaattcctcattggttttcttcccagataaatcaagaatatcttgaaacagtgtcacagagttgcaatttcgggcattttacagcttctgcagactaacaaaaagttaaatctgaagtcatggttcttaaaaatgaacaaagtacaaaagcgagtcatttgcaaactgtatctaaacagtactttggaattcgaaggtggccagaatactgcaagctctgacttagcaaagacattcagacttacctcttgtcacgtgggcctgcccagccgacctagttggagggagtctagaatcaggagttaacagaggccgagagtaggacgcggccccttgagagggtggtctgtgtacacagctaagacaggggggcttgccagcggggaaaccttactccttccggttttccagcctcctcggcccacctcacgtcttggacgagcttccttcctgtcatccgctgatggcctccccttgctccaaaagcagctgcagtattaggcatgtgaggaatccccctccagcttgtatgacagtgcttcctcaactgttaacctcagtctgaattcctgatcagttttagttgcaacaccctgctactcacatgttattgcctcttcttccctccccaagccataaagaacagagtgggggtgggggaaggaaacctacacaagttatattttcagagaaaccaagacaacaaaaaaatcctcaaaaatatgtacatgtggccaaaaggaacagataagagcagatcctgggtgagaagccacgtgtatggacagggagtgagagggtgttgcagatgagaacaggggaggcagagctccaaatgtcaccagcaagtatccaccagcagaagacggtgactgcaccccgaggtggggtccaggagcagcgctgagagggaacgggggcggctctgctgggggagctggaaaccggaggctgggaccaccctcgggcccccaggctacccatctcttaaagtgtcacctttccctaagaggaaagggacaccttagaaagaagcagctgaacactggggagtcaatggagtgatggggggacaccatggctggaggggaaagccctcctacaccaggctaggttctgagaggcagagggggaaagaaacagtgcctcagggcagcacagagaggaaggggccctagagtagagtctggctcctccctctcccttcacagccaggaaaagcacactcactccactgaataacaacagaaagaacagatatagcaaccatgcagaagactataaaaaactgtggaaaagaacagcaaaactccctatgaggaaaacgcagcaggaaaaaaaaatgtaaccacagaagtggataaggtgaaaattataacccaaaatagcactgaatttttttttttaactcagtgaagcaactgcaattttaaaggaagatcacgcaagagggccagataagatgcaccaatgaagcagaaactagaggaacttagggaagaaaaagaatttagaattcttttctgcaatgaataaaaaatgacaggtcaggatagatg

SEQ ID NO: 35958 - DNA, 865 bp, Bovine  19866881709557
  misc_feature (1)..(1): n is a, c, g, or t
ncaactgcggtttctgctgatagcttcttatagtgcaaacacttcagggccactggtcataaacattgagttcagtcattagcatgtatacaaatgttctctcctgttattttgggagctctattaaaactgaggcttgccttagattctgttttgtctgtcacagctaactatgcaagttttcatgaattgttgctatgatagttcctactacaatgattccacattggtcctattaatggaaatattgagccatttaataaaatattttggttgaaagcattgaaatagtttaataaaatattttattaaaagaaaagagttcaaccccaagtgtgttttggaatggggtggactcatctgcttggctcactgcttccaattctatatttgtgtggacctcttaatagtgccaacagtagcatcacgcactagagtcaatccaattatgtacttcttgcacaatatcctttctcaacactgtgttgtataatctattcctgagatagtataagtagcggtagcagataggcagatctttaacataaaagctcttccagtgatacaaagtacaagaatctgagtttaataaagcgcactaaattttatctatgattatatcatattttccaaaatatgtggccattctggtgctctttgtcctgagagttggtgcactggacacttttcttgcttcagtgtttgagcatgctcttatattaccaaacagaacagaaacacctgtgctaaaagaagaagctttgctcctgatgaacaagaatatagatgttttagagaaagcacttaaactggcagccaggcacactggctgggacattggaaagaaaatctgaaacttcataag

SEQ ID NO: 35959 - DNA, 750 bp, Bovine  19866881815989
  misc_feature (1)..(1): n is a, c, g, or t
ntcctaatagactgagacttgattatccattaaactggaaaagcatttgttttctctgtagtaacaatcttacttgattttttaaaattcattcatttgtaaaatgtgaagataccttcaacttcctcaacccaatggcttacatttgttcagagaataaattcatgcttgcagaaccattcttgaaaaccccaccactcacaatgactttgatggctttcctaaaccaagggtaaaataaagcatagatcaaggggttcatggctgagttataataagtacaccaacagcaaatctcataaatataggccggggttatgaagcccataaaggcatcaattaatgagtcaatactgtatggtaaccacgaaatcataaatgctatgactgtgatacccagggttttagctgctttcctctctctcttggctactctggatttataactgtctgatgatgactctcttttactactgatattttcaatctttttagcctgttgtctggccactaggaaaatattacaatagagaattagcataacaaaggtaggtataaagaaggatagaaaatgtaccaacacccagttttgatttataactatctgacaacctcctacacagttgagggcactagacaattcctctagcccattctcattggcaccctgtgtagaacacggcaccactgtaagtaatggggtaggatccaggagatgctgatgcatatacatgacacagacactgtgaa

SEQ ID NO: 35960 - DNA, 1301 bp, Bovine  19866881873458
  misc_feature (1)..(1): n is a, c, g, or t
ngttactgtagctcttattttgaaagaaatgaggcaatagaactaaagcaaacagatctatgtgaattttattccaattgttgaaagcactgtataaattatataaaagaagtgttgtaaaagaaatattaataatagtcctgtagtattactacctaaaaaaagtagtataaaaataatctaaaagatacatttcttaaggaaaactgaatatgggaccactgaaaccctgtttgattgcagagtagggtttttattgttttcttgttggttttatgcctgaagactggttccatgtatgaattatgttgaatatcatggaaagtataattattctatatcccgaatctgcccttttgccacaggcacaaaactgaaggcctagcagatttcaaaatattctcttatctgccactcactttaaacaagatctctggccacaggcctatttagatacatggaaatctgctgtgtccctagtggtgttctagctaactcctggcctgctaccacaggctgtaccgtgaaaacaagtttacacaagattacaaaatctgcttatccctgttttgttttaacacctgtgaaaaaaaatacaagactgtcatgtggcacgcaaaaggctcaggtgtctccctgtttagaagctggcagtcctgaacagcaagaggaaatcaggttgtaatattaataaacacctgccagaactattatattcattggctccatcccagcgaactaatcaactaaacctaacaaaacaattgtctaaaccctaaggcagggtgttaccaacatggctccgagtccaccctgtgataaatatgagaagccagtgtactgtactgttctgtaaagtaggagagcagagtgtctctctgagaaggcagttaaaaataacaatagtaataatagcacagtttctatgcaccaagcaccattgtggatggatcccagggacactgaactgatgggaaaataaacccttcttcttcatggagtgcacgttctggtgggagagacaggtgagaaataataagctcagtgatcccccttcttattactctcatcatcatctctgctcattccctcatagtatttatcagtgaggtggagaatcatggggatgggtagggaacacacgggacagagcaaggactactttaaaatagatggaagacagagcctgctgaagaagagaaatgtggacatctgaaaaaggagaaggaaccaggactgatagaacaggagaagatggacttctccaagataaatgcaggtgctcagagaggggacatgag

SEQ ID NO: 35961 - DNA, 1467 bp, Bovine  19866880454315
  misc_feature (1)..(1): n is a, c, g, or t
naatctatgacagcttttgaatcagtaatcccactacttaggatttatcctaaggatataattatacaagtggagaaagatctgtttatacacccttaactcaatactgtttataacactaaaaaaccagtagcaatctaaatgttcaacctaaggaggatggatacacgttatatacatatccgtatgttatatacattgggatctgtgcatccattaagaatcgcaatatatatttaaatttatgctgatatgaaatgttttcatgcaatatcaagtaaaaaagtagtttacaacagtatatggaaaacatcctaatagaatctagacattcaaaaaatgtaataagcacacacatacccacatatgtagctgtccacagatcccttactaccttccatatgtggatgtgtatttaatataaaatacaggtaaacaaagagtgtatcattttaacaggaatataaaacaaattagatttactgaggaaggaaaacaattctccttgactcctaccaaaagaaagacatcctacataaaaactcatggttagttgttgacagaataagcttttaaatatagtatattctgtgaagtaaaattatcattaaaaagaaatagcaaaaaaagttttcagcagtatatttatgactgagtactttttgctgtccacctgaaattatcacaatattgttaattggttataaactccaatataaaataaaaagttaaaataaatgttttaggcagaataggctataaaaatacctgaaaataaaagggtagtgggattaaaagcagttaacatggattggggcaagagtatacaacattttcaaataattttcctgatcacccaatacctcacacacatagttatacttttagtaaattaattcagtgtttaaaaaagaaccaagggttaatccactaaagcttgtaactaaatttgtatttagtaattataacagcctgtcagtacatctcaagagcaatgcacatgtacaggagatgcttgttcagaagatattgtccacataacgctttggtatgtatggattcaatttagtagttattagtgttaatgacaataaatacaaaaggaataaattagacgttcaaagtaagtgatccaagaactaatgttttcacatttaagaaactccccatgacttttctttgttaaaaaatcaaaacaagcacacaaaacagagaacacacttactaagtgtagaaagcacaacacgtacctgtctgacactccttgtgttgtgtatgtggtttgcaagaggtagccttggtctgtgtgacaggtttgcacaataacgctttgttctttaaaagttttgaagactgggaagacagaagtttcatggcatctgtctgcacacttccctagttaaaaacaaattcagaaaccaaagacagatttttttttttttagtatcttctcactgactataattg

SEQ ID NO: 35962 - DNA, 1370 bp, Bovine  19866880485707
  misc_feature (1)..(1): n is a, c, g, or t
naggcagttaaaatgtcataagtgaatggatcttgttctttgtaggtttgcatccactttcccaacacatgccatctgccaagcattgttctaggaatgggggagataatgcagtgaataagatggatggaattcctgcactttcacggagcttaccttctaatgggagagacagacagtttctgaatcacacaaattgaaaatggtaatgatagaagagctatagaggtacacagtgccttgagagcaaacagcagggggatctgacctagtcagggaggccagagaaagcttccctgaggaagcaacaactgggctgagatctgaagggtgtgtaggagttagcaaggcagaggtggatgggaaaagctttccagatgggagggaaataggccccttgatgggagggattgtgggactgcaaaagaccagcctggctggagcagaggaagcaagtggggagcgtgttgtgagaggattttggaagcccaggaagggccagagcctgcaggccttgttggatgggttaaggcattttatcctaagaacatcaataagccagtgaagagttttaagcagggaagtgacatgatcagatttgtgtttccaaatgaccatttggaggggaactgggtaagaatggaggcagggagaccatttaggaggcttatgcagacatccaggcaggagatgatgttctgaggtagttagattaggtagcagcactttctgctgcaaatacagaaactctggccaacagcggtttaaataaagaggactttattccttcctgcgtttaggcctggaggaaggcgactgcttctgttggttccctggctcgatgactccagggccggcatttctgtgattctctatgccttgctctcatggtggcaagacagctgccctgggtccaggcattgtgattgtattcaagctgaaaagaaaggaaggatggtactggcgagtcctgccccttttattataaaggcaaaatctttcccagagactctcgtcagatttttttatgtatatattattatcgaaatgtgaatcatatgacttctaggtacaagggagtctgggaaaggggaaaggaagttgagaatgagttttggccagtcggcccacagtgatttggtagatatggaaataagtgggcagatctatttttaggaaacaaaatccataggacatggtgatggattgaattattagtcccctccttgcttgtttttccttcttattgattatgtttagtaatggggaggcagcagaaggaatgtgatggtaatcgtgagatataggaggaagtttatataattaaatctatatcaattaatcatctctttaagaaatccagaaatcgg

SEQ ID NO: 35963 - DNA, 1111 bp, Bovine  19866880783586
  misc_feature (1)..(1): n is a, c, g, or t
nctaaagttggcttcagtgctctgcttacttctctggttctgtcttcacttagattttggctggagggatttttattttttttttaccagctcattgatgcatttaagaagatttaaaaatatatttcatctatcattaaaaaaaatcatttatcatgttttcagtgggaggatcaaccaggcacctagtctgccatactgcttgactgacattttgatgagtttctctgtctctgcacctgtgtggctctctaattctctcttctagtcttggagactctattcaaatgcttctgttatgcttcttgacttctttgactacctttcttcacccagacagagctctagattctaaaagtatttagtgctcatctctattaaggcatggaattcttaacacagcagtcatgatttgtggagtgcaaggtcccttgttaaagaaattattgagaatttcaaaacagtgacagcagagcataaagcttgtaagtgtggggctctgtgtgactgcacactcacactcctgtgaagctggccctgagagtaatgactgatttacctctccgtctccctcatacactactggatgggtgtgagagaacactgtctaaagtctgtctgactaatctttatgccccagcaggctagcaaggtgccaggtacaatcagtaaatattcgtggagggaacagatgaaaacgacaccatttcctaattctaatatatgtcaatgcttttatacaaactgtaagagaaaagtagagaaccacacaaaatgtccctatcctttgtgagatgcatttccagtttcagaatagtgaacagaatgtacattttagaactgagaaggacctccctggtggtccagtgattaagaatccgcctgacaatgcaggagacatgggttcgatccctgttccgggaagattccacatgctgtgcgacaacgatgaccatgtgccccaactattggacctgcacgccctagagcctgtgctccgaaataagaaaagccgctgcaatgggacacctgtgcaccatgctcactgcaaccagagaaagcctgcaggcagcaatgaagaccctgcacagtcaaaaataaataaataaaa

SEQ ID NO: 35964 - DNA, 1688 bp, Bovine  19866880825699
  misc_feature (1)..(1): n is a, c, g, or t
ngtctcagggtggtctgagggtttgtggtgtcagggtttgtgctttttctccactagcaagtactaccccataggacatgggaaagggagttgggagtgctttgtctggagagaaataaatacagggcacatctcctctgagactagagctgggggaacacggtgcatgcgtgtgtgctaagtcgcttcagttgtgttcgattctttgcaaccctatggactagagcctgccaggctcctctgtccatgggattctccagcaaaaatactggagtaggttgccatgccctcctccgggtgtgggggagaacatggattgatgctaaagagactgagtttgatgagatcttgatgaaggctcagtggctggtagcagcacctgtgtagtgatggggggcgtgggaaaccattggtgtggacattcccaggcttgatgtggccacagacaaagcaaacggggtggtctgggtttctgccaaactagccttttgtgctgtgagtctcagacatgggtcctgcttggggaaggaagaggaggactgtgccatggatgaaagaccaagctatcaaagcatctttccaaggtggagagatgcttctcggtgcttttccaataactacttgagaggccattttggtctgaagtcccctctgcttccccagagaggggtaaaggtggagaagaattgccatctggaggtaggcggttgatatctgtaaggttaccccagttccccctcctggcagggtaagcaacagcctctccagctcaggccatagggtgggccagaggctggacaggccctcccctcccctctatggaagattcccaggagacttcacaatcttcctcattgtctcacatccctcagggtcaggaagttcttcttgttgtctgactgtgtctcttccactactattaatcatgtccgcaaagctagctcttcttcctgacatccctgtgtctaataatggcatcattagtcttccagtcacggctgctgcgaacttcagagtcgtcttcctttctgactctctcccatctcttcccagggttttccaaacctcaaatgtctgctggaactctctcatcccacccctcaaaattgcttatttcccacctcctctgcctttgtgcatgctcttgccttcactgggaattccatctcccttacacacagccatcttgttctccatctcaagcaaactcttctctgggaagtcttcctcggtttccctctactggatctgctcttgccctcatcttaactggcctaacattttggaacctctttccagcacggtcatttattcatctacttagtgaacatttgttaggtaccctctctgggcaaagccccgagctgagtgctggagatccagtgagaaacagaatttggttcctactctgcagaagaccagattctacttcgggagacagatactgaaagagacaatttcagtgcaatgtgatagttgctttcatgggggaacccagggtattctaaaaacgcaatagagaggcataacccagaaaagtcttcaagggaaggcggagcttaatctgaataagtgttagccaggggaatgtgttgaggggtggatgaaagaagattctaggaggagggagcagcttatgcaaaaatacagggacctaaaataaccctctcatggaaaggttggtcccc

SEQ ID NO: 35965 - DNA, 889 bp, Bovine  19866881201560
  misc_feature (1)..(1): n is a, c, g, or t
ntgaaaataactgattcaaatatttcattcagatttatctatgcctaatgagaaaaatgatgtggaacttgattctccacctgcaaaagaaaaaaagaataggttttttccagacttacgatgcggaatatttaaaagttggttttattatctgtccgggatcaaaagaaagttcaccgagggccacagtgtgtcatctgtggagaaattttatccagtgaaaacatgaagccagcaaatctttctcatcatttgaagacaaagcattcagaattagaaaacaaaccagtagatttttttgaagaaaaatctcttgaaatggaatgtcaaaacagtgctttaaaaaagtgtttactagttgaaaagtcacttgttaaagcttcttatttaattgctttccaaattgctgccagcaaaaagccattttccattgctgaagaattaattaaaccatatttagtagaaatgtgttcagaagttttgggttccagtgctggagacaagatgaaaaccattcctctttctaataatacaattggacacaggattgatgaactatctgcagacattgaagatcagctgatacaaaaagtcagagagtcaaagtggtttgcccttcagatagatgaatcatcagaaatctcaaatactacccttcttttgtgctatattcgtttcattgattatggttgtagtgatataaaagaagaattattatgttgcattgaaataccttgccaaatgacgggttttgaaatatttgaactaataaataaatatattgacagtaaatctctgaattggaagcattgtgttggtctctgtacagatggggcggcaagtatgactggtaggtgttctggtttaagggcaaaaattcaagaagttg

SEQ ID NO: 35966 - DNA, 1216 bp, Bovine  19866881996035
  misc_feature (1)..(1): n is a, c, g, or t
ncttatatgcctccctggacaggatactcccagctcttcaggaaacccacatcatactggaccagccctgtctgctacagagttctggtccagctgcagggagtcatttccctcatgccttctcccatttctcaccctatttctatgccccagcagatgggtactacaatggctcaattactaacctgaacttattgagcatctagcctatgccagattttgtttatacagagataaagcagatggatcctggtttttaaggagctcacaccctgcaaacacatttttatcctactgtgttgaagtatgggaccttagagaaggtagcgactgctatgccctggggttgataaggtgggcaagcttaggtgaggtttcttggaagagagggtgcctgaactgcatcggaggcaaaggtagggggacaggctttccatatggaagaatcctacagtctgtgctgactcctctccccattctctctcctgttgtggtcctggctcctgctaagcccaggaatctagagaagagagcagaggttaagataccctggatgctgggggaggaccaggcagagctgaggagtgagaggtgccacctcatgaacctggctgttaaccaaccagccagccctcatgggacccagctctgtgcttgaatcctttgtgggagaggcctggaggagacagcaggcagcccctgtcccaactcacacagagagcctgcagggcagtgtgccagcccaggaggcaggcttcgtgagggaacaagacctgtgggccagggagtaggacaggccacaggcctgacctggctgagaaactgctgcccagtggacccttgccatagactggggattctgcctgttgttttctgatagcaggctcaaggctggcagcattctggagcccagggcagcaacagcccaagtcccaccaaacacatacaaataaaagaagacactaaggtgcctgaagtcagaagtagccaacatgtggaaacacatgtgctagttgccttggacggatcaactttgagtactcattgctgcaacttaggaggtagggttttgttagccctgctttacagatgacagaattgagacctgtggtcatgcaggtaggctgagagaaaatggttggaagcagatgattgtcttcgcaatacccagcaaaacgtcactctggacttgccctcccagatccttggagctgga

SEQ ID NO: 35967 - DNA, 2567 bp, Bovine  19866880271050
  misc_feature (1)..(1): n is a, c, g, or t
naaatagatgggtaaacagtggaaacagtgtcagactttatttttttggggctccaaaatcactgcagatggtgctgcagccatgaaattaaaagacgcttactccttggaagaaaagttatgaccaacctagagagcatattcaaaagcagagacattacttggccaacaaaggtccatctagtcaaggctatggtttttccagtggtcatgtatggatgtgagagttggactgtgaagaaagccaaagaattgatgcttttgaactgtggtgttagagaagactcttgagagtcccttggactgcaaggagatccaaccagtccattctgaaggagattagccctgggatttctttggaaggaatgatgctaaagctgaaactccagtactttggccacctcatgtgaagagttgactcattggaaaagactctgatgctgagagggattgggggcaggaggagaaggggacaacagaggatgagatggctggatggcatcactgactcaatggacgtgagtctgagtgaactccgggagttggtgactgacagggaggcctggcgtgctgcaagtcatggggttgcaaagagtcagacatgactgagcaactgaactgaactgaactgaatctttttcaaattcttctcccatttgggttattatagaatattgagcagagttccctgtgcttgctccttgttgcttatctaatttaaaaatatttattctatttatttatttggctgcattgagtcagttgtgacacataggatcttcgatcttcatggcaggatgtggggtccttagttgctgtatgcaaactcttggttgcagcatgcatgtaggatctagttctctgaacagggattgaccctgggccccctgcactgggagtgcagaatcttagacattggacaccagggaagtccttgtttgctcttatgaagctgtgtgtcattttgggaagggcactgtgggctaggaggcaagggacttgggatctaatctggtcacagcctggtcactggtcttctctggcttcatttcccatctataagctcaggaggagggagcaggaggaagcagctgcttgtcccttgagtcagcagactgctgacatctcttcacctccctttggccgtcctgattccactttggacagacacacctggagcagggcaggaagaaacacacacacaggttcccttggaacaccatctctgtcaatctgttctgaatggactgtaatgctgggagctcaagtctatgctctttttttaaaaaagtattcatttatttatctggctgcttcgggtcttcgttgccacactgcaggatcttcgtcatggtgtttgggtttctgttattgtggtgcagggttagttgccctgttgaatgtgggatcttagttccccaaccaaggatcaagcccatgacccctgcattggaggtggattcttaaccactggactaccagggaagtccaaaatatatgctcttaatagcaattttctttgtagttgttgccctgctgctgagcccaacagttttctttcctacaaatggatgtcttatgaaaaaaaaacacttaatatagctccaaaatcatgactatggcatttacctaactctgcaggatcagagaaacagaggaaacaaagctggaccttgtccatggaggcagtgaagtgcagtgggtgtgtgggtcctttaacttgacctccttgagcctctgtttcctcatttgcacaaaggggacaatacctttacactgtattaaataagatgacatgtgccaagtgcctggcacatagtaggagctcaataaatgtcagtgctccttcccagggagcagggaaatggctcttctccccagacagccaacgagtccctctttgcctacaactctctgggtttgtttatcttgtgtagtaattaggcaccagcagctgagagtatccaaacctacagccttatcttttccccaggctgcttcagttgatagagggttgggtggtagatgacagcttgtttatccagagagcctgtaaaatattctgttgagcaaacacacagaaaagctcgtttgtcttgtcttttgtctctacaactgcacagttcagaagggatgttctccgatcttaccaactgcttgctcctctgaacgttgttcacagaccctgtctgcccacccctgggaatgctggggctgttccaccccctccctctcaccttgctaacccttggcaagagggcaggctccatttaccacatctggttttggccgcttctctgagcttcacactggacaccacacctgggtgtccatggacctcacccactcagcccattcaagatggaagccacctcccttcccacacttgctccttctctgggtctctgggtcttggccactgggagcactaaccacccactccttgggcctgaaacctgggagaccgtcctggacatcctgctttttctctgctccacatcctaacacctatcaggcccatgttctctctcaaatctctctcctgattgttctcaattcagccccag

SEQ ID NO: 35968 - DNA, 2745 bp, Bovine  19866880407093
  misc_feature (1)..(1): n is a, c, g, or t
naatcaggaagcagaactgttcccaaaaccacagaacatttccccctgagttactccttactaagggacactctttccccctacctctcacctgtggcaattacttctgtgttcttcatctacacttttgtcatctcaagaatgttatataaaaggaatcagatagtatataacctttttcccccctcagtgtgatgccctggagatccatcaaagttgttgtgtgaatcaacagttcattttgtcatcacttttgagataaaaggaatcaggtacaggacacttgagaaagaaattcctttgtgaaaagtctttgttttcaaggcttaccgttactagttctttgcccccctcagagacctgaacagttaatttatttcagtatgattggcaaattggcgagttggtagatgattgattttattatttgatttataagtgttttcctcagtcttacagcaattagtttttccatgggccctaagttttgcacggatctttatgtgtttgagacactcctttcaactatgaaatattcattgtatttttgaggttaatgctaggtgctgtaatgaataaacccctgcaaagtttagtagcttcacacagtaaaattttatatctcattctagcaacagaccatgtatatatactctgtctttaaaatccttttctctatgaaatgatttggagacgcaggtcacttctgctatgaacctctgctatcttttaagaccttgaggtcccctggaaccagccatcagatagagggagagcatggggggtcaccaggctgcaggttagcatgggtcatacttggaagtggtatcctccatttcttccattcctgtgtcattggctagaatgcagtttgatggctggggtcagctgcaaggtagtaaacaggagtagatggaaggatgggaagatgacgttcctaatggcaaccacatctttaaggcagcactacactccggaagagggaaagcacgattattgatggatggctgattgtctctgcctccatctcctgtcaaagaccccatttcagatgaataatctcaacagcaacctaacgggaggggatctaagagttgaagttctagatttgactcttcttgagcaaccaaggcaagtcatgttcactctctgaatctcagccttatattatctacaaacagtgggttaagttaaataattctgaagcctcctctcttacatttaatggttttgtgttgtgacccttctttattcgcagacgtatttgaaaaatctctgcgatcttggctgaaggggaggttcggtcaacctgggttagtctgttcctccaatcctatgtttgccaccatggactcatctttaacctagagtcccagggaaacagaagaaaccctgggaccacacagcacaactgctattgcaatcgggaggattctgacagtttaatcatgagagcggtaaattcagctcctgatacatttgtcactctgaggatcaagaagctggtttcactgtgcttgcctagatcaccgcttgagagataacagacaattctggtcatgccaggaaggaaggaaaaagaaaactgatctttagttctgaccgcctatcctctgtgctgctaccgccattttagagggagccagagaggaccgctggtgagagccgcgaacatctcatgctttcagcccatgatcacccagacctctgttccttagagtaacaagtgagacttcatattagtggcaattgtgctgatcaacactgtgtttacatctggatgaaagcggaggaagaactaaagccagaatgccttctgggcaattcccctcttccttaatggacaggatctggaggaggcgtggctacactgtttccaagtcaggtttccttcggggctgtacatttcgtttctttcatgtctctgaagttgcttttctgcatgcctggggaacagagcaggatggcatttggtgctcttgtcgtctgggttttcaggggtggatgaagcttggatgctcattaagattactgcgcctcatcatttttaatgtgaggcccaaggtaatatttaatgaggctgaaaagtatattaataaaattgcttgtagtaattagcaggaaattataatagtagggtgatggggagattttagaaatcagttaggagtgatcaagaccaatctcgaatgtcactgcttattattttttgctctcaatcatcatgaactacacctttgcatgtttacctttgaaaagaaatctttgatggggctcatgcatattgctattgtttcatgttgttttgttccttgctgagtaacgtagagctagaggagtctttcgaattacttgtcaactgccttattgccccctagaggcaaatgggagctctattatttctacctttatggcctcttacctgaaaagagaggctgtcagagaccagagtccccaaggcttctgtgaaggtgagatgagaccaggagtcctttgtggggcttattaacccagaaagtgtaagtaaaggcaaaaaacccaaaaagctcacagatttgggaggtaggttatgatcgagggtcctaaaagctgtgcaacatcttcaggtttgactgttgattaacccttctctaccagtctctattctgttttacaagtagatttggagctaaaacttctgaaatgaacaagattccaagaaggcaggacttctcaagattaccctggttgaggcttgagctgggg

SEQ ID NO: 35969 - DNA, 2600 bp, Bovine  19866880595691
  misc_feature (1)..(1): n is a, c, g, or t
nactgtgtgaggcaacagacctcagggcctttgcccgcactgttctcgcttcctgaactgctcctccccagtcacaaccctcacactttggcctaattagtggccactccaccttctagcttagctgaagcatacactaaatgctcaacaaatctttgttgaacaaatgaatgaataaattagaattgcagtcctcctaacaaacttctatttgtcattatgaattaacaaattcatcaatctggttttagaaccagagtctcatggactcggtcaggcaatcaaactccctgacactgagtcatgagtctggggatctgtgagaatgaggaattggacctagatcttggtgacccactggccccagcttgggctcttaggtagcctctgtctctaacatggaatccatctcttctctggcacccagaaaactgtgtccgttggtaaacaacacagcacctgcagataatgccacacacatcaagtctgatgcgacagctcctgttccaggcatgtttactctctgaaatcaaataacagatgcaaggtggcagggaaggccggtgaacaggaaggaagatctaacttgcccagtccttttccacttaggaatgataaacgcaacacaccatggcgacataaactgtaagcaggctcccctttaaaaatacaaccatcaatctgttgctaagcccacaaccagttgcagtattaatcatattcttttggcaagagaatccatttcccaataaagtttgagtggcagaggaaaggcagagccaaccatcgggaaataaacgatgcttccaagtgatcaaaggaaagctgctcttctccctggcagctcgctagccatcctgctgctcgcagcagacatacataactacacgtgccactcggcttcccccacatcacatttccatcattgcggagtgctccgcggttctgtgctgggcccatttttcactctgcgccagttttgtatgctttgaacacagacctcccctagaaatgaagagtcccttcttaaggacgcccgtcacctctactttcttactcacagctcccttctctccctcgccttctccccgtcctcagccaataatctctcagcaatcacgccaaggagcactgtgttctgctttgcctcctgaaccgtgaacacctggaaggcagagtccaaatctttctcctctttatttccccagaggctggcaccacgtaaacatctgatgagtgcttagacagtggggctttattcacgataagagagaagattctaataaaggaaacaaactcgggaatcagtgaactgctattcacgaagaaagtcgaagcaaccaactctcagatgctacactcgtattagggacagcaggacaaatccccacatgttccgctcttttcctctaattggctattactgagtatttctccttccatacaaatgttaagatctgtttggccaatagcctttggaaatgctatgatgttacttcatctacactaaacttatagattaatttgaaatgaatgacatcctgacaacacttcagttcagttgctcagtcgtgtccaactctttgtgaccccatggactgcagcacgccaggcttccctgtccatcaccaactcccggagcttactcaaactcacgtccatcgtgtcagtgatgccacccaaccctctcatcctctgtcatccccttctcctcccaccttcaatctttcccagcatcagggtcttttccagtgagtcagttcttcgcatcagatggccagcttcagcatcagtctttccaatgcatattcggaactgatttcttttaggaaatttcctgacaacactgtcttccttcacacccataaacacagtctctctcttcactttcttagccttcttttatgccctttagattttctcagggcaaatcgtatgcactctttgagtagatgaattcctagatacattatagttgttgctattataaatgacatcttccatcataatttcttaatttattattgtggtacaaaaaaactactgatatttgtatgtttctatcatctgacaaacttactgaactctctaatactgatgattggtttgttaattattttttctccaagtaaatgatattatatgcaagtaatgatgatttgtctcttcccttcctaatcctttggcctttgttttaatgcattacccaaaatcttatttagtatgtggcagcagcaatcatgggtacttcttgctaaccctgaaaaagaatgtttctaaaatgtgtcgatgaaatatgatgtttgcaataggcttttggaggaaagcctttatcaagttaaaggcaccctctccgtgatagagtgtattgttcccagttgtctgctgccctttctaccaggtccatcttcacagcgcaaagtatagatcccaccacactgataccaagcttggtcatatgacctccttcagccaacgaattgtgaaaggaagcgacacatgacacatccaacctgacatctgcagccatcacttggtgcttctactgctcattccctctgctaaggaatcaccacatcccagagagggcgcctccccca

SEQ ID NO: 35970 - DNA, 1367 bp, Bovine  19866880598250
  misc_feature (1)..(1): n is a, c, g, or t
naacctgtttcttctgatttttcctgagcagagtggcttcactgcagacgcagtgtagcatatacttagcaagtggctgcgtttgtttcaaggagtccttaaacgagaggggattagcttgtgttggagatttgatgcattctgagcctcactcatttgtaaaaatgtgaatcttccgtggtatttcgtctttctggtttaatgctaactagaccatttaagttagttattttcccctggtttctaacagctgcacttgtagattcaggaatgctgcaaatgttgacttttaaaaatggacttatcttcatactttatttctaaatggagacattttgatatccaaatctagtataaatatgactcagtttgatttcttcgaaagaatctgatttaaaacttttggcaagtttgggtaaataatatgtttaaaaactcagtggtgtgctctccatagtctttttatctggaaattcccagtctcaaaaaacaatttcagtttgtaagcttacatccaagtacacagttggggtgatatgctttgctggaacatgttggtcatggtgtccgaaagtcagtggtgaaagcttgtcatcaaaaggcaatttcctttttctttcttgtgagatgtgttttatgagccaggatgatggttaaaaaaaaaaaaaaaaaaagaaaagcatttaaaatcagcctctgaaaagtgtggaaaaaacatggtttgggacgaggaaaggaggagacagttaaacatggatgagggaatcattcatttatgtactagtgggttttggcatctgtacattgagagcaaaaatggatctgagagggactgacttgcgatggcagttgttagcaatgtagtcatttaactcgataatcattacctctggggagctgttagcagtacagtcaaatttgactttctctcctggattgcttgatttgtttcctaataaaagaacaattaatgtgcaaacctggcttggattctgtttcagcaactatcgcaagcatgttcgtagcgaaagcagaccaccgtcttgggttgcagcccgctgcctttctcctctccttttcttcttgcctagccccagcacggctcctgcagactgcagattgccgactgagacggcgtcctctgtagtagtgtgactgtcgcctttcagagccacggccacaggacattacagcatcattcttttgaacacgggatactcccatgacactctggcagcgtgttgctgtggaaacaagagcagtgccatataggtgggtgggtccctgatacatatttatttatggtgatgaagagatggtagaatctcaggcaactatggtgtggggggggaagttaactcaggagg

SEQ ID NO: 35971 - DNA, 1250 bp, Bovine  19866880628045
  misc_feature (1)..(1): n is a, c, g, or t
ncctaaaggaaatcgcccctgaatattcattggaaggactgatgctgaagctgaagctccaatactttggccacctgatgccaaggactgactcattggaaaagaccctgatgctgggaaaaattgaaggcaggaggaaaagggaatgacagaggatgagatggttgcatggcatcaccgattcgatggacatgagtttgagcaagctccaggagttggtgatggacagggaagcttggcatattgcagtccatggggttgcaaagagttggacaccactgagagactgaacaacgatgagaagggtgacagggaatcattactctgcctaccacacctttatagaatgatgttggctttctgacccaatagattgcagagctaagtttttctaaaaaccttagtttctcaacagagttcagaggttcttttatagtttttagataaactatccttctgctgctatatgtatgcatttatgaagatctgtttatttgcagtggtagctactctaaatatatggtaacttggacatttttgatggctattatgaattccatgccagaattatgtgtcattagctattctctttacagttcatctagtctgcaagacagaggctggtaagtgttaacagaagactaaaggaccacaagggcaggctttgagataaattatttagtccaaccatcttacttgatccatcacaaaatttgagaattgcaggaaaacttctcctccaagcaccctgatgatctccaagcttgattgaaaggctctgagtgaagggaactcactacctgtcacagcaaattaccccaaggttgaatatttcaatgcctggaatgcttttattttcctgcagtggaaacatgccttcctttagtttacacccacaggctctggttctgtcctcttgggcacaccagttatccttctggagggaggtaaaggcagagatcggatcccttcttctttttattaatttatttattggctgtgctgggtctttgttgctgtgctgggctttctctacttgtggcaagtgggtctattctctagttgctgtgtgtgggcttctcattgcagtggcttcttgttgtgaacacagcctctgggtatgcaagctcagtagctgtggcacatggacttagctgccccatggcatgtgaaatcttcccaaaccagggatggaactcatgttctctgctttagcaggcagattcttaaccacggaccaccagggaagt

SEQ ID NO: 35972 - DNA, 3432 bp, Bovine  19866880665996
  misc_feature (1)..(1): n is a, c, g, or t
nctgctgggtttcccaaattggtgacatattgagtacagcactttaacagcataattttttaggatttttaaatagctctgctggaattccatcacctccactaacttcattggcatcagtgcttcctaaagcccacttgacttcacactccagaatgtctggctctgggtgagtgaccacaccatcgtgataatccatgtcatagctactttaaaaatgctctggctaattcttatatagtaatggtaattaacctagatttaacccataacccacaagcaaaaacatattcacaaaaagtcttatgcaaaactgttcagggaattctctggcactccagtggctaagactctgtgcttttttattgcagtgatccaggtttaattcagtctctggttaggaactaagactgtgcaagccatgcagcatggccaagaaaaaaatgtttatagcatctttattcataacaaaaaactggatacatttcagttggactgtgccaaaatcatacaatggaatttactcaacagtgaatggctaatatacaacgtactgttgttcagtcactaaggcatgtccgactctttgtaaccccatggactgcagcacaccaggctttcctttccttcactatctcctagagtttgctcaaactcatgtccattgagtcggtgatgccatccaacaatctcatcctctgttgtcctgttctcctcctgccctcaatcattcccagcatcagagtcttttccaatgagtcagttcttcacatcaggtggccaaagtattggagcttccgcttcagcatcagtccttgcaataaatattcaaggtagatttcctttaggattgattgattggatctccttgcagtccaagggactctcaagagtcttctccagcaccaccgtttgaaaagtatctattctttgacactcagccttctttatgatctaactcttacatccatacatgactactggaaaaagccgtactactagaaataggtttgactgtgtggacctttgtcagcaaagtgacgtttttgctttttaatacactgtctaggtttgtccttgcttttcttccaaggagtaagcatcttttaatttcgtggctgcagtcactgttcgcagtgattctgaagccctagaaaataaaatctgtcactgtttcaactttttctccatctatttgccatgaagtgatgggactggatgccatggtcttagtttttttaatattgagttttaagctggcttttttgctctcctctttcaccctcatcaagaggctctttagttcttcactttctgctgtaagggtggtgtcatctgcatgtctgaggttattgatgtttctcctggaaatcttgattccagtttgtgcttcatccagcccagcgtttcgcgttatgtactctacatagaagttaaataaacagggtgacagtatacagccttgtcatactccttttccaattttgaaccagtctgttgttccatggccaactctaactgttgcttttcgcagcagccaggtagcatgatctggtattcccatgtttttaagaattttctacaggtgtttgttgtgatccacacagtcactggtggctcagagggtaaagaattcacctgcaatgcaggagacccagtttctatccctgggtcaggaagatcccctggagaagggaatggcaactcactccagtatccttgcctggagaatcctcatggacagaggagcctggtgggctagggtcacaaagagtcagacctgactgaatgaccagcactttcactttcatgcagtcaaaggctttagcatagtcagtgaagcagagtagatgtatttttgaaattcctttcttttttctgtgatccagtggatgttggtaatttgatttctgattcctctgccttttctaaatccagtttctacctctggaagttctcagttcacatactgttgaagtctagcttctctagggttaggcaaaaagggtctttgttttacaatgaagagggaacagggcttcccaggtagcactaatggtgaagaatgcacctgccagtgcaggagacataagagacgtggatttgatccctgggttgggaagatcccttggaggagggcgtggcaacccacttcagtattcttgcctggagagcccccagggacagaagagcctggcaggccacaatccttagagtctcaaaaagtggcacatgattgaagcaacttagcacacttgcaagagacaaggctggaaagaagcggtgtggggaagcagagtggaaaggtgacttggttggatagcacatcaaagaatgtttgcctttgggccagtggatacttaagacagttgtatgctgcctgaggctgacgatgggtcaaagttgaggtgcataaaggaagaaaagaagctgaaacaggtttaacaatcattttgttcccattcatcagtggggacaagcagttcagctaatcatttctgaggcaaagaataggaatttggagcatctatatttggctttgatgtgggtaaacactggagtacatccatgaatcttatcagaatcatctgaggaagtatggttctctgcactaagcagtttcctagacgaaggagtcagggatttctttaaccgatgctgttttccagtatcacaggatccagtaaagcgcagcactgtcacagtttgtaattatacatccaattgtatgactgtctgacttgtgtgtgtctcactcatgaaatgatgttacaggaaaacacaggctgagtctgttttttgctggacaccatggaaaactcagagctgggcatcgtgaatactaacttgtagtcattagtagacaaaggaaagaataagcaaatggattcacaatagtcaatagaaagtttatttctctttttcacatccattaaatgaaggatttatacagctacttcctattctgaaatatttcagttatgagaaaacagttgttttcacaaacacatagttcagggatagaactgatttaacaaagcttttagttgttgagggcaaggtgccttttcatttggtattttgtcttgtgcttgtgaagttctgttgaagtataattcatacaaaaaataattgcagaagagaaatttgaatttgtgaaaagtgtaacattttagtttaattgcctttcttctccatcttcctgagaaagggaattacctctctcatcaattttgagattacacctgcacagtgtctaatgactctcgtgagtttttcttcccttagaatttcacctcacttccatccattctcctgttaagaaattagccaatccacactctgcttctcatatcctgccctaagaacttcagtgttcaatgcaataagcgatacaaacttgctctcattctcctaatgagctgccatttt

SEQ ID NO: 35973 - DNA, 2437 bp, Bovine  19866880738517
  misc_feature (1)..(1): n is a, c, g, or t
ntggacttctgaggaatggtgaacaagaatctccactctgtcccgtctccctcttctgtcctcttcctgctcctgaccagcaggggaggccctctcagctcacaccacaccaccacactcctcccaaaacagtaaaacagatttcccaaggcaagggacatcagcacctctgacttctcaggcactcgagaatgacgctagagacgaagtagacacgtgcaagctgatgcatccatctcttgtgtatcaaatgaaacacttctggagaaatgttctcctttgtaagccactggggtacccatcatctctccagccccttcagtgctagggtccccccaaaaaagacatcagggcacaccctctgatttggcctagcagctgagaaaacaaacagcacgtctttagaaacacaactgctgggggcattgggctgcaggaaagctctataaccaagggtggctgagccccaccatctgagatccctttgaggactgaacgttgatctacagacatacaacgtgggtttatgggaacagtgctcaaaggcaggagggttatagctggtctatgggctgcagcagagaccagcagctacagcggaccaagatcagagggccaagttctgaactgttttgaaaagcaggtgctggggacttccctgtggtccagtctggttaagacttaaccttccaatgcagggggtgagggttcaatccctggtcagagagctaagatcctatatacctcacggccaaaacataaacaatactgtaacaaattcaatgaagactttaaaaatggtccacattaaaaagaaaaaatgggggattgacatgtacatactgccatatttaaaatgagtaaccaacaaggagctactgtatagtacaaggaactgttcaatgtcatgtgggagcacagatgggaggggagtttgggggaaaaaggatacatgtacacgcatgggtgagtcccttcactattcagctgaagctatcacagcactgttaattggctataccccaattaaaaaaaaaaaaaaaaacagggtttatatgtgattctaatcgtgtaagaaatagactcagatccatgaaacattttgcagtccatactacgtgccaatccctgggctaattgtttttacccatatgatctcattaaatcctcctcccatcaaaaagatgaataaataaaagcatttgatttaaaatcacagagactgactgctgaaatagaccagatagatcttggatttccaccatgaaatgcagaatgccttcctcatccactcatctgcatagttactttcttttggttctgtccttgagtctagttcaagggaccctaaactccagcgtgcataagaattactcaaccaaacacactttatcacgggggcctgaagggatttttccaagggtaatcttgacagtatgcaagtcccaatttatctgctgacttcaagacccaatcctcactgaggattcccgtccactgagttacaatttatgatcatcacagaaggggaagtgcagcatgcacaggtactggcagagcagtcagcattcagaaatgtcccaggtgatcaaaaacatgaacagaagctctcgggctgtctctgtcactagcaatttaaggatgaataaagtgagtgagttgagtcagagacagggaacaaaatgtaagtgaatggattaacaaattgtggtagatccttgccacggaagactactcagcatgaaatattaatacactcaatgagatggatgacactcacaaacaggagacttaagtgaaagtcaagcgcgaataactataccatatcactccttttagataaaactgtagaaacagaaaagctataggatcaaaacacagaaaagtggtttcctggggcaaggaattggggcacatgtcaggaggcaaagagggggacggcaggggaggagggcttcttgaggtgagggaatgactctgtatctcaatgggatggtggctatataattgtatacagtgaccaaaattcacagcagttcagttgctcagtcatgggcaactctttgcgaccccatggactgcagcacgccaggcttccctgtccatcaccaactcccagagcttactcaaactcatgtccatcaggtcagtgatgccatccaaccatctctgtcaccctcttctcctcctgccttcaatatttcccagcatcaggttcttttccctgatgtactatgatgtaaattcactatgatgtacactaaaaattttatagcctggaaactgtttcttaacgcatttttttttaaagaggagggggaaaaactcataatcctcccacatgaaaagattagagaacctgatcccaaacaaaatgatttaccagtatgggtcagaagctcatacaaagcagaatcagattcttcccttcggattt

SEQ ID NO: 35974 - DNA, 2205 bp, Bovine  19866880747137
  misc_feature (1)..(1): n is a, c, g, or t
ntctttgtttggaaaccgcttggttacctgcagtggcagaaggccccctggttgggactcctgaagtgtatccatgccgaccactcccttctatgacaatggccacacatggctgttacgcttccttcccaccgtctctgctctctcccaattcatcagaaggcactatccttgggttcctccaacagatccagagctagcttaatactgctctgacatccacccatccatccacccatcattttgaacccctattttgggtctgaccctatactaagagataggattcttggatttgacaagtgcctactctggagggatccccagtctctgcatgtccacccatgactctccattcagcctccctagtcaggcactttctcccagtatttttcagctagtgctgagtttgggatctctgacatccagccttcgaggaatagttaatgctctgtttgatgctggaccatcacattaagctcccatcccctgttaataggcaggtgaagatggagatgtcccatgagggagaggggctgtctaaggacaaagggcctggacagtgctcagcaaggagcccaccactccctggcctgagaatatgaatgttctccaggtcattacagcagtcaaacgcgtgtcttattctaagacgtatgtaatttctatctgggttgtccctgcccccacccttccaatcactgcagtggaaagaggggcagcttgcacaaagtacagatggttaatttattggcactgagcaagtcacctccccttctggatggcaggcacttcatctgtaaaatgggaggattgtaccagttgattttccaaggccattctttccacgtctgagcgcttattattctgtttaaatctgtttaccatcttatcataaattgaagagcaaatgtgtgtatgtacacaagcattcatatgggtcaatgtggcctgtgaaaaatctgactcttgattcctgctgaatatccattagatcactttaaaaagtaattccaggacttccgtgatggtccagtggttgagagtccacctgccaattcaagggacgtgggttcgattcctgatctggaaactaagatcccacatgccttggggcaactaagcccatgcaccacaaccactgagcccatgagctctagagcctgtgcgcagagaagccactgcagtgagagcctgtgcactgcaatgaagaggagcccctgatctctgcaaccagagaaaggccacgtgcagcaacaaagacacagtgcagccgaaaatcaatattttttaaaaaaaagtaattccagactctcattgttgagaaaaaatggcctctgcagtgagtgtggaggggaagtataccttcactgaccgacaacccatgtgctacacaggcatggaccaaagcctgggggaaagggcacatgaggatgcacgaatgggctggatacaggaatccggggcgatcatcaacagaaccctgtggtctactctgtggaaacgaacaaagtctcgagcatctgctcaaaggcaggctggattatcccagaacatctctggaaatgagagacagccccagtccctgggaaatgaggacggggaagccctgggcagaagaaaaatcaaatctccagctgggccagagctcagggggctcccgaggaaaacataaaatccctgccctcagtcatgagacagccacgcaagctgggtccagggtgtgtctagagaaagacagacttctttggggtgtacaggggagctgagaagcctgcggcacccaaggatggaacctgacctcgaaggaggtaacaccttctcatcacccccagatgtgccaagcctccatgtatcaccgggaactgtggacacccgcttgtttctcccacttctgataaggtcagctgccgcgctttataatgcaagaatataatattcctgctgccaaggcacactgatgtctaaaccaactacctttccctgccttatggagaaagcagctcagcaggggagaggcgagccaggctgcagttacaaggcttattaagacacctaatgaaacaccttgcggcggctgccccctctgaggacagctcagcaaaatgcatcaccaaagcagatgtcaggcttggggcaattgcttccaaagcactaaagtcaggcagggaggcactggggctcgcatcatcctcaccaggtatt

SEQ ID NO: 35975 - DNA, 2245 bp, Bovine  19866880842853
  misc_feature (1)..(1): n is a, c, g, or t
ncaaagtgaactcttgtataagcttgggtttccccatggtttacatatgaaaaaaaaaaaaaatgtatgtgaccaaactcaaacctgactgggtggtctattcctgtataaagatggttaggaagagctttgaaatcctgatatcacccaaagggccttttcagagctactaacagttaatggaagctatgggatgacaaatgtcaggtcaatataatagggaactttcttaaagcactgcccaaagatgggttgggttgtactaaggggtggtgagcaacctatcactggaatgcaagcagagaccagagagagggatgattgtagaaaggcatcaagcagtgggctatgcagttacagtaatgtatcagactggtgagcttctggtaggaaacacgctaagtttaagtgtttaagtgaaagtcttcagtcgttgtctgactctttgcgaccccatggactataccgtccatggaattctccaggccagaatactggagtgggttgccattcccttctccaggggatcttcccaacccagggattgaacccaggtttcctgcattgcaggcggattctttatcagctgatccaagtgaaccaaatgagatattccaggaaaaagttgcagctcattttaggaaagcagcattttaaacaacttgttgtcaaacccagttaagccaaattaattctttgtttttcttaaaccacctttcagtgttcagtcattgaaacagaggggcagttcagatcatccaaaagaactttagagtgagatctagttttgaatccaggccatttactatgtttgggaccttgtgcaagttacctgacttctttatgctttggtctctttatccatcaaatcatgatatagaaacctatcaatgtggttgtgaggaaaaaagtcatgttgggcatagtacttggtacataataggtgcacaataagttctcagtatgactataattaccacagcatctcaggagtagccacaaccagtaagagacactggagagaaaatcagtcgtgatgtgtataacaatagtggaaatctcatttaaggatgtctgtagactgacaacggagaaggcaatgacaacccactccagtgttcttgcctggaaagtcccaccgacggaggagcctggtaggctgcagtccatggggttgctaagagtcggacacaactgagcaacttcactttcacttttcactttcacgcattggagaaggaaatggcaacccactccagtattcttgcctggagaatcccagggacgggggaacctgttgggctgctgtctatggggtcgcacggagtcagacacaactgaagcgacttagcagcagcagcagcagcagcagtagaagctgcacagtgtcgttacacgtggcaaacccacgcactgtttaaggtgtgtgctctccatgcattgctgtgatgtttgttttccacaggaaatgagatgagagacaggagtttaattcttattgtagtggatgttacttcctaaaagaagttgaaaataaatcccgaatgggcttttcatcattatatcactgtttcttaagctttttccccctcattatcactctcctaaggagcctttttagattttcttttttcctattaatcccacttctccatgaaattaaatggaatcagaatttgagcttcagaggagccccaaactcttgtaatagctaagattattttgcccctcccaagaacaattttcgccctttgggaggcgataggttcctccgtggagggtgcaggatttgtataaagctttgtaaagaatgaagtgtccaggttgggatttcagagcgggggtggaaatcattcttccccatggctttatttagtatttgttttcattggaaaaaggctctcagtaagacttctgaaatttgccttttgctgtgccttacagcagcgtatgttttggggaaagagatttgtcccaaccatggtgcctttatcaagagtgctggtacctgctatacctacactccttgaacctcacagggacagttgtcacccatccagtgattttggaggaaggtggagcctggttggcagtggggggtggtgtctggatggtgagagccgtggggtcagatcctgtcccctgtattggctgctggacccagttccagggacaagaggacagtgctgaccagcaccggtgggaatgaggtatgtgcaagcctttggggatgcgggatttgtgg

SEQ ID NO: 35976 - DNA, 1842 bp, Bovine  19866880856231
  misc_feature (1)..(1): n is a, c, g, or t
nctttataaagatgccccaccccttggcgacctcaggggaccccctgcacgtaaggagagatgttcctagggaaggcgtggtgggcaggtgtacagtccatttcccaacatgggtccacaggacacatctattccagaaccactcagggtgttggttaattttgttgttcagttgctaagtcatatccaactctttgtgaccccaaggactgcaggcacaccaggcctccctgcccctcactgtctcctgaagtttgcccaagttcatgtctattgaattgcagtcggtaatgctatccaactgtctcatctctgccgccctcttcaccttttgccttcagtctttcccagcatcaggggcttgtcaattaattcgttaattttgcatggaactaaatccgaatccctagagactgaggctcaggtatttgactttttaacttggacactagtgactctcaggcatatgtaagtcggtgaatagttgatgtggcatcagaaacaagggaagctaagagcctccagggacaactctcagtgcgctgaggccaggtcagcaacatgcggacatcagcattgcgtctctgtacctacaggatgaacactgagcctggaacatgtatacacgatgtgctttgggcaggattctttttcttacaaatgacagacatctagctcaaacaagcttaagtgaaaagaggaatccagtggcctatttagctgagcaattcatgggcaccttcaggcaaagctggatccaggtactcaaatgccattctctctctcctccttccccatccatatctcagtttggggatagtcagagaaactggacaatgacagcttcatgtatagttctcatgacttaccagtcttcataaaataaaaaatgagaccttctccaccacccctgccaaactctagcaaagacactgattggctggattggggcacattccatttcctgaaataattcattcggcctgggaagtggtagggagggcagcactagaactgaccagcctgtcagtggacaaatgaccacccctccatactggggccagtcaccataactgacagccccctgaggatcagatggagtgggaaaagaaggttttctccaaaggatcttgggcagtcaagtaacatctattcacctcacctatgaaatgaaatattcatgaatgcttttaataagtggtttacaaacctgaccacttacccagggtctgctgctgctgctgcttagtcaccaagtcgtgtccgattctttgcaaccacatgggctgtagcccaccagtctcttctgtttaagggatttcccaggcaagaatactggagtgggttgctatttccttctccaggggatcttcccaatccagggatcaaacccatgtctcctacattggcaggcgggttcttttcctctgagccacctgggaagcccccctctccatcagatgttctatccaatcccccaccacagaccctgtgatttttacacaaccgttgccccttctctgtaccaaagctttttcaaccagtcagatactccacaggcaacccagtggaataaagacgagttccttcagtttcggaaacagtctgtttgagaaatattattttactgtactgtactacagagaaaaacatttcacccaaagtgttagccacacacttcagtccccagaatctccttcctcatgcctggaacctagcaggatgggggcagagccctcccaagtgcatcgagattgtcccatgggtgcccaggccagactgtgcacgcttatttaagccattatcatgtcagataaaatgttgataaatcattattttcta

SEQ ID NO: 35977 - DNA, 1369 bp, Bovine  19866880863784
  misc_feature (1)..(1): n is a, c, g, or t
ngaacagcagaaaactctttagacattactcttttgatcataatttaaaatatttgtggcatagggaatgctatgtatttatcaagtctttttacatttaaaaagatctcttcctgtgcatcccagaccacttcattcctgtcttctcttacggtccatcaggaccatgtgactggattgcagtcaactagatgggttctaaaccactttagaccatagaaaaccctagggatgtttcacactcattgtctcttctctttccaagctaacctcagaggccacaaggcaaaaggaccacttggaggagccacagaacccataataaaatgtcatttcaatgagaaatcacttttgtgtgtgtatattaagccactgagatttttttttctttcctgcccccaaaggtaagagtcaaattaaaacatccaaaactggggtggtattggaatttggagcaacaaaacttcttgttactcaggttatctcatacattgaaaaaaactagtagatgggaattccttggaagtccattggttagcacttggtacttccacagcaaggggcacgggttccatccctggtcgggaaactaagatcgtgcatgtcacatgacttggccaaaaagagtctaacaactagtagatgccaggcacattccccaatcaaggaagtcactgagatttcaggagtttgttattgtagtatacccgagacaagccagactcacataatattctgttaaaatcaacatgaatatattaatgagcagaattaaaaattcacatgaatttttaaagttaaaatgcaaaactttaaagaaacatcgtgcttgaggcaggctacactggctatgctccagacccccaagacccacacatgcattcacttgtgctattaggaagacttcagtggaattatcagagacgtaccctaaagtatttggcagagacagtctgtggaatgaaacaaaacccagttctattacttcctcactgactcactgagcaagtcactccccttctataagcctcagattacgtgatgggggaaccattgttattgggtaagttttaggtctcctggcctggaagaacagcaaaatttgtcatggagaagccaccagcccttttgcttagggaagcacctgaatggatttataaatgatgaggctgaccagacacagccgggttgagagaaatttaaatgcttttaaaaaagaagtaaaattgttcattaggacacataacaggaattttggagtccccagcaatctcttgagaagagtccttagaaaggacaaatgggtacttccctggagatccagtggttaaaaatccaccttgtaatgcaggggacacgggttcaaccc

SEQ ID NO: 35978 - DNA, 2061 bp, Bovine  19866880908844
  misc_feature (1)..(1): n is a, c, g, or t
nctttgctgggagaatgggggctctcctgtagattggagggtctttgacagcaactctgacctctactctctagatgctagtaggaactcttcccttcccagttgtgacaaccaagaaagtctccagatattataagagccctggaggggacaaaaccacccctgggtgagaaccatgctctctgaccttgttgatggaataaccagtggacaccaggatctctgattcagggacatggacagggtggacagtagtctgtgatggggctgtggattgaaagtgcctgtttatggtccaggattgaccatctggacacacaggcccatgggaagaccttggcccccaatttaagggctaaccctggcatcctgccatctgtgtggtaccctctctctcctgggtaccttctcggttcctccatgaccttcaggaggtcacatgtatacatatgaatgcatatatatgggagatgttggaaatgagcatctccttccaacaagtgtccaactctctgctcagggtagtactgcagggtttgagtaattggggaaaggagatgtaagagagcgggataatccagcgaggagaggaacaccagtgtgctcgcctttgcactcgtcacatgcagtgaaatggtacatgtaacccactgagcatagtgcctggcatgtggaaaatgcttaataaatgcaggtgattattaccgttattattaatactatttacaactgtgactcttttttgtaaaataaataaataactagtttcctgaaaacactcctccaggcttcctgctccattaatattcaacttatttaaatttaattttttcaaggttctctatttaattttttaaaaacctagtgaattattagcattttaatgaataatgacatttaataaataataacactagtgagggctcaaaatacagggaatttgaattaacaccttacctgtgttttctccgaaaagaaagaaaaaaatgcctacaagaaactctacactgtgaccaaatggtctctgtaatttgagcttctgaattttttttaaagtagtgttgtgtgtggaatgatggccttgcaacattctcagttcttcctattttacaggggagaagtgcctaactagagttaattttatttagaaataacagagcatggtggcttaggtggtaaagaatctgcctgcaacgcagaagacccgggttcgatccctgagttggaaagatcctctggagaaagggagtggctacccactccagtattcttgcctgggaaattccatggacagaggagcctggtgggctatagtccatggagtctgaaaagagttagaaatgacttcgtgactaaacaagagaagaggtggaataagaggaatttatactgattctccctgtaatcccagtattacatcattatggatgcctaagaacagtatagaagaaatatgcaaagaaatataccaagtccttcaaagtagtggatatttgatataaataagataattaaataaacattttttatatcttgaagttagatccctttagaaaatagttttaaaataaacaatattgttttcttctctcagaaattcttttgagttcaatagaacttattaaaatttggagtaaacttttcacatattgtacaaaaggatggtaaaattggaaaaatattctgtttatattttctagacatgataaagggactgaaaaattttgtctttttcccccaacctttcaaagagcactaaatatctaaatatatgtggttattattttatatgagtatttctgttaatttgtaaatgagaaggtgacatttttagagataatatttgtcaacacaagttgatgaaattcaaaccctggaaatactatagataaatgccttcattttaaaattagattattgagttttgtattggtttacagaagcagtgacagattttattttcttgggctccaaatcactatggatggtgactgcagccatacaattaaaagatgcttgcctcttggaagaaagctatgacaaacatagacagcatattaa

SEQ ID NO: 35979 - DNA, 1255 bp, Bovine  19866880921003
  misc_feature (1)..(1): n is a, c, g, or t
ntttttatatttagttcttataaattcctaaaaacaaagttaaattttcttatctcttatcttcaccatacaccctcaaaagtgaatgagaaatttagaaagagctattcctctcacccaaattgaacatgggttagattgtgtttagattatgtgctagattctgttctttttccccccttccttttggcagggtggggtaccatgtaaaaaccaagtaatacatgatccaccttgcccagctcattcaattttgtaatataggtcatgacagaaatataatgtcctctttcatttgctgtctctgatggaagcattctaggggaagctttttctcccagccccatttgcctttgtccttggggtcaggccccttactggatgttgggacagacctgctgcagttcataggaaagggagttactggcctgtcatcgttggtccaggcgtagcatcattgtacagttgagggttctgagcagaccttttccaccctcagcttccagaggtgaccatgaagattactcctctcagttatggtgatgccgtgtaaattttcaataaatatgctttatctggaatttctctcaactgggcagcctgctgtgagtatggaaaagagagatttgatacaggagggcaattaaccttgttcagtggacttcaaattcagttttcttaaacggttagaagcttctttgcactcaatcattggctttctgcatccagcccccacctcaggatacatcaggccttagcagctatatttatttactactcaagacagagttctgtccattgaaagaatatcatgtattctaagaataattaagtattagtgttacttttaccttttaatcagtttaagtagttatctttaattatctggttcttgaccacaagcttccccccatcattccatatcatggagcacctgcaatgtttagaggcaaatacaaggatgaatcggaacctttgtccttgagaacaggagacagagaattacagcctaagggccatatcccacagccctagagccatatcgacttacccacctaaagttttattggaaaacaccccttcatctgtgtattttctatcttccttatcacagtggcagagacaagcagttgccacagagaccatcaggtccaccaactttaaaatacctgctgtctggtcctttacagacacagttttctgacacctgatgtagaagtcaaggtctaggcagagagagaacccagtccccaga

SEQ ID NO: 35980 - DNA, 1016 bp, Bovine  19866880932832
  misc_feature (1)..(1): n is a, c, g, or t
ntgctgtctgaaatcatgaaaatacagaagccaccctaaaataccataaagacgagattataggatttattttatatctacatgggatatcatatatatgtttttaaaaagagcacaagtgatcaaatatatttaaataaaacagagagctacaatgtattaagtggaaaaggtaggctaaagatcacatctgtctatacctatatttatatttattcctaagtgtgtacatgaacgtaacattctgaaagaacatgcacacaggtgttaataaaaggtatctccaggtatgtgagtagtaggtgatctttgtgttacatatgatcttcatctcataaaactgtctgaaatagctatgcattctttgtataacaaaaaacaatagagctgttttttcaatgctgtggtatctgttagtaaaaagagctgtgtacaaaacagtgtatacccaagggcatttcaagttctgtaaaatataaatgtgaaggagaaaacttgttaggaaagacacaatattttaatagaagctagatagagactgagatgagggacatcttcaggttctatttcagctctgcttttttgcattttcaatataacacaaacgttattttcatagtctttttatttttttctaaatcaattcctggtatgtcttttaatgtaggaaaagaattgcaagcagggaaaagaatgaaccaaaaggccctctcgcgtctcctctggtccccagccctgcagcacagaacacagaattcctccagtggtttgaccctgtctcctccacaaggcggagagtgcagtgatggctctgtcccatctcattcacctctgtatctctagtgcccatcacagcacctgccacacagagggtactccattgttgccacagaaatgaatgaagaaaatcctggcaggccatgggagccatccaagcctatagagtgtagctatgtgttacagagatcattttactagcagtggtgggaggatggactctcaggaggaaagcaggg

SEQ ID NO: 35981 - DNA, 1684 bp, Bovine  19866880963613
  misc_feature (1)..(1): n is a, c, g, or t
ntttggtttggcttctgccctcctgaaatgcttaaacttgcatttactgtgagccggaccacagctaaaaaccttatgtgcgtccaccctacaattttcttattatttcccattaacaggtgaggaaacagaagcacaaggaattcagtgattcaggatgcctactggcttcaggtttcttctcagcatttcctttcaaaatcactgttatcatatctcccaaccatggacaaaaaataatgaaatgagcagagaactccaagcctaatcatctcaaaacccttttcattttacagacatttcagtagggctttgctggtaaacaaaaataaataagttcagcttacccagaagtcagatgccctgtaataagttctgggcaaggctctccccagagcaggagaatgtggcattatagtttaggttgagtttatttctttaagccttatgctccccaaatttctcaggcactacctacctcaggaaaactgagatatgataacaaagactgtatagcccccccaaaagcccccagattaacaaagctccccagggcttggctgggggtcagggcttctgctttcagagaacaaactaattcttgtttcccaagggaagaacattaaagacccatggatgttttaaaatataaatgtatggaattgtgcaatctctcaataatcaggtttctcttctctgacaggtttccaaaacatcaagaatagacaaatgttaaatatttccttactgctaactacatttccccccctcctcctttttctcctcctgtaacttctaacatgaatttattttctatttgaaagccaatctcactggttattagatattctccctgctgtcaccatcagtaaattattaaacagctgaccaagctttgttttaaaatgattctcttatgaagctcagtgacatatttgccatgaatactgaatggtgccgcggtctctaaggacacgtgagtgattcctatttactacctttagcaaaatgtgtgtgcaattagcagcaagaacttgacttgaatcagttaccagagatgcctgtggctggttcacgtggccctctcttgacacctcaccttcctgaccggagaagcaggttccgcttctagaccgcatcgcgaaacagcgcatagaaactgccttttgtcatttctcacctccttgcttgtcttgccacccctgagccttgacgtacctgcagggaatctcttccttattgaaaggagcagctggctctgagtgaatttccctgagaagaaaataaacctgatggagatgacattgcttaaactgatcatatctccacttcctcatcttcaaaacagacatcatggtccctacttcttagattctataatgaaaccaaagcactgaacacagtgccttgtagagacagagtaagcgcttggcagctgctagctactttttttccattgatgcccacgtaagtccagactctctaggttgtaagtgacccatctcaaacgcatgtaagcccaagagggcacatgttgacttactgtttgtcttagtggttgatcagttgagatccaatcagggaaacagaaactgcttaaagtactcacaacagaagaaatttaattctggaaattgtctataaaggtgatgaggtaactgagatcccagaaagggacgggaag

SEQ ID NO: 35982 - DNA, 553 bp, Bovine  19866880977217
  misc_feature (1)..(1): n is a, c, g, or t
ntgggagtacaagaaagttctcttttggttcaatctatccgcttcaaaaaggacaacttcataaagtgaactgaagctcaagagttaaacagggagattcctacacaacttttattaaccccagatggtccaaggaggctttcaaaataaatacggttggcgttccctccacccctgaatgttggggttttggagacaactcatttatgacacacatgtttctcctgctttaattaaactccttttctcgtcaagggaagggaagataatcccaatctaacgtctcatccatgttgaactctgctgtctctcttctgtttccaaatgaatttggcttattaaaaaagtaatgagctattaattaactctacactcacataaagctgtttaattctcaatctaattagcagcaatctgttgaagggttctaacgattattttaaatttgctaacagagacatcttttcacttttcataagttatttatagaggaactcacattggatcctgcttgctttttaattttggtaacatatttattaaatgcaccact

SEQ ID NO: 35983 - DNA, 1300 bp, Bovine  19866880996944
  misc_feature (1)..(1): n is a, c, g, or t
ntaattatctagcccagggatcagaggccaaagagggatgaactgtatggaaacggttaccatgacggaggtagggagggattcagctgccttcatacaaaaagctgctctctgtgaccttggagttacatgtttgtgccctgcagtactcacagaggtcagaccactggactgggcattaggtgaccgggtttccaggcctgtctccaccactggcccactgcatccttggtcaatttcctttactttatcaggaccctgtaaaattagtcaagggaaagatagagggaaccccatagctaggctgtgaaactgccaagaattgatatcctagaggactcctttttagactttggaatttttcctgggacaatgaagatccagggaaaatttatgagcatggaagggctttcatcatatttgggtttgtgaaaacagttagacacctgtgtgtgaagtgtggggagagacgggttgtgggcagtgggtggatgggtgtgtccctaaattcatgtctgctttaggatggaaaaaagtagcccccattcactgagcatttattgaacacctcatgtatacctggcccttgtggggtactgtagagacacaggagtttgccagggcaaggacaccttacgcagatgatagctcacagatgaatggatttggatgatgacataagcaaagaccttgttcacgtttgctcacgtggtgagtcatgtcctaagcctctggataagccgtctctacagacccaggatgagaccatctccccaggcctgtgccctgggcacgtcacagagtaattgcctcacctacatcatagctcccaacactcactgccagcttttgtccaggcttaagtcttggagatcccatcatgtttcccacttgagaaattcccagtcaatgtagaatcatcaatggagagcttttaacagtctcttggtatttcctccaacaacccacagtgtattcctcttggctgcctcctagagcacagtggttaagagcatgagcccaggaactggaccatcaatgagtcggaagccctgctccactgctctcttggctgtgtgaccttggacaagtcacataacctctctgggcctcagtttccctatatgtaaaagaaacttcttattataaaagttaaagtgaaatatctacacatagtagatgtaagctacatgatagataaatggctatgttagtttatgtggtttaattctgttctataggattcagctaccctgtgtctaaaatgagatataatcgttatgcctttatgcaaaaaaca

SEQ ID NO: 35984 - DNA, 1185 bp, Bovine  19866881019817
  misc_feature (1)..(1): n is a, c, g, or t
nagttctgactattgattcttttttttaatttgaaggttaagcagaaaatccatttaaagttaacccagactatttatacttaggatggtatatgaactaaacacaatgaaattgagcccaaaggaatatccccaagaagaaagaagtcagtaatgtgacccataattgccttttatgattggtagtgtatgtgcctggatctctgcacccaccccaatgcatttaataaaagccattggcagcttaggcagctaaaggcctctagcaaacagttaagagccatcccactgttttgagctgtcttagactctgaactccctgaggacagagtcttttgcatttcactttagtgtctggctggtacacccagaagtttgaagcaggggtgagcatgcatccttcattagatgtggctaagaatgtaatgatattctatgttatgggaattttactgtgattgcaccatctcattgtggcttctcctttgtctttggacgtggggtatctttatttggtgggttccagcatccacctgtcgatggttgttcagaggcttgttggaggagaagatgagtacacgtccttctaccccgctgttttggaagtcatggggaatttaggattcagaatgggcagtgggataccgtataatgtgacaagagcattaaacttaattctggccacatattttcaagataccagatgaaagatattacctaggagactgctggccctctggggataagccatgaaccttgtcatatgaatgggatgctgaccaagatgtttgcttgcacgttagagagactctggtccctgagattgttcaaacacttctgtacgtggtgggaaattagggtggctcttcacattttcatggcattttgtagtaatgataaaagaaatgtgtttcattatttttattttgggagatacctaaaaacactgaaataaagtacaaatcacccataaccccaccacttggagataactactctaaattttggtgtaactcttccagtggcttgtttttgttttctaatgcagatatacacatctctttgcataaaattaagccaacatgtacgtgttctctaactgatttctttatttagccatgtataatgaacattcctttgggctccaaaatcactgcagatggtgattgcagccatgaaattaaa

SEQ ID NO: 35985 - DNA, 842 bp, Bovine  19866881107394
  misc_feature (1)..(1): n is a, c, g, or t
ncaccctttgttccaagtttccaggtgccacccgccagcctgtgctgtccatggggtgagcctccccactcggtcaaagcaccctttgttccaagtttccaggtgggacccgccagcctgtgctgtccatggggtgagcctccccactcggtcaaagcaccctttgctccaagtttccaggtgggacccgccagcctgtgctgtccatggggtgagcctccccactcggtcaaagcaccctttgctccaagtttccaggtgggacccgccagcctgtgctgtccatggggtgagcctccccactcggtcaaagcaccctttgttctgttggtttacttgaaaatgccactcagtggcttcaagcgagaaggaggaggcagccacgtcttcagcctgttctcagacatcgatcacctgccggctaaggagacgtgactgtcgcctccccaaccggacaagatgatttttctccaccacaatacgagccccgtgagccatacaatcatggtgaattccctatcagctcaacatcctatgcaatttttcagagaatatgattctatctgaaaataagtgcaacagtctggaactcatttctcccctgtgcctaactttcagtttcctataaataccacacagctttccaggcaaagacacacctcagcattatccaacaagcatcagtcatgcctctgccttgagcagtgtctgaaggcattgagaattcaccgtcttattaaggcatcactaatgctgtttgctgggcctgaaattgtgtcaaatatcaccgtcaagaatgtttcaagctaaagtgtgtatgtgttgtgtgtgtgtgtgggggg

SEQ ID NO: 35986 - DNA, 1317 bp, Bovine  19866881149458
  misc_feature (1)..(1): n is a, c, g, or t
ntgccaagcacagggcctcacacaggaagtttgaatagaaaccattgtttcttctatctcgttaccagccacatttaggttaaaggcaactgacaaaggaacgagcctgtgaaacaattcgggtcatggctaaaaatataaaattgatatgatcctcaggaacagccctaaatagatgaggtgtcaagtcgccctcctcccaatccccgctccccactcgggcgcgtcctaatccttctcccggacaaaccgcagcaagaccagcatcgcagactctgctccatgagcctggccgctgggtgacaggatctgggaaggcacttacttaagtcacaagaaatttcttgacacggtgctccaccctctctaaactgctgtttggggtttcccagagaatgaggcccgaccaaacaaaacacaaatttcctgtcaatgggaccaccagcccgagaagccctcggaagtcaccttgcccttcgggcccatgctccacaggccgcaactcctggggcccctccaaagcatgcagccccctccctgtccctcccacccagactcagcatcccccacagagaagccccctggcaggggctttgtggtataaaaggatctgacacagcttaggcaacaggcagacaccggcgcctcatcgacacagcggatattttctcagttaaaaaaatgtgttctcacttaagaatgctaatggcccatgcacagaaataaaatccctgacctactttgaagctgaacttattaaacaagccgaccttattactcagaagagactgtaaaacagtagaataaagcccaagtggaattccttgcatccttccttgacaggcactgccaagaaaagtacagaggagagtgggagccctgggcttggaggcaggagccagggttcacgtccagctctcgctgggtctcactgtgtgacctgagagctatcactgtcctctctggtccttagcacctgcatccaggggcctggaaggaggtgctctcagtggtcattttcagctgtgatagctggtgcttctatttttttttttttaagaatttcatgttaaaattaaaaaattaaaaataagttaccaagagcatatcatgatagacaccataagacagggcgaagacacacactgtgcctctaaggagcctggagcctagcagagcaagtgtgggaggtccatactgattaatggatttatctcctagcagcaatctgaaagcctccacgaggctacagcagacaaaacacaacttgtgtctgcaacgagaatccccgctggcaatccacctgacaactttggt

SEQ ID NO: 35987 - DNA, 2139 bp, Bovine  19866881177336
  misc_feature (1)..(1): n is a, c, g, or t
nctctcattttcctattacattattccagtggcttcaactctctgtttgcaaatgctaaccctaccagcaacaaaagcatcttctacaaattgctttgtaagtcatcaagcatgcgttatgattatctagatactcataaaatcctagtgcaattcacatggcagacaccagcttccccattttacagatgaggaaacgaagcctgggcaagtacaccagttcagatgagaagtggtggtttagactagaatgtaagacttgcagttctcaggcctaggccctcggtgttatcttcctcatgtagtctgtgataagagttcactgtgggtgctcccctcagaactacagaacttctcgactttctccagcacgtagcacggggccttggaaactcaataaatcattgcttgagttaatgaataaataaacgccctttccatcatggctttagctttctcatctgaaaatgagcatgtttaggtgcaatgattcccaaggacccctcaggacccctctttcctgtagctacagattcccagcctccagacaagctgctggggtaaggcctgtgccaggtagatcacaaggacagacagagagcatcagctgcactggttgtgaataaaaagaacaacaatgaaaaatgaatggagaccatttagggaaagaataataaaaccccacttttcgtgaggctagaaataatacagggctccatgacttgctaccgactctacttcttgatgtctttgccaccccgatgtcgttcattcccactttgcaggcagttcttttcttgtgcagaaatgtaatttagtgggtggcttttcccatgactctgtgtcgctaacacatccatttccttctctgcttttaaagtttatgttcctttgccgaacaataggctgcgcattaccactgcctccaaaaccctacgcagcagagaaactcctctaaaagctcctgtaggtcttgagacagagagacagacagacagacatggggggagcagtttccagagccctacatgatattcgatgtccttaaagatcccaaggggaattcagccaagtgcacgtgagctacaagatgagagcggtaactagagtagtaaacacttactatgcagcaccaagctgtgccggatgcttgttcaaagggctttccaacattctctttcatttaaatttcatgacaactctgtaagaaatgtacgattatgtccattgtacagatggaagaaccaaggcacaggagggttaagacatttggcaggtcacacagaaaagtgtagagccaggcttggccccccatgctgtgtggtcccacatatatttcccactttgctattcatcttttctgctaaaatgacttatgacccactggacagccagcattcctggctaccccctaagcaacaccaaatagtagatggacaaagagcaaggagatttatagtcagttccaacctgtcaccattccaggctattccaagattactgatgcaattgtgggcagattgaataacctcgttaagacttaacttctttatgtgaaaaattaaaatggtacacagttccaggtaccttggcaaatgtttaagacttaagagataacaaatgtcctgtatgttccaaatctggaaagtcccaaggcagagctggggacagagcatcccttcattcagttattcatttacccaccaactgtttattgagaagtgaccacctgccatgaacagcacggggtgctggagaaattctcactgtcatggagcttactgtttagcgatgagagacagtaacagtaggaagcggggagggagaggatcctttagactggcctgagaaatatctgagctgagaccaaaatgaggagcattggtctgccaagagagtggagagaacattgcagaaagggaaaagaacaaatgcaaaccagcagaaaaaccttgaagagtgccagggaaagaagtggagccagtgcagctggagcactatgcctggcagggaggagacgggggtgagtttttgagagggaagcaggggttcgatcaggccggcctttcaggccacagtcagagtttgaatgccatcctatgtgcaacaggcactcttacaggattttaagcaggggtg

SEQ ID NO: 35988 - DNA, 1245 bp, Bovine  19866881199586
  misc_feature (1)..(1): n is a, c, g, or t
nattgacgttttcaattgaggtgctggagaagactcttgggagtcccttggactgcaaggagatcaaaccagccaatcctaaagaatatcaactctgaatattcactggaaggactggtgctgcagctaatgctccagtactctggtcacatgatatgaagagctgactcactggaaaagaccccgatgctgggaaagattgagggcaagaggagaaggggagacagaggataagacggttggatggcatcactggctcaacggacatgagtttgagcaaactcagggagatagtgaaggacagggaagcctggtgtgctgcagttcatagggtcacagagtctgacatgacttgccaattgaacaactagcagtgaagaaacagaagcactgacttcagtccatgggacaggaagatacccaaacaagcaattccaatcccatgtggcaagtgccaagatggtagccaagaggactttgaggccctgaagagcctgcaaaagacacagaaaggaagtgacatctgaatagatttgctttttcacgtcctttgaatctttcatcaaactgctttccaaaaagcctgtacccatttgagtatgtaagactattttctaacatgaatgccaatgctgagcattatgtcatttttattatatcttgcctagtttgacaagtggaaatggtactttatcttaatcagtatgcctgatggctaataaggctggtaatatttcacacactcactgggtgtttccagttctacttttgtggaaattcatctctcctccaagcttgctcggacccccatgccatcttattactcccagtacacggtgccgaggccatatgtatattgaagactgcaaatcaggagtagggctgggtctattttatccctgtatgtgcagcagaaagcactgcccagcttataggagatgctctgacagcatgtgccaaatgaacaacacagcaggctcttgagcccttgtttcttcttcactggggtgtcagcagcagccatatcagaaccacaaaaaaatggtgctgctttcccaaagacagtcctgccaacattattaacagcaactgggcacaaacaaggagaaaaacagaaatagagcaaggccatagttcaccccattgtacgtgatcatctggcaggggagcgtttgtaaaattcaaagagaattgtcttcagaaaatacattttgcttaagcgattattccagggtacctgcaaaa

SEQ ID NO: 35989 - DNA, 908 bp, Bovine  19866881231785
  misc_feature (1)..(1): n is a, c, g, or t
nacatgggctttggcagttgcaccacgtgggctctagagcacaggggctcagtagttgtggtgcatgggcttagctgctccacagcatgtggaatcttcctggaccagggatcgaacttatgtcccctgcattggcaggcaggttcttaaccactgggccaccagagaagtccccccaaactgcttttaacccagagcatcattatggaaaacaagcctatgaatcacttgtgcgctcttcgtaagactgcggtggaaaatgttgttccctacatcacacgctgctttctttatgaggactcctgggaacaattcctgtctggcttctgtgtgaacaacagctagaatttctggagcaattggtttgtgtttatctcagggacaatgtgaacagtgtagctgccaagctttccttcttctgtcggtggccgtggtcctgtgggctctgcctgtgactcaccagaagcagcagacgtacagaaatgcagggcttttttgcatctgatcagctcccaagtgttattttcctcctgccttgtgttgcctcacttttaatttatgctatcttgttatgctttatgttctactgtaagccacctgaaaagcgttctgtgaaataaggtttggtttacaatgaaaagtagataaaaaagatgtagaagagttctaaaccttgtgtttctgtctattttcttcaaaagttgattacattctgcttgaacatccttccactgttagactcaaggtttggagcacacaacactcagaactgtagcaataacattcataaaataattggaaagcccaaatacagatgctgaatgtactatgactgtctcttcttattctcatgacccaactgaggcaacgccattgaaatgacagagcttcctgggagcctaatgcat

SEQ ID NO: 35990 - DNA, 1518 bp, Bovine  19866881238208
  misc_feature (1)..(1): n is a, c, g, or t
natttcatgggccccatccacgtgtgtgagtgctaagtctgaccctatagacagcagcctgccaggctcctctgcccgtgggattctccaggcaagaacacaggagtgggttgccatctcctccttcaggggatcttcctgacccagggatcgagcttgcgtctcttaattctcctgcattggcaagcaggttctttaccactagcatcaccaaaatattaagtgatgttcttctgtaatgaccgtactactgcctcagcaatcaaatctaaaagttcaggcaggacatggtttgatccatataataatttgtatatttacattaagccttgcaatcactgccaatttaattctcaattttagcctgtgaaaattaaaaggaaaaaaactgtctaaaaataggtccaaaaggcctaaaatattaagtactaaattttttactgagtatccatatgcaataaaactaacaaatttcagctaaattttattaagtaccctaacctactgtttcctattaactgggtcttgtggagctattgtttcctattaactgggtcttcctattaactagtatcttgtggatactagtgtgatcattttatagtcttacaaaaacacagtacttcaacttttagggtaaggtttgaaaaattttctgatgaatcttcctattaattcatttttcaccttctgactttcttaattttttaaacatttaagtcaagtgtgagacaataaatctctttactcaaagtcctttagagagtaaaatcctgacactgaactgacactgcccaaaataataaaaagaatgaaaagatgtgaacacactttaaaagtgatgtttgtatttttctccaagacccgaaatttcctataccacgggtcatttatttgaggttcctgtggctgagctcctaacatggttctgaaagatcttctattgctgggagtcaagaccttaggcgttccctccccttgagggtgagctgaacccagtgacttgacttgaacatggcaagaatgatggatgtcacttccgaaatgaggttgcaaagactgacttccagcttgctcttactctcccctaccccctcaacatctcactctggtgaaggcaggtaccatgctgtgatggagaagtccatgtagcaaggaacccagatggtctccctccagctcatgaggaactgaggccctcaagtccaacagccatgagtaactgaatcctcccaacaagcctgtgagtgatctcaggagcagacccttccccatttgagcccaggtgatgacagcctcagccactatcctgactgcagcctgggagagacccagagcacccagctgtgccactcagagtcctgattcagagaaacggtgagacaataaagtcactatgtctcgaggaataacccattacacagcgacagacaactcaccaagctgccttagggtgagactagatttccgtttttcttttagaaagttggtgcccaaaaaacacagacagtagcatca

SEQ ID NO: 35991 - DNA, 1469 bp, Bovine  19866881266024
  misc_feature (1)..(1): n is a, c, g, or t
nattatccttagaagcctgtagcctcctatggctgcaaggttcgtggatggagtgactgcagaagcatggtattgattgcaggaagtaactgaagtgagagttcacaacaccttctggaaggcaggcagcgcttggctctggtgcagtgctaatgagctccccagccagctccagttcgacctgcatcttcccagcaaaagaccgagggctggcgaggaagaagacaccagcgggtgtgggcgaggaggtgattcatgcagagcagttttgtgggctcataccagctcctctccccgagtcttttgcttcttttgccttttatctccacgaggcagagcaaagagccaggcttgcactgggaattcctccctgagtgtataaatgagccagtctcttggaagagagggaatcctctccttctagagggatgttaagcccaaggatttgcctctttccctccctctgtgatcctcaccaccttcctgtctttccagggctgcataatccacgtggaggtcagggtgtccatgtcacctggagctaaggtgtgtgtcgttgtttgaaagcagacgtgggtcagcatgttgagtgggcacctctacctctacttcaggttgcatcattgtgtgtttatgctgagaagccttcccaagaggttggctttttttttcccctttcttcaaaatgtatggcaaaaaaaatcacagtgttaaaaattcattatcctccaaataaataagtaaaaatgtaaaacttattattaacttttgtacaattttaaatgctgtgttagtcactcagtcatgtctgactctttgcaaccacgtggactctggcctgccaggctcctctgtccatggaattctacagcaggaatactggagtgggttgccatgccctcctccaggagatcttcccaacccagggatcgaacccgggtctcccgcactgcaggcagattctttactgactgagtaatgagggaagcccaatatatctacaaatagaaatatgcataatatagacaaatataaacatgtgtaaatgcacagacacagatgcaccagtggatacacatatacacatctgtgtgcctgcacgtgcacacacgtgaaggcacgcaaaattggatacacccatgcatgcacacacacatgtgcccacagacagatgcacccacgggcacactgttaaattaacgaaacaacgaggctctaaacaagacttcaggtcagttcagttcagttcagtagctcagtcgtgtccgactctttgcgaccccatgaatcgcagcacgccaggcctccctgtccatcacaaactcccggagttcacccagactcacgtccatcgagtcagtgacgccatccagccatctcatcctctgtcgtccccttctcctcctgcccccaatccctcccagcatcagtcttttccaagagtcagctcttcgcagatgggccaaagt

SEQ ID NO: 35992 - DNA, 1050 bp, Bovine  19866881364032
  misc_feature (1)..(1): n is a, c, g, or t
naatagagaaaggcaggaatacttcagcaaaccaaagaacacagcacctatctaaaggaatctggaagcaatttttaaagaacacgatgtactcagaagaattcatgcccgtgcaatgagcagagcttatggtccatgaatttgccatctctaaaccaaatgacatccaaagtccctaaatgtgcgagaccatggagattaatactgaatgaaggcctccctacagacagaaagtgtctgcacgtaacttttcaggtgacagatgggcagacaaggtccgcacatcaccgtctaggtgacatcacgcttttcacaaatctcttctcagtctatcttctaacagtcccaggaggcaagttcttattatccccattttgcttttgagaaaactgaagcctggagaaggcagatgatttaacaaggtcacacaaggaggtcctgaaagagccagaaaccctggcaccattccctggtccagtgtgcactgctgggctggaggacacttctcaggctgagggacacccaaggctgccttgggtcggcagagcccagagctgcaacacccatccatctcaagctggatggtgcatccagattcaggctttgaatccacaaaagaattctccttaacaccactttaaatcttccttttaacccttcaatttatttttttcaatgaaaacctatgctgcaaagccctgggagacccctgggggttgaaacagcacacaactagcaaaggaaggccatggtatttgcatgtaaaacagccttctatgctggtaaaagcaacagccgtggtctgatacacagggtatgcagtgttcgctagcatatgaagccacattttgagggaaaaaaaaatttttttgatgcccaaaagcatacctacaggagcaaacctagcaagaagaaccaaacttgtcctaaaccccatacaaacatctcaacgtctttgccagaatggcttaagcataaatgaaatagctttgaattacatccccaagatgaagaaaattgagctcacagaaaatagctaatgcgggcaaa

SEQ ID NO: 35993 - DNA, 3423 bp, Bovine  19866881444255
  misc_feature (1)..(1): n is a, c, g, or t
naagagaccttaaggtgattagttaaattacctagaacaagaagcagaacaaggaaaagtagccagtgtattgatatttgatcaatatctccttgaatacagtaaaatatgattatcgataattacagatataactattgttgttcagtcgccaagtcgtgtccaactctttgcgaccccacggactgcagtacaccgggtttccctgtccttcactgtctcctggagtttgctcaaattcatgtccatagagtccatgatgctatttaaccatctcatcctctgccaccctcttctccttttgccttcaatctttcccagcatcagggtccaaagaaggcgggaatggcaaaccactcccatattcttactgtgagaaccccaggaacatgaacagtacgaaaaagcggagatatgacttggtgggtgtctattttgtactattgctattgctaagtcacttcagtcgtgtccgactctgtgcaaccccatagatggcagcccaccaggcttccccgtccctgggattctccaggcaagaacactggagtgggttgccatttccttctccaatgcatgaaagtgaaaagtgaaagaagtcactcggtcgtgtccaaccctcagtgaccccatggactgcagccttccaggctccttcatccatgcgattttccaggcaagagtactggaggtggggtgccattgtcttctccgattttgtactaagagctatacatatattttttccctctaataaggatccaactagctatatctgtgcccactgaacagatgaggaacctgaggctcgaagcgaacatgtaatttccctgaagacacagagacctggggccaggtctgagattgaaacttgggatgctgacatccatacacaaaatctatactcttgaccctgcccaactaccttgatagaaagtcacaagggacttaaatccgaacatctgactctcagcatcagtactggatttctttgaagaactaatctgtacattgataataagttctgaaaccatggtaggttgttaaatggagttagaagacaaattttaaaaaaccatcaccaacaaaatttttatgagttagaaaattgtcatcaagaccacatctgcatatttgaggaaacctaagcccttgggataagctaaaataccttgaaatcaaagactttaggaaacccagaaacagacagcaaattagtgcatttatgagcagtggtctggaacaggtaggttgaggggccagattgtcaattgagtgaaacctcaattacagagtaatctaatgtatacccagatacattatcacaactcaataaacagctctttggaatgaagtaattccaatttgcttgcattttaatctgtgtgttgccctgaaaattttgtattgcctacactcaaatgaggtggtgttttctgaagcactgatgctcacagtcccaggacagtaaacgagccacaaaccagccataaacacacctgcctagggagagacagagacagaagtggagacagaggtccccgccctccacagcttggcccagcacaagcacctgccacagacagcatcagagggacctccggctcctggcaccctcgggagctgaggggtcctatgacctcccaacccctgcatggcctgagttccaaatgagtgatgccaggcggagtgggcccatgaggtccggaggccgagcacaagcaggaccagaaacttttcctttggtccagatccctggctcactggtggtggatagaggaggaatctggggagactgatgtggtgggaactccaggacccaaatgttcccaagcctacatgttgggccccatttaaaaaaaaaatgtaaaaaatgctggctgtgctgtgcagcaggtgggatcttatttccccgaccagggactgcatctgtgcccctgcagggtaagcacagagccctaaccactggaccaccagggaaatcctgtgacccccactttaatattccctcctgtatgttctgcacatgagggaagcacccatccccactctgcataggaagcctcaaaggatctctgcagggccacagatacgggaacaagattgtgacctggacaagtgtcctgccccatctacctcagttcggttcagttcagtcactcactggtgtcctattcttcatgaccccatgcactgtagcacgtcaggcttccctgtccatcaccaactcctggagcttgctcaaactcacgtccatcaagtcggtgatgccatccgaacatctcatcctctgtcacccccttctcttcctgccttcaatctttcccagcatcagggtctttaccaatgagtcagttcttcccatcaggtggccaaagtattggagcttcagcatcagtccttccaatgaatattcagggctgatttcctttaggatggactggttggatctccatccagtcccttggactctcaagagtcttctccagcaccacagttcaaaagcatcaattctttggtgctcagccttcttgatggtccaactctcacatccacacatgactactgggaaaactatagctttgactatacagatctctgtcagcaaagtgatgtctctgctttttaatacgctgtctaggtttgtcattgcttttcttccaaggagcaagtgtctttaatttcatggctgcagtcaccattcacagtgatttggggcttaccatccacagtgagcctaagaaaataaaatcagggatcgaacccaggtcccctgcattggaagtacagtcttagccactggaccatgagggaagtcctgtgtgtgtgtctgtgtgtgtgtatgcgtgtgtgtgtagggaagggttaaacccatttctggaatctggcagttggtatcccactccagacaggaagggaactcaggagcgtgatgcatgagttaaaaacaaaagttagcaataggtcaagggacccctgctatgagcccagcctgctgtctggatgtttttgacactgttcaggacacgatgctgccagatgctgacaaggccacaagcctcgggccctccaggtgaggcctaaatagcatgatccagcccctgggccaacccctgctctgcccctaaggacctgtctctgtgtctcaacctggctgtggatgttcctacagctgtaaaatgaattaaaataaaaccaaggtgcagagccacagtcaggactaaataagatcatgaatgtaaagggacttctacattcaaggggtctagtttctagctgacccccaagtgaatgtaaagagagaagaagtgcaacagggaagaaaaacaggcactaagaaaatgcgatattccattaaggattccaataaggtgcaacaaaacaggatccatcaccaggagcacaaacctaacttcacccacg

SEQ ID NO: 35994 - DNA, 1602 bp, Bovine  19866881606127
  misc_feature (1)..(1): n is a, c, g, or t
ncagagcatacggttcccccaaaggagtctctccaagtgtcctaatttcataacgaatgtttcctgggccatttttgtcattagaatagaatacaaatataatatatggcaggcatttttcctcattctctaattaaacattaatagcacttggagaggtattatcatgccgtttttaaaaatgaggaagaaactcagaggaggaagtcacttgtccactaataagctagtgagggcagacccaagctctgaacactggatgaagcctctggtctgtcccggctctacagtatcacctcacttgaatatcgtcagtagccttcgagaaaggaggctgctctccaacgcagagaatcctcactggatttgcagtcacaacgagtgggtttcagacctgcccttgcctctgttccttaataagtgttgctaatctctttgagcttctgctttctcatctgtaaaatgggaataaagtgtgactgcctcacagacttggaacaaggactaactggacaccatttatgaacatacctggcacagttgttggcacagagaaggtaaatgacttctaattggttctgatgttagaagtcaattctatagcatgcctatgttttcctgtatgtggctttggtgagcagtgaggtttgagcgtgttcattcatccctgcacggtccagtttaatatttttctcttgtctcatgcagtgtcatcccggttggactttgtctttttaaaggcatttattctattctttcacaatgatatatgtaaaacccactttccttatgaagtgtttattttttgcatatagaatcctttgtaatctaacaccatccagatataagagccatttagttgcatatgtaaaaggacctatttgaaaagtaaaggaataaagtggcctttatgtgcttgggggcctttctggggaggttcaccagagaaatggaagtacacacacttcctcaagaaattcagtgtccctggggtctctaaatcgtgttattttctcactgtacatgaggcctcattgcatttgctttatatcctagtcattctctgtcacagtggcagagatgaatattttcttcactgtagttgttttcctaagaagctaaaaatattggaaggaaattggttttttctcttctgccttatctttgcataactattctcggggatctcagagcagcgtaggagatgacctctttttttattgtcgctgtagcgccaagacagagacacaagcagcaggcaataaaagcaaccctggcctctgcgactgtctttggaactgacaagatgatggttgcactgaatccactggtcagttccaatttagtccaatccctgatttgacatggcctccacccctgcagcccagtgactgattgtttttcatgattgatggaggtgacagatttattttaaaactgaggctgatttttcaggaccctgatgagcttggggagatggacgggggtggggggtgtataggagggagaaagaatactcctttgttaatggtctctgtcagtgacttctgtgagagcctcaacagctcaggaagccctctgttaggaaagcaatggcaggga

SEQ ID NO: 35995 - DNA, 743 bp, Bovine  19866881953035
  misc_feature (1)..(1): n is a, c, g, or t
naatgaaaaatattgagaaatattgagaaaattgggtaggggacaggtcccctggggcccagaaagctgtggtaaggaaattatattgtattccaagtagagtaggaagtcattggaggatttttaagcaggggagaggcatcgaatttacaatttatttattcttacgatttaatttctttgcctctatggataaatatgtttcaacgtttttctcagatacacggtttggagaaactttgagttttgagactagttttcccacggggtggggacatgcttttccgaagactgaaaaatcctccgatgcttttaggtgctgcaattagtttccagacacacgttgactcttctttgaaatacttcctggcatgtactgctggtaaatttgaaggttaaatcttcggcttcctccaaaaggtgacagaggcacagagtaaaactaattaggaaaattcctgagtagttgattgcagccatttgttaagagttttgaaatgcaaataaaaatttgctcagctctttctctggaagggagacttgttcagcctggtgtttggttttagaattcatctgcctgtgaagggaaaagtgtgacctctctgcagagaggcagtgagcacagcttgaatctatatcctgctcttgtctcaagtctttctcttgagaacaaaagaaaaatgcattcagttctcccaatagtattatttatcatattctctcaattctaggatgtggtaaag

SEQ ID NO: 35996 - DNA, 2281 bp, Bovine  19866880420522
  misc_feature (1)..(1): n is a, c, g, or t
nttgtttccatagcttgactattgtaaataatgcggcagagaacatgggggtgcttatatcttttgaagttagtgttttgctttggataaatatgcagaagtagacttgctggatcacatggtagttctatttttaatttttttgaggcactgctttactgtttgccctagtggctgcacccatttacattcccaccaataagacatcagttcacttcagtcgctcagtcatattcgactcgttgtgaccccacggactgcagcacgccaggcttccctgtcgatcaccaactcctagagcttactcaaactcatgtccattgagtcggtgatgccatccaaccacctcatcctctgtcgttcttttctcctgccttcaggctttcccagcatcaggatcttttccaatgagtcatttcttcatatcaggtggctaaagtattggagtttcagcttcagcatcagtccttccaaagaacacccaggactgatctcctttagaatggactggttggatctccttgcagtccaagggactctcaagagtcttcttcaacaccacaattcaaaagcatcaattctttagtgctcagctttctttatagtcaaactctcacatccatacgtgactactggaaaaaccatagctttgattagatggacctttgttggcaaagtgcttaatatgttgtctgggttggtcataacttttcttcaaaggagcaagtgtcttaatttcatgcctaccgtcaccatctgcaatgattttggagcccccaaaataaagtctggcactgtttccactgtttccccatctatttcccatgaagtgatgggaccagatgccatgatcttcgttttctgaatgttgagttttaagccaactttttcactctcctctttcactttcatcaagaggctctttagtccttcactttcggcataagggtggtgtcatctgcatatctgaggttattgatatttctcccagcaatcttgattccagcttgtgcttcatctagtccagcgtttctcatgatgtactctgcatataagttaaataagcagggtgacaatacacagccttaacgtactccttttcctatttggaaccagtctgttgttccatgtccagttctaactgttgcttcctgacctgcatacagatttctcaagaggcaggtcaggtggtctggtattcccatctctttaaggcaagatcaaggtaaaaagcaagaatgtgtcctgtactgtcttggaactgggaaagtgtacacattgttagaacatcattccaatatcatttcctttgcctctctggcttcatcttgtaggatttagctcaggtgacattttcttctaagaaggtatttactaccattttctcctcaaatctgctctgtgttcacacaatacattgtttttccttttcttagaagaaaatgcaccatacaatgattatctgcttattggtcagtcttgctgattatatggggaaagtctttgaatgaacggagctgtctttgagtctatagaatccagtataatgtctggcatacagtagaaaccaattgctgacattgttgaaagtcattcaatcatgtccaactctttgtgaccccatgaactatatagtccatggaattcgccaggtcagaatactggagtgggtagcctttcctttctccaggggatcttcccaacccagggatagaacctaggtttctcacattgcaggcagattctttaccagctgagccacaagggaagcccaagaaactcaataaatgtcagctaaatgaaaagctgaatatatattactaatttctaatgtgggtataaatagcttttgtcaactgaactttttagttcagtttgttagttcagagaataatactgaggtctactatgcacaggccaagtggacttccctttgtggaacagagccatatataataacatccatcattcagtttccagtagtaatactgggtgcagatgaatatatattgcatttgtccaagaaaaatgatacagattcatttttaaagtttcctacaaagtactgctgttcaaaataattagtttttctgaaaaagtgtgatgctgactacatggcaggggtaagttcctgccatgagcatttgaaaaaagtgatttaattaaacttacatgtgttaaaacatttaatagctcatataatgtgagattttatgaaaaggggaaatatctgcccatataaatgccaattaaactgtgactgaacatccctaattcaatg

SEQ ID NO: 35997 - DNA, 1362 bp, Bovine  19866880569516
  misc_feature (1)..(1): n is a, c, g, or t
ntcatcatccctttgatggtatgattacatttcactcatacggctagatattattctatgttattatagtaattataatatttaagaatataataacatacccattaaaatatttaagaatcgaattagatacctcagaaactacatactattctccctacctctcttactgactcctttcatcgctaaagagcagccatctggttcaagattacgctggcaagggttggtcaaagagctctaaatttattctttttttcccccaactttaaacttttaattttgtattggggtatagccaactgacaatgttgtggcagcctcaggtaaacagtgaaagaacactctggttaaattactgtagaaagtctgttttctaatgcttcactttattagatcttgttgggaaataaaaatgaccacatctttggtgcaagtgcttaacctggacatcaacatcaactttttaatgtgttctccatcactgtttctttaatttcaactcaaatgcatatgacgtttgaaaaactcatgaaaataaaattcaaaaaaatatttgcacagaaaacaattcatgaaataaaggcaccgattgaacttactttgctttgcaaatattcttggtattctacgttatatttctttaaaaggtcctttttcaattcatctgtccttgggaatgcaatctccttcagtttcttttaaaaatatatatatacacacattgattagtagaattttcagtatagtctttcagatcatcagctgagaaagaaaaacaactggtatgtgtattagaaatcaagacacaagtaaccaaacaggaaggtggaaaaatcagtattttctagggctccaaaatacaacttttcagcagagaagagaagaaattatcccctttgtaagacctttattgactccactggttaggtaagcattttgtataggtaggtacctcattttcaggtagtggacttgcaactgcacatcccatggtatgtaaattatatggcatcatagttaaaagggacattggagaacatggtaagtagagatccctaggcttaacagactgtaaaaagcagttgaggcaccttttataaaaatacagattcccaggcctaaccccagattttctgaatcaacatattcagagaaaggattgggatctgtatctcaaacaactttctcagtgattcttgatggcatgaaaataccattcaagtacccaccccagccttagtacagatgaggaaacaaaggctcagagacatcaaaaggctttgtcagtgtcatacaactgacttgtggcctccttatgactaaaaccccaaactcctaactctagctaagctcttccat

SEQ ID NO: 35998 - DNA, 2031 bp, Bovine  19866880691537
  misc_feature (1)..(1): n is a, c, g, or t
ntgagcagtcaagcaatgtcagcactgaagatgcgcattatgcatgcagcactgtgagaagagcagtagaaataaagatagagcatcgctaagatgatgcggtcatttcgggagaaaagcagtaatagcagcaaaagcaatgccacctgctgctttacagttagtagtagtgttatccaaccaagggctgctgcattcagttgtgcatatcacttcagttcagttcagttgctcagtcacgtccaactctttgcaaccccatggactgcatcatggcaggcttccctgtccatcaccaactcctgaagcttgctcaaactcatgtccatcaagtcagtgatgctatccaaccatctcatcttctgatcaactattatgcttcaatttttaaaaagaaaagctcttatactcatggttatgatttataacagcaaaagaaaaatttcatagagcagaatcaggagaaatcaagtgcaagcttccaggtgtcctctcccaggaaagatagcacttattctcccagcaacatgtgtgacaacatactgccaaccagggagactcacctgagccttggtgaccaaagtgtttattacaaatcaatcatatggacatggagcagagacatgactaacttcagctagtcagtctccagagcccccagaggtctacctaatacagtgtggcccagaacctcagctgaaccaaaacaggtattcaccatagatcatatggtcaacataaactatctggcatggcctatgatcactacgcttcccagaaggctcagtggtaaataatttgcctgcaaattcaggagacatgagttcaagccctgggttaggaagattccctggagtcggaaatggcaacctgccccagtattcttgcctgggaaatcccatggacagagtaacctgtcaggctatagtccaggggattgaaaagagtcagacacgattgacaactgagcttgcatgcatggtcattgtacaaagacactcttatcaggcagatattccaagggcttagaggcctcctgagttaacccttgactacacatgtacataaaaatataagccatgtactagattatctgtgcaaaacagaactgtataacattctgtctttagaaactagaatcacaattccacttagaagacagtgtccaagtaaataacaggtatgaataaagctcagcattctaggacgacagtaaaagagcaaaaattcaaaaacaaactcagtgtctaagactaggaaaatggttaaataaatcatggtgtactcatagcctggactactatatactcctagtgtagtagtagctcagttgtgtctgactcttttgctaccccatggggtgtagcctaccatgctcctctgtccatgggatttttcaggcaagaatacgggagtaggtaaccattcccttctccaggggatcttcctgacccagggatcaaacctgggtctcttgcattgcagacagactctttaccgtcaccagggaagccctatatcttaaaatccatatattgtaaggtgaaaaacaagatatataattaacgctcatcactcatgaattttgcattgtgaattcacctcatttctaaaatttacttgtaatctcaaaatcaatcattgaggtgctgtttgtggtcatttgtggacttgcgcaaagtggcaaaaagtttgagttgcccagtgggcacattcccagctgaggtcaaacaaggagacaaccgccttcttgtttatccttctcatgatctacctcctgccatgcatttcacgtttctgtgcttttgtcggtgacttctctgtctaaagtggccccgagcacagtactgaagtgctgtctagcgctcccaaggccaagaagcctgtggtgtgccttacagagaaaacatatgtgctaaataaggttcattcaggcatgagttttagtgccattggacatgagttcaatgttaatgaattaacaatgttttaaactgtcttcaaactgaagcacatactaaacaaggcaat

SEQ ID NO: 35999 - DNA, 1650 bp, Bovine  19866880715519
  misc_feature (1)..(1): n is a, c, g, or t
ngtataaatgaattggttttctgtacatctgaaactaagatgatattgtaaatcaactatacttcaatacagagataaaataaattgtgatactcaaaaggcatttcatatgctcataaatgtactaattcatgattctgttgtatttttaaatgagatgattcaattaatattttcataaaacaataaaaacttcataaaacatttggaaaatgaatttgaagtgctgggaagaaatgcagctaatttgtcaccataaattcacaagagcctaattgtgttatcttgctgttaaaatactaaaatttcctagaaattatgcattctaaagataagctgcccataaaccaccaaactctaatatccacttgaacatacttcccttttattgtaatttgcttttaagaaaataccatccagaagttatctaattcaataaagcataatgaatcagaaataaaatttctaaatatcattttctttgcctgccagatgcctgaagcccagagatgaggtcagtccttgggcattattaatcaattttatttaattttcatgtattttctaagggcagtacatgaacgagatgaatttaatccagcactattttcaaaagcaaaacctctcctagaatacctctcatccaccgcttctccagggttcctcaaccacaggaaatattctaaccgttcaacatatttcagtagacagctgcagtcacatttctggttttgaactagacaatctcttcaatgcagtggacaaaatctaaacaggctgtgtccctccaaaagtttccctggcagattacttttaaatgctcaaaaaattccctatactgccaattgtgtccttagtcgttcagccgtgtccgaccctttgtgaccctatggactacagcccatcaaggtcctctgtccatgggacgtttcaggcaagaacagtggagtgagatgccatttcctcctccagggaatcatctcctatgtctcctgcattgcaggtggatcctttaccggctgaaccaccaaggaagcccctgctgctgctgctgctaagtcgcttcagtcgtgtccgactctgtgcgaccccagagacggcagcccaccaggctccgccgtccctgggattctccaggcaagaacacgggagtgggctgccatttccttctccaatgcatgaaagtggaaagtgaagtcgcttcagtcatgtccgactctgtgcgaccccatggactgcagcccaccaggctcctccgtccatgggatttcccaggcaagagtactggagtggggtgccattgccttctccaatgcatgaaagtggaaactgaaagtgaagtcgctcagtcgtggccgactcttagcaactccatggactgcagcctaccaggctcctccgtccatgacgtgctattgttcctatatctgggtttcagaggaagagactggaaggttagcagcttccatgaggtcagtaaattagtaaggattttagctggatgaaaacccagtcactggacactaaagagaatggttttaactgctgatgccatttggcggactggagacgttttttaaaaaaatgttccagttttaatggaacaggtgatgccatccctaaccaagatctggagaaaatctgtcatta

SEQ ID NO: 36000 - DNA, 694 bp, Bovine  19866880716420
  misc_feature (1)..(1): n is a, c, g, or t
nagatgttttccttaaacaggaaatttgacacactgacatactcaatggcattatgaaaaaggaaaaattgatcacaggacatgtagttctgttgtggttctgtttcatctcatgttgtggccatatttttgtgttaaaaactacatgccagctttgacaaactgttcatttcccttcatattttgggtaagtcaatatatctacaacagtacataaatcattaagtgaaatcaaataatgtctgattttcatctcaaaatatgattaaaatgcatgaaattatattctgtctatatcatgatagctatgatcaggagactacatggttaatttccctgacagactataaaatcacccagccaggaatggtgaaagctgttaatcaggaagataacctttgaaagccttgctcctttcataatggttgctagttaaatatgaacatctgggaaatcattatgaattcatggtgcataaatctattgccctatgtacagtacccctttttatcacagcctttccataataagaaaagaattcgtgtgtcaaaaatttttttaaccatacacatatttgatgtaccatttatcaacaaaattgacactgctcttggatgtccataatgctggctataaaatggggataataatatttagctgagaaatatctaaaaggcttaatgttgtagcaatg

SEQ ID NO: 36001 - DNA, 776 bp, Bovine  19866880877094
  misc_feature (1)..(1): n is a, c, g, or t
nctttttaactctccttgggtactgtcataagttagataatctaatttatctattgactagagacgtctgtgagaacacaaagttaaggaaataaaatagccacaagacagttttataaagaaggtgattgtatattctaagtgcagtgaagtagactaaatagataggttacagagtgaaaaaatagaatagggtagtcagtaaagcttactgcttaaaaatgagaaataagcgcaaaatcaaataagtactctttaactttccaggtaaaatttatataaattttaatagtctattgagagccctgagttgagaaaaaaagacttatgtttcatttcatttcattcaaaaagaagaaaacagtccaatacacttatacaacaaaatattacttggttttttctgtacctgaaagcccagaattctttggaatttgtttttaggtacaagtgttttcgggaccaggtagtccctctgctgttccccatccacacatcataaccagcatctgccagaaggaagcctaggctgttattaggaagattggaaatccagctgctggcagatgtgagcaaaccatgttgcaagtatacaacaagtctctgaactggaaaaaatgtagaaaatttcttttaaaatattgtagtgtctacatgagtatctgacctcaaatttaatcttataggataaaatttttttaattgtataaataggggtaagttttacatgttttaattccattttatgtcagagttgttcactaatgaatttctct

SEQ ID NO: 36002 - DNA, 1315 bp, Bovine  19866881007152
  misc_feature (1)..(1): n is a, c, g, or t
ntggctctttagttcctcttcactttctgccattagagtggtatcatctgcatatctgaggttgttgatatttctcccagcaatcttgatttcagcttgtgattcatccaatctggcatttcgcatgaggtactctgcatataagttaaataagcagggtgacaatatacagcctcatcatactccttttccaatttggaactagtctgttgttccatgtccgattctaactgttgcctcgattctaactgttgcctcttgacctgcgtacaggtttctcaggaggcagttaaggtggtctggtatcaccatctcttgacaggtttctcaggaggcagttaaggatggtctggtatcccatctcttgaagaattttccacagtttgctgtgattcacacagtcacacagtgcacagtcactttagtgcagtcaatgaagtagaagtagatgtttttctggaactcccttcctttttctatgatccaggggatgctagcaatttgatctctggttcttctgccttttctaaatccagcttgtacatctggaagttcttggttcatgtactaatgaagcctagcttgaagaattttgagcattaccttgctaggatgtgaaatgagcgcaggttcaaaagcctggactgtagttaatccaacgtgcaagtgtggtcagtcatgtccgactctttgcaacgccatgcgctgtggcctgccaggctcctctctccatgggattctctgggcaagaatactgcagtgggttgccattcccttctccaagggatcttcccaacccagggatcgaacctgcatctcccacattgccaggtggattctttaccactgagtagcgctacaacaaacctactccccctttctttttaaaaacagtattttattaaaaagtgtatttttaaaggcaactcacatgattctgatgcaggcagtgactgccagatgtttggaaactgctatccaagacaccccctgcatcttggtttggtatttaaatggtgagttatttcatatttaaaaagaatctgggggagaaaattgtacagttgtacaagggggaaaaaacacgccccaaggtagaaataagtccttaacatattgtcaggtgggaaaaaaaaattaagctataagagtaagaagaaaataaatcaatctatttctataattatgatctctatctatatctttaactactactttttgaaatgacatgcagccagaaacagtacaatgcagagacatttcatattcctgggtacacattttctccgtgggggattacagaatgatataagag

SEQ ID NO: 36003 - DNA, 1986 bp, Bovine  19866881110442
  misc_feature (1)..(1): n is a, c, g, or t
ntgaactcagaatctggggcaattcctggaatacagtgagtgctcattagatatatgtgtatgataattaattggaaaacaattggcaatgggggcaataagatatcacattctgtcaacgcaaagtctttgtgatgacagtaaatataaaagattgtgtagtgagaacattcatgcagaaagacaatagtcacaaactaaaaatatctttacatatctactgtctgataatactaatgtctgttcatagagctttcacttcattatgttattatataaagagttcaatcactatgagtagtattatcttaaaatgtgaaggacaatgaggaggatacacacattcacagatacacacatctgtattttggggatgacctaaaatttactccattgtatatgagggaaaaatataaatgaaagaaaactctctttgaaagcttaaaaaaatgaaacaaaagcttaattctttcattcaaataatatctataatttaaagtcatgacaagataaattcacagttacgttagaatcgtgcaattacatgtgcacaagtgaaagctcagtgatgggatagctcgctctttgggagggagggagtagaatgggagtattatgaaaacaaagagtaccttggtccatcagaattttcaaagaaaataaccctttggccagaccataattccccatagaaacaacctacatagagtcacatacagtgactaaattatgtttatgcttttattaagcaacagagctcattctgacaatttatctactaagactcatgccagaaaactgcttattcattttctatattctgtttggaaaacaaaacatgacacataacaatataaaagaaaactataatcccgagacgcatgtgcagtcactgtacaaaagtgttctaaattgtcttaggcctgtggcattggctttccaaacagcatttaaacactgccacatgctgttcatctgtgtgtcttgcagcctgtggcaccggcctgacctcgacagaatgaatcgtgcaccaaattaatgaagctattaactcttcaaaggaaacttccctggtggctcagatagtaaagaatctgcctgcaatgcaggtaacccaggttggatccctgggttgggaagatgccctggagaagggaatggctacccactccagtattcttgcctgaagaattccatggacagaggagccaggtggactacagtccatggggctgcaaactgtcggacacaagtgagcgacttaacactttcacttcacacttaactcctcaaaaggaccaaccagtcttgaagaagggaagtataaaaatcttgagaattaaataattccttaagaattagtaatttctaataatgccattttcagcaacatggatggacctggaggagtgtcatactgagtgcagtcaagtcagagcaggagaaaaatggtatgccgtcccatatatgtggagtctaaaaggaaatgatgcaaataaacgtactgacaaaacagaaagactcacaggctagaaaatgaacttatggttgccaggatgaagggatagttaggggggttttcggacagttatgtacacagtgctatatttaaaatggataagcaacaaggacctactgtatagcacatggaactctgctcagtgttatgtggcagcctgggtgggagaagctttgggggagaatggatatgtatggctgagtgcctttgctgttcacctgaaactatcataatactgttgattcactataccctgctgctgctgctgctgctgctgctaagtcgcttcagtcgtgtccgactctgtgcgaccccatagacggcagcccaccagggtcccccgtccctgggattctccaggcaagaacactggagtgggttgccatttccttctccaatgcaggaaagtgaaaagtagaagtgaagtcgctcagtagtcatggcctgcagcctaccaggctcctccg

SEQ ID NO: 36004 - DNA, 1636 bp, Bovine  19866881129375
  misc_feature (1)..(1): n is a, c, g, or t
nagtactaatttatctgataactagagatattaaatgtgctttgattcatatgtttgtcctttggtttttctgtgaattatatatacatttccttcttttgttcaattatctattgtagatttaattgatattggttttatttttttcttctttccttcctttcttctttctttcttttcttactaaaaagtcaccagttcagatttttcatgggatgaatcttgaataattaagtatattatttgttaggacaccacctagaaggatctttccactccctccaacagtattcttatagaaagtttacacagaatttcacttttagaattctctttgatgacaaatatattaatatttccttttacaggtagattccaaatgtggcagcttttagcagcaacatgctggatgcttcttcttggacctgtattcggttatcacaagaaaggatgcaccacaaatcctgaagctactatgaatattgtaagtcgttcattaaggaaaaatatttaagataagacaattattaagctattgtcattttaggggctttcctgctgtcatttttagatatgactggtatgcctgtctagtttttaaaaattctaagttgactaaatctgtgtttccaacctttgttccttggcgtcgttgactaaacaaagaactgcaaaacctgactcaatttgggggcagtgaagctccctctgctggtggcttgagctaccatttcatttgtggtttcttgaagagaaagttcacaaattcctgttgatgatctttttagagaatccttgggctcttctgaggttttttatagagcagtttctctgatttatgaactacatttatgtacattttaagtttagtaagccagatttggtttgggctgcttataaacaaaaatatctcaacaggcagaaattcatatcagaaggggactagaacaaagtggaatgaaatagatctatgcaaacaacaaaaacaaacaaacaaaaagaccagtcacaaatgcttacgatatgcttcattccaatggaaaacatatttcttgtatacactgtgtaccatcatgtccccacccatacccatttgtattagaactttaagaatggaactatcaatgacataatttttcaaaaaaaaaaacatttacagagtgaaccctgagtgccttaataataccatgccaagaaaactaccatgtatgattaccaccttaccttaccaacaccttggcatacatcttccttttaaaacccacctcaaatcatcctgattttcctgctgtattctgttccaaaacatagataacagtagattgtgacttaaagtattatattgcaatgtgggtaaaaatctaggcattatatcatgaaggtatacatgttcctttcccctttttagagccagattatttcctactggggctatccttatgaaatatatgacgttgtcacagaagatggttatatcctcggaacttacaggattcctcatggaagaggatgtccaaaaacaggtaggatttatttcattatgaaaggaattatgcctaaggggagattcctggatgtgctgatagcagcaggacagctggattctaaactagagcctattctcttctattcctcc

SEQ ID NO: 36005 - DNA, 806 bp, Bovine  19866881136345
  misc_feature (1)..(1): n is a, c, g, or t
nttttagcatgaaagtcatgcactctggtacactatcagaaaggtgatgtgcacatgggtaaaaccctgcttttctttcctaatcaaggcaatgtttgaccttaaaggagaaactgttctacttcttttgccagttaatgagaaatataggtaatccctgattggactgatgtcaggggagctttcataatggataaattagctaatctggggctgaagatcattgctaccatctccttgtaaattatgtttgatgatattccctaggtaaagattgatttataaatagttacttttccaaaataacttggtctccttgagcaaaacaggaaaaaaataaatgaatataaatagattcctaagaattctcattccggggtgaagggaatgtcaagaagtctgaaaatgattcttgaaagaataattattttttattttttacagaagttgtttggtaccaaaggtttctttttagaagaaagtatagggaagtcaccttctgtcaaaatctgcaacaataaaatattatgggtgatatgtagagaatttatgtctttatgggcaggatccaacaagaaaaacatgaatatggtatgtataatgattcgagggccgtttgatgcttttagaaattccagctttcctttggttcttctttttgttttttattcatttatttttggctgtgctgggtctttgttgctgtgccggctttctctggttgcagggagtgggggttactctctagttgaggtgcgtgggctttgcactgcagtggcttctcttgttctggagaacgggttcca

SEQ ID NO: 36006 - DNA, 1757 bp, Bovine  19866881236123
  misc_feature (1)..(1): n is a, c, g, or t
ntgataggatactgaaaggggaactccccaggttggtaggtgtccaatatgctactggagatcagtgaagaaataactccagaaagaatgaagggatggagccaaagcaaatacaatatccagttgtggatgtgactggtaatagaagcaaggtccgatgctgccaagagcaatattgcacaggaacctggaatgtaaggtccatgaatcaaggcaaattggaagtggtcaaacaggagatggcaagagtgaacgtcgacattctaggaatcggtgaactgaaatggactggaatgggtgaatttaactcagatgaccattatatctacaacttcagttcccatgaattaatataatacatgtacaatcagagttgactcattcactgtaattcatcttttttgcccaggctccagctttaaacactgtactgttttagagagcaagtttgtgtgtcaacaaattctgaaacagcctgaccaatcatggttgagactttttcctcaaaatctctgaaaaggctttggaagtgaaggcagattccgccccacacacacacacaccaaaactacaaacattcaaatgctgtggactaaatatacatttttaagaactttttgagagtataaacagattatatgtttgtcagtgaattatagttttccctctctctcataaatccaagcatcagaatcaatgttgccatatttaattatagttcttcaaaatttataacatttaattactcaaggagataatcacattgcctagtggcagagtttgttctggagcttatgttgacaagaataactaacacccatagtctattagccagaagggaagggagttggtcacttaactgaaataaattgcatatatgttgagtcatctctcaaacgtggagcttgccaaaagaagaaccagatgggaaaaactgaatgagtcagtgcaaacctgtcactctatttggggaaaaaaaactcaagcttaattttctattcataatatgactatattcatataccaactgcatctttctttatgcaagcagattactgcactccaaagattcctgcaagcatgaataaatctaccaaggggaaaggtgggcttcaaattctccataaagatctcttatgtttttcagcttctggtgcatatctcctgggatctgttttttaattcacaccagggtgggtcctaaaagtcagaaactcagaaagacatgtacagacttacactctccttataaaaaaaaaagagagagagagagagagaaaataaacagtacggaggggatttttttaatatttagaatttttgcttttccttcagaagattcgtaatcaaaattaatttatttttccaaataaacattgcacagattattttatcattgattgattgacctgggttcctttcttcttgctttacttcaatcatagtattgcatatatgttggtaatgcgatttatagaatacaaaccaagagcttatttttgttaccatttatttacatctcaccagtgtagcaaaaatgactcatgctgacgatctcttactcacttatctcatgagtattgtactcaccatgaggaaatacccaataagcaggacaggcattaagaggataatgagtagataatcaaagaaggtaaatcttttcttcacggcataatgcaagcaggttctctgtttctaaaaaatccataaaaggactctttattaatgaaacactttttcaaaagtcagatttt

SEQ ID NO: 36007 - DNA, 1659 bp, Bovine  19866881247179
  misc_feature (1)..(1): n is a, c, g, or t
nacgaggagtacaaagctaactcctaagacaaatcacacacctccagctatatgattaaaagcgtacaattacttcccctccttgattactcatttcctggccaattttctttatttaaaaaaaaagtatattttagtgctttggttaacagctcgaagtcattactgttttggaaaagttgattcgtctggttagccagttcgcaacagttttacagaaggtttgtataatgacatccttcgtgagcgtgattctgcaagtagttggtaagctggggcccgcctcctccataagctctgcacctgcactcggttgtccatcttccctgttggctgtatcccattaggaacactctcctttccctccctttgcctggctcattcctcatccatctggatccctctctgaagacattttcaagacattttcgtctgggagatcttcctgtctcccaattcaaggttaggagctttgctttgcttctaatgctttgcttctaaatgctttcactctccctgttttctgctctgcactcgtggccctgtcttacaggtgtggatttacctgccccctgcttcactgcccagcagattgttagtgctgtgaagaagatcctgctcctgcagttcccaacccaaaacagacacaaaaagaagtgaatggtgggaggttggggagaggggtgtaaaggggctggcatatggagactctgtattatctttgcaacttttctgtaagtcgaaaactattctgaaattagaagtttattgaaataaaaaaaaatcataagaaaggcgagaggaagggagggaggagagcgagacagctgacaaaatcagcatctcttgagaatgaatcataagtcaacaactttcacaaatggttcttccttacctaatatttgccattttagcccagtgaggtgtctaagtattatatttactttataaagaattgtagccaaaaaaatttaagcaacactgacagtttgattagttagtaaatagtagattcaggaattaaacttagatattcttgctctttctaactcccctgaaacctcccccactccacacacacacctaacccttaagtttaatgaaatagtaataggtactttgtgggaagaaatgtgttacatgatcaaatgattttagaaaattctgggttaatttaaacaggtctcctaatctaagagttctctgagccctcaatatgctaatatgcattctgactaagataaactgtgatctatactgtttcctagtcttctttgtctttatggagttctttgaagaacacctactgaataacaccttaagaatgctggtgttctggaagaaacagttcagacatctttaacagttaattttaacaacacatttttacaggccttcaagggcaaagaaatacaattttaataatagagtttcaggcactccaccagatgtgggagacacttcggacaaccatcctgattttactcaaaccacaccatgtaagttaaagcctgctgcttctactctaaagaaatccttgccattgaacatttcattctaaataacatttaaacatatttctacttattttaaaaagctgggaggaagaaaacccccaatacccttttaccatcaagactttttatttcttatccccta

SEQ ID NO: 36008 - DNA, 1324 bp, Bovine  19866881264170
  misc_feature (1)..(1): n is a, c, g, or t
naaatctaaagtttactggggacagacttcagcagttgtatctgtgtgagatttccccagggaaatatttcttccatcctgagaggtatctccggagttagaaaaatttgggtttgaaatctggctctgacccagaatctgtgtgaccttggtcaaattgctcaatccccctaagcatctgctttcctataaaatgagaatgagaacagtgctgcccttaaaggattgttaagaaaattaaatgagataatatcaagtgcttagcataatgcctaacatataagtgtaccgcaaaaacccagcactgcagttcttaaatttatatacctttcgagatgtctatatataaagtataacatactttagaaaaagttttttgaagcctttagaggcaatatcctaagtgtcaagcacatcaagataatactaaatcaaagatatctctttggtaggtaaagtatacatactgggtacacttcacttttcagagcagatggtaagaaaacaaaacattgctttgaaaagtaagatgtattaaagattctaaaaccatttcagataatagtttttgaaaaattaaaataaaccatggacttctttagctatctaatctagaatgctgtttgaagatttatcttttgaaagtaatgaaaacccatattttgtatcatcattatcctagtacactggcattacattttcctaatcctattcctagcccaggactatataaaaacggaaggtgccgaataaataggcttccctgtattatcaaaaagaaaagtatctttattaaaaatttaagattaagctggtttcacactcatgtttagggagaatgctaatcattatctgaatacaaactttaacaggtacattccacctagttgctacacatagctgttttctgggggggatggagggagtaattcagttcagttcaatcactcagtcaagtccgactctttgcaaccccaatgactgcagcacgccaggcctccctgtccatcaccaactcctggagtttactcaaattcatgttcattgagtcagtgatgccatccaaccatctgatcctctgtcatccccttctcctcccaccttcaatcactctcagcatcagggtcttttcaagtgaatcagctcttcatatcaggtggccaaagtattggagtttcagcttcagcatcagtccttccaaagaatattcaggactgatttcctttaggatggactggttggatctccttgctgtccaagggactctcaagagtcttctccaacaccacagttcaaaagtatcaatttgtcgggcttagctttc

SEQ ID NO: 36009 - DNA, 729 bp, Bovine  19866881294940
  misc_feature (1)..(1): n is a, c, g, or t
nctgtgtcttatttcagtgttggaaggtcaggtagtaattgatagttccatttttttttttctctcttacacagtttctgtcatatctgcctccctgccttctctttggtagggtgaaactgaaaagcagtgactgattgattgtatgaatataccaagactataaattcaaacgagtgtccctttcaacatagtcagtcaccctaataagccatacccttattgcagccagattgggcatctccttaaaatcctgacacttattcttcagcatgtactcagttcaatcaggtctttgaaaggtgagcttgaatttaatgtttcagaaacaactcaagtcatttggacatatatctttttagtaaagtagatgggcaatcttgacaattttctttaatgtttttatataactaaagagatataactgcttgcatttatttgtgttaatgtgtccagtaagctgattctaaaagctcctaccctaaaagatgttggccagtgtatcactacagatttaatcatatggccttctaggataagtgctttgaaagacaaaagtcagttgtatttatcagttaaagtacattaggtgtgttgttggataatttatttaatgtggggtgattatgactttgggctttggaggcagacttcagttcaaacttcagctgtccctgtggctttgagtaagctaaactataactccaagcccatctgtaaatggtacaa

SEQ ID NO: 36010 - DNA, 2160 bp, Bovine  19866881350027
  misc_feature (1)..(1): n is a, c, g, or t
naggatgagatggctggatggcatcactgacttgatggacgtgagtctgagtgaactccgggagttggtgatggactgggaggcctggcgtgctgtgattcatggggtcgcaaacagttggacacgactgagcgactgaactgaactgaactgaactgaactgattggtaatgtattcagttataacactatctgaggacctttacctattattaacaatgcatctaagcttctcaacagcctatatgatggacactgctattattttctatatttgacatataaagaaactgagctacttgctcgtgtcaccacagctagtgattcaaacccagtcattccaatttgaaccacttaggtaccatgctatgtggatgagatgatgaggcctccttgtagcccttacctatgagtgtgttatggttaagtctgtcttcacatcaggttccagtctccagcatttggtttggcagccaccatactcccatgtgaagttcttttctcctgatcttggtttccttgcagtgtgcacatgtttttctttcatttcctcatggttagtgttttatgacttggggatcttgaagaggcagccgtattgtggatgtaagccattaccacacaggtttctgctctttttcagaacctcataatttgttaaaagttctggtttgggttttcctcacatcttatcgctgacagttttagcagtgtatgccaacattatcgactgtctccagggtactgatgagatataaaggtttctgtaattgtctaagatcatttgccactttatgtagtacaacttgctcacttaggtacactctgcttccaagtggtttttctggcccccgtgggctataaaatcatttgatacggctataactttaaagacactagcaaaacaaaacactagctttgaatcatttgcttttgttaactcctattttaaggttacctttttaactgaggagggaggcatgataagcagggtttcttctttgtaaatggagaaaatagagggatattttttcctctcacttcttttccttgctgatgatatcaattggcagtgattttcttatgagctttctgttagttttttctcgttttgaagcatatccatttccaatagaaatttttgaaaactgtagatcatgaccagtatcaagagctgctctgatcaagtcttttttttatctgatagctatttgaaaattaagcaccagtccaaggccacaccgtttgttagggtcaaaacaaaggctagattcttggtttccagacagacagttcagtgctctttctatgttccaaatcctcagagtttgtttgaaataaaggtcaatattgcaccttcaggagaaaagttaaaggaagatttacttcgtaaaagctgattattttgaaagctcaaagccctcacagatttaagtttccaaagaataatacacaatcacaagtgtagctttccaagaacctagcaggaagagatagaaaaactgtatttaattttctagccaaatgctagactgacataaaattaaaattttttaaaaagtgtatgttatatatatttgaatgctcttagggagttattaaatagtaaaactggaaaagaatagtattttcttaactcctttaattttttgtctcaattgagttaatattccaatatagtaaggaattcagttttaaatttctgtggcccttcatcaagtccctaaaaagaatttatagtctgtattagtttgttaccataacaaattgccacaaactgagtggcttaaacaagagcaatttatgactcacagttctggaggctagaagtccaagatcaaggtatcagcaacattggttccttctgagggttgtgaggaagagtctattccatgtctcttccttagtgttttagttttatggactgctaaatgaaatgccatagaccgggtagcttaagaacaacagaaatcttgtctcatgtacttctggaggttggaaagtccaagatcagaacactggaagcttcagtgtctggtgagagtcaacttattgattcatagatgatgactgtcttctttcatagtaaaaaggtcaagggatctctttgagatcccagaggcctcacttcctgatactttgggtgttagcatttccaca

SEQ ID NO: 36011 - DNA, 857 bp, Bovine  19866881367647
  misc_feature (1)..(1): n is a, c, g, or t
nccccaacacacacacttgttctcttacagaatcattttggattagattttagactgagaagtgatcttggagttctagagttcaatggtctcattttacagaggggaaaaatgaaacccagatagatgggcattttcccaaagtaaccatttagaagctaatattcagaattcgacatagaattctcattattctaattcaatttaagagtttgttcaatttctccatggaaaatacacacccataagttcctctttctcaaatcaggaactcttgctacactgaacccagaaggcaatggctcaacaactgagccccaggggtcagctgtacctctccctaattgcatcatctcttcatgcctgatgtcctcaggttacaagggaccacaaagtactaaagatagagaactactctacctaagtaatcacagactgttgttggtcaatgtttaccacttatgattaaataaaagtcaaaatatcaaaacaaatcttttaataaaaatcaaagtgataaatttttatcaaaattttaaaaatctttctgaaagcctaaagaaggaaagtattcccctcagtatattctccccattcctctcttttaaagaaatctttcagaagatacagaaaaatcaactgatgcagatggtaggatctgagaactaccaggggaactctggtctgtccacagactatcagtcatacttacttataaaaattcagattttatatcttattttgttaatgacagcattgggcatccagattttgagagtttggagactgggttcaaatgaaaacttctactgcttatgatcataaggcacatccattttttaaaaaaataaagtatt

SEQ ID NO: 36012 - DNA, 1519 bp, Bovine  19866881402825
  misc_feature (1)..(1): n is a, c, g, or t
nttttgtagcatgtaggaaaatgtgaaattgctcctaagatgcatgtgctgaaaggcattcattcttttttagagctagaaaagtagaggttcccactcctcaacagttaagaaaactgccattttcttgacaatttgtggaactcatacattggtcatgataaagcctgtgtctattttttccaaagtggtgcctatgaaatcttagcaaaatgaatcattctatagagggtttaaaatcacagtggaatcaatgttttggtcaaggtactgctgctttaattacatttgtttcaacattttggttttggagattttcttatctgacctattatgggtccctgtgaaaatgaagtttaccatggtgccctctggtggaatcccatctggacatttttaaaactaaagccttatgtagtgagaatgcatccctctgcattaaagaaaaggagtaactctaaataatactgtcggcatactgtaagaaggttctattgccattgagggactgtaagaaatacatgcctcagaatatttgcctgcaaattcagggatacagcctgaaggagctgcaaaggaaaggccatgatataaatgtatgaaatttcaatcctgttagaatgaaggctaggagccacagcatttcacatcacctgacaacttggaagctgactaattaggtattatattcagaagggcaaaagaaggttatggatgtttcagcacttgaaacaatatttataaatagtcatgaacacaaaaggaaagtagaatttggttgtggtttattgaaaaccagtgcagattcatttcctcatcagagttgataaaaccataatgtgtccatcaaaacagcaagcgtcacagcattggttccttgaaacttgttgtgaccgtgaaatttagtgactcttcaaaaagtgtctctcgcttatctctgtaaggggataaagtgatgatctcttggagatattctgggttacatatcacagggatcctactcaaggaatttgagtaccagccaatcataaaaagatatcaatggaattacaaagtacttagctgaggacttagggtcttcagatggagaaaaacagtgttattccataaaaatcagttgtatgtttgttcatttgaatgtactaaataaaacagttatttaaaataaaagccaaaaaagaaaaaggacaaagtgagcatctaatcctttagagtgtctgcaaacgatttagtggtttatttccgtattcagcattcctgaaaggtggaatgtagggcagagtaaacagtgagctgtgaacacaacacacttgcatttgatccttgatgcttttcttactcgggacctttctttgaaacctgatgtatattagattaaaacaaaagcaaaaataactactaaaccctctaacgcactggttttcaaagtagtggtactgccccctagggggtgtttggggataatcttgtcaggaaggtgtctcaaagtatctaaatgattatgtggctattactgaca

SEQ ID NO: 36013 - DNA, 1461 bp, Bovine  19866881423547
  misc_feature (1)..(1): n is a, c, g, or t
nattttttgtgacccccaggactgtagcccaccaggttactctgtccatgggatttcccaagaaaaaaaaacgggagtgggctgctgtttccttctcgagggggtcttcccgaccccaaggttgaacctgggtctcctgtgttacaggcagattctttaccactgagccacctgagaagcccaagcagactttatttgaaacaaagtattcctcttatcttacctctcagctatgttccttcttctagtcagtctcctcccccagcacacatgtgcgtgcactcacacacacacacacacacacacattggctgtggtacatttacacatcttactccttccctttggaaagccttatacctgcttccttccctggcaaattttgatgtttccattagacctcaagtgaaatgaccagtcacaccctattgaaacgttctctgtccagtatgctggcctcctcccatgcgtttttatagcgccttgcccttctctctgtcttagtccttggacacttacatgccagcagttgtgctgaactggaaactccttaaggacgtgaccctttaaatctcttttgtattcaccttgtctggcatgtagcaggttctcaatacttggtgaatgatttcatgaatttcatttccccctaatgaaaaacttcactgtacttccaaccgatttagcagatcgtgacctattaagtttgaagttcaatacacttctgattatcttatcaaatgactgaaaatgtgaacgtttaagaatttcggtgtaaacacttgggcaaggggaaaagttcaggggtcttaacctagttttccttgctctttataaaacatcttgatttcttcaggtggacattgacatgatagcacaacagagcactgaatgtcaattgaatttttttttcttttttaatattttcaggttacaaatgctgctgccaactctcttggtcaaatgactcttcacctccagcctcttcttgtgtgtgggggggatggatttactcagtccaactttgacggctgcatcacttctgccttatgtgttctggaagctttaaagaatcatatttagtactgcctgtattcttatttttcacatgtactttggggttcttgttttcacagttttctgtcattgattattttgttttctcttttgttgagagaaattactgaaaaattgttctttactgattattatttttcacatggagtataaaatcaatttgataatttcagtacttacaactcctacaagaaggaaaaatcccttgtactttatacttttttccacttttctgagttgccatgtctacccactccttgttggaggcaaagtcgtgcttaagaaaaaacaaatagctctccccccaaattctgtcaaatccaagtaacagttcatgtccacagacctttgttgtcctttgaaaatttcagtcccaaataaaga

SEQ ID NO: 36014 - DNA, 1340 bp, Bovine  19866881466934
  misc_feature (1)..(1): n is a, c, g, or t
naagaaaaataagacagagaaaaataatgaaataagaaacaggatttctcgagcatttaactgaagaaaaaaataatgataatggtaataataataattcattattaataataacagtagtagtttgccactgctgatagcaaatgaccataaatttagtgatttaaaacagtatttattatctcactttctgtgggtcagtagttcaggtatgggatagttaagtcctctgctccaggtctcactggttctcaagctgcaatccaggtgttagacagaccgttttctcaacaagaggccgaactaggaaacagtggcctcccaagctcattcaggttttggcagaattcattttctcacatatgactgagagtcccaattctttgcaagttatcagctggaggccacctgcagatcctagaagccacacacggttccttcccacatttgtttgccttattaagccaacaaggagaatctcttgctccagtttgctaaaatggattcttatatagtagactgcaattaggggatgacatcccatcacctttgccaattctcctgtctagaagcaagtctcaggtccctcccgcactcgacgggaaaggattacataaatttgtggttcctgggtggaccacagattattggaggggttaccttagagtcggtgtaccacattcttatgactaaaatccacttccttagagaaaggaaagtgtatttaattttacagccattcctccatcattctaattaggtcttggtaaatttcaaggggtgcatcctgtccaaggtaaaaatccacatgattgtagtgtggaattgacttgtaataaatgagcttgggaattttagggagtaaattctcaacatctttgagatcagccacgtagtcctgtccaccactccacactgctgttggaacttccatattagaaacgttgtatagaggaggtgtaagctaaataaaattgaagagagagaaaaatagttttcacagaaaatcatattatagaaagaacatcaatcatcagttgttaagcaagttctgtatgttctaaatgttactgtatattatgtacatacattcaccattgtactactatcttagaaatagtctgaaaatgcaagcagcatatgcaagcagaattgagagagagtgacagggagaaagagagagcctgatgattgtgtatattcctggctattgtgagtttatcattatacttcttatttcagtaaaaccaaaccatatttttataaaatgtaaaatagagtgatttttactacttgcattgtaaagacttacatattctataactaaattatgttccccg

SEQ ID NO: 36015 - DNA, 634 bp, Bovine  19866881575973
  misc_feature (1)..(1): n is a, c, g, or t
naagcccttgaaattggacctaaatgtgggcaagttttatagcttactgtttgattctactatacagttagggttgagaaacactgctttagagcccgcatagggacaagaaaagctttatgtccagagggttcttgatgttcttcttaacaaaactgggagtacttctgctttattttaatctgaaccctcaagatagactggaatatccatgaaaattcaggtcctcaacagtaattatcaggacaagccagatcctcagagaaacggggagcagtccacccacctcttgggtttctgtgtccttgtatctgcaggcttctgagctctttctggctaagaacaaaagccattttacaagcataaatcaaggcaggaaagaaagtccctgcaattctggttagagctgatgggtcctgttcaccatgcttacatttagtcattctcttacatctggaagaattgcctagagttgacccataaatgtccagaccactcattcactgggtacctgatcctgcttcatccccatcagccccaccctctccctcctgtatgttgacatagccctagcataggtcccagtttctgactgtattatacatggtgctacatgcagtaccatgatttgtcc

SEQ ID NO: 36016 - DNA, 1241 bp, Bovine  19866881624590
  misc_feature (1)..(1): n is a, c, g, or t
ntcaatgataaattcccccttcctccctcactattgagccaggacaatatataaggggaatgggtgagtggcaggctcatatctcattcaacctgcatttgcttgttagatggatgtcacttggaggctatggtcactcagctgtactttggaaaaatgctctatcctggttgaatagcagcttcctgagatgtgctaatcttgcaataatttctattgggctttggccctggtttctgtttcagcttttaaaattctatcttctggtaattttttaccatatattatttcttcaaactgattaattataacattaacaaggtctcttggcttctgtcctctttctttggtttcaggaagtgtctctgagggttttctggccctgttcaatctgttctgtaacagaatagaacctcaactagtccatttcatatatatgttgtaatctttaaaaatttttatgtatttgaggcccaatttagcaacagaaaaacttgtttactttaattcctagatcatatagtttaagtattgtacagtatataatataatatacaaccatcaaattgatgccttcaagctgtggtgctagagaagactcctgagagtcccttggacaggaagaagatcaaaccagtcaatcttcagggaaattaaccctgagtgctcattggaaggactgatgctgaagctgcaactccagtattttggtcatctgatgagcacagctgactcactggaaaagcccctgatgctggaaaaggttgagggcagaaggagaagagggcatcagaggatgagatggctgaagggcatcaccaatgaatggacatgaacttgggtaaactccgggagatggtgagacagagaggcctggcgtgctgcagtccatggggtcacaaggagtcggacacgattgggcaacagaccaacaacagtatagagtaactaataatatttgtggaatagatgtgtgaacaaacgacctatgtcctagtcaagctgctggcgattttctgttttatagagtagacctgctgggcaaaataattttactctgttacctatattcttaggcaattgttaaagaacaccctattatctagcagctattgaaattaaactaaatttaaaattcagttccttagtcacactatgtcacgtgctcaagagctaaacatggctggtttcaaccacattggatggggaaatatagaacatttctatcaccacagaaagta

SEQ ID NO: 36017 - DNA, 779 bp, Bovine  19866881673046
  misc_feature (1)..(1): n is a, c, g, or t
naacaaggtggtgcgtggtttgtgactgcagtggtgaacggaagtgagttcaatgaaagagaattaaaaagcaaggataattcctgatttgaggctaaagaggctaagacattgattggtggctccatttgcggaaacagagaagattaaaggatgaacaagttctgaatttcgaaggcagacaatcaagagccagtgcttcacatgctaagtttgattataacatacatagattttttttttttttaaggagtaaagtaactcttgtcaatcatattctgaattctacttgctttccagggctggaataatctttcctctgtgatccttgcatcagatcctttaaaaattccatagattctgcccatttagcaaatggggcctcactgagtggactgcatatatttcagaatctgtttgcgagaagttttttctctggttaagacctcccgagttttatgaaaacatctatttatccttagtcacaaggagattttcagcctgttgcaacttttattggcactgccaaaaggaaaaaaatatggaagcatttcaatagtcctttaactggacccaccaaggtccccagagcaggcgatttgtcctaactcgcacttggtgttccagaccttgccggagttcttctgcagcatgtacgaaagccctgattttctatgatgacagtcgatgaaaatgtcccactttcccaatactccccagcaataagcagtcatcctttattatacattgttattcggcctactcagcatcatgcccta

SEQ ID NO: 36018 - DNA, 758 bp, Bovine  19866881686388
  misc_feature (1)..(1): n is a, c, g, or t
natgtaaaggtaagatgagaaatagggggaaatgattgaaacttggcagcaaaaacttaagtttaaaatgggaacaaaccaaagataacaaaaacgaacaatgttttaccagtaaattaattttaaaaagaaacttttaaataattgtgcttttcgtcaaattaaggtttttgttagttgtgggagtatgatgacttaaaataagtaaaatgctgcaggcttccattaaattaagtctggtgccacttacagttttttccccaagtccagtttatttgctttggctttagctaagcattgtggggagttgttattatgcaaacagaaaagaagctagcgggtttgcaaagtacaagatgaacatatttctgagtgtcctaaagcttacaccaccagactctgacattttgccttaatactgcagattccaggtcctcgtaaacattgctttctgatttctaaaactatgaaagtttgagttaaaatattaattctttgagtcattgcctcagcctaaattaactctagtcctaaatataaatatatatatatatatctgtataaaaatatgaggtgacatgtaataaagtttttactattatgaattttagaatgactatattgctcacgaatggcatggccataaagtaattaaatggataggctgggaagagtggctgtaaaatatgtatgatattctgtgacattttatatgagtacacacaatgcattattattatattctttctcatttgaag

SEQ ID NO: 36019 - DNA, 1001 bp, Bovine  19866881747070
  misc_feature (1)..(1): n is a, c, g, or t
nttaacatgtttattatttgtattttttttataggctggtaattctggtcggttccaagcttttgattggggaaaccctgatcagaacatgaagcacttccaccaggtacaataacaataatcaccaattgcatactgcaaatgaaatttgtaaaaatagtatctactcatcaagcacctactcactatgctccattcactatgccagatactttgtatagatcagatgctatttggggggatcttaccacttgccatatcattgtttttgattcttagcatgacctccccagataaatattaggttaggtaaattgtctctatttttccagaagctcagagaggttaggtgaattgtcagaaattatttagctaataaagaaccagaataccacccagggttcctggatcaaaagtcctttcttctgttacacttactccttctcaaaaaaatagaaactctcagcacttaagaccatatttttaaagaaagaattaaagatgcgcaattttatttctaaagcgtattctctggcttcttatccatccttcataaatgaacctgataaaatgaactaacattatcctaataagtttttggatgtcatttactgctcattcaaaaacaattatgaattattaaaggtattccagacaggattatcacctttagaaaaaagcaatgctatttgccagatgatatgtccatgtatatcttgacattatatatgaaaactttcctttgtgaaaaaatttcatattaaagtgaataggcattgttgttaatttttccagtatttaaggaaatccaatgatggctttagcttctggctaatagactgagctcaaattaaacaagtaggcaacaaagatacatggatttttttcaaatccggcatgtggaaatgctggagtttttttaaagcacactccagtactcttcttgcctggaaaaccccaggacggaggagcctggtaggctgcagtccatggggtctcga

SEQ ID NO: 36020 - DNA, 1194 bp, Bovine  19866882107621
  misc_feature (1)..(1): n is a, c, g, or t
naatacatgatagtaaaaaactctttcttttccttgccaaatgtatatatttaggacctagggcagctccctccagcattttgcattacaaaaattttcaaacaaaataaaaccactctgttagatcctgcaacaatcaaaaactttccaggcccagaagatacaattatttgtaagtgaatctctatagaaattgagattgtttcagtcaaaagtcttgcctccctgttctcagaatgaattgtagagcccctggagcagacaagggtgtctaaggttaatctctgtttctatatagatatcaattaccttttcaaaaggctgcccagtgggatttgctacttggcagcttgtctaaaaactagctaaatgtactaatgtgtgtggcaggggaggaaaaggtccagtttggttgtcaacctagttgacccttccatttttgtacaaagaaaaaaatatgtttcttttttaaaaagggagagttttaagccctttcagttgctaaaatagctgatttcacagttttgttggtttatttttttaattgaaaaaaaaaaatgggaagccatgataaaccctcacgtgcatagcatatgctcacctgctagtatgagtctccttcatctcctcctctctcttcctagtgagaatattttatgatttctgaagatctgtgttttcattaagaaaagcagtaagcataatatcaggccccatagctccaaaagtaggttaaataataaaatgaagcccaggatacgagtgtaacaaggccagtgtcagaagatcattcatttatcaattaattaaatctttcattaagacagaaaatgatggttaaagggaacgatggcttttacttctgagtgcaaagtaaccggtaatgtcagaggagaaagcaatgctaaagttcatcttgaagctcagacttacagatctagaagggaagtgtggacgtgatgaagatatgcatgactccagtgcgggaattcttgcttcatcttggccacacaaacttggaagctgtgtaacctagggcaagttacttaacctctctgaatctcagcttcatagagatataaaattaggatggcaaaatcatctatcttgcagggattttgtgaagattaaatgaagtcttggttctaaaagtgttttgtggccaagaatatgctgtgataatgtttaggatta

SEQ ID NO: 36021 - DNA, 1570 bp, Bovine  19866880609750
  misc_feature (1)..(1): n is a, c, g, or t
naattttgaaaatggaaagaaagagaaagaataaagcattgatccggcctttcatagaaaaactgtacctcagagtaaccaaatagttgataaagggaggtttctctgtgtagaaatatttcagctaataagtaagaaaagaatggtaattttaaaatatcatgactttgctacccttaatacattaatgagcctgggtggtgacggttaacgccagttagtgagggagagagagagaaagcggtgaccagaccctagatacgtcttggtcatggggcacagtgtcaccaggggaacagcctcaccaaaaacgtggatcaacaccatgaagttggtgaagcatcttgatctaaggatcaatttacagaaaatactgggagctgatgaaaatactttcaaagttacacgtcagggatgcagtcgtcagcaccagctggtggggcttctggaagaccaacgtctcagtgtctccaacacatagattataagagagaaaagaagtcaacaatatatttcaagtttcaaaatgtatttgtaatttcttcaaagactgtttctagggttcagccgcagacgtgaactaactgggagctgatggcttatccataaggtgaagagaacgtttcagtgtcacatgtctatatgtgtggataaagaggtgtgctcagaaatgtaccttaggaaccgcagcacgaccacagaaagaaacacagagctttcagggcagcgttactgcttacagagaagctggaaacagctgaagtctccaagcggtgagaatggcccaccgcctggcgatggagacaagcccggccctgggcccagctggggcacagcctggacgtctgacctcttcccatgagcgccctctgggctggctttcggtgtaccatcttacgagtctttcccaatttatcccctttgggtccctattttttcttttgctatattctattttggcttgaacgggtgaattttcatgatccaatctgttcctccgttgacttttgtgtctattatttatctttcagaggtttccctcaaaatcaccatttttatctttatctttttatggtttactctgacccagtctcatccgtctctgtcatatgaagaccttcatgacataaagccaccctcagcctctcctgtcttgtctgctactcccttccacttacatttcgtgtggtaatctcaccgtgttttgtgttttgttgtcttaaagagtcaacttgtgaagaacgtggcagaagaaagggaaacactgcttttatccatcttcatctttactcttcccagtgtttgttattacttctggacaccacgtttctttctgataaaatccctcttcagcctgaagaacttccttcatcattcctcagggtgcagatcagctgggaacacgttcattcagctttaattccccttaaagtgtctttatttatccttaacgtttgaaagatgattttgctagatgcattcctatttgacagactttattcagcttcattttcttgctgccaatcattatttttgtgacaaaatatcctctgtgagttttatccttgct

SEQ ID NO: 36022 - DNA, 1782 bp, Bovine  19866880748183
  misc_feature (1)..(1): n is a, c, g, or t
nccatgcacacacggtcatgcggctgcttttacctgcgaggtctctgaatatcttcgatatgaccacagggacgccgtgttccacgccgccctggaagacaggcacaggggtgcagtgaagtcggattggggaccttcacagggaagtgtcgggggaaaagcaacgcattcatacctttatgctcaggcccaggccgcccacaggctgtctgcgaagcgtaacagttctgtgctttaaaaaatgtagaaaacaagcccagtttaggttaaaatggacaatcagaaagtgaatgcaaaatgtatacattaacttctttattaaaacttcagacatatgggggacatatgtatacctatggatgattcatgctgatgcttggcagaaaccaacataattctgtaaagcaattatccttgaatttaaaaattttaaaaaacttcagtagccatttatatttccaaaggggagctgcctaatcactgcagcaacagcaccatttcaaacctgcactcggcagtgctacagggaaacagacgggcctggtaagaaacagccggcaccgtgctggtttaagatccaccccgagctcctgtaaagtcggtcatctcaccccgttctggctctgagggatggaggccccgttcccaggcagcagatggggaggctacagagcgcatgctcagccctccgtttctaaagtctgtcatctcccctgacccccaaagaggctgcctgcgcaccgtgctgctctgcacagctcaccattttcagatcagtcgtcaagtaatcgatgctaacttgtgaacgatccaccatttcacgtcctgacccaatttaaagctgccagtgctgacgagaagccaagactaaccctgccgtggctgacgagtcggtcacgccacctctcaagtgttccaacatgtaaggtgtgtgtttggtctaaactgactatttgtcagtgaacagggttggccaaggattgatgaagtggtgtaggaagcgtgttcacctccaaaagtagcaatgggaataataaaaaggatgcacattgctttggtaatttctgtaaaaattggagagattcacagcaaatacgctggtatatggccaatatggagggtaattacttagggttctgcttactacttttcaaatgttgaaaaattacataatcaaaggaaaaaattataaaatgtttagtagactatgcaaaacactttgctattatgattttacttacctaaagtttcactgaaagacaaatttttgtgtcttatttgcacacttatatgcacactcacacaaacacatataaaccattatttattctatccttaagctaaatcacagtgtaaacttttataatgaatttggcccatctattcattctttgtgggcttcccagatggctcagtggcaaagaatctgcccacaatgcaggagatgcaggttcaatccctgagtcgggaagatcacctggaggaagaaatggcaacccactccaggattcttgcctggagaatctgtggacagaggaggctgcctggctatagtccatggggttgcaagagtcggacatgactaagcacacacacacacattcagtatctcaaggttttcatgttctcaaagccaatctgtccttgttgaagagaagaagactatggattgagtccacacacatttactgggcgaatgcacggtgctgagggccaggaccagggcaaattccacaagagtcagagtcgccgatgtcccggcagctgggaaattcctaagaa

SEQ ID NO: 36023 - DNA, 1009 bp, Bovine  19866880158322
  misc_feature (1)..(1): n is a, c, g, or t
nttgcagccatgaaattaaaagacgcttactccttggaaggaaagttatgtccaacctagatagcatattcaaaagcagagacattactttgccaacaaaggtccatctagtcaaggctatggtttttcctgtggtcatgtatggatgtgagagttggactgtgaagaaggctgagtgcggaagaattgatgcttttgaactgtggtgttggagaagactcttgagagtcccttggactgcaaggagatccaaccagtcccttctgaaggagatcagccctgggatttctttggaaggaatgatgctgaagctgaaaccaatactttggctacctcatgcaaagagttgactcattggaaaagactctgatgctgggagggattgggggcaggaggagaaggggacaacagaggatgaaatggctggatggcatcactgactcgatggacgtgagtctgagtgaactccgggagttggtgatggacagggaggcctggcgtgctgcgattcatggagtcgcaaagagtcggacacgagtgagcaactaaacggaactgaagccctcccctcattcttcacgaggggcagagaggtcagggggctctgaaaggctcagccctgcactgacacagttcggaggcagctggacttgggcggaagggagggaggcaggtacaaaaaccaatggcggagggggacgggagggccccattctggccctgaccctggagaccccatgcaggccccaccccgtttctgccccacccccggcacacggggccctccacggcaggcccgcctggccagtacatccggggcagtgggcaggggctccccgccctgctgcggccggtttaccctgagaacccgggcccccatccctgcattctggatttaagaagggagaaaatgttaaatccacactcgggctttgcgaggttgtaattactcgggtctatcaagaataaccttccctctttatcaagcgccatgacaggcccgccacaa

SEQ ID NO: 36024 - DNA, 1223 bp, Bovine  19866880410820
  misc_feature (1)..(1): n is a, c, g, or t
nctaattatagctaccccgtgccagtgcccacttcgaatctaactctcatgagaggtaggcgctaatcttatctgtacttcggctctgaggcgactgaagctcagcgaggttaaggaacttgtcccaagttcacattttgttcgtatttcatggacgttctggtttcgcaaatgcagatcccatctgcgagcacaggtttccaaaggcagaaggcccctgtagaatagaatgtaaactgcagcggggacgaagttgcaggaaacgcaccctgtactcactttctcaagtctcttgtccgtttcttttggcgcacctggggcccgggtggaggtacttgttttgatgacagtttaaggtattattagttatctcactataactttattgtaggaaaagaaagacattgccagctgtttagtttgagtgtctgtcactgagccacccagtgctgtagccacggtctacaggaggctatttacatctgaatatcaaggaatcaaaatgaaataagattagaagtgcagttccacagcctcaccggccgcctctcaggggctctggagccacatgtggttgtggctgctgttctggacgcaggaggagtggagtgtttccagccctgctgaaagtttggtgtgatggcgctgctctatagcgagcggttctcttttgtccttctggataagaattggcaacactcttggctaaagcttaggctatttttcactgacaaagagataaatttagccagacgtttcttttatgtttaccttttaaaggtctgtgtgtgtgtgtgtgtgtgtgtgtgtgtgagagagatctttcctcccattcacattcagtttttgacataaatttgagtttcccttttctcctgggcccccagaggggcttacgttatcattattgtgtgttttaccaagaggctttctctgaaaagatcagtacggcgggcaagtgatggccacggcttgaagccctgttaattccttgctctccaaagaagaattcagttcagcttttaaatatgcatttgtgttacttactccctacctgggctgaattcacgaagaaaaagcgttctcagcagggccaggaccaaagagctagaaaattaggtcacattctacgtgtggtggctgcctgccaggcctgaggtggaggagacagcctctggggtacccgagggtgctgtgtgggggttttcctgggtcgggcctgc

SEQ ID NO: 36025 - DNA, 4000 bp, Bovine  19866880438843
  misc_feature (1)..(1): n is a, c, g, or t
nactctttttttcggtttatgtattctgttctttccaagactgctaagttgtttggacataataatcaatttgtttggacctgactacttaataaatcaaacctcgcagcctggggtttctatgagaaaacatccataaacactgggggtcatacgtgccatgacctgaaaagtgtcagagcctttgccctgtattgttctgggcattatatgtagcatgttcaggcgcgaggagcagggacagaaagactggggacaaaggggccggcatgaagactgcacccaaaagtgtttctgcaaaaataacagctgagagcaaataacacgtaagcgtttgttaaatcacaatagtgggtgcagagatgtctcattttttcatccttatccatgtgttttcagtggttaatagtaaaggcagtttgaaaagaggacagaaggcggctccggtataaatttagggtgcacttgtgtgggaggaaagcagagagctggagaggtgggacatgagatcctaagaggttcaggagaaacgggctgaaaccaaggaggtccgaaagaccaccctcctctagactggggttcccagcccctggttacgcgcttcagactcagggctgcggaggcccgggtgttgggaggttggagaggtcaggagcgggaagagatggggtttgctctgagggcgtcgattcttaaccctggatgtcagttcctgtctcttcagaagtcttaaaaagggatgcttggcgcatctgaaaggcctgggcgtatggacatccagctgtcaggcacctggcgggcagctgggacggagagtcacctctgtggtccaggctctcgggagctttcctgtggtttagacgttgctgaatcacgtggaggtgtggattcggacgggcaggcctgggtgggccgttcccacgggtggtggtactgctggtctgagcaccgcactttgagcggcggcctcttgggagggggcctttttcagctaagggtggttgtgatggacgctcgttggagagcagaaaggtagtctggatctgtctccgcccggcgttcgcttttgataaatacccctcttatctttttttttaatcttttttcccccttatcttttgcggtgtaacattttacccccaaacttgggaactgaacacagtgaacgcttatcatctctcggggctcctgtgagtcaggaatccagaggcagctgagctgggcggttctgcccgggggcctctcctgaggctgtggtcaggatgccggctggcccgaaggctgctgagcgatgctgtcacttcggtgtggagtttgccgtggttgttgggtagtggtctcagtcccccgccccgggggcttctccgtgctgttaagagagtgtcttcccaataaggcggtgcttccccggtggctcagtggtaaagaagtcacccaccaatgcaggagatgtgggttcgatccctgggttgggaagatcccctggaggaggaaatggcaccccactccaggactcttgcctgggaaatcccatggacaaagaagcccggtgggccacagtccgtggggtcgcagagtctgacatgactcagcagctgagcgcaagtgcacggaattgacagcgggcttccccaggcccgcccgcccttctgctgcatccggctggccgcagcggccaaccccgatgagtgcagggggtgccccctcgtgagcaggaggattactgagccccatctgggaggctggccgtgatacgccttgatgtcttcaactaggaaaggaatgcccgtccaacacgagaacttgaaaactatgaaaagctataaagtgaatgtctcccatcacgtcatgacccagaggaaagttctgtgaaagttgtggtccctgtcctgccagttaagaaaaaagaaacgcatggattttcatatgcagacgcacacatagacacttaaaaacagcagcataacaccggccctttcacacagattgttcttttccttggcatcaaatctggcacgctgtcagtgggtccgtttcagttacgcttgggtttctctcatagacggtttgtaggatatcaagatttgacaccatccaaatagctggttgggttttcaaagtttcatacatttctgagtgaagaaaaatgttctcatcatgtaaaaacttcttaatttggatcatcagttcttgcttcgggtgcctgaatgatgtaataaacacgctcgagccttcaaatataggatttgagtgaagaaataaagaatgagtttgccagctgatccggcatcattgcatgtaattgcaccatctctggttgcttgtcatgagctgttggcagttgttaaaattagctttacagtctgcctcagagtagcagcaaatgtagtaaatgagcactcactcttaatgaaactaatttgtatttgaaaatataactacatttattgcccccattatttaaatacatgcctgctagttggtagtaaaaatgaactttaaactgaggttttggggttttttttaaatcccagctgaaaaataatcttttcagaaggtgatccttttcaaagtggttttccagtgttgtgtgggcatctgggcttccctggtggctcagctggtaaaggatccgcctgcaatgcaggagaccctggttcatttcctgggttgggaagatcccctggagaagggaaaggctacccactccagtcttctggcctggagaattccatggactgtatagtccttggggtctcccaagagttggacacaactgagcaactttcatgggcatctggggaaatatttaaaacacaaattagaaatgctttaaaagtaaacacttcaaacatttgaaatgacacggtggaacttctgtggtggcccaggggttgagactccgcctggcagtgagcgcggcgctggaaggcaagttcagtccctcgtcgggaagctgggatcctatatgccttgtgaccaagaagccaggcatgacaatggagtcagtgttgtagcaaattcgatgagggctttggaaatggttcacataaaaaaatcttaacaaatacgtaaaatgacacaggatattgtgtcctgttgctgatctcttttttctggaaccaggtctctggggatgtgccatctgtttgatttcacagtggttccctctgaatgccctgcaccccacccagacttctagaaccaccagcctccctgtaccacctgcatccctttgtctcctttacctgtggtctccttgagggcatgacccaatctttccatttttatgtttcctaattcagggcaggactcaaagcagcttataatacgtttgcattgagtgaaagaatgagtgaacttggaacataaattctctccctcatggagctgacgattcctgcacgaagctggtccccatatacaccaaagacacacttccttctgagcttgattcagagagaattgcttttccagaatgtcaccagttggagggtctttgcttctgggtcatttgcagtgtctaatgtcctgtccttgcagttgggtctcagaaccccccggtgattttctgagtctcctcgccagtcagcatccagttcctaatgacgtttctagtagagaactagaaggatattttgtctctctcgtcactgtctcaccataggagtggggaaaggctttctctctttttctgcctttgaagacgtcttggatgggttttcttggtgccattagaatggtatcatctgcatatctgaggttcttggtatttctcccggcagtcttgattccagcttgtgatccatccagcccagcgtttctcatgatgtacgctgcatggaagttaaataagcagggtgatagtatacagccttgacaaactcctttcccagttgtgaaccagtccattgttccatgtccaattctaacttttgcttcttgacccacatacaggtaaggtggtttggtactcccatctctttagtaattttccata

SEQ ID NO: 36026 - DNA, 2371 bp, Bovine  19866880587035
  misc_feature (1)..(1): n is a, c, g, or t
nccgttcttggagacccggaagaggaatggtgacagggtaatactgccggcacttctgatggctcttcggtttgttgaaaagggcaaagatctcccatttctgcggggatgcatagagagaacgggagacgggaggttaaacagtgacaaactgccttatcgggctggatgcgactaacaggaacctgcaggcagggcatcacaggccagccttctgctaggctgcatgtcgcctaacaggaagacccaagcagcacgttaggcagccttgaaagtgacatggaccttgaaggccgagtcccatggggactgccaacagaaggccggcccttgtcatctgcgcccatgatgatgaagtcctcggccactgcagccacggaccttcaataccccgagaggcattccgaacggagaccaggaaaggggtactctgtgctctgagaaaaactggcaggttaagcctttagataggtattttcaagagagcattttatgagcctaattcttgtatctcctcaaatcgagaaaaggactaaaatcgttcctggtgacatctgctccttgtcactggcagcaagcctctacccaaaaggtgtaactgaccacacatatctccttcacaaaaatcgtatgttacactgacctctcctcctacctccctggagccgtttttcagggctatcggaaatgttgtctcccaggctaagtcctcattctgtccccaataaaacttaactcgcaactctgacgctgtgcgttttttagtcagcaggactcagttctgaatatgacatatgatgaacagctgttagctgggatcaatttgtatggttaggtgtttgaaagaaggatatagtagacatttctagaaattcatacaaaggggtattttagaagaaaaagcagacatgttttggggcaagagctgatctgttttttctttttcttttaaaggaaatgcacagaggcacataaaatcaaaaatactgccgtaattccaggagctctgcacctccctgaattcactatttataaactgcagtggtgtttcctggggccgaacgcataatacttaatcaaggacatcaaaaatacatcactgaaatgtaaaaataaattcgctccagtaaatgagggttcctgcgtggagtgataaggttgctccaacagccaatgggccctgagagtaaggcgcagcttccccggccttcctttatggctgggctctgtaaaaatcgatgctcactgccacccggcagctgacccttgcctcccgccctacgtgcggccggccacgagtgagcagtctcagcctccggaagcaaatacctggaatttcaatctaaggctgaaggtctatttttgtgttactcaatttagtcgagcaaccaagaattcaccccgcttaaaaagctttgcttacacaggccactcaggaacatgctttggttgccaaaaatatcgattcagataagaaaatccccaccctccttccaaagaaatattctaaaggtcataaacaatggctgacattagcaaaaaggataaaggacacccacacactccctgtaggagacaccttgcctggaccccacattctgggacactgcatcccatgtttatttcccagttttccagtctccaaatacatgacctttgaaaatggatccactttcctttatctagataagtgtgcttaaacaggaaatggagcttcatgaccataaagggacaccgttaccatttgccacaaacaggagcaaacggtgaggcattttcacaccaaaaacgtttctccacatagcatctcaagttatctcacaggacgactgtattctgggacaaagagagtctttccactcaggtggcacttacccacctgagtaagtgccagcagagacctcagggagcaattctgggccaaagactttgctgtcagccgtttcgagcaatccaggggctagaatcaatgaggaaggaggggacgcgtcttcacaaacagccacccggctctccaacaaccagcactggcctgtgcctcgtccccaccccatagtactttctcggtccacttccctgactcaggaagccatcggaaaaggcagccggcaagtgctttcaggggagaaattagctcttggtatatggagctagcgatcccctattttgtgactttcaaatacaagcgttagctgtggcgtcatgccgagaaaggtttatagagaatcaagcaaggggattagggctggggggtgggacagaaagtgcccttttccagtccaaggagttggggttcaagtaagagctgcagctgttgaaagggaagagtgggagccaggccttacttcatctcttcaaaagcagaccctat

SEQ ID NO: 36027 - DNA, 1299 bp, Bovine  19866880597032
  misc_feature (1)..(1): n is a, c, g, or t
ntggtataagctgtttaggaattttggacaacatgaagttgtagagatccagtctatttggaaagaatattaatatggatcatatggaagatcaatctccaaaggtcttaattcagtgccagaaacaggttaacgtacttgcttgtgtttttatgtggtgggaacgcgactgtctaagatgatgaaagttacctgcacttctaagagtatttgtcttcatatacataaatcatgaagttgaggttaaaactaatcctgccttaattttggtctatacaacataatagctcataatgggagctttatatcgccctgtcctgatgtaacttctatgggccatatcagcagtgcccattgttttataatccctaataatcttcattctgaatctaaggggaagaatcttttaacttaagcattcccaagagggctttcttgtgcctcagaatttgaaagcaccctgaaatttgttcttttaaaaattctctgtactttgttatgtgtgcatgctataacattcttacatgtatttattctgtgattaaatcttcagattactgtaaatgatacctaaactctaaagagtcaaatataattatcttaatatgaccttaagaaaagtaagggaaaataaaaagtaaacttttatttgtctgcaattttgttggactgaagtatttaaaagagtaaggtagaaagaagagacaaaatcctaaacctttcaaaatggaaaattaattttaaacttaaaagtgtgttccttcctatgttgatattgcctttgcataagtgaataagtagaaataaacttttttcaaagaaaagtttattttcccttttactatttttttttcagaatacttgtttaaaaacattaatgctacaatttacattgtagaaaaattggaaaatactcaaattaattttattatatgaaagtaagaactggattctagtatcaagcgtgccacggctagttccttttcttgacatcagttcccacaatttcaaatgagaagattatgctaaataaatccctaaaaacccttccaggtctgtaatggttcttttatacaaaaagttgcatttgcataatgctttatattactagagttcattcacgttggtcctacattctcagaactgccttgtggggtgggcaggacaaaccttgttatatctcctctacatgggtgaggaagttgagctgtaaggaattaaaatgatttctttgaggtcacataaaccacttggaaccagccatgtactggttctacaatttcatgttataatttatga

SEQ ID NO: 36028 - DNA, 767 bp, Bovine  19866880606781
  misc_feature (1)..(1): n is a, c, g, or t
ntgttgagatgtctcacttgtatttatttggaagatactttctttttaccgtctgtataaaaaaaggtttccactcatataaaatctaattatggtttttatactacctaattttggtcatatggaattgatttttttttaattaggcctactcttttttccaaagaggaatcttgtaccttgcatatgatttgacttcatgaaacttagtttatgtcaaaagccaagtgatttttgttgtgatagggaagaaaaattttagtttaaaagttatgtggaaatagcttaagaatcatccatgtggtgtgattaatgtttttattactctcttgtattttagccctcactggtgcaagctatatttaatggagatcctgatgaagttcgagcactaatatttaagaaagaagatgttaactttcaggtaaaacagtttcactgataccagccttgaaaagcgtactttgctagagttgatgatttttgttaaaagacctaacacaattctgtaagtttgtctaagcaaaggtaaaaaggtcttgaggcaaaaaggaaaggactggatatgtatattcagggtaattactaaaacctaggacaactaggagtcagtgaaggatttttgttcccccaaccttttactttgaaatttttcacagaaaagttgaagaactttttgaatacccatataacctccatcattgataacatttgccgtatttgctttctctccaatatttacacaagttatttttatactacacata

SEQ ID NO: 36029 - DNA, 1448 bp, Bovine  19866880632523
  misc_feature (1)..(1): n is a, c, g, or t
ngatctaatttaaaaatagaggagggataatgttttttggattgaaatgtttaaaataaaaaatttaagtaactaaatttaaaacaaaaggttctagaacagaccttgtctgatagaaatataagatgagccgtgaatctattttaaaattttctagtagcgacattaaaaataattaaaacaggtaaatcaattgtaatatcatcggcttaacatgtgatcagtaaaacactctgaaatattttacattcttcttttttccacaaagtctttgaaatcatgtgtatttctcacactcccagcgtatctcagttcacaccagctgcatgtcaagtgaaaaagggaagcgccaaggaagggaaggaacgttagaaaaaaccttcagatgcgttatgagcacttagatgcctgtcagggcctcactggcagtctcaaaggccacgcttcctggtggtccatttcagtaaatatcgttggctgaatcagaggagtccttttcctgcctggttaatatccatctttctcttctcgtgcagaccgtcattgatagatggcatctttctgggtgaaaacacgggtttttttttttttaccatgtttcttctttgttctatgacttgttctatctctgttacccatttttctacttaatctcattctcaggctcttccgctcttccactgaaatgcgtgagaaggcagctgggaaggattttatatgcgtgtgtagacccaggcagcatcagggaccccctttttcagtagtgggaaccaaaatgcctcctaaaatcagtctcctgaggcatcattgaccgcccccagcccatgtcttacatggcaaaaaatgaaccagagattgctgaggacaattttgcatgcaaattggtgagtggagcccatgtgtacgattttctatttccatgcaccaatttgggagtttgcacatgaacgcggtaattgttcatgcaaagctgaaaatgcaggtgtgaagccttttttagagcttgagagctgtctggtcctatcctcatttgagtgctgttgaatcttttgtgatgtcatacacataattttatttattaaatgcattcacaatatgtggaactttcggtaagtcttgcaaatggctcattgactgtgtcactgaatacgtgtctccactacagcagggagagggggcccactggtctgcatcgctggtgtgtctgggaaccatgcctttgaaaccacgagtgggcttcctttgagggtagacgtggtactaagcctgcagagaatgggatttattctgttataaactcttctttttttcatgattgaagtactgacatcctatttttttcaaattttggtaatgtgaatgtgaacttgctcgttcgtgtctgactctttgcgaccccatggactgtagcccgcctggcttcctcagtccatggggttctccaggca

SEQ ID NO: 36030 - DNA, 2736 bp, Bovine  19866880734053
  misc_feature (1)..(1): n is a, c, g, or t
ntgcgaagagttgactcattggaaaagaccctgatgccgggagggattgggggcaggaggagaaggggacaacagaggatgagatggccggatggcatcaccgactcgatggacataagtttgagtgaactctgggagttggtgatggacagggaggcctggcgtgctgcaattcatggggtcgcaaagtcggacacaattgagcgactgaaccgaactgaactattttaaatatataggagatttttacatgaaggatggtatatgagttttcatttttgacataagaaattagcagcaagggcacattccattaggaataactaaaacccaggaactgcaacactggctacgaggtgcttttaaaatgctccttccctacaagtctcgaaaacagaaatctgcagaggcttgacctaatgacaacagtggagttcatccctgtctaaccccctccccttcttgcttgcctatatatttctctctttatcggtaaaaatcgaagagtaaaagaggctaagaaatgggagagaagacattttatccaatggtcaccttcagcgtgtttagtgatgacaacaagcaaagcctttaggttattgtttttagaaaccagagtattttcaactctaaagttggcaagaaaatgtgccccagggaaagataatactcaagaagcctgttgtctctttagtgacaagatgatcttcaggagatctatctcctaatttgctagcatctgcaaagaatcaaaagccatctttgtcttttgttgatcaataaaaaccgccagggtagcaggaacacgaggcttaaaagtactgtcgagtataaaacacaagcacgtaaagggacattacctccaattacacagcaatgtatctaatttgggtatagattttctacttgtgaaataaacaactttttcacagcaactggagcccagcacacaatagctgtctagaaccctttaccctgccaggagcttgagccaaattagatacaataaaggaagacgtttatggcactttattccacgtcccagcagagcagcctgctgccacccagacactcacgtgccactattgtccactctgatagcttaataaagacaaatcctcaggaggaaaacagccacgtgagaacagttccaagaaaaacctgacttcataaaggctgcctgcaactcccactgggcagagtggagcaggcaccacgattaggatgtgcattcaagcaacgccactcggagattttctacagcctcttagaataaattccttcattgaaacatcaatgagccatgaaaccaaacagggagctatggaccaggaccgggtccaggtcacgtgggtggccgacggccggaggcagcgcgtggcactgcgggccggggtggctgagctcctttaatcagagctcggggcacagggcgcccctgccactcccgcccccagggcgtgtgttatcagttcaggatacattctggagatagaaggtaggggaaaatccacagagaatctaaaaaggaacgaggcagccgagaccacaccaaatgaaggacacagaaggtcgcagggaacacatgtgacaagaggcacttcctatggaaacgctgaggcaagcagctggagacgtgcctaaactgacagtgtgcgtgtaagcctaagagtatgtttttatgctgctgtaggtttagagatcttttagtttttaaaattatcttccagtaacagttttgtttttctttttgttacagtttgatgaattttaacacaaacatagagaagtgcaactaccaccaaaaccaagatactgaacagtcccgctagcacccccaaactccactttgccatctatccctttctgctcccacccttgccccgctctaccccatcaagcactggtctgtttttattgctgtgtttctgtcttccagactgtagcacaaatgagactggcttctttcacgcaacacagcacccctgagagtcacctacgttggattgtgcgtcagcagccgatctgtttttactgctgaataacaaatacaggcagacctgggaaacactgcagatccggctccagaccactgccatgaagcaccgaaatcaagagtgcctgcctgtgcacgttcagtcatgtcgcactccttgcgaccccatgcactgtagcccgccaggctcccctgtccatggaattttcccagcgagaatactggagtgggttaccattcccgtctccacgggatcttcctgactcagggatcaaagctgcatcccctgcactggcagcaggttctgtatcactgggccacgtgctggagcacagctactgctcgctttcccagtgagtataagttatgcttacactatacttcagtctttgaagtgtgcaatagcattatgtcttaaaaaaatgcacataccttaattgaaaaatactttatactattaacactaagctacagcaatcaaaacagttttgtactggcatagacagacagatcaaaggaaaaggtcagtaagccccgaaataaatccacacttatagccaattaatcgatgacagaggaggcaaaaatgcacagtggagaaaggacagtctcttgactaaagtggtgctggcaaaactggacagctgtatgtaaaataatgaaataagaatgttctctaacaccgtccagaaaaataaaacctcaaaatggattaaatacctaaatgttaagaccagata

SEQ ID NO: 36031 - DNA, 2547 bp, Bovine  19866880743932
  misc_feature (1)..(1): n is a, c, g, or t
ntgggaagccgctgtgcagcacagggagctcagcttggtgctctgtgatgacctgggagcgggatgggggttgggagggaggcccagcagggagggagatatgtgtgaatacggctgattcacgctgctgtacagacgaaactaacacaacagtgtaaagcaactccattcgaattaaaaaaaagtcaatgctttaaagcagaatcagagcattgattgtgcagcccccgtgccagccagccaggtatccagctaagccacctccacctctaccccccaccccctcaccggccagtcaggccctgggtccacccgctgacttctctcaacccacccaccctcttgtcccgacagccaccttcactccctgctcatgattgcaacggcttcaagatggtctcctctcccccagttttaccccttccttccatcccttctctttctaaacccagagctagctttccagaacacaaatctgattgtgtcacctaccctagccccatctcaagagcctttagagctcttgagagagactagactcctcggtccaagacctaagaccttcagtcatctggcccccaaaaggacacacaccaatcaacttgaactgcccgtggcttctcaagtctgtatgttctggctcctcccacaggttgtcccctttacctgaaaaggatcatctattcccagcctcattcgccaccttgttgttcagtcactcagtcgtgtctgactgttcgtgaccccatggaccacagcacacccagcttccctgtccttcaccaactcctggagcttacccaaactcatgtccattgagtcagtgatgccatccaactatctcatcctctgtcatccccttctcctcccgccttcaatctttcccagcatcagagtcttttccaatgagtcaactcttcacatgaggtggccaaagtattggagtttcaacttcaacatcagtccttccaatgaacacccaagactgactttctttaggatggactggttggatctccttgcagtccaagggactctcaagagccttctccaacaccttctccatctggctgactccaaatccagctgcaggtctcaaaccttccttgacacacacacatcttccaacaagggaacctttcaccacatccccttcatcaccagcactctagtgacttggctcttcatctgtaagatgccgagcaatgtagaccagtaggctaggccagtggtatggactgaatggtgtccctttgaaatccagatgctgaagccccagctcccagggtgagagtattgagggtgaggaagtaactaaggtgccatgttttggggctttcccaggtggcccagcagtgaagaatccacctgttaatgcaggggccatgggagacatgggttcaatctctgggtcaggaagttcccctggagggaaaaaaaaatggcaatccactccagtattcttgcctggaaaactccatggacagaggcgcctgatgagctacactccttgaggttgcaaagaatcagacacgactgagcaggccatgacacaagtaactaaggaaatgaggtcataagggtgggactctattcccataagaccaacgacctcacaagaagagacaggaaaggggcgctctgtctcactcaggggtgaagacgcagcaggaaggtggctgtccacgggtcaggaagagagctcccaccagaacccggccctgcaggccccccgatcgtggaccttcagcctccagagccgcaattaaaaataaatatcatctggagaactttgctacagctccagacacaacagctgggtccagtccgcagtcagtaaatatgtgtgacgtcgatgaacagtcatcctacggcccctagtgaggccaggagcaagctttcataacacaaacggtacgttaatcggattagggatgcagagtcagacctggaaccgactcttcctacctcaaaaaccgaccgggagagcaccgccccacaggactgtctgctctgggggtgagtcctctgcgatggccggtacagtagccatgagccacacgcatctgctgagcacatgacatgtgcccgggatggcagagcaacggatttttactttgattcctgttttttcatatatttcattcatttgtattcatatatttgtttcatgcgtttatttcactcagtgttaactgttatactaaactgccacgtggctggtggctcctgtcctggacagtgcggagccacacagtcaggcaaaggtcatgcccgaggcattactgtcgccctacgggtcacagactgtgcccactgctcctgttacaaacaccatggactctcacaggtagctttccagtggtgtcagtggcctggcaccgagaagctggcaagccgcacacataaaagggctaacgaggcacccttctgcaggaatcgcgatgctttatgggcctccacctgcgaggaaacccgtcgaagggcacgttcacccctcggtatcagagttaattaaaattgaaggcccaatcaaatcacccagaa

SEQ ID NO: 36032 - DNA, 1517 bp, Bovine  19866880748343
  misc_feature (1)..(1): n is a, c, g, or t
ngagaggcgaggatacacactgtaaagcagttctcggagtccgaggcctgggagacggtggacagcacgtctgtgagggcgtcatgggttctctgtagtggaaattctgagacaacgcagggagagagccctcgagtcgggagcagagccagtggctagagccttcccctcacgccctgcctctcctctctgcaggtgcctgcagcagccgccgcccgcggacagcctgcccaccgccagcgtcgtcctctgcttccacgacgaggcctgggccaccctcctgaggaccgtgcacagcatcctggacacggcgcccagggccttcctgaaggagatcgtccttgtggacgacctcagccagcaaggtggccgcgggcttcctgcaggctctcttgggagggcctggaccctgagggcctccgtgcacagactggagtttggagcctatgtaggcgggagtccccgaagccgtcccgcagacggggattcgggtgcaggagactcatccgggaagagccccagaggctccgccccctgtgacacccccagagtgtgatgctggctgcaggcgaggaatcagcagctggagggtgactgtgctgctctctcgttattggctcttttgatcgcagtgcagggcatgtgggatcttagtcccatgcccctgtattggaagtggagggtcctaaccactggaccgccagggaggtcccttgtgctcaccttttttgtaagggacttgagcactgaagcgtctgcagattttggtgtctgcagtgggtgggcggactcctggaaccaacgccagcaccccgactctgaaggatgaccgtacgttggtctttccatctctgctagtgctcatctgggcgctctcacacctgtccatttgcacagtttttctgattttgaatgtgctgtgctgtgcttagttgctcagtcatgtccaagtctttgcaaccccatggactgtagcccaccaggctcctccatccatggggattctccaggcaagaatactagagtggattgccatgccctcctccaggggatcttcctgacccagggactaaagccagttctcccacactgtaagcagattctttaccatctgagccaccagggaagcccaagaaaactggagtgggtagcctatcccttctccaggggatcttcctgacccaggaattgaaccagggtgtcctgcattgcaggcaggttctttaccagatgagctaccatgctaatatcctctttcaaataaatgctaggtagagctggagtctagggtaggtaatgagcacgtgacaggtgtccagagttgagttacttttagaccccagctcacgctacatatcagcattagtcctcccacaccccctcgtttaatcttttcatcctctcttcagttttctccctccatctccactctcacctattgcaatcggtatgctactgtgtttcaaacttcatcttgtatccacagatcctgtggggtgggtttagaagctatgcca

SEQ ID NO: 36033 - DNA, 1937 bp, Bovine  19866880808825
  misc_feature (1)..(1): n is a, c, g, or t
nccttgacgtgccccttttcctatttggaaccagtctattgttccatgtccagttctaactgttgcttcctgacctgcatacatgtttctcaaagaggcaggtcaggtggtcttttatctttttaatatcctttaatattagaggagcaaaaactacaagtatatttttggcgatttggtgttatatggggctatttcatttgaatatgtttttcgttgccaccaaaaaaggatcaaatatttaatttaggagaactgcaaatcttagtgttgatgcagattaaatcatgaaacttttcctgcagttaacgaaaagttttttttgttgttgttcgttttttaagaaatagcttttgattgcatttcctcttcttttccatttgaggaaactctcggattaaaaaggatgaaagtcagaaaggacctacttagctatctttagtattatgtttttattagtgtaaattaattagggtaaaatcagataattcaaacagcttttaaagattttatatatgtgtttggtatgtatgtatgtagatggtaaacaagagcttctctattggatagttctctgagtggggggcagtttcccctactttcggaagcttgtgtgctaggcagtgtgtagttctagagtgtcagactgggtcatgccaggagtgagaactttgaacagcgagggaagggacagtcacgttctggagaaatggagttagctggacttcagagttagcaacagctggcttttgagggacataagagcaaactgctgcatgaagggtgggcagtggagttgaagccagcagaacaaattggaattgcaagtgtagaattactcgtgtagagccagtaagtagcctaatccaaggtatgggcaggtaagttaaaaaccagcatgtctgttggttaaatgattcgaacagagatgcctggaatccagagacctcagtcgaggagactgggggactgcagcctgcagacattctcagctgatactgtagtgggtcagagagggaacctaatagaagtatttcccaactcagaaactggttaagagttctaaatgaaacactatatagatgtactatagaaatgctctggaaatttgtgtatagggttaaagcacttatttaacagttagtgaccttggtaatttaaagaaacttattttaaatagtcccttaatgaaacaaattatctttcactttatcttttatcataaagctggatttctgtatatcatcctcacttaaatttagatgtactgactggatcgcttaactgttagagatgatcagtaatatctggattcttttgtatgtcctggtgcattactggtttagaacctcctgtgttttggcttttaaattattgcttttgagatgctgcttaattaacttcgggtctattttctttgcttactagcagtgttccaccgactgagagtccaggttctatttataaagtcagaagaactccctacccttcacctagtttcctcagcacctagaagccacacttttgagcttgggattccttttctctgaccttaatgtctttcatcatgggttatcctctttcttcacccacacctgtgctttgctgtgttagaaccgacttcaccttgttggctaggttcactttggccacaaacagacctcttgagaaacttgacctgctgactcgagcagtactggctagggtagtgttttctgaatcacgggacagcttttcctatggcctctttaggggtctcccagctcttccgttgcacccttttgtattagtcatacctactcagctttcatctctgtttttccacctcagtctccttttttgagtccattggcacctctggggcctcagctcttaacttatatctcagtctcatccctttcatctggtctgctacctcctgcaatctgtctgtcagg

SEQ ID NO: 36034 - DNA, 1006 bp, Bovine  19866880907410
  misc_feature (1)..(1): n is a, c, g, or t
ntactgtgctaagcgtagggagctaagagttgtaacctgggggaaactttgtaagacctgttctttcagattccttccagagttcctctgtcttggagataaagatcttcctttctcccaggtatagggaggacacctctcacatgagggtcttatgaccttcttcaggggaaggtcaaagagttctcatattccttcagcagaaaatattcaacccaccaaggtgccatgtttgggggtggcatatcctgaacatccccagcgccccttccctcaccaaaaccctgtaagaagagctgtgctggggagagaagggcaacgcatctgctttgaaagaacaggggacgggtagctgcctgggacaagggcggtgggggtgggagcaggggatcttagaagagcctcgggggtctcgaggaacaaggcaagggtcctctagcaagcaggcgaaaagggagcggaggatgatctcggtctcggtccgagaggacgtcgaggggcggcatgggtgtgagaaagcgctcggcgtgctcgggacggccgcaggtgtgaggcgtggtgtgcaggcgagaccagcggggagacacacggcagaggcagctgcgggttaggagcccgcgacggcccgagaaggagcgcgaatccggagggccccgcccgcagcaccccggaagtcccctccgcgaaggcgggctggacgcagcgccgggtgagaccggtgagaccgtctgagattgtgcagcgagaaggaggacgtgtcggctcccggcaaaggctcagcccagcgcccgcccgctcaacgggactgctggcagacagcgccagaaataaatacccagctgtaacagaaccaaggcacgggtgttttttcaagtaaacagcctcacttcacctcacctgaactcacatgaattctcattttgtcctgctggctggaaactgccgcaggaatgcaggaatttactgataaggtgtctcagttggaaggaaaactgagcggcatcct

SEQ ID NO: 36035 - DNA, 3507 bp, Bovine  19866880938300
  misc_feature (1)..(1): n is a, c, g, or t
nattctccaggcaagaacactcggggtgggttgccatttccttctccagtgcatgaaagtgaaaagtgaaagtgaagttgctcagtcgtgtccgactcttcaggatcccatggactgtagcctaccaggctcctctgcccatgggattttccaggcaagagtactggactgggttgccattgccttctccgagagccattcataagcaattgcaaattaaaattttgtattatattgttactgaaaattttaaaagctcaatttattaactttttttggagaaggcaataaactgttctttatctaatgaatcttactgggattacttatttaacaggaaaatgatcataaagattaattgaaagtctttattcctccattatttaataagtaattagaatcgttcagagttcctagacttattttgaaaggaacagttttatagtatctcttacctgacttatatacagaactctgtattatcttgtttgagctgtgccatagttggaattttacaattttcattttagtctttaacgtcctgttgttttcatccaaagatgttgacaatagaaaacaaatgttgtgagtgccccctcacccccagcttttggtcagtactttgaatggagtcttaagagacttaacattgtattttctgagtttgttgtgtttgttgttgttgttgagatatagttgtcccataacagtgcttaacattcttaaggataaattctaaagtgcttataggcaaggtgggaacaagacagactcctgacagaaacaggctgtaacttagactgtactttagccgttcactggtttattcttgatttaaatgtgttctgaagaaacagaaccagacaagggtgagcacgagtgctgctgtgaggagagactgcggccttaaggcgggtgatcgtgcgctgaggctgctgagtggcatccctggcctctccccacttggtgccagtggcagccctcagtatgtcaacccaaaacatctctacacattgccagatgtccccaaagatacaagtaacacctccttcccaccacccattgagacccctgtgttagagcaagaaggctgttttcagaggttgagaacatggagcctcatgttgacggtggaccgtaagttccaaagagcatggtgggagggttccaggtgctgggcaggagtcagagattgccagggacagaataaggctggtccttaacaggggtcagactacaggagatgaggggtaacctgggaggcagaggtttctgggggtggctggcataagccaggagaaatcatcagaggttgaacttcatttacaaagtagctagtttacagattatctgtgttgggaaacataaagagctacccactttagttggaacaagtaatttgaagagaacaggtatttgagtgaccaaatattggagaagtagtagtgcaagtagtgattaatacagaaccttaaaacatgtgttttgtaaatgtgatttccaagaagtgggagctctgtagtgaagatggacatgtttgtttataaggtaaggtgcgtgcgtgctaagtcatttcagtcgtgtcttcctatgtgatcgtatggactgtagcctgccagtctcctctgtccgtgggattctccaggcaagaatactggagtgaattgccatgccctcctccagagggtcttccagacccagggataaaatccacgtctcttacctctcctgcattggcaggtgggttctttactactagagctacctaagataataatatggtgcattaaatatgaatttgggtctaaaaactgggcaagattattcaagattatatttctggtgctgactttgaccaaggatgaagtcatagagcaaaggaaaaacttaacagagcaagattgactgtgtaacaaaatgaaatcttactattgatgcatctgtgacacagacactcagtgagtaatgtaatttcttgttctgtcttaggatcagttcacgtgtggagagacagtcccagccccttccaccaacaaagaactagttaaatgctgaagaagatttttaggttctaaaacctgaacttggggaatgaggcaagctggaaaagtctaatgcggagtcactggcttctttacggggacagtccttttgtggtttgctgttcatgagagtctggattctttccatcaggtgccaagttcatctccaattgaagaagcaagtccaccacatgacatgcctggattttgtgctcaaaaccttgaattggaagtgtttccatccaaacataaaagaagataatttcaaatcagtgcttttttccctcagttttatttttatatctttacactattacttcattatctgacaacagcatcatctacctcaaagcattaggtttctttaacttaaaaagatttttattttaatcacttacgaagattttttaaatcagccctttctatgcaatttgacgtcagctctttgctgttgtaaactgaaggaagtcagttgcctctagtctgttgggactgcgccttctactccctcaccacgctgaccttcgtcagggatctgtgttctgttaaacgtgccacttcattatgcttcatatactgggtcctggtggtggtgcaaagaaaaaatatactgagctcacaaagttagtgagttaagaagaaaagtcaaaaaacaaaacagtcaaaggatagtggacttcccttatcaatattctgcgttttccttgaaaatcaggacaagataaaaaacagccaaaggaagtgaaactggtaacagaacgagaagagaaaactatgcctacttagttatttaattaaatgcttgagtgctttttcgagatcagtgcaactaatatttctgtatctggcctcttgtgtgtgtatttgtttttcgataaggctaatgagattttactctagacgggttaacgtcaagtcttcgtggctggtggctgtgctttcagcactactaccaaatcagtcactagtcctaaaaggtaaagctttgataacagcccttgtatttactaaggatgaacttgaaaatgagatgcctgttctaattaaatatgccctgagggcagatatgtgctgcgcttagtcgctcagtcttgtctggctctttctgaccccgtggactgcagcccgccagactcctctgtccatgggattctccaggcaagaatactggagtgggttaccattcccttctccaggggatcttccccacctagggatcgaacccaggtctcccgtattgcaggcagattctttactgactgagccaccaggaaagcccaagggcatataggtaagcctttataagctgtagccacacatacattcactcttgcagagaattgttaccctggagaaaaagaaaaatacaaagataggccattggtcttctttgccacagccatgagagtagcaagaaatagaatcacttgcatgggaaattccaaatttccctttaggtacatac

SEQ ID NO: 36036 - DNA, 729 bp, Bovine  19866880964695
  misc_feature (1)..(1): n is a, c, g, or t
nctctgaaattgtggtggaggaggaggattaaaaaccaaaggacgtggctgcacatgataagcacctttttaaagaataaaaagaaaacaaagcctattttcagttctctgaaaagccacacatgtgtcaacaagaacaattcctttctttactcacacaaattttgtttcctgattgcagggcccagtttcagctttttaccatggaaatttatctgtgactgaaaataaaacagtatcaaaactagaattaatgtccaagtctttacttccaagactttgattaatacccaagttctctaaaattactagtatcaggtaagatcagtgttaagaatataccaaatcaaaacttacagcatgaaaccaccttacttaccttcactctaataaaattttgagaagttatggaatttgatttaaaaaaaaaaaaaaacctttactctgtctctaatctttcctgtctctagttcatgaagctggatgttcaatcaaaaatacagaggttctgattaagttatgtaaattattccaagcctgagtttcaaacaggaaatatatttatttctatatcttataaaagaatgagtatatattcaggacacaaataatactaaacaccacatccataacatgagagattttttccaaaagaagattacttacttctactatcttctgcacatccacgtcattataaaatgaaacaaatccatagctagaaagtca

SEQ ID NO: 36037 - DNA, 2090 bp, Bovine  19866881052871
  misc_feature (1)..(1): n is a, c, g, or t
ncccccggtgccctcctcccgcccgtcagctctccagcaccatctctgcccaggctgctggaggaaccaggaatgctgtttctctcacagggttcatctcactctagaccaacataccgtgtctcaccaagagagccacagtgggcaggaagcctgcagcacgcggccagggcatgatgggtgcttcttttaagcctcccaaagctcagtctgtgggcacaaacagccctgatgagtccccagccccaggaagttggtatgactgagccactaatccaggggtttttccaagcggcaggggggtgagacaagggatcacacctggtctaagatctccagggctttcctgctcccaccaaagaacagacaagtctccagccatgcagggcccaccaaatcaaagacaaatcatgggaaatcaaggacgatgctttcccgggataccacacagactctgttaaggctgtggccccagtggatgggtttccggatgtgggaaaacgggcactgggctgggacattataaggctgaactgcacggggaggattcagacactggttcctatgataggaggcctcgccatcttgttcatctgtgcaggcacagcctggagccagagaaagggcaggtaatcaataaatatccaatgaattcatgttgttgaataaccctgtcagacaggactgccttctccattaaagaaagtccacccaccaagtatgccagctcctttaggaacagatcaccatcaaaggcaacatgcattccgtacagctccatactgtcttcacgcttaacaaccaactcagaatctacacctgagatgcccaactgaaataacccccatcctcttttaggagggccccataaggctgtcaaaagaaggtatcctcctccgtatgaatcatatatgcaccagaaaagcatgtttatgcaacagaacagaaataaacctcggctgctgatgactccagcaagtacccactgcacacctcattcttatttatcaggagatctgacctgtaaacaaaggacagcttaaggcacgtctgaaacacagaactgggaagatgactctccagaattaatgacagtgacaagtgacctgaaggcagaaccacctgcattttcacactatttgaaaatacttcatagataaaattcaacaggccacctttcttccgaagcacgcatgaactctggtccaagcactgtctaaagcattcctataaaaattctttgacgcaacagagctaatacccataatcaattaacaggatccatagcacattaacttgttttctgttctgttttaaccaaatgagataaaaattattatcatgaccacagtgccactttcgtgaatccctacagaaaaagaatttggttttgctctgacacatcacagtcatcaccaagtttcattctactgaaggaaggcttaagttgctaagatttactgcttgcacagacacacacacacacacacacacacacacacacagccctctgagcccattttcacacaagactgagtgctgtttcctcatatggatgtagagacactggggaagcagcaagaagagtttttacattaagaaaggaatgcaaagaacaccctcgtccctcttaaatcgtatcacctccattagtgaatatctaacaataacattaatactaatagcaggtttggttgcattcgcaaaagcaacaaccatacagaagataaatgtagtcgctgtgctcagaaaagcttaaagccacgtcacacatattatctcatttatctttaaaaatccccgaagactccatatgagtgtattcatctgcagtgagacatgttttatgggagccgatttccttaccaattcttcatatcttctgtttaaaaacaggatctgtctttagcatgcctccccaccagaacctcagctcctaactcatgcaactgacttcctttcatgagtctcaaaaacaaaacaacaaaaaatgcaaccaactcttagcaattacagaaagtaaaaacaaaaatgaaacacacgcaggaaatcaaagaaattcacaggcccaaacaattgccattgcccaa

SEQ ID NO: 36038 - DNA, 1142 bp, Bovine  19866881216991
  misc_feature (1)..(1): n is a, c, g, or t
ntggctacacctgtttgtcccagagctttcagctgtgtccttcttgataaaaggtgtacatcccttttcatcagagaatgatcaccctaaagttcgtcaagtttctctttttgctccgtctcgctggaggctcagagtcatatgtaaatctcgtttctaataactgtattacccccagtttccaacaccaacttttcctttctgaagtcttcttctattttagccagttacataagtgattcatcataagcctctttgaatacattttgggtaaagatgaagattaaaatgtcaatgaatgaaatgaaagatgtttccttgttttgttttttattctcatgggccagagcagctgcttggtcagggctgaattaggaagaaattggagttgagagacttgaaaaggagtgattaaaaaaaaaaaagtcttatatttagctttgtgtttggaacctacagatgtatctagagttcttggaattcactaagggcaaaatagcaaagcttccctgtctgacttggaaggagctaggaaaggactcactccatcatcctgtcacttgtgaactgagttttaactcacaggcagacttgaggtcaatcctctcctaagcctttctaagccctaggtggtcaagcatttgagtttcaatggagccgtcaacaaacaccagctaactgaaatacgtgaggtcaaccaaggcaccactgtccagagagccaaaagctaactgcagctgcaaactcatccaccaaacttttaccccaaggaggaaggaccctagtttatcttaccactctttgtttttcccctgggcctgaacgttcctcttgctctgtgatgtagaaagtcattctggaagcccatgcaaattcttggcatttgtgggaagtgtcttatactaagaagcaagaagctctacagtctctcttcccagagttttgctgctcaggtgcgaccccaagattgatgctggccctcccaggactctgtctgccgaaggggacagagcaggacaggggctgagagctttcctgggccacagaccagaggaaggtggctcactctgcagggctggaggcatctaaatcccctgctgctcctcaacacacgcacacacacatgcacacacatacacaca

SEQ ID NO: 36039 - DNA, 821 bp, Bovine  19866881256645
  misc_feature (1)..(1): n is a, c, g, or t
ntaagtcatccacaatttgatcaggtcagaaacatcaaaatagagaatgaaatgggaggaaaagatgaaggagaaagatgacttgataaggaggacttgagggtcagcaagtatgattttctttcttataaggcaaattttagagccatagcgccttattcaaataaccatttgtcaaatataggtaacgttggtgtcaggaatgaagatatattcttcaatgaaaacacattacttgaaaactcactactatcaacagtttttacataatgtcagggttggacggtacccagaaatcgtcaacaacctggagagtgtgtttcaatgagcttggtgctagggtaactggacagctgcacatcagcaggaagtcacacatccttagtcaagatcaaagcaacttttatggaatccagttttaaatcaatgtcatggcctgttgtcttcaaatctacttcaccaccacatcttaacgactttgctaaaatattcccttgtcatgtgtaaaatccaccactgaattttctaaatcattaaggaagtaatgtcaaataggaccactgatatgagcaagtaaccctcttgtagaaatgattctcatctctacattccacaagaaaacacagacttaaaaataactacaggtactggtcagctacgtaggcaatgacacatgaaccaagtaattaaattattttcaaactatagtaacctgtctgtctaaacagcactgtataaaataaacagcttaatttttactgagccatcgatacactaaaaaatgcattaacagttaatgataccagggtaagtctctctta

SEQ ID NO: 36040 - DNA, 723 bp, Bovine  19866881733297
  misc_feature (1)..(1): n is a, c, g, or t
natgactgcacgacttacttacttacttacctcataaggcctagtagcacctgcatttttagagacgggggggtggcatacaggatgcgcctctgctgcaaataggcaaccatttagtcaaagtggggggttaagctatggcagatgtgggtcaatagaacatgttctcaatctccccttgataggaaggcaaattcttactataagatgctgttccttaaaactgtctagtcatatctaatttgtgtgcattctcagatattccagtcagagccttggtaatataaccagtgtttccaattgtgtcctgttacaaggagaacagattattattgtatttatacaaacaaatatatgaccataaaaatcagaatactcacagaacactccaaaacctggagggatcagatagggagaaaaaagtaaatgtttcatctttattcacaaatgtatatgttagcaaattgctcgtagcttaagagaaaagagaaaaagttttcttaactctggaaaaccaaaacacaaaagaactaacaatgtttcaaacagaaagtcaaaattataatcatcctcattatttcactcagtcccatgaaatttatggagaaagacaaacattaaaaaaaaagaaaacaagcaaacaaacaaactgccctttttaagatgaaggaaaattaagttttagatttcataagtacactatagatataaagtctttttttt

SEQ ID NO: 36041 - DNA, 706 bp, Bovine  19866881785630
  misc_feature (1)..(1): n is a, c, g, or t
natatctgaaaccagaggtttcatggcccacaggttaggtccagcacgtggccaggtctgcacattgtcattgctctcttacatattgtggggggctgcttttgcattttgcagccctacaagggcagagctgaagagctgtgagagagactccccaaaccctcactacttagtgtcttccccttcacagaaaaagtttgtcagcctattttatacaggtccggggacctttggagaaggaaatggcaacccacttcagtattcttgcctgggaaattccaccgacagaggagcctggctgactacagtctaaagggtcgcagagtcgggcacgactgagcacagcacggagcacccagggagcgggcgtcggtttcgtgacttacaagcagcttccgagaagaccacacccaaggcccctggtttctagtccagctgcctccccactagtcacgaggtgcttcctactgcagtgatgtattataaacatttttaaagataaacaaaacaaccagagagcgatggttttcaacccgacagtcccaagatggaaaaagaaggagtcccagcaaacacagggaaggacttgtctatctttggaatatttgggggaatttcagcagtcaccttggaaatctgctgaaacaaataacgggcggcaagtagtcaaggatgccactctggaggtaggaaaggcttcttttta

SEQ ID NO: 36042 - DNA, 1444 bp, Bovine  19866880066358
  misc_feature (1)..(1): n is a, c, g, or t
nttcgcatgaggtggccaagtactggagtttcagcttcagcatccgtcctttcaatgaacacccaggactgatctcctttaggatggactggttggatctccttgcagtccaagggactctcaagactcttctccaacaccacagttcaaaagcatcaattcttcggcactcagctttcttcacagtccaactctcacatccatacatgaccactggaaaaaccatagccttgactagacagacctttgttggcaaagtaatgtctctgcttttcaatatgctatctaagctggtcataacttcccttccaaggagtaagcgtcttttaatttcatggctacaatcaccatctgcagtgattttgaagctcaaaaaaatagcctgacactgtttgcccacctatctgccatgaagtgatgggaccagatgccatgatcttagttttctgaatgttgagctttaacccaactttttcactctcttctttcactttcatcaagaggttttttagttcctcttcactttctgccgtaagggtggtgtcatctgcatatctaaggttactgatatttctcccggcataaacacatgtacatatagctctatatgtataagacacatatattgcacacataggtctatgtatatataaacaggcacccccaggctatgttcaccggatttgtaaataaggaacggtaggtaagcgtctggctgacatttgcgctcccgtgtattttgcattgtgctggttctgtctctcctgtaagctgataagacgtgcaaaggccaggagtgcgtgatgtccttcttcgatgatttttcacgattcctggcatgacgctctgcagagtgaatgtttaatcagggccgacagacaggaggccacggaggtcaggtctctttgtcctccaggcttgtcaagggtgagaaagctcctcagagaggggaactgcgatgctattttcagctctttgaaggatgagcctggaagcccagaaaggaagctggcagtgagacagggcacgagtcaggagagtggagtcaaggggcacctaccacgccatccaacccgtttcagactgagagattcatccaggccaactgagactggggagctggacagaccaagctccttccccagaaggagaaggaaaattctgggtgtttttttgctggtgatcatcgtgtatgtgtgtgttaaatcacttcagtcgtgtccaattctttgtgaccctatggactgtaagccaccagctcctctgtccgtgggattctctaggcaagaatactggagtgggttgccatttccttttctggaaatcactagccatctgatttattaagcacctcaaagtgctcagacagtaaataacctgcctgccatccaggagacccaggtccaatctctgggttaggaagatcccctggaggaggaaatgg

SEQ ID NO: 36043 - DNA, 3201 bp, Bovine  19866880376944
  misc_feature (1)..(1): n is a, c, g, or t
ncttacctgcctcctgagaaacctgtatgcaggtcaagaagcaatagttagaattggacatggaacaatggactggttccaaactgggaaaggaatacgccaaggctgtatattggcaccctgcttatttaatgcatatgcatagtacatcacgtgaaatgccaggctggatgaggcacaagctgggatcaagattgccaagagaaatatcactaacctcagatatgcagatgacatcacccttatggcagaaagcaaagaactaaagagccctcttgatgaaagtgaaggaggagagtgaaaaagctgggttacaactcaacattcaaaaaactaagatcatggcatccagtcccatcacttcatggcaaacagatggggaaacaatggaaacagtgacagactttattttggggggctccaaaatccctgcagatgatgactgcagccataaaattaaaagacatttgctccttggaagaaaaactattaaccatcctagatagcatatttaaaagcagagatattacattgccaacaaaggtctgtctgatcgaagctgtttttcttcagtaatcatgtatggatgtgagagttggaccataaagaagactgagagctgaagaatcaatgcttttgaactgtactgctggagaagactcttgagagtcccttggaccgcaagggagatcaaacaagtcaaccctaaaggagatcagtcctgaatattcattagcaggactgatgctgaagctgaagccccagtactttggccacctgatacaaagggccaattcatcagaaaagattctgatgctgggaaagactgaagggaaaaggagattgtggcagcatatgatgacatagtttgataaaaattactgattcaatggacatgaatttgaacaaaccatggcagatagtgcaggacagaggagtctgacatgctgcagcccaaggggtaggaaagagttggacacaactttgggactcaagcacaaaaacaaagcttaaaagacaaaaactgtaaaatcaactataactacaatgaacaattaagggataggcatgaagacgtaaaataggacagaaaaaatagaaaatcctgtaggggagtaacaaaatatagagctttcaaaatgtatctgaacttaacctacaatcaacttaaaagaagtagatgcagttttatgttgatactgtaaccgcacatcaaaaagctgcaataaataaagtttaatgagaaaggaaaccaaacaagtgtttggtggagcgagcattcacactcaggacgctgagactcccagtccatggtctcatccatcctgaacctcattctagctccattttcatctcactgtgatgatgaatttttattcgttcagattttactttgaactctgtttgatatcagctcatatataaccactgtaatcacaagccagaaagtgatacagaatataccagataatttttattccttggccattaagtaacattaagttcattaagtcactctattatctctaatcagaaatgtggtggaacttccctgttggtctggtggctaaaactccacactcacaatgcagggagccaaggtttgatccttggccagggaattattaaaagatgtcacataccacaactaagagttcacatacaacaaataagacctaggagagctaaataaataaatataaatattaaaagaaaaggaaatgtggcaaagtgaagtttcaggactggggctggattcatttacataaaaaggttctagaatatgaacttggccactatgtttcaggagttgggccctaaataatatctcttaaaatttcctggtaatgtttcttgtgccctagttgtacaactgaatgcatatcaacataaggccactgcccttctttacagtatcttcatactcattattgttcccttcatttgtggtgtcacaaatattaatggagtctagttgggcaatgatactaaaaaggcacaaattcccaacatgtttatagcaaagaagtaacaattccaggtttgtattttcctgatctgataaagatgtgtcctgctgttgggactaattacaaccagaagaaaagaaaaagatttgttcatgttttccgttaaaacaaaacaaaacaaaacaaaacagaattaacccaaggttatgccaaagtcatttttcttctgtgctgttattacatcttctggagtgggaagggaggactacattggagctcccacacaaccgctgttctgcgtcatctctgctgcagtccatagggagtgcactgctaatagttatgaaaattacaattcattggcatgctgacgagttgcgactctatagttagttctgctttctttttaattttccacacgggtaattttttaataagcaagaggcaaggacagatgaagaaagctagagtgtgcacccacatcttcatttatatctgagacgcaaggatggtgtgaaaatgtgtcagtgacgacacaagcatgatgctcatcaagccaatggcagacaaaggtaatgataaaaacttggcatttgcttggactggggaggaagatatgtttctgttgaattaatccaattgtcctctaaaagatcttcagcattaactaactgtattaagtaactcatttttatggacaaatactgtttgactccaataatacaagattcctagaatagtcagattcatagagtcagaaatacactggtagatgccagggcaaggggattgaggggaaaaggagttagtgagtgtttaatgggaacaatttcagttttagttcagttcagtcgctcagttgtgtctgactctttgcgaccccatgaaccacagcacgccaggcctccctgtccatcaccaactctcggagttcacccaaaccaacatccattgagtcggtgatgccatctaaccatctcatcctctgtcgtccccttctcctcctgcccccaatccctcccagcatcagggtcttttccaatgggtcagctcttcacatcaggtggccaaagtactggagtttcagcttcaacatcagtccttccagtgaacacccaggactggtctcctttaggatggactggttggatcgccttgcaggccaagggactctcaagtgtcttctccaaaaccaaagttcaaaagcatctattcttctgtgctcagcttt

SEQ ID NO: 36044 - DNA, 2497 bp, Bovine  19866880592009
  misc_feature (1)..(1): n is a, c, g, or t
nctccaggcaagaatactggagtggattgccattcccttctccagaggatcttctggacccagggatcaaatctgggtctcctgcactgcaggcaggttctttaccatctgagccaccagggaagcccctgtgacattgttgggatgggctaaattaggtgttatctgttccttgcaaggttcatttgctagtgttttcctggcctctctttgctgaagtcaagaggattgaagctagcttcctgctgtatctcctcccagctgttaaaatttcctgctctgtttcgcaggcacaacccatgtcaggatccaggcgtgtttccttgctgctgctttactcacttattttcgtcagcacagagcttagtctcagaaatgacagcttaaaataattcatttgatgttgtcttcgtggacatgtgaactctgaatgacttcacaatacctggtatgcagagaagcctattgtgacactcgtggtatctttagcagaagctaatattagcattcaggttttttttctttgcatgtaggcattcattcattcctttgttttcagtttatccaggaagcatatattaaaaccctaggagggagctagagctaggaaggtcacacgaagatcactgtacagctgtctctctggaaatacagtgaggagggaatgcttttcctccctggcacagctaggtcataaattagccgaagcattcacaactttccagtagagtgagccaagacttcattcgttttttacaaccacacataagaagccaggcagggcagtttaatgtcatgggttcgcagcactgggctttggtgacatatggctggggttcaaaatctgacagaccacttacctttactttttttgtttgtttgtttggattttggatcctgctaccctgctgagtctgtttatcagttcttagtctgtgcgtggagtctttaaggttttctctgtgtagtatcaagtcatctgacagttttacctcttccattctaacttagatacattttctttctttcttgtctaattgctgtgtgtcaactttcaatactattttgagcagaaatgatgtgaatgggcatccttgttctagatttagaaagaaggcaaagtgcttttcactgttaagtgccatattggctgtgggtttgtcataaatagcttttagtatgctgagatatgttctctctgtagtcacttttgtaacagtttttatcaggaatggatgttgaattttattacacggtttttctgcgtctactgagctggtcatgtcactcttgtcttgtttgttgttgatgtggtgtatcacattgattgatttgcatgcactgaaacatctttatgagcctgagataaactcagcatggtcatggtgtatgacctcttctatgtgttgttgtatttggtttgccaacaactggttaagaatttttgcatctatattcatcaaaggtattggcctgtaattttctctactggtgacacctttttttggtggtggtatctttatctgattttggttatcagagtgatggtggctacatagcatgtcttggggaggtgtttcccttttcttcagtcttttggagaagcatcagaaagaatatgtgggtccacctgagaatcccctgattttggttctgtggtctgtgaaatgagggagcttaatgaagccactggtgggtgtgaattcacccgatgctgacctgagcagtagatagttttctttcccttcgttgctgccctgtaacctgttttctgatatctctctcaactgtctctcgatgagaaattttctcactgcttattgccttttacaataagaatagtattaatttcaggcattgaaatttacataaacaaaagagtgagatgagttatttcaaatatatataattatatattaatttatatgtaatagtattagtttatatatataattatataatatattagcatattgtatatgcaaatatgtattatatattgtgttgaccaagatgttcatttgggcttttccataagatgttatgtaatataaattatattacatattttccatatttcataaatataaatttattacaaataaatatatatttgtatattatatacattattgatatgtaactataatatatgaatctattatatattaaccataattgtgtttgttaaaataaatacatttaatatcaatatattaatttaatacacttatacattatatgtttatattaatatatttatatataacaaatctgtatttatgaaatatcttaaaattactataatttatatcatataatatagtgacatatattgctgtaatgtaaattatctattatatacatttataaataaaaatgtattatatataaacactttaatataaatatataatatatgaatatatgtttataatatatatgctatattaatggggattgtcactccaaagggtctgactccttgcacccatag

SEQ ID NO: 36045 - DNA, 2648 bp, Bovine  19866880634859
  misc_feature (1)..(1): n is a, c, g, or t
ntactggaatggcttaccatttccttctccggggatcttcctgcctcagggatcaaacccacatcttctgtgttgcaggcagattctttactgctgagccactgaggaagcccacaatggactattactcagccataaaaaagaatgaaataatcccatttgcagcaacatggataaacctagagattgtcatattgagtgaagtaaatcagacagagaaggagaaatagaatgtgacatcccttatgtgtggaatccataaagattatacaaatgaacttatttacaaaatagaaacagactcatagacttagaaaataaacttatggttaccaaagggaaaggttagaaggaaggataaattaggaggttaggatcgacacatatcactatacataaaatagataatcaggacctactgtatagcacaggggaaataaaagatatgtcctattacattaattgttgagtttttttttattagaaaatataatcacgttaactcaatgtccagctccctactaggcctcaggagacaaaaggaaaatgcataagaagcctcagccttcagggagtttatgctctagttgcttaagtcaagactgtataaaatgttcaaatagtattttggcttctttgaggcactggccatcagcatcataaaaacactccacataattaataaaaacactccctgcccgttcctgatacccagagactgttgaggacaggtgcagtttaggagtgaaggcaaagaattgctctataactagggtagggagatgttaaactgccttcagattagatatgaggcagaattagaactgacttcaaataagcctcttattcatgctcagtctctcagtcgtgtctgactctgcaaccccatggactgtagcctgtcacgctcctccatccatgggattttccaggcaagaatactggagtgggttgccatttcctccagggatcttcctggcccagggatcaaatctacgtctcctgcattgcaggtggattctttacaactgcaccatctgggaagcccatacccagctactttcaacattaccaggactaccaagggcttctgtttaaatggtaacttccctacagtttaaatggccagtgaaaagttcagtgcaaacttgagcacagtttgggatggtatggcatatttttcacatgactcttaaggaagtgcccaagtttttcttccttgtgggtaaagttgttggcaacatgtgataccatcctcaggctgcgatggccaccaagcatgcatgcagagaacccagagagtaaataagccctgttggaaatgtgtttcctttttcccttttgccacggttgtctttcagcagatttgtagctctcaaggtaattaaaccttgcatgggcattgtgtttctcaggtgtgaaaagttagcagttttgtcccataaagagtgtgcagaatccttgtaaattgaccagctcatctacaccttccctgagacgcaattgctccgactgctgtgcgtgtctttggtgcatctcatgtgcctgatggtttgtttgctacatgaattggtctggctgtcagagggagcctctgtctgcagaaggggcagcaggtagaggaagccggctgggtgccttcacatttgctgtgtagaggtctctgcttttcacgtgcgtccctcctcaccctttataattctgctttcttcccagccattgtgacagctatttattgttcattccaggatggattacccttgaattacctctctgcttgtcactgttgtggtttcttcaagctcccagtgatgggggaaacagtaaaccagtctgggccctttaaaggacccgactttctgttcaaagagaattatttttagaaagctgctatagaatttaactttcttcaatcagcaggatttatgtgaagccatatgttggtgtgatttccccagataaagccttaggaatcttctttcaggctcctggagcgggtgcacaatacatcctgtgggcaggctgcccgctgcctacaggggtgcagaacccctttgatgggctgagggtaaggctttccagcggccttgggtcttgaggctccagcctcagccaggaagggccgaaaggatgtgacaagtgacctctgctagcagccaagctgggaatgcgagtgatatgtttaatcaatactttattctcaattgttggatgtaaaaggcttagaaaataattcaacagagtactcagttctgaaataacaccaagtgtcatttcacctctctttgattcagaaggtcctttagaatcctttcatccttggagagctagttaaagattctgggtctagaatggctgataaaccagcctttgttttagttaggaagggaaatagtagagccaggagaggggtgagagccccaagcaagggcggtgtttgtagtcggggtgttagtgctcggctctgtctacctctgaccattgtcccccagtcttccctggttctgtggtcaaaggtgggtccaggtagggcctcctctccccgttttggcctctcacctgttagcacccagttctgtaatacactttgaagaagtgaagtgaaagcctgtcagctgtatcagactctttgtgacactatagactgt

SEQ ID NO: 36046 - DNA, 5150 bp, Bovine  19866880656185
  misc_feature (1)..(1): n is a, c, g, or t
ncctttgacatgctgttccttctctttggagtgtttccctttctgtcccaccctcacatctaagtcttattcctttttgaaatcagtttcatagaaggccttccctgatgtcactgcctccggtctttattttaatattttaacaaaaatttattttaatatatgggattttaaaaaccaccaaaatgtcaaataaccagtgtgtggagtttctttcattctagatctagaattttttctttgagaaataaaatgaaagctgcatgtatcaaataatttgagagatgaaggaaaatcggatgtgaaggaatatttacttttgtggtgaacagtttctttcatatggttgtctttaactttgttagcatagggataggataggccagttaattacacctagatagtaagagattctccactagcctgagaaggctctgcaaacagcgccaaattgaatttgggaatgagtaggactgaggtgtttcagactttgctagtaacctcaggcccttcaggaattctaaatggcatgttgtgatgtttgaggatgacggggagggagaataagatgtatcagatgctaaggctgcttcaagccttaaacttgtgtgtgtttaaatacttgcaggtgttctcaaggggttctagactcagcacagaaagctcatgtttcattgactggattagtatggttatttatctctaggcatgttattgatgctcaagctgaagttccaatactttggccacctgatgggaagaactgactcactggaaaagaccctgatgctgggaaagactgaaggcaggaggagaacggggcgacagagaatgtgatggttggatggcatcaccaactcgatgcacatgtgtttgagtaagctctgggagttggtgatggacagggaggcctggcgtgctgcagtccatcgggtcgcaaagagttggacacgactgagcgactgaactgaattgaggggtgttattaccttatttgtagaaatctcctagacttgatataagtgggccacacaaaatgtgcccaaatgaaaacattgattcccaaattaaccttctccccacatcagccagctccttttacatttttaggtaaagagattgagggaaaacatttttaagaacaatcctgtgttgtgtttttgctggagaactcttactgattttccatattttaattaactgtgtgttcatcactcagttgtgtccgactctttgtgaccccatggactgtagcccaccaggctcctctgttcttgggattctccaggcaagaataattctccaggcaaaagggtagccatttccttctccagggtatcttgccaacttagggattgaactgggtcacctgcgttgcaggcttttttaccatctgagccagcagggaagccctaagcatgactaatttaaagatgattttaaatgtttatattgcagaatagggcacatcaatgtatcaacaagccctagcctgataattggtagatagtgggcacctaataaatgtttcttaacagaatgaatatcaaatgaataaatatatttttaactatttgtataatgattatcaaatatggaaattttacacatatttgtcatttattacatggttgattgaatttttaccatgttctaggagtaggagggaattatggaggttaacgagacgtggtctcagacctcattacagttatatttcatgcagtggttcttaatctagaatctaatataattatttgggaagcttttaaaaataccagttcctggatgttacccagcgtctctgatttgactggtctggagtggggccgagacatcaggtgtggttgttagttgcagccagaatcgacagcttctgttaccaaatcctatctgcatcctcttgcgttgccataataacgttctatagactgggtggcttaaacagtgcacgtttattttctcgcagtttggaaggctggcagcctgagatcaaggtgctggccgattcagctgctgttttttcctgttcttagcagggccacccatctgattagggctctacccatgtgaactctcctggtgactcggatgataaagaatctgccagtaatacaggagacccgggtttagtccctgggtcaggaagatccctgtggaggaggaaatggcaacccagtccagtattcttgcctggagaatctcatggacagaggagcctggcgggctacagtccattgcatcgcaaagagttggacacgactgagcgactaacacactttcatacacatagcgtacatacgtgtcaactcatttaaccttaatcacctctccaacgagagtcatttcgagtttagggcttccgtgaattccgcggtagtgggaacacagtttggtccttggcaaccattgatcaagagaaggaagtttttgtaggaagtgtgctactctgagttctaagtccacgtgtgattagagccgtagtgtttgtgcgtgaaacacgttggggttagtggaaggagaaatcactttcaggtgctggggttagggagcattttggatggtgttaagtgagtgagccttgataaagaaaatgaagggtgggagatggagaatgaaggcagcagactgaggtggagtctgacccgacgggctgctcgctgcctggcgctgcaggatccatctgtgctctctgagcctcgggttctgaacccccgcccctgcctgtgacggtgctcgtaaaacgaccccttcacctccactttgtccttctttctgtaagtaagatctaagctgattgcctggtgggttgattgatttttagccaaggaggataatacaaccactgggatggcagaataaggatttaaacaatagaaattttaagctgaacttctgatcctggtgggactttggaattactaatagattcttgaaaacgtgggtcaagtagatttggtgatagagcagcactgagaacacagcataaaaagcgccaatttaaagacagagcctgtaggattgcctgggcaggaacgggagcagagcttgctttgggtgtttatacggcttttagtgttaccattgttcagagtattttcaagactcttttagaatttgccttcagcttctacagtacatttatcttaatatcttattatcttaatattctcattttggtaaatttttgttttgaagatgaacttgaatttcagccacagttagccagaggcagtctgatgaagggagtagatgaccctccttgggcaacactgctccccaagaaggttgcattgtagttttaactcagcctggctctaaaggccatcctgagaaagatgtcgtgagtctctacaaatgaaccaatttcattgctttttatggctgagtaatactcctttgtatgtatgtaccacatcttctttatcctattgtctttcagtagacatctaggttgcttccatgtcctggctgttgtaaatagtgtttcagtgaaggacctagaggctgtcatacagagtgaagtaagtcagaaagagaaaaacaaatactgtttattaacatgtgtatgtggaatctagaagagtggtacagatgaccctatttgcagggccggaattgagacgcagacatacggaatggatgtgtggccccgtttgtgtgtctcagttgctcagtcgtatctgactctttgcaacctcatggactgtagccttccaggcttctctgtccgtggggttctccaggcaagaatactggagtgggttgccatttcctcctccaggggatcttcccaacccaggggtggaacccacgtctctggcattggcaggcacattctttaccactacaccacctgggaagaggtgaagggtggggacagattgagagattagcgttggcatgtgtatagtcagtgggaagctgctgtacggctcagcctgatgctctgtgatgaccgggaggggtgggatgaggcgttgggaggaaggtttaggaaggaggggatgtttgtatgcatatgcctgattcacgctcctgtacagcagaaacaacacagcacggtaaagcacttacacccccattttaaaaactgaatgatttgagcaagcattgaatctttgaaataagtgaataagctctcaatataaaaataatttccctactctattatcaaaatggtccatgtgttttgttaaattttacggactgttgagagatggaggagaaggaccaggagagctcagacagccagaagccattgaggagcacccgtcagtgtgggggtagccccccgtgtcccagacgggcatcggagggaaggcacgtgagtgagggatgcgttgctgggaggcccaggcgtgctgtcgtatattcctttctcaaatgtctacttacgtagacatgtctcctatagtgacatgactgatttcctattagctgtcaatgggaaattgtgcccgtagcaaaagacagccttgaagttttaccaaataaagtaaatgtgaaacctcttccactgaaggcattatggccacagcggagatcgctgcgcttttctaaaattggcaggtcttcttgcataagccgatttcctgcttcggtatgctttgagactagttgtccctttctggcctcatcttggttaaaacaacgtgggtggaagaggaagttttcacacctcgcaatctgcagaatctgaggtccaagaaataggtgcttttgggaaccgggcacatgtggtgtgaacgcagtggttactaccagtgggagctgatagcacggaggagctcagatgtggcacagcgatggcgggacgctggcgtgtgtgacccagaagctgagcagaaataggcacttctacctcattgatgtgctttccgggtcttgtgagttcgagattgtaaaaagttctatggtcaccgactgacctaatatttgatgtttactctccgcgaaggtactttctcagccagctgacaaatcaggccttttgccttttctaaaatagttttcttcatggttggaatcattgagctcctttctgatcaagaaatatgaactgtgacgttttgaattttgcttgttcaaaacgatgcttctgaaaccagcattcttcttgtccaagagttcctgcaggctttcacaag

SEQ ID NO: 36047 - DNA, 1173 bp, Bovine  19866880696204
  misc_feature (1)..(1): n is a, c, g, or t
ntgggatttctttggaaggaatgatgctaaagctgaaactccagtacttgggccacctcatctgaagagttaactcaatggaaaagactctgatgctgggagggattgggggcaggaggagaaggggacgacagaggatgagatggctggatggcatcactgactcgatggacgtgagtctgagtgaactccgggagttggtgatggacagggaggcctggcgtgctgcgattcatggggtcgcaaagagtcggacatgaccgagcaattgaactgaactgaactgaactgaaaaagtaaacagtataggctaaagctgtcaaaacaacacaaatactaaatagactctgatccaaatcataagatgtctacactggcaagatgggaagtggcttctgtctgacagaggtaggtggataattcctgcacctagaggaaataggcgcccctctggttcatgctctttccaagacaacttcagagctgagtttcctctccccacattgcaaagacaaatgtctagccgaacatccgagttaaagggatttttgattggtgttgaagcactgcatggattaaatgaaagagtgaaatagaatctgcttctgtcacaaatccaccttaggaaatgtgtgggaaaatatgttttcagcaactttctgattcatttaaacttcaaaatactctagattatacctgctctccatacttctgcctgtttctggtttccaaattttaatatggtttccctttaagtgaaaactcagcttgctctcctcatcagccaatttactgggtatggatgccacatcactacttggttccctgaaggtaattttggagattttagctttctcctttttaacatgtaaatttgctaattctgaggaaattgaatctgttatcaaggcaatatacaccagaaaatccctttcaaatgctgcttttatattaggaaaagcgaagtcacaaaaagccctgttggaaattcattcatggtgctaagaagtggtaaaacggagttgtttatctataggatgacatgttattaaacctacattttcccaattaacatatctttcctatctatggatgatgagaaactgaaagttcaaacattcaaacgtgaatgatcaggaaagtcacaggcagccctcaggattctgcatgtgg

SEQ ID NO: 36048 - DNA, 1481 bp, Bovine  19866880710729
  misc_feature (1)..(1): n is a, c, g, or t
naactgaaccatttagaaaacgaaagatcatggcatccggcccatcacttcatggcaaatagatgaggaaacaaaggaaacagtgacagactttattttttttttgggggggggcctccaaaatcactgtagatggtgactgcagccacaaaattaaaagacgcttgctccttggaagaaaagctatgaccaacagacagcatattaaaaagtagagacattactttgctgacaaaggtccatctagtcaaagctacagtttttcctacagtcatgtatggtggtgagaattggactattaagaaagctgagcgccaaagaattgatgcttttgaattgtggtgttggagaagactcgtgagagtcccttggactgcaaggagaccaaaccagtccatcctaaaggaaatcagtcctgaatattcattggaaggactgatgctgaagttgaaactccaatactttggctacctgatgtgaagaactgactcactggaaaagcccctgatgctgggaaagactgaaggcggaagaaggggacgacagaggatgagatggttgcatggcatcaccgactcaatggacatgagtttgagtaaactccaggagttggtgatggacagggaagcctggcatgctgcagtccatggggttgcaaagagtcagacaggactgagccactgaactgaatatgtactttatcggaaatttatatgtgatttatcagaaagaaattttgtgtcctttgctcattttttaaactggctattcatcatttagattagtgggacttgttccagaacaccatacaaatgctgcctgttctagaacacaatatttttaaagagtgccattcagaatgacagtctgagattcgtctgtgctactgcgcataacactagtatgttccattttactgttgaacagtatctactgcataagtcctccagagtgtaccctttctccttttgagagacccctgggttgtttgcagtttggggctatctgatgagctactgtatgtactaactgcacagggatgaaaggtgtttcatttcttctgggtagcattgctgggtcagtgggcaggtctatgtttagtgaatgctgtcagtgttttcattgtagtcattctgataagtaggcaattcctattactataaaggttatcaaccttatgctcctacaggtccctgagagtctgttcatttttaatcttcttttctctgttcttaagactgaacattcctactgatctatcactatattcatcactccttctgtcatttttattctacggttttctataccagatatttcagttctagaattttgatttgggtctttctcctttcagattctgttaagattttccttttattcattgcaaccatattttccattacattcttaaacaattacaacagctgagataaaatccttgtctgctaattccatcatttacaatcctaaagttcgac

SEQ ID NO: 36049 - DNA, 2031 bp, Bovine  19866880748859
  misc_feature (1)..(1): n is a, c, g, or t
ntgtggagtgcctacagcatggtagcatctgggtgctaaagaatggtggctcagatggtaaagcgtctgcctgcaatgcgggagacccaggttcgatccctgggtcaagaagatcccctggagaaggaaatggcaacccaccccagtattcttgcctggaaaatcccatggatggagcctggtaggctacagtcgatagggtctcaaggagtcggacacgactgagcaacttcactttactttaccgtggtccctgtcctcaacaagcttataatcttctggtttagggtatcaggctcacataaaggtaaagagatggactcagattaataattttcaatttgcccaactgcttcaactatatataaacacgcactggataaggaagtgatgtacacaattgtggtaggaacctgcctttgagaagctcagaagtacaaacttggattacaacagaacagagaaacaacaggaaaagacagtccaggtgctgagaacacagttttagttcagccaaggtggtccctaagctggtcagggaaggcttcagagaaagggtaggacttgtgggtgtactggatttgggaggacagaagcatttcaggaggtcagaatcagtggggaaaaaatcacagcaaagacagctgcaaattttctagagattgaagtgcggcaggaaaagcgaggagacagatgctatggctcagttaatgggacaaaggacttgaatgttaaggccaaaaatatgtatggtggccttacagtaactcagcatcagggggcagggaaggagtcaagaatcagcattgcatagcctttcaacaaatctctgatgcacacgccaggccattcacagttgagacaggtgacctcatccccactgagaaacaatgctgaacggcacgtagttactctgagaaatgcacccagaaacaaaataccctgcacaccaggaggaaagccttcagtacctaggggatccaatcatgcattcactattctgcacaggaaaataaaatcccggcttgtcttgaaaacagagtttgcgtgtgcaactaactcactataaactgacttgtcaccccaaggagattagttctttccatcaattttaagtacattagagctttcaagcagcaaaacacatcctgtgtcatcaaggacatcattagtcaagtgtgtcaagccctgaaatgtcaaaaatgattctaacatcctcttagactgttcaaagtcctgcatcactttgtttactgataatggtaaagaacagtggggaaaaaacaagctaaagaggtgaacatataaattacaacgatatgtgtttatttcatttagggcttgaagttattaccccaagtgataacatgagtacatacatactaagcttttgatataattctgacaaacgacaccagaataagactcgggggtctccgaatgtctagttgaatgggttaaaaaaggcacacaattcaggaaaattatctggcttcaaaatatatggttcttataattgttcccgtacagataatgatatacaaaataacatgttcaagttacatttcgaagagcaattttcattctcagcttcttagttgaaaatctaattgtgtttaaaagcctgagaaagtgttctctggccccaattgttcagtcttttaaaatatccttctataaataaggctaatagcttcattttctccacaataatgggattaactatttctgggcataacgacaggtcaaaaaccaatctccattatttgccagatgaaaacaattcagtaactgcttccggctttttcttttaatgtgctggatataacacaacattatttgagatacttattgacctttgtcagaatactattaggaccaacctgtcctgaagctaacaggaggatgagatgcagctcctgcaaattcaaggggctggaggactcgggcagcaagcggagccctgatcacgggtgctgctgctggtggcagctgcttaccagaagatgctttatgacgtcagcatatcct

SEQ ID NO: 36050 - DNA, 1392 bp, Bovine  19866880838121
  misc_feature (1)..(1): n is a, c, g, or t
ntttgacattatcgacctttgttggcaagtgatggctctgatttttagaatgttgtcttaaaaaatagatacatgtacacgtataattaaaatcactttgttgtatacctgaaataaacacagcattgcaaatcaactataatataaaaaaattttaataaaattttaaaatatattggttggctaacttcaactcagttggtacccatccctggttctcaacttgggggtgaagaacacccaagggaaatttgggaaaatctggagatattgtgggtgccaaaactgggtcagtgagggcgtgtcactggcatctggtaagtcgggtccctgatgcgctttcacggggcatttcacaggatgccattcacagggcagtactgcagcaaaggaggtgggtcgacatcagtagaactgaagtcagggaactctgcaccactccactgcatggcaacaaagttcacaaagacgctgagagtgagaacaagctcttcaatccaatgtaaaaacataaaaaacatgtttcaatggtttcagtggacacaaatcaaggtactgtgtggtttatgtcataagcaccagtccaaattagccactacaacacagctaaaatattctgggtttccaatatccttaaatgatgacaaaatgttcatgcttggcagaatctgagtcaatgagcactacttgaagccagccattttcctatagtaacatgctttgcgtgcgtgaatttcaatctctcataattttatttttaactttttccaggaaaagatgcaatatcctctttaattatcactaaatgtgataaatgaaacagttttgtatttcccagcctcattcagttaaaatactagaatggagaaacttgccaaaatgaacgtgccttctcttttggatggtaaccaaaagcaccttcttatatccagtgctcagactgccaaagcagaagccagcacaaaaacatacttttgcagctctgctaaatttaatttttttatgttaactctctttagaagattggaaagattcccacagaacagccttaaagtcagtacctgctttccaactggaccaaaggaatggcaatggaatattactcagccataaaaaggaatgaaattgggtcatttgcagaggtgtggatgaacctagagattgtcatacagagtgaaataagtcagaaagagaaagacaaatattttatattaacacatacatatatgtggaagctagaaaatattttttgttgtttttagttgctaaaatggtgtccaactcttggcaactccatgggctgtagcccaccaggctcctctgttcacgggatttcccaggcaaggatacctgaaagtagggtttccatttccttctttcaggggtatcttc

SEQ ID NO: 36051 - DNA, 1356 bp, Bovine  19866880844864
  misc_feature (1)..(1): n is a, c, g, or t
nctttaaaaacaattcccagtggttttaatgtatgtttaggcttaagacccactgctctagaaaacacagagctggagctgcctgtgaatttcttcttagtcctcggggagtatccctaggaaaggtattggaaacgcagcacctcaagcatgttctatattgtcacttagcaactctctattcatacaaaaagggcccctgcaaatataaaatcccaacacagaaaattaatacagtgaatccgccaatatgtgcacaccctgcactcacaccttatccgacgagccatgtcagaatctcgggatcattgtgtgtgtggttttggtttcatgctgaacatttcgagacattgtgctggctgcctcatagccatggtttcatggacaatatcaactcagcacgagggtcatcacacaccccatgcatcttttttgcccctctgaacaaagtgaatgttgacctggatacggagaaggatcctagctagggtctttctcattgcttgaatcctaataaaaaaagatttttgcagcccaagcagagggctatttttttcacaagcaaaagcaatctgttcttcctgagataaatcagtttgtgttctcatgtacagaataagggatgcccagcgtggtgggaagtgggggacaaatcaggtcattacatcaaactactgctttctgttttacaaagaacattctcaggtgtttctatagggtactgactgtcatagaaccaaagagttttcaccataacaacctttgcaattggctgttgttccctttttatgttgagtcaactgaggctcaaatgctcaagtcattgccttaaggtgacaaaaaaggggcggaatgcatggttgctgagtccagtgtttatgtgttttgttttaggccatgcttgcttaaagaaagacagcaccggtgagagacagctttatgcagaggaaagtaaaaattaagcacacccagagagccatcatctttcaattatactgtggtaacacttaaaaattacttacacagtatactaacttactgcccatcaaaagcaaatgcacttcctgaaccacaaatatgtattcatacaaagcaaaccttattcatttggaaagattccgcatggagtgttactataaataacttcattatctgtaatagaaactcagctatcaccattctaattagaacatgactaaagaaatccatgttgaacaaagcatctgtaacatttggtgagggtaataatggctttgaagttccaggaaaaagtcagttttccaaatttctcatttacatctctctcactgttcccgaatcaatggtttaaaaaaaaaatatatatatatatatata

SEQ ID NO: 36052 - DNA, 777 bp, Bovine  19866880848939
  misc_feature (1)..(1): n is a, c, g, or t
ntgactgtctttttctgacttagcatgatctctctaggcccattcatgttgctccaagtggcattacctcactcttttttatgggtgggatatatctttatccattcatctgccaaaggacacttaggttgtttccataggtcctttctagcgaccactaacactacttaaataccttgagtagaaagcagattaaaatagctacctaaacaaaatacagacctgtagggaagtgtggtttagagggagccccgcccaccgaggcagggagcctctgagaaacggggagtgtcctaaaccctgagcagcaggcagggcctcctgtcagcagaagggcctccctactggaacacagcggcactgtggctcacgcttattcagtcatccctttactcatctaacaaataagaaaataagtgaaattggttccaggaatactgcataatggaggtaataaaataaggaaatggaaatattgggttagtcattagaatatctcttcctgtatcaacattcctttttggttgttgttagcaacagaaatcgaaatggaaaaaaaataagagtaaatggcttttcccaggtcttttgcatattattgttagcaaatgtggttctgtgtaaccatcttaaatggtaatagtctgtcccacagtggttttcttcatagaagtcattttttctctttctcctgcctggggatttatgacttaacaggcagtaataggcaagataaagccattcatcatgcaggcttaatgcaggaaagtaaattaa

SEQ ID NO: 36053 - DNA, 1607 bp, Bovine  19866880881712
  misc_feature (1)..(1): n is a, c, g, or t
nattagatcctatttgtttatttttgtttttatttttattactctagtaggtggatcagaaaaagatcttgctatgatttatatcaaggagagttttgcctatgttttcctccaagagtttgatagtgtccagccttacgtttcagtctttaatccattttgcatttatttttgtctatggtattagagagtattctaattccattcttttacatgtggctgtccaattttcctagcacccagtataatatcacttatatgtggaatctagaaaaatggtacagatgaacttattagcacataagaaatagagtcacaggcgtagggaacaaatttttatgtggttactgagaagggaagggtggtgatgggccaaattgggagattggggttgacatatatacatcaccatgtataaaacagatgattaatgagaacctactgtttagcacagggaactctattcaataatttgtggtgacctaaatggaaagtaaatctaaaaaaaagtggctatgtatatacgtattcactttactgtaaaacagaaagtgacattataaaataactatactccagtacaaatttcctaaaaatatagtgctaatgaagtttcaggccccacgggcaccagaggacagggctatttgcagatgagcctggaggacgtgaaggaaaggtagtgtgatgggaggaagatggatcgatcagaacaggtagaagcagaagctacggtcagagtctgacagacctactggggaccattttatgcttcgagtctatttgacccccttttgcggtgtcttacattctctcagaagcacagacaagaaagctcatgtgaaacagaacttaagtaagaagccaggttcatctttgaggtccctgtgtctgctttccattggcttcctgcgtgctctccactcggcccacttgattccctttatattctgggcacgtacagatgtgtatttttgtaatgggcctgttctatctatatttgagttttcaggagggcatgccatttggaaaaagttttccttagtaatagcaaagggaaaaatgactttgtgtttcaagtaggagacttgtttcaatgacatttaaaagatggatgttcaccattgggcatctttccaggttgagaatctggcgtatctcgagaagatgaatggattgaagaggctggttcatacattatctttgttttgcttctggccagcaagggagaaatgttacgatggccagtaggctgtcctgtgcttgtttttaggtttgtgtaaagtagccagtatgcagaacactaaacgttgcctgtggtcttttagctcctggaggaaactaaaaatagaagacagggaatgaacaaaacatagcacaacccggcattttctagcctttccccctcattctacatccgagatcttttttctgatacctcaagacataaagattcctagtgtcctgtttcttgctggtggatggggttctctggggactagacagcatgcttccactcagaggctctctgaagtgggagcttagagactggaagatagactgatttgcaagaggcaattctctcatgaggacaggactctgaatta

SEQ ID NO: 36054 - DNA, 797 bp, Bovine  19866880898234
  misc_feature (1)..(1): n is a, c, g, or t
nagaaagaaaataagagacacattgacccctgttcccaaatcaaagtgtgtatggaacatattttcttctgcttagctccacagtgcttctgctgctacagttggacacttcttttatgaggtacaataggaggttaatggatcaaatgagcagatggtaatattctggaaaataatgatgacacttatgccactgccagggacttgaccctgctgagtgatatggtaactcagcagtgggaaattgttcctgggggcacacaatctgagtgctgcttccattacgtggctgagtgatcagctgctaaacacacacacacacaacttacattagaacacactgggtaaaacacactattaaaaacaattattccaaagaatgctcagggaccattaattcttcaaatcaacacatgtcttaggaatgtcaactccatgctgggcaatactgcacagcttttctcaaagtctgttatgcttaaaattagaaattcacaaaataatcttgagctttatgtgcacaattaaaaatattttgtgtgtgattgcatttatcactgcatgcatgtgtattttataatttatgctatatttatgtctccttagataatgtaggagttattttgcattatttaaaaacataaatggtgtcatattgtatatattttaaaattatggttttgtgcttatttctatgcataaggaaaacatagttacacagaaaaatattattccacaaatattgcttaaaataaaatgaaagtgaattgggtaagtttttagaaaatggcttgggg

SEQ ID NO: 36055 - DNA, 1418 bp, Bovine  19866880975375
  misc_feature (1)..(1): n is a, c, g, or t
naataatagcctttgattcacagttatgcaaaatcctcccttcatttttacaaagtctagtctaagagagtaacagtactccaagaaaagaaaatactataaaaactacagagagcagggtttacagatccctcagaatgtgaatttcatttgttgaataaatcactccagaatacaaattcgtatttcagaagaggaaaaagtgcgtatagatgatcattggagtaaaggagtaacagatggcaagtggaacctttaaaaatccagtatcggtgaatcagacacatgagattggaaaacagacttttgtttctaccttcaacaattctcttcccagataaaaattctcctgtcagctatagagtttatatcaaatctaccacaagtgttcaaagcaaagagaaaccatggtgatgttaaatgacagaattggaaatggccttagagactatgtgtaaccctcatacagaggttgaaacctcagcacagagagtttaaagttggtaacaactgtagatggaaatcctatggctaaaacgcattcattgttaatgggggaatcctaagagtgtatgtccaaagtattctttcttctctatgtattctggaggtgaggtctgacatgtttattaattcaaactgtaactctgttaagagcacccagtgctcatatattttctaaagctgacttaccaccagcaaggtatttcattttcacaagaaccttctcacacatgggccacaggccaatgcagcattttcccctcataatcctgaacagtgaggcagatttgaccccactcttcttccagagcatgtgggcagagtatcagccacagtgacagtgaggagggtgacttcactgagctctggtccatgatacacagcagagagaggacaatcattttagaacacgcttcacacccccagcctctcctctccttgcatggtggcactggcagtcttcgttccgcatgacaggacctcagtacggaaacatcccaggctcctgggtcatcacttgaaagaaagccacccaggagagctgcccgacctccatgtactacagtatgggtgacaagtaatcattctctcacagcacagagaattcaagatgcgcttgtcaccgcagcatcacctaacctctcctgactatcatagggacgaactctctgtaatgaccactcctacaattgggcgtattcagaactgagagcatcctgaacacatgcacacagctttccatatcacgacggtgttgagagcaaatcaaaaatctaaaagaaagtagtatagctggctcctttttctctttctctgggtctctcacttctgtttctcattggccacctactcttgggggatcagtctatatccctgacatgccaacactaggcttgccagctctacactccctg

SEQ ID NO: 36056 - DNA, 1641 bp, Bovine  19866881056283
  misc_feature (1)..(1): n is a, c, g, or t
ntctgcagccccatggactggggaatgccaggcttccctatccttcactgtctcttggagtttgctcagactcacgtccattgatttggtaaggccatccaaccatcttctgtcatccccttctcctcctgccttcagtctttcccagcatcagggccttttccagtgagttggctcttcccatcaggcggccaaagtaatggagcttccacttcagcatcagtccttccagtgaatattcagggttgatttcctttaggattgattggttagatctccttactatcccaagattcttttccagcaccacagttggaaggcattagttcttcagtgctcagccttttttattgtccagctctcacatatgtacgtgactactggaaaaaccatagctttgactgtatggacctttgtaggcaaagtcatgtctctgctttttaatacgctgtctaggtttgtcatagcttttcttcccaggagcaagtgtcttttaatttcatggctgcagtcaccatcctcagtgatttttggagtccaagaaaataaaatctgtcggctagatgcagtgcaaagcagacaagaacttgaaaacaaggtcactggcaggagtctctatcagttattttggtttcaagccaacagaaagtaaccctggctaatttaagcaaaatagaatttattggcagaatagggatagatcataaattttaaaaaggaaaaattgagtctatagggcttagaaaaggtaacaaggagggaagctccagggatccaggacagttatagaaactaataaaaggtctgtccagggcttctccatccaaggaagtgcctctcagttgcccttgagctgtttcactcaagaaccaaattctgggtaaagaaacttcctggaagacttgggtcacctggaggctgagacccctggaggcctgctgtgggagtggaggagttatcaaaggaatggactgttgttatgtataaaaaaatgggtatccctggtggctcagttggtagaatccacctgccaatgcagaagccacagatttgatccctgggtcgggaagaccccctgggagaaggaaatgacaacccactccggtattcttgctgggtaaatcccgtagacagaggagtctggtggactatccatggagttgcaaaagagagaggactcagcgattgaacaacaacaatgtataaaagatattgtgggagagggatcagggccagcacgtcaacagatgcccttttcagagatgagagattcccagccccacccttcctgcataggcggggaccctgcagcgtgcagtgatgaagagtctggagctaggaggctgggggcgagggcagtccctccaccaccatcgcatctgcaaggcgcttctttaggtccagacctgagcagtttgccgtacgatcccggatgtcccttccagagccgctgtggctcccagacctggagctgcgaggtttctgtggagagagggcagcttgtcctaggccatgctgggagagggggagcggagcatgggacggtgacagcctgggcagcttttccttccaaccccagttttaggagtgattgtttatgaagcccgatcagatctgctgtgtaccaagtgcactccatac

SEQ ID NO: 36057 - DNA, 1375 bp, Bovine  19866881081494
  misc_feature (1)..(1): n is a, c, g, or t
natgtatcagaagctttattctcaatagcaggataggagttaatcttgcttttctgacccctgttactggtgagcttgaaaagatgcccaccaaaacccatcctttactatactttcactttgggtctactcttacatattctcctttcactcctggagatgctttctaagttgtacaaatttcccagaatcatagcccttctacctcgcccaatctcacgtatagagggtggcatggagtctggattcaagcctcttagggccctggaatttggtcctctggctttggctacacccagtctctttcttccctttcccttatgcccttcagttaagtccagcagtggtttggggaaaaatctgaaccagttacaacagtgtaatataacgggtcaccttctgcaaacaaaaattttatgactactaaatgttaggggccaataaacatagcatacagcagtcctgcatctgtaaaatacactaacaggtaattagggagaaatgagtagaggtttgttttacgtttagaaattccaaatatctcttagcaaaatccatttttaaaataatatgtgtttcaaaagctgcacaaataattttaatatggtcttatctttaaagcactttctcagcgctcatttccccagtgtgctttgaagtgtgtatcattaccagaggtgtgtgtcagactgggttatttttaaaacaaattagtatagtgaataagcattctgtttttaccttaatagttaaattgaatttggggagtaacaagtaaaactacagaatcaaggcaattggagttttattttgggggttgggatagagtaggtctgtatagacatttcataatggtatgggcaatgcccatttcttttctgttgtatattcctacagagtgaccccctagagcagagatgctcaatcagcagcagaaattttggtcttcatgggaggctggcaatgtctggggacatatttttaaagtttatttatttgcttatctgtttacttagaagtaaaatagctgtgtaatgttatttaagttacaggtatacagtatagtgattcacaattttaaaggttatactccatttgtggttattataaaatattggttatatttcccatgttatacaatacatacttgtcacttattttaaacctaacagtttatacctcttaatcacccgtccctgttttgcctcccactggcaggtagccactagtttgtcctctatatgtgtgagtctgcttcttttttgctatattcactgctgctgctaagtctcttcagtcatgtccaactctgtgcaaccccatagacggcagcccaccaggctctgccgtccctgggattctccaggcaagaaca

SEQ ID NO: 36058 - DNA, 2181 bp, Bovine  19866881130798
  misc_feature (1)..(1): n is a, c, g, or t
nttccaaggcaccagactgagatgagcctcttcagaatgtctgtgtgaacgacactcagcaccgccactggacaagcctctgagaacatccttctttcaggaagctccctcctctgcttcctcaagcttctcacttgcttaaagacttaatgaatactctcagggttaaacattgacactaactgttcgggaccattcatccaataaatggtcatcttgggtggcctctgtcatctctaagtagacttttatctttaaaagtgcagaaatagcaacagtcatgactttaagtactcaaggcttacctcaaatcatcttctctgtctacataaacctgattctatcaaacacagctactctctccttggtagtacagtcttttgtcccagtttattttcactggtattaaatatgtattattacctcctaaactacattttaagctctttgagagatcaagcactgttggcatttggacacgttttccccagtaaagacctcctagaatgtcctgtacgtagtaagtgtcgttgtaataacttgtctgatgaaatcaggtctgttcatgtctggtcatcacttgaaaacacttcaccctttgaagactcttctcggtgctctcaaggacaaagggggaatgaattcattactagactgggcaacatgaaagccaagtaggatcttcttgctgttccaagtttgttacacaactggaatgcgaagctgatgagctatcacatccatccaggtgggtagatccatcgggaccccgtgaggatgttaacacatgagccgggcagatgggacttgacatttccatctgaggtaacacgtgagaagggacctgtcacatcacagggcccatttgtctgcttataaacagggttcaattaaaacaattatttatacatgttctgtagaccttgaagagcttcccatgtggctcaggggtaaagaatctacctgccatgccagagacatgggttcaatctctggattgggaagatcctctggagaaggaaactgcaacgccagtattcttgcctgggaaatcccatggacagagaagcctggtgggctgcaatccatggggtcacaaagagtcagacacaactgtgcaactgagcacacacagagagcttgaaggacaccattctttacatccccttggagttctggaaaagagtgtgcccattttcgcaggtgaagcagagtaactcagtgataatcccagatcccttagagatgtacgctctgtctcttgaactcagacaatgaaatgtttaggccacagatttaaagataaatatactttggcaggtttatctgtccctaatcacagtgtaagagctaatgacaatgatgcttaccgtcattttctagacacagcttcacagaatgaggctatttatgtcttcctaaatacagattatgatttagatattccgtagtggcataacaatgatttcttaggctaaaacagatataaatagcacaataatcccatttaggtaaggtttgcttttttttccccctaaagtggacctgcttatttaaacaattatctctggggttgttgtttgttttttaatatattcacttgttggcttatctatttattcattgcatctggtcttagttgcagcactcagcatcttgtactgtggcgctcagctcttccagccgtggtgcgcaggcttcagcagttgcagcgtgcaggcttagttgctctgtggcatctgggatcttagtttcccagccaaggatggaaactgagtcccccgcattgcaaggtggattcttaaccactggaccaccagggaaatccctatccttctttgcatttagtctaacaatatacacagcaatagcaaaagacattcaaacacttagtcccattaggtgccctatttacaaatctaacactgttaggagtcattgctcatgctaagtgtgatcacaagcaaacctgagtaggcctcctgctgcccgaagtttcttgtttctgtgtgtatgcgtgttggtgtatgtctgcatgcgtctgcgttttgagtggccctctttgctcgagatcatctgtccagcatcatgagagtctcactctgtgtggccattcttcatatttaagtcttcactttctctaacactgaaactaacagaagcatataacgctcctgactg

SEQ ID NO: 36059 - DNA, 1532 bp, Bovine  19866881246052
  misc_feature (1)..(1): n is a, c, g, or t
nttttgctgggagataaggtgcagaattgaatctctacaattctattaaataccctgaaatgaaccgagagtagtcccagagttgatggcaggactgaagcagaaagatggtatttcatggtccttatttcaaaggtgaatacagggacaaaaatctaacagatcatttataagtcattaacataaatctcatatgtaaatatataaatacatgtgtatatttaaataactgaatttattcttctgttttatggcttcttaactttgcatttttcttagaaagacttcaactacactatggtaacctgaattttttattctaaaatgttacagttcaatttatatataatatggtgatcttaaaatgatttttgcatacagttttaagtagatgttcagttttattccttctctagatgtctggtagatcttaaaagtttatttaaaaatttgtttcccattgagctaaatgcaactttaagatacactaaattttcataaatatgtggatatattcctagaaaatgctttatttcttctgtttacattgcattatctatccacgcctgggaaaaagttactgttaatattgtagttttaaaatatgtttgaatatctgttagggttcttcactcactatgctacttttcataattttttcttaaatttcttgactatttttatatgcttccattttacttgaagttctgacatgtgatgcatgcttaatttttatacaactaaatttaaaggtacatatttctattttttaatcattaattcagaaaatatacttgctttcaaaacctattacccatttctgacttttctttcaggctttcaaaaaatcatctgtctaaatttcttagaaaatctttacgatacatgtcactataatgcaagcttatttataaggtgcctacccgtcaaatccatctgctatgatgaagagaggcccttcctctgtgttgtgaaaagcttaaaatgaaggtgtcattcttgccccacaaagccaggttaataaccgtctcctactattacagaacacaaccagctgtggagtcagctgtctccttgagagtttcattacttttggctgttttccttcacaaaaattattaaactaaaaagcaaacctttccataaatcaaaaagaagtgttatgttttacaaataaaaaggactgcatgtatttattttttataagagatctaagagctaaattgccattaaaaaatgattactgttaataagatactgtgtgtttttgcctgatcttacaagattaatattttagtttatctaattaacaattatttttatctatattcttaacctaaaaaggatttgatacaaatgtattttgcttaaggttactttaaaaggtaaattaatgaaaatcaaaagttttacagtatttactgtcaagctttcttcttatttttgttcaaatctgggcaatggatgaaaacaaaatttcctagctctcttgaatcacagcagaatcaaaaagcagtataaatgtatgtata

SEQ ID NO: 36060 - DNA, 1072 bp, Bovine  19866881274026
  misc_feature (1)..(1): n is a, c, g, or t
ntagaggagtaaaagaaaaacaaaaactataacaaacaagtgccaaaaaccaaacagaacaagtctttatatagaaagatgataaaatctatagaaaaaatagtaacacccaacttttaaatgtgaaagaatatggataatccatagtaaaaagcctatcaagcatacatgtatttattattgttaatgagagtcaataagttgtaacaatatacctgtttgtatcaatttagcaaatatatttaaaatgattatacctattgttcataatttatccatagcaattggcacaacaattcccctactttctagaaattatccttcagaaataagcagagctagagatgaaagctttatttttagagtgtttacctccatgttaattttaaaagaaaaatgagcaacaacctaaaactttgacactagataagcagtgaaataaaggacggtatgcacattcaagtcatgtagtggtaaaaaattcacatgccaactcaggagatgcaagagacactgggttccatccctgagttgggaagatccccaagagtaggaaatggcaaactagtattcttgcctggagaatcccgcggacagaggagcctggtgggctatactccatgaggtcacaaagagttggacacaactgagcgcgtgcatacacacacacacacgcacatgtacacacgtgcacacacacacgtgcgtgcacacacacacataaattcaggtcacaacaggaaagagcaggcaaagagcgggctaatgacagtagtctgttttttctgcttggatttttatgtatttctggtgtcattttgcagtgagggagaatttgatggtttgggagagggtgacagacgttcacacagcagcagagaagttaagaatgtaaactcagggcctttcctggtggtccaatggttaagaatctgccttgcgatgcagaggatgtgggtttgatccctggtcggggaactaagatcccatatgcctggagacgactaagcctgcctgagacgactagagagtccctgagccgcatggaacagccccacgtgacacgatgaag

SEQ ID NO: 36061 - DNA, 820 bp, Bovine  19866881305356
  misc_feature (1)..(1): n is a, c, g, or t
naatacagtgactttgttttcataaacatatagcaccttatgccaaatgaaaaataatttgagaatcagcagaatccaaagtgttttcactgttcctacttgaaacaataggagagtaagaagaaaattccacatggaggtaacaaccatggtagcatggctgggccccaaaacaaagaagagaggtatatttataaaatttcaacagccctataccctgactcatctccaggttcataaccatgaagcccactttgtccaggaccatgaattcactccagtattttatctaagatctgaaatttccagttctcatggggagtcagcatctgattttaccacaaagactcaaactaaataggacaagtgactttaagtatacaatttacaaagagttctgagatttggcattgggaattttgctttttagcatgggaaacacagttcctaaaagagaaacaaagttgttaatcaacaggcctgagacttgattatcaattaaacagactctaaaaacatccaaatcaatgctaaacatatctacacagatggtctcattcagtccaaaactctcaagagagaaaactcaagcccattcaggaaattttgtctcctacaaagtgatggggacatggcactgaatgcagccggtcttttaaaaggaacagcaccgatatttgtgtgaagtgactaaagaaagctgtgttagaagctagtctgaatgagggtgcggcaataagattttgaaatatacaaaattctacaatcttttattggcaaaatcatagtattctgacttgtggagtacgaaatatccatc

SEQ ID NO: 36062 - DNA, 975 bp, Bovine  19866881376396
  misc_feature (1)..(1): n is a, c, g, or t
ntcgtgtccgaccctggactgcagcactccaggcttccctgtttcaccatctctcagagcttgctcaaactcacgttcattgagtcgctgatgccatccaaccatctcaccctctgtcatccccttctcctcctgccttcaatcttccccagcatcagagtcttttccaatgagttggttcttctcatcaggtggccaaactactggaccttcagcttcagcatcagtccttccaatgaatatttagggttgatttcttaaaggattttcctaaagaattgactggtttgatcttcttgatttcctaaaggattttcctaaaggattggctggtttgatctccttaatgtccaagggactctcaagagtcttttccagcacattttgaaggcatcagtttttaggcacttggctcacacatgactacaggaaaaactatagctttgactatatttcaatccaaaaaaaatttttttttcacattcttgactttgaaattttgtctctcttgccatgggttcattttagtaacatattcctgattcagttcatgagtagtgcatcactggaatttagttttatctcttagatccatgttagcaaaacacaagccaaaggccaaatctgacccacttttgtttttataaataaagttttattgaaacgccaccatgattatttactttcatattatctatggcttcttccttactacaacagctgagttgagtagttgtgacagttgtgacagagactacatggctcacagtctatggccctttacagaaaaagtttgccaacccctgacagattaagtataggtccttcactctcccattgccaccatggttattcttcagtctctcaaactcgtaaggacaatttaaagagcctggtagatgcagccaacaataacagctcatggaatgtacacagaattacctgactgactttttttgatgatagtttttgatt

SEQ ID NO: 36063 - DNA, 823 bp, Bovine  19866881408946
  misc_feature (1)..(1): n is a, c, g, or t
ncttatctcacatggcaaccacctctacctgactacagccttttccaggccaggcacagacacagtcttaaattctttttatctcagaactctaagtagacttcatactgacaaatgatcagaagcagtctttaaatttaaaaaggaaagataccatctctactttaagtctttgttcattggacaataagaaacaaataatcagttgccctgttctctctcccccaacccaaggaagaaagaaaagaaagtgaagtcgctcagtcgtgtccagctctttgcgaccccatgcactgtagcctaccaggctcctccatccatgggattctccaggcaggaatactggaatgggttgtcgtttccttctccaggagatcttcccaacccagggattgaaccggggtctcccgcattgtaggcagacactttaccgtctgagccaccagggaagtccacccaagaaagggttgaccaataataaatggtaactatacagagtccttagacatcaactcagaaggcacatcacagggattcttggtccccagaggaaaaagggactgctactcagagtgaaacccggtgctgttgagagagtcatttcctaggcaggttgataagaactctaggggtccccaaggagagaggggtctggaattctcaaggaggaagaaaggacaaacttttttaccctctacattccttaggattatataacaataacgtatcctgcctgaggacagtctttggattaaaccttctggctaaacctgttatcttaaaatgtaaattatgggagtaggtctagtaggtctttacaagg

SEQ ID NO: 36064 - DNA, 842 bp, Bovine  19866881572436
  misc_feature (1)..(1): n is a, c, g, or t
nctgcagtgattttggagcccccaaaaataaagtctgacactgttcttgcttagaataaggctaaagtagggagtgtccatttaaggtatttttaaaaattcactttatttaaataaaaaattaataatggttcaagtgatagttatggcaaaaactatggaagtgggacacgaatgactgaaagagtgttagatggtatatttatttctcacaacaaccttgcaaattagaaacaaaagtccggagaaacgttgggacttagccaacctagaaagcgaataggtcatgaaacaggattcaggtgaaggtacttacgtctctgactaatgctctccaaggttccccctttaccaggatgcttttttttgtataaggaatttttcgttcaactactgacgtgtgtgactgactcatattgttttttaccccacctcatctcctcaaaaatatttacttcctaaattaaatccttcccctcccgaatgaatttggtgtgtttttaaacacacttataaaacatacagggaacagggcccgatttcctgcctggctgagtaaaacagtaattctccagcttggcacctcaccctgcagctgtgataagggccgttatgcccaaataggcccttaaacggaagacctgctgagcagagacccactttcccagccctgctccacctcgtcagcttctctgccaactgaccaggcggaagaagcagcaggggaggagggcctgcaggtaggtggggaggggatcgttttttttgaaagccttaaatccctcacagggaagcagcagctgctcctcgtttttccaacatctgtcccatctgtccccctg

SEQ ID NO: 36065 - DNA, 1241 bp, Bovine  19866880390336
  misc_feature (1)..(1): n is a, c, g, or t
naagggtcagcttatttgtttgaccacagtacttattctaaccctcatctctctcattatggctgggaaaatgaaagaatggctagaaatgaaagcataaaagaatgtgcataaaaggctagagttaaatggaatatatcagaacttcttttgatgtttaagtccccaggtttgaattctgtcactaagcaaagcacttcagaaggtgaaccttgctattattaaaaatagctaaagaatataaaatacccttatgcaaccagagtataaaatatttcgaggtattagaaacatcactgtggaaagagaaaggattaccattcctctaattcttcttaccttaacaatggtattaaatccatgtatcctctaattctttttaacctaacaatggtgttaaatccatgtagtcacctagaacataccacaaggtctattattcaatcagcatcccaggtcacatttggtcttcccatggaacataaggtaaggattaaggatatggtcaattctttttttcttcaaaaaagagacactttctcattctaaatattttggacatgattttcactctcaggaagcaaaacaaatgacaattatcagaaacaaataagcaagtgacaacccattttgtatggggaggtcatacacgatcggaggccaggaagccatattggctgtgctcaggagccttcagtcgtgtccaactctttgcgaccccagggactgtagcccgctaggctcctctgtccatggaattctccaggcaagaataatggagtggggtggccatttccttctccaagttgatgacttcagaacaaacatattcagtctttagactgccttagatagtcaccatgcaggtttatttcgtttgtaccttctgatgcattagtctgtgcttagaacattctcttcccttagtctgtgcagtcctgagtgcttatggaattcgaagtatttcacagtaaccttcacttggtcagctatttggagtaagctgtgtttcttttaagtgtgtggacattgtttttgcgtggagggtagaagagggctggttaaaaaagtatccacttgtttttactccagtgcatgatttgaccgtaatgtttgcaatttgcattacatgtacctttatcactctttccagttaaggagatttaagccctaaaacaaaactgttaggagcactgttcccactgaggaggtggtagttttcctccttttgattgtgtttg

SEQ ID NO: 36066 - DNA, 1319 bp, Bovine  19866880431281
  misc_feature (1)..(1): n is a, c, g, or t
nctcccccatccctgggattctccaggcaagaacactggagtgggttgccatttccttctccaatgcatgaaagtgaaaagtgaaagtgaagtcactcagtcgtgtccaactcttagcgaccccatggactgcagcccaccaggctcctccatccatgggattttccaggcaagagtactggagtggggtgccattgccttccctgccaagaagttgcaagtatgcctaaatatacatgtttattgaatattttcccactaaaaccattgggttcacataaaccatagattggctcataagtatggaggcattcagtttttcaagtcagcatcttctctctgctgtcctgttagaatatatgtcaccaagcaaggggggcaattaaggagacatgatgtttatgctgtttaacttttgttattttgtgcttttggaaaaaatgagagtacaaaaggaggtggagatgggactgaaaagttcaatacagtgtaaatttgttctgtttactgattatagcagaaaacataagtcctctttcctgttatttaaaaatagatctctgaacatgtctcccacattcctatgaaaagtaacagctactctagtgttccaaagaaaatcctagttattggatttctatagtgaagaattatttcaaacaaccttaccttgcttttaaagactacttggaatcttgatacatttttccattactggcagtaaattatttttagttcaacttgtcacagttgacaataaacttagattctgttttgaatgtacattctgtgctgctgctgctaagttgcttcagtcgtatccgactctgtgcgaccccatagacggcagcccaccagccttccccatccctgggattctccaggcaagaacactggagtgggttgccatttccttctccaatgcagaaaagtgaaaagtgaaagtgaagtcgctcagttgtgtccgactctagtgccccatggactggagcctaccaggctcctctgtccatgggattttccaggcaagagtactggagtggggtgccattgccttctccgtacattctctataaacatctaattatatagccagtccaaagatatggtctatggttttttacatagactgtagtaagaagaaaatttaaatattatgaaacctctattttataagcttcctgttaccagagagatatgtccactcatataaaaattatatttcatttaaaacttgaagtcactgagtacatactgttacagtatgtaaataattcagataaaatgtatacacttacaaatattcttacctcccaaat

SEQ ID NO: 36067 - DNA, 2593 bp, Bovine  19866880448810
  misc_feature (1)..(1): n is a, c, g, or t
naccataatgaaggctgagtgtcaaaaaattgatgcttttcaattgtggtggtagaaaaaagaacccccccccctttgtgaatcccttggactgcaaggaggatcaaaccagtcaatcctaaaggaagtcaatcatgaacattcattggaaggagtggtactgaatgtgaagttccaatacattggccacttgatccatagagttgactcactggaaaagaccctgatgctgggaaagatttaaggcaaaataagaagggagcaacagagggtgagatgattagacagcatcaaagactcaatggacatgaatgtgagcaaactccaggaaatagtggaggacagaggggcctggcgtgctacagcctatggagtcacaaagagtcagacgtgacttagtgactgaacaatgagcaacacatcctctagtcctctcactgtaggtaaggcactattctagtcaatttacttgtcttagtttgtctaatctccccaacagtcctataaggttggcactatttttcactctatattacagatgatacctcataggctcagtgtggttaataaactttgatcaaacttatcccatcttatcaagaggcaaaaccagaattgcatcacatgtgtgttcttactcttatgtttttaatcattctttttttattaactttgatttctgtcatatgacaaaattaaatgaagtgtagagatcagaacttattttttgtttgcttgtttgttcattagttctttccagtatcctgaatagaaggcataaagcttaaacaagaatggtgactgtctgtaaaaacaaaggaaagaggaacagtgtaattttaaatgtgttttcaagaagataagtcataatacagactctgtgaacccttaaacagtggatatccatctcagctgcagctttcagaggagttcatgtgagaaaagatgtgccagataagtaaatgttctaatgttagtcttcatatctgttatgggctaaatgattgttcaccacttctgcccaccaatttgtgtgttgaagttttcaccctgaatgtgatagtattaggaaatgtggctcttgggaagctattttgtcatgagttagagccctcatgaatgagattaggggctttataaaggagatgccagacttctggcctccagactgtgaaaaaaaaaaagtttctatcgtgaacaaaccacccaccctttagtgcttcatatcatctcaaatcagagaaggcaatggcaccctactccagcactcttgcctggaaaattccatggacagaggagcctggtaggctgcagtccatggggtcgctaggagtcgtacacgactcagcgacttccttttcacttttcactttcatgcattggagaaggaaatggcaacccactccagtattcttgcctggaggatcccagagatggcggagcctggtgggctgctgtctgtggggtcgcacagagtcggacacgactgaagcaacttagcatacctgttgttattatgtgtgagaaaagagtctttaatttgttctccttttgactggttttgctccagctgcctgctgcaagaactgtcgctgtgtgaactaaaatgaccggatcgcgtaaatcctcaaatgctaaaccgatgccctgcattgcatttctcacgtcagatctttgattgtcccagagctactctcccttgcacaccttgaattaaaatatccatggtcttacattgcccccaaacctatctcaaagagtctatttcctgacttttaccctagtcaccatgatccccctccagttttgcctaaggaatgtgttgctatggcaacactcaccacccacagtcaacagtcaaatttcatttctcagacatagctattaaaaaataaatggtccatgtaacattctttgtgtttgtttccctgttcatttgtgaaatctcctacctgttcgaggcattcacaaatgtaataaaataccctttctaaacatttgggcaataatttgttaattcaacaaaggcgctattcagattctcaatgttttataaatagctttccatcaacatgaagtttaaaaaaaaagtcacagtcataagctacttcagtcctagattttgcttagtcaaactgtgtcttattttgtaataggaacatgaaatgaattgttacatattatctgctaaaaagaattctgtctctttaatttttagaacccaaagtaaaaatgacttatttaactgagtcagaaacaagaagaggggtgtaggatttctccctctcttcagtggcctccccaccaaatccacttttatttccccaatggagacaaactaataacccatggtatgtgtacaagccatggcgaacatcacacatttctaggatacttttcctggtgcatggcccggtaaaacccagtccagcccccaactgtgggatgtcatgtgtcaatagcaaccatatttaactcatttccatgcctgactctccagccttctcttggtgagtccttaaaaagtgatgcctgcagttgagtctcttgctgtggagccctgggaaggaggtaaggaggaagcttaccctat

SEQ ID NO: 36068 - DNA, 2898 bp, Bovine  19866880482083
  misc_feature (1)..(1): n is a, c, g, or t
nctgatgaaacaatggagcataagcatgaatgaaagagtttgttctcctttctacaccactctatttgcatgtggcacacatgatgccccatgagcacagaattctgggggacccatgatgtgtgggagttcagtgagattcaaagcaagcacatgagaagtgtgttctagctctgattgagtggaacccaaacttgtttcacgttcagaaagaaggtaatggcattctgaaaaatacaaatgacccagaaaccctattatatcttttcttactccccaatcacttctgctgaaaatgatgacatagaatgaaaggaaaagatggcaagccataattccttttgctttcagttctttcttgcttatcagtaagctgtagatagaaagtattagtgaaatgtacacatatcaagaagtgaaaaaaaaagttaatcttgtgcagggtttccactcttccagtaagaacaaaaatacataaacatgtacaaactatgaaatacaatttgagtaatctaggtgattctgcaaacatggtaaaggcacttatatttgcatttaaagtgggcattgaacaatataatcattaacagatttgtgctaataattttaatttttttattttctcagaatgacattaaataccaaataaaaagcatatggactttcctggtggtccagtggttaagaatccacctgccaaagcagaggtcacgggtctgatccctggtctgggaagattccacatgccaccaggaaaccaagccaatgtgccacaactagagtcagtactctagaggctgtgagccacaattactggagcccaaaggcgctagaattggtactccaaaacaagagaagacaacacaaggagaagctcacacaccacaactagagcatatcccccactcaccacaactagagaaagatcatgcatggcagcaaagacccagcatggccaaaaatttaaaaaaaaaatttttttttaagcattatgacatactgaaaaagactgcacaagagaaaaaaaaactttatattttaaatttctaacagcatttttcctgctgttttaacagtggcctcttgttttaattttgccctagtcccagagtttatgtatccagccctgactatatacatctgagagtagaaatagttgtcattacttttcattgactcactgttccatgcgtttgacaatattcagcactcattatgtatgaggaatgtgctagtggctgggaatatggtaatgaacaaaataggcatggtctctactctactggacttcattgttcttccttgaaatatagctatgctttatgttttagtgtcctctaattcaatgggattttccctgttaggtctaaattaacaaagttgagtttcctgtcaatgacaagggaagaagtcttattagtatgtctgaactccttctgcaagagtgattttgtcactcatggtcaatcagcaaccatacagagtatgggatctgggatgagaatccagtgagaaaggacagcttgggagtccagctgcctgggtttcatcataattcttacctctggctaaagctatgccttatttgcacctattctgatggtcccaccagaaaaatgagaaggtgctggtctcgccactctccagttcaccgtgatgttacagaagttaaagggccgcacttcttcagaagccttcctacccggtgtgtacactttccagacgtcagcatttttgtgtctcacagagataccaagagctggcctctgaagaaagtgggccacagactgaaagatgttgggggaggggagtgaaggaaggcagaggagcctggaaatcatagctatccagaaccactgaggagggcggctcttttcttcctcttttcccctgagagtgtgtgctgatctggtcagtaggaccctcgagtctaaactgcactgtatggttacaaagttcagtcctatataataactccctcaatatggtccaccaggcatgtctgatcactggttgcagcccatggaaatcactgtcaagtttgctccccttgatgaaggtagagttcttggggagtaacaaatatgccatcatgagggagattgtaagggtggagcactcatccttaccacaggaaggatgggactgcaggaaatagtgcgctagcatcaaagtgagagaagcatgagattgggagcctggagtccgatttcccactaattagcatatatcctctcagcaagtagctttctagaccttggtttcctcatctattaaatgagagttgaataagaatatttcagatatcaactaaagctcgaacatttttcctttgtcctttgtctatagccttctccaatcaatcctttccaaaaacatgccgctgtgtagaggtcacggaccacatcttttttgtccttgattccccactatcacatggtactgggaacacagtaggtgctcaagaaatgtttactgaatgaatgtgtctttggacaatctctgtgaatggatgttgcttcttcttatctcttcccagagaaacagggcagaaatctatgataacataagaaaaggaaagcattctaatagttgataacacagaatacattaaagcaatgctcagtcaccatacattaagtctttttaatgtagcttttaaacagcttttcttattagccaaatgaaatacagtaatcctttaactctcctgtgtcagattatcagctatttcaagtaagtgttaacatttctgtcactggcaaaagtgaattatgttttcctttccaagcttgcatcaacatgcccaacaagcaggctgaacacgcctctctaatgggacagtgtgaggtgccactgcttggtgattataaagcagctcgacatcggggggagggg

SEQ ID NO: 36069 - DNA, 1356 bp, Bovine  19866880629149
  misc_feature (1)..(1): n is a, c, g, or t
ntttatttctctagtgttatgcagcttatgggaaacaaatgaaatactacatttatttgaatttttattcagtgttgagttatactcttatacctcagctaaatattgttttgatatattaaatgtagacctctacaccctccttttatagtcttatctgtcatttgatttttttccaagtcattagtccttcatttcattgtttctatcatggctttaaatatccagtgagaccctatgatttttatctgaacactaataaaccacttctttgaagcagcttctactatagccaggaagtcataataaggataatggagtaatagtcactatcttcaccaccacatgattcctaacagtcacaagcacagcttccccaagccccatcaccgtctccatgttaataatggttaatgagctaaagtattgaagacacatagtctccatttgctcagggattttgtattgtatatgctaatcatgtgagagaactagaggaagatgcagtagaaaaggttatgattaagaatgttatgtattcttctttttttttttcctgatttaaataactgctgaggcacaaaccaagacccaagggagctacagaaatttacacatttacaaaactgggttcccacgaagagaagtgtcttgcaggaagaatgtcaggatgaatatttcccatcacatttgaaaaggataccagtaaaagaggggttggcaacaatgctcttgtacttaggagagctacagaaggcttctaaagagccaccggagtgccaggcaattctgatgatggtgtggtacaatttgaaggactagagaaggtcccatattacaaaatatacctccaccacttagaggctgatctgctgctgctgctgctaagtcgcttcagccgtgtccgactctgtgcgaccccatagacggcagcccacccggctgtcccttccctgggattctccaggcaagaacactggagtgggttgccatttccttctccaatgcatgaaagtgaaaagtgaaagtgaagtctctcagtcgtgtccaactcctagcgatcctgtggactgcagcctaccaggctcctccatccatgggaccttcctggctagagtactggagtggggtaccattgccttctctgagaggctgatcactgcaccttaaatttattcactggaaatacaacactttgctttatgaagtcttttaaatctgtagttgagattcaataccagttagtgaaaccacctgtatcagaaaccttgtttccaaatgatgcttgggctttattttcaagtttcctaaactgggcattaggaatgtaggttttcaaagtcttaagtgtgctcg

SEQ ID NO: 36070 - DNA, 2046 bp, Bovine  19866880642796
  misc_feature (1)..(1): n is a, c, g, or t
naatgctttgtagggttaggggcttgggaaagggctgtaaagagaagtttgagtaactctgatatgatctttgggtcttcactttctggaatcaccaatgtttctcctcttggtctccctaaacccattaaacacctgcattctaaaagaggggagcttcccaggtggcactagtggtaaagactcctcctgctaatgcaggagacataagagatgtggtttgatccctgggttggagagatcccttggagaagggcatggcaactcactccagtattcttgcctggagaatcccatggacagaagagcctggtgggttacaatccatggggtcccaaagaatcgaacaaggctgaagcaacttagcatgcacgcatgcattctaagagtgtctctattaatgtccaatggtctgtaaaccccaggttaggccagtgcagggagctctctggtgtcttgacctcaccaattctgatttctggctttacaggctttcacagcctctcttctgtccacaatctaggattgtggatagaacaaaaccttgactatagtgaatgatataaaggtggcttagtgatctgtaagttaatatggctatctacagtctactcaagagtacctctcaaccatctttcttgatcatttggggccaactcaatgggctgaagctctgagttcaataggatgtttagaaagagaagctcctcatggttctgactgctatgttaccactgccacccagagtcaggaactccatcagatctctagcctccagcccaagttccctgaaaatgagaatccccccaaaatattaattttctatgttcagagccttctgaaactgcacttttagtatcacaacaaccccagccattggtactttttatcctctactcttggagaaggcaatggcaccccactccagtactcttgcttggaaaatcccatggaaggaggagcctggtaggctgcagtccatggggtcgcgaagagtccgacataactgagtgacttcactttcacttttcactttcatgcattggagaacgaaatggtaacccactccagtgttcttgcctggagaatcccagggacgggggagcctggtgggctgctgtctatggggtcgtacagagtcggacatgactgaagcaacttagcagcagcagcagcatcctctattctgggcttccctggtggctcagatggtaaagaatctgcctgcaatgcaggagacccaggttcgatccctgggttgggaagatcccctggagacccactccagcattcttgcctggaaaattccatggacagaggagcctggcaggctacagtccatggggtcgcaaagaatcagacacgactgagcaactaacattagctctgttatttcatctgcagcttggaggcttgtgtgttgtaaacccacagaggaaaactcagaagttatatagaatcagtctttttttttttcctccacctaggagaaattgttttgttttcttttatttttctggaaagtcagttatatgttgccatagggataaaagataagaaaaaaaaataatctaaccaaacaggaatatgacttttcatttatgtatataggcacttttacctgccttgtgtaaaatcaattcaactcaacaaatatttatcgaatccctactatgtggcagccataattctaagttgtacgtactatcagtgaccaaaagagatggactgcttaccctcatccagcttatagttacttcacagggtattgtagtaattgacgcatgtaatatacttggcatagtgcctggcatttaaaaactacataagatacagactatgtgtaagagaaaataggacaaatggcagtgttccaggttgaacttaatttaatcatcatttgtcactgctctgatgaatattgcgaaaatgaaggctttagattgacactttttaagtcaaaacatgagaaaatatattcttagagtcggttgtaaaatgacattaatctaaccgtgatattctattttcacagcagtagcctag

SEQ ID NO: 36071 - DNA, 1686 bp, Bovine  19866880675545
  misc_feature (1)..(1): n is a, c, g, or t
nttataagttcacgccctgcacctgcaggaccgggcggaaagaaagaccgaaattgccttgggcggggggagcatagagggatgcaaagatgcaagcgcaggggaggaagaagcggaagaggggcccgctagtcttccagcttataaacaaagctccgggtccacgttgtctcgcgcctttcccgagtctccacccgaagcgcacagtgggcccgaaggccccacttttattctcgcaccccgacgccgggggtcctttcgcctctcgcatctggcctcccattctcctcatcctccccttctctgggctcaaggccccccggctcggacccggggctcagagggtcgtgatcctggacgtgcaggtgccattacggaagacgccgccggactccaggttctcgggctggaagtcctccacgctgtaagcgcggctcttgagggccgtggcatagtagtcgaccggctcctcggcggcgttgtccatccagctgaggcaaaggatgcgctggaaagagcgcttgaagttgtctgaaaggaagccgtagaggatggggttggcgcagctgttggcgtaaccgaggatgaccgacagctggctcaccgtggcgtcgtcctgctccgcgaacacgttgactagctgcaccacatagaaaggcatccagcagatgacaaacaccatcaccaccatcatcaccatcagggtgatcttgcgctccgagcgcttgcgctgctgccagccggccttgagggccaccatgcgcattttggcgatgatgagcacgtagcacaagcagatggccccgacgggcagcaggaagcccatgaggaaagtgtacaacacgaagcccaccagccagcgctgggcgggctcgggcatgagcatgttgcaggccaccgtgccgtcgctgttggccgccgtgcgcgagaagaccacgatgggcagaatgacgagcagcgacagcacccacacgcccagattcaccaccttggccacggtgggccggcggtagcgtgcggccttgatggggtgcaccacggccacgtagcggtccacgctaagcacagtcagacagtagatgctggtgaacatgttgactgcgtccacgctgagcacgaggcggcagagtagcgcgccgaagggccagtggcgaagcaatgtggaggtgaccaggaagggcacgctgagcatgagcagctcatcggcgatggccaggttgaggatgtagatgttggtggccgtcttcatcttggcgtagcgcaggatcacgtagatgaccatggagttcccacagagccccaccaggcacaccacggagtagatgaaagagatgaggatagcgctgccctggccctcgctcaaggtcccgttctgggacgcgtttcgccccggttcttccatcccgtctgcagcgccggccccggggcccctgctgccgccgccttcgccgcagctgcctgggctggggctaggagaggagggagaggaggcggtgccattggggaacatctcagctgatgggggccggtggggctgccggggctaaggacgttctccgggcgacccccgccgctggcgccctcactcggcacccccggcggtccgcccgcagctcgcagtcacccggcgcctgggggaagcgctcagcgactgcaggaagcgcagctccaccgcggccggcggag

SEQ ID NO: 36072 - DNA, 3178 bp, Bovine  19866880749688
  misc_feature (1)..(1): n is a, c, g, or t
nctccatcagctcctaaatcctatgacaatgtaaaagttttgctaggccaggataaagtattaagcagaacattatccttccaactctaatcccaatgctatatttagattaatttctctctaaaactaattaaaatcactggctcttttagggcaatttgatctgcacatctgattcattttcctatactggtagaaagggaaagaaacacaaaggaacatagttctaactccacatggccccatctgtatgcacatcaccaaagagaatgcaaaacattcacaacatcaataatgtcagagttattaaagcaagtaatttccttttcctgatgccattttcatgaaccttgttgaaacagtctcttgcacatttcttaaggtcttttttccaagtgagttttccaaggaaatagcctcccatgtttatatagatatcttccagttttgagcagagaagagctcaggggacaatctttgggtaaaagggtaactgtacaagcgatccttaactacttccaaaacttcactttgcagaactttctcattgtgttttccatgaccattattttgccaggaccctaaggatataccattctcctttttaaattctggcccagatttcaattcaaacaacatatcttttccttatcttttttttttttttcccagacatcttaagctgatatttgtaaagttctttacacaaaaattagaagaaacaataaaaaaaaataaaaaagaatagactactttataaagggtacatttcctctcccaagctagttaattcacaaaatcaccttttgaacactcaagtttaacccttctttctattcccctctttgcacttttcttcccaagtcacagtatggcgtaaagagtgtcagtcactcagaccttctaaggaaatgaacagctaggggctttgatgtgcagtgtaactttcgtgttctattgagagcattcttaacagtgaagacacaggagctggtctccatccttcactcctcaacagttggagctacttcctcataacttcattatcagtcttcttgactttgcaccaaaaacaaacaagcaaggaaactcacaggaaataactctacaattatacaaagtaacttttaaaagtgtcatgaatttaaaaggttggagaaccctccctgctccttcccccacttcatcacaaggtaagcagtgagcctccctcccctccttgaggccctaggggctttcccagtcgtcaccttctcactgcacagatggagccaaaggcgttaagtttctcttatatttgaaactaaaacattcatcatagttacaaatccttcctccaatctgatgcttggaatgacatggaacattaatctcctctttcctctagggcttgccaaggatcaaaaaaacttctgcctgtaaatggctctcagcattgatacatcctgaaaccatctatgtgcatcaggaaagaaacagagctcacttgcttctatgaaaaaaatccatgttttttcatcctcggggctttactcctgagaatcaaattggaaaacaccatttttaaaggcacattcaaagacaatctgtgaaggaaaaaaaagtagctgctagaagcaagtaaacaatctatacttggatctctgaaaacaagataaaagtactttgcaaagaaacaaaatctaaggaactcagaaaaactgaagtcaattgtgaaccgatttgctgatactcttctcctaagaggagggcctgtgctgttttttaaaaataaatatataaataaagttgccttgcctatatataagaagcagaattttagttttttccttcataatataccaacagaaaccaccgcaagcaagtttctactgcctggagaataaaggccaaatttcttgttatagtttacatacctcttcatgacgcagcccagcctggctttcggaccatatttcccttgtaatctcatacgcagccttgttacagcagtattagttattagcagtttctcacaattgtcacattttctcaggtctgtgcacacacacacatgccatccctatttttgacatactcatggtctccctccacactgtctacctaacttctatttctccttcaaaagtcagagtaagtgttgtctactggaagtcttttctgattgccataggataaagcggatccctctctattgtattgtccgctgcactatgctaagaagaaggcaatggcaccccactccagtactcttgcctggaaaatcccatggacggaggagcctagaaggctgcagtccatggggtcgctgagggtcagacacgactgagcgacttcactttcactttccactttcatgctttggagaaggaaatggcaacccactccagtgttcttgcctggagaatcccagggacggggaagcctggtgggctgccgtctatggggtcgcacagagtcagacacgactgaagtgatgcagcagtagcagcagcagtatgttaatgcccatactgggcgaatttaggtgagaaacttctctaatgacacaatgatcttaatacattatttctcaaggactgacgcagagaaatttttttaaaagactatacccacggtaactgttttataactatgaataccgaaaaatagttttataaagaatatataatgccaaagcattaaataacaaattttgtacattttaaatttaatgtgaaagctaatattcttccatgtctttaaagtaatttattttatttatttgtaagtactgatttataagtatgtagtgatttcactcttggaaacaagagttctctgtttcaatttttatagcgtccagaaaatataagctaatatttaaatgaatccagtggcacatcatttttataaaagcagtcctaattttatatatattatcaagcttgtacattgtattttcctaaggcatctgtacaatcaactacaactagataaatatcattataaaaaactgttagaatgattagagtagcattaaaacaagcatacttcctgtcccaagtgtgttttgggcaggggttggaagatggagaggatatgtacttttatggacaagactaagtaacaaatactgcaaggtagtatgactgtgtggtctcctgtatgttcagttcagttcagtcgctcagtcatg

SEQ ID NO: 36073 - DNA, 1342 bp, Bovine  19866881073579
  misc_feature (1)..(1): n is a, c, g, or t
nttttgattctaatttggcagttccaatggaacctcattgcactttctttttcctcccaaaggcaagagctgtggattctcagggtggaaatgcaaggactcacaggtggcctggaaaagaatgtggtcatttcttgctttcatgaatgagcaaaccaaggtgcagggaccatggctggtggggcttcagagctggttgaattcctcaaggcttgttctggctgtcttagaatctgggcagccggcttgcaaaacatcaagaggaaatttcctcttgagccataccgggtgacccactctgccacaatttggaatgggagaattctagagcagtctgggaacttttagctttacctgcccagctcgcccaggtgggaatgaagtaaggctaataaagtgatgactttctctgaagtgttccacagactcagaaaggggaagccaagaatagagtccacttgtcccaggtatggtgttcattacagaccaggctgccttcttactgtgtcacattgggtgaaattaattttgaaatcattttgatcaatgtttcattttaccaatatgtcataatttagtaataacatttaattccatccatagatacttaatttgatcaatagttaagtcctaattttaaatatattaatttttgaattttggtgggggcagaatattttaatgttaccctctccctttctgtgtactcttgcttataacaaagatttgtcattagcttttaagccagaaagaagtcagatcctcctatgaggaagacctctgtgctgtaaaaactgtctgttcactggggaaaacatgccctttggtaaattttcacaagagtcattcccccagctctcaagcttttaggtacagctctgcttgtcccatagaggctggattaactggattagactaacaatccatattgtgtctcagagcacttcttcagctgtatccttgaaaccagaggactcagcaaggcaattctggttgtttcttgaagctttaaaaatatttcataatgtatgcctgtgagcatatgtatgtgtatttatttaacatttattgagtactttgggggctttccaggtggtgctagtgaaaaagaacctgcctgccaacacaggagacgtgatttcaatccctgggttgggaaaatcccctggaggagggcatggcaacccactccagtattcttgcctggagaatcccatggacagaggagcctgaagagctactgtctatagggtcgcaaagagtgagacacaactgaagcaatttaccgttcatgcactcactgagtaccttatactgtaccagacactgaactaagtacatt

SEQ ID NO: 36074 - DNA, 1572 bp, Bovine  19866881314618
  misc_feature (1)..(1): n is a, c, g, or t
nccctacaaagcatccacgtcttttctttaacacagggcaccacatatttctgaacccatattcaagaaactgagctgctaaattctgacagaatgaatatcagcaaacttaaggaagacaactgagttagtgaaatgctttaatattaaaagctgcttccctgaaaatgcaatcccacatcctagtgttagcttttgatttaaagtttccattgataatccccagttctgaatgtgttccttaatctattcttagtagatctctagccaggaatttgaacacacggaaaaaaaaaaaatgaaagaaatttccagggagtataaatgcaaagcctgttggtttgaaaacttgtccctaaaagaagtattaatatttaatatgaattttaaaatcttgtatcattttactttgggtcactaaaagagaaaggaagcaatcctcaaatgttaataatgactttttaaaagtaattcaaaaaggtcttagattaaaaattaagtagttctctaactttattgttggagccgcttaatataatttaatataaactctctagcttctttagcttcctgatttgttaaatgtatacgtgtgacacccttcccccaacacacatacacacacgattatatcattagcattcttgcaggtcactttccacatgccaactctctaacctcttaatccccttctaaggctagtgacaaatagcaattgccactggcacaaagctaaagggaaattgtaaaaaaatattacatgaccttgggatcaatcaataatatggaaaacttgctggaaaataaatcattacctctttagagctttattggctctgatttagatgcctctgtcttgaccttccaatttaaacctgagtgaaggataagtaaccaccacttcctcatttttaaatgggtttttctggtatcatcccttactttccttatagaaatttcctaaggttactaagactgcaattagaacaaaaataaagttgtagaagtttcgggggaagttccatgtaatcattacaaacacccttcagaattatattgtgcttgttgcatgaaatatgagaagcaaaacaggtgttcttttttaaaaaatagtagagttttctctgacttttgaaagtgaaaaaacatttctacatccaatagatgatataagtagtgaacatctaaaggtgatgaaaaaaatgttttgagactaacagccaaggaagagttactattaaatagagctttctaatgaaaacaaatctttatagacaagatattcaaactgaattgtagtttcagagcctaaaagtgcttctagcatatcataagggctcagtaaatatttgcataattaaatgcattttattgatgggtaagagctatatatgtgaaaagtgacattttgtattggagtatagccaattaacaatgttgtgagaattcaggtggatagcaacgggtatcagtcatttatatacgtatcctttctccttcaaactctcataaaagtagccttcttgttatctttcatcttccccgacagaagaggggcgtttcagaaaaaaa

SEQ ID NO: 36075 - DNA, 1216 bp, Bovine  19866881589750
  misc_feature (1)..(1): n is a, c, g, or t
nacaacttaatttttcctatggttattgatattcttgacttctgtttccacttagggtcaatttttattatgttatatattccagattattctatttaggttacttatatttttgaaaaataatgtaaaatttcctattactttttactttctaagtttctttttgtgtttgtgggtgaaagtacttcaggttcaaaatattgagttaatcataacctaatttcatggtgtattacagttattggcccagtcctttaatttactgatttatttaatccattgcattcactcacttccttctcatttctctctctctcgtagaaaaatgtttgatgtgtatccttcctatgtgtgtattattgtgagtcttcttttgttatatgcatgtattttaatttaaataatagcatcattccatagataacattctgagaattacttttgaactcagtccaacacttttaaggggcttatcaggtggtgctagtggtaaagtaaccgcctgccaatgcctgagacataagagacatgggtcaatccctgggtcaggaagattcccctggaggaaggcttggcaacccactccagtatttgtccctggaggatcccatggatagagaagcctggcaggctacagtccatagggtcgcaaacaggtggacataattgaagtgacttagcacgcacccatgcactaaatttttaaagatattcatatttctggacatctatccattgcttctgaatgctgcataatagcctataatgtgcctcctcattatgctgctaccgatccattcccctagtgatggacaactacctgacctctagctccttatcacaaatacaactgtgatcaagattctactacatgccctattatgggcctgtgtgagaatgtccctgtgatgcgtaaccaggaaatacgctgctggggcctacagtaacatctactcatctgactaagtatccccaaatgcttttctagatcaggtgtagcagtgtaagataactaaaggacgaaaataattactttttgtggaaaaaaaggtttttattataaaaataataagcataaagttaagcttaaaaatgcattccaatacacattaggtgcagacgaacactgtttgattctacttatatgaggccaattcagagtcaaaaagtacactggtagatgccagaggtcagcagggggtggactgggggagtg

SEQ ID NO: 36076 - DNA, 1164 bp, Bovine  19866880368584
  misc_feature (1)..(1): n is a, c, g, or t
nacagccctcagctatcctcttcctaatgggattgccccaaccgaagacaaatggcttgcttaaacccaaacacttttttccagggtagtttacttacaataggactattaggcaggctctctcctcagggaagaccggagcccctcatcccttgggcatgcttatgcaaggacttctccacccaccctatcctacatccttcccctccgtccacagatccgaaaggctcttcctactaaacaccctgcctgttaacacgtaagccacagaacccatctggtgatggatgataagaaacaggaactgttctgttgaaagaagagttaagatggcgaataaacagtaatggtcaggaagatcccctggagaaggaaatggcaacccactccagtactcttgcctggaaaattccacagatggaggagcctggtaggctacagtccatgtggtcacaaagcgtcggacacgactaagtgacttcactttcacttttcgctttcactttcactaatggctttctcacaatttctattaacctggccaatacacgtgccacctgaatactacgcgttgtgggttgtctctttgtctttccagcagcggctcatttcttccaagacgcacaaccgagcaatgacagaaggaacgagaacagctgcaagcactgagactctgtcaagaaagcctctttcttctttaggttatccaagacccacgcactgcaaccagatgcatgccgtcctgagcccaaaccctcgacttctctcccatctcggactttcaaattcttaaatttgccctttacttaaaaaagtcaatgatttcaccaagaaagtttgattagtttcttttactttctgtaatgaagtgccatcctttttacacttgaaaggatctttgtaataatgcaacattgatcttttgaatacagatgagctaacctagataataggatttagaatgtgagagactggacttgggatgatatttaaggctccagtgccatcaagaggaattgcagcataagacatctgcttccagagacattgtctgccgccacattaatagatggaggatcatgttccctaccgcacaaagtttttattttgttcagcagcttcagagatgtcaatatgctctatcttcagatgtcaatcacccag

SEQ ID NO: 36077 - DNA, 1568 bp, Bovine  19866880386561
  misc_feature (1)..(1): n is a, c, g, or t
ntagagctgggatttgacagctaataggttgagtgccagaaaacatgatactttcctcctgatggcctcccaggaaaagctgtgatgaagaatgtaaggttgtagaagtcaaagatcataggacaccttccaataaaaagtctctctcccaaggtggaatacttttatcagttaccttcttggtaatattttaaaccttaataatggcagcagataccccaatattctttcattctcagaaagataattttatgggctaatgttagaaactcattaatctacatttccactcaaagaatttataactgtctgcattttcttactccagtcatcagcatgttgaccactgtgggaaaaagctgtgtccacaatggaagcatcaggagagattctggtgatggttcacagggaaacttgaagccctgaaaatttgactttcttctatttggcactcaacatcctcaacttcccctccattcccctttcttcttctctattcttgtcccaccacatccgtgtcatggaaatggctactgaaataaattagtttaatttgtgaaatcacattacggttctctctgctcatgccagcttgcccagattagcccaagcagatggcaatggagtttcatcgctggtgagaaaaggggccctttccagaactgcagaacaagtgtgggagaaacgttatggatgccagaaagctgtgtacttgagtttttgggccagcgatagcagtgctctgcatcaggacgactctctgccttctgaacagagggcttcctgagagctagaagcagctggttctggagaaaagatggcttgcaaagaatcagaggcattatgagtcttaaattatttaagttcctcctgtggcagcggactgtaattgcttcctatttctgtaaatattagcagctgtgagcctttcaagtaaggagctaaaacagcgctccgtgtatcatacttaaactctggaatattgttaaatatctgaccttgggctgtcaaagcacactcgttacctacactagcccttatgcaggggagttgttgacattctgaactggtatattattttcagcctggtctgtaatagcctcgagagatggagaattggcaaagggaattgcaagtcaccaagtagcaatgtcatgatccatttcctcgagggaggtcacctctgtgcctgctgctttttagttgtttttacatctgtaactccaccgacagctgtcatgatgaatcctttatcaaactggcaacaacttgtaataggactagtttgcataccagctcttacctctttagtctcagttgatctctctgccttatgttcaatgatttaatcctactgattttttttgagccttcagactcgttgtattctcattgtcttttgcatttgacttaccctgagttttctgtcttaaactctgcatgtccttgtagtacacctatgctagcttctacttactctgaggatgatgcctgctcttggaagctcttgtgggctaattgggcttcccaggaggctcagtgtgtaaagaaccagcctgcaatgcagg

SEQ ID NO: 36078 - DNA, 2243 bp, Bovine  19866880400386
  misc_feature (1)..(1): n is a, c, g, or t
nttttatcatgaagttagagattccctttttattattgaagctataggaggcatttttcaatggtctggagctaaaatataacttcccctgccactaagcttgccagtggttcagaacgttagtttaaaaggacaaaatggcctatggttgttgctgttgcttgtaaattccattgtgaattgattataggctgagagatcgttgatctggacatcaaggttcaagctatctgaattcataatagaggactttttgaactacaaataattctgcgtttttcagtacaaaaacagcttggaggtgtgagggttgggttgagctggtgggagtggtacaagcctgttgttattctggggaacagatccagtgcattgaggtatacctaattctcactgcagtcattgtacatcagggcaatttagatttcgtgatcaacctagcatttcgtatgtagcatttatcttattagagctaccaatttaattatatatgaaaacattcaaattagcaagtgcatgaaggaaaactgcttgtgcatggaagaagataagcctatattatggttaatgtatttatccattaatataatcattatgtcatttaagacatttaggttctaccaaagtatcttgttaatgtgagttataatgcctgtggttttcagaacactttctgaacttaatcctggtctctttccatggtttacagtattcaatttttctcattcgcagttgtttcaacattttcaacttcctctagattatttattttgaaattctgttgccagaatatgttgaatatgttgctgattatcattaaactatttatttatttttctagaataaaggtatttctaacatatataatagtattaaagagtgctggatgtggggatttagagagtggccaccttatactttaggtaacatttcatattgtggtgcccccccatcattgtttagacagtttttttttttttttcctcatccttgaagagtctatccattcattttgtttatcagttcatcactctagcttttactcgatgtgtcattaaaggagcactttgacaatgaacttcaccaagactaaaaccttaaagttctgccagaaatatttgtgtatatatacatatatcctgtttatctgtctctattaatttgttaactctagtgtcctgggtgtttacaggggtattctatgctttatagcttcacactgtaagtgtctagaataagaactgaattcccttgactccatcttggagaactcccctgtgtaattgaagctatctgcagcatttggtaagtggggctactccttttcttgttcctctttggacaacactgttcatttggctctcttcctgtctctgtgctttgggtattccttctgctcccattcagatagtgttcccagaatcctctcctgtgtctctttttccattttgcacacattcttcactcgtggggataagtggtgtttctccactgtatctctctttttcaacttgtgatcagacaatcatttttcttcacttagtatactacttgtaaatgtcaatagttcctcaaactcaacaatctcttaactaaatgtctctctacctgattattttttctcctcatccctcatctctaagtcttgtcatctagaatcccaaaatgtgtcctagtctataaatctttcccgtgctaataattccattactatggcactagtccagatcttatcatccttttcttggacaagtatatgagtttgctaacctgattttataaactttattcttaatattttactgacttttattcataagtatctataattatctgtctaaagtgatttttttagtccttattttaactgtctgtaactcacaataacattgacttctttatcttcctgttacccttttcttggttaatgtaatgatactctcacctggttttcttcccaccttctgcctgttcttgccaggtctttttgtacattcttctacattttctaattccatatttgtaggtttttcataggttctagcttatcccaatttcctttcattttatttcctctactttacaatctcaaatattccaaggcttctgtgattccctctttgctgctgaatcccaaatttgtatctctagtccatattgaatgccaactcactactagttatcgatctctgtttgaatattccataggaatattctttccagtttaaaagcaaactcataat

SEQ ID NO: 36079 - DNA, 1380 bp, Bovine  19866880433687
  misc_feature (1)..(1): n is a, c, g, or t
ntgaatattcaggattcatttctttaggattgactggtttgacctccttgctttccaagggactcccaagagtcttctccagcaccagagtttgaaagcatcaattttttggtgctcagccttctttgttgtccagctctcacatctgtcgtattatgtatatgtgtgtgtgtgtgtatgcctgcacagtttatattatacacacatgtatatacatatatatgtagacatattgaatataaacctatgtataatctaaatatacataaaaactaaaagtgacttttaggagactattcatttaatgcatggagatgatgtagttatttgattaaaacaagtaatgctgaggttagaccttgatttgaactaagatctgtttcttagttcttcttcctaggtatggccttcagcaggctggtcagcttttcttatattcatttttttagtcgcttaagtagagatataatggctcctattatataggactgttgtataagataaataggatcatatttatatatctcttaacatagtggctgatgcataatggtactcagtaattgtctcagtaaatataaatataaatatttactcagtaaatataaaacaaaattttaaattattattattattactctagctttgagcatggttccagtttacaatttaaatcttttctcccaagagttcacttaagaagatttcaaatctaagtgccacccaagcaggaacattatctaaatagtttctggagcctgtgggaaaatcagagctatggataattagaggtcagctgtcaggacccaagaaaagatcttttaacatatcttcgggcaaaagagagaaaaaggcataggaactagaaaatgttcaaggcagagtgaatatgtatttttccttgaactttatccagttgtggaattcaatatgaaaccttagaagtatgagtgtcaatgatatttcccaccaattaaatttcatcctggcatgaatcagctggcataaatcaaagactttaggtgaaagaaggtcattttgttcatgaaaatgtcatcctctctgtacaaacagcaccttccagggttgtaactgtattccataacaatggggcacattgttgtgaggtgtgtagcttagccttttttttataaaagagctgttgctgatgattcagtattgttctttttcactcactacttagacttaacatgtcatttcctgcaaaaatgaaggtaaatccagatggtttgggaaactctgataggtttactggtatcctgttggattgggtagactcctgaccatgttgtatgtgacagcttgctcttacctgtcacttgctgaaagcagaaaattcttagactatgttcagccaga

SEQ ID NO: 36080 - DNA, 906 bp, Bovine  19866880523491
  misc_feature (1)..(1): n is a, c, g, or t
natataaaacgtgtaagaaagctttatatacgtagtattacctggattgaactcatgtgctataattatgattttaaatttattactatcttttacatgaagttcagctagtctgagtaatttatattctctgaacatttcttgttttactctttcatcaggtttcactcttaaaattcactgcatggtctccacggacaagaagtaaaggttcttcattgctgcagcctctcagttaaaagatagggaatccgcatttccccatattttactgttaggctgccagtatgtttcatagtctcccacatgcttttcttctctcaaagacattttcaagttttcttaagtcagataatttttgggtaacaataaaattttggaatcctgcagtctttaaaagaaatacaaaaaaatttaaaaaactcacatattgagccatttaccacgtctatataaaaattacattaagttgcattattatggaattgctaatactacctaattttaaaagcactaaaataaacttttttggaagtgattttatttactaagagaaaaaaacaacgcagaataaggcatatatatctatatgggtttaaaattgaagcctattttatggaaaatgggacatttaaaataataatccgaacagggaaatttttttcctacataaatatcttataactttgtgctgtgtagtatgggagtttttcctggtaatttttggttttgagacatataactcttagttaaaacatactgacttgaaggtttcttagctttcatcatgagggtaccgtgaccaaagcaaatcacatgtctcacagtattctttgtatttcatatagttcggtcaaatggagtcacctacttcaaaagttattgtgaaagaaacctgagaaaaga

SEQ ID NO: 36081 - DNA, 1741 bp, Bovine  19866880549369
  misc_feature (1)..(1): n is a, c, g, or t
nccccatagtgaaatttaatcaaactgaaaagaccagttgatctctcttcaagagaaaaggagggggtcatgtgtacatctttaatatatggatggctgggtagagtaaatgactgtcgcacagaaggtttatctgtaaacactgcagtgagtctggggtttttagccacaataaatggctggtttcaatcaactgctgctagcaggaaatccatggcccataggggcaattacccatctcttgactgaagcacaggacaattacaagctaccgaagtatactcatgataatggagcacttgactgttcagtgctaatggaatcgggacaagaaacagtggtttgtagctacgtttctcagctttgacccagccccaaacccttgcttgttttgcttatttcacaagacggtggcacagactgaggaaccgtggtctacaaaagcagtatcatcttcatccaaaacacagacatcaaggtgttcactcctctgcatccccaacagccccttaaaatgatttacactcatcctgatttttcaaaatacatcacaccttcatctgtagttttgcagatttcttacctaagtgttatattcagcatttggtgctcattactggctaaactgattagccaaattaggacttctgatctcaaggaagtgaagagaaacttgtcagggaaataaatggggaaataaatactcttttatgtcactgtgggaaaaaaatgtcagctaggcatccatagagaggtaaagcttctaagagtagagaaggaaaataaaagtaagtggtctatcagttaaccttctattctcattacatttctttctaatggaagacctaatgtgttaagcgctgtactatgtgcttaagtgcattgtctcattaagcctcacaataaccccagagcagttaatacgataatcctcacttaaagaatgagataatggagactcagtttgagtaatttactcaaagcatcacagttaagcacattgtggaatcaggacttgaatccgatctatatcattccgaaacctagctcataaataccctatcatcctgccccttctcttactgaatgactccagtaagaggcaatgaataattggcaaagccactctattgtgctcccatgatagacattaacaatgaatcctggcctcctttcccactgagtgtagacaggatcatagaatctcttctataacagtaatttcatgaatccaacaatcttcaacctttatgccaacttcagtatagaatttctcaggcctggaacaacatttgacctaccagtcaaataacaattcaataaatgttagatttaagagatcattgtatagaaggggcatagacatctttgttagacctaaagagatcagggcttatgttgtggctctcccatgtactacctccatactctgaacagcttatctaactctggatcttaattcctcagctgtaaaagaaggatggtatgacccaccttctttgccaacaaaggtccatttacctaaagctataatttttccactaggtatgtacggatgcaagagttggaccgtaaagaagactgagcaccaaagaactgatgctttcaaattgtggtactggagaagactcttgagagttccttggaaagctaggagatcaaaccagtgaatcctaaaggaaatcaaccctgaatattcattagaaggactgatgctgaagctgaagctccagtactttgg

SEQ ID NO: 36082 - DNA, 1689 bp, Bovine  19866880594954
  misc_feature (1)..(1): n is a, c, g, or t
nctgcaatctatggggtcgcaaagtagttggacacgattttgcgattgaacaacaacaatcctctgaacctgttatactctctctaaagtggggaatacttacctacctcctagtgctgttgtgagtataaaataatcacataaaacaatagctcaatgcaaagaatgcagctggtaacacattaactatttgtataatgttaataacaataattatttctgattgttaaacttgtgaaatagttgactaaatttcccagaaaggtttgcaatttcataggtttttataaaaagcaagactagaaagcactttttctcagagaatgctgtaactttcagaagcaaaggggatcatttttgcctgaggtctgtctctaacaaataagaagaagttattgatccacaactggttatgcaaccctgcccacactcttcatagcaggagattaaaaagactaagatgtatccttcatcctcaggagctttgcagtgtagttaatgttgacaagactaacttatttaaaacacagagcaaaataagagatgttatcaagtccaaatttcatggaatgagttataaatgctataaaaccccagaagaaaagcagattagtatgggatagagtggtcaggcaagagagaaggtataaactagaacttgaagggtgagttatatttggagagccaggaagagggcattgtgaggcatgaaaaatggaaagaacagagaagcaaaggctagaggccaaagagagagcaatcgctgtaacctggtgccaagcctatgaatgttaaagaggcaagagcggtgaaaaagaaaaaaaatcatggggtaatggtcaagagtagggactcaggagtcagaatatttgggtttggatcatgtcttccccacttgctagctttgtgaccttcgacaattcctttaacttctctgatgctcaactttcacgcctacaaaatcagtgatagtatcacctcgtagcattgcttcaagattacagaacaggaatgtgaaatgcttaacacaacggctggtacacacgaataattcagtatatgacatttccagtaatagttgtaatagtcgtggtagaataatcatgcttgactctagaatcatagatatttaaacacagaacagacgccaggggttattttatctgagcctctcatttaagagggaagataactgaagtgtagagatgagatgacactcagcttctcatcggcaaactaagaatcactattcgcccctccacacctgtcagattcagcattcctattccaaaataactcgtggttggtgctcgtgaacatgctaaattagtgctgatttaggattcctttttaaaggactgctgagtgttagctgcctccagtcagagggagaatatgagaaagccaaattctacaaatagaagttttcaaccctctaataactactccaccaaaagtagaagccgagcaaggacactttggacttaaactcgtttgcctggtcttcctccagtcaactttttacccgatctttgctagaaaacttccactttggtctcctagagtttaaatgaagtctattaaacatctcttgtatatgttgcagggttcttttttaatgccctggaatttttcagccctggaaatatatgtaaaagtaagttcacaaagcacttggtgtgatttcta

SEQ ID NO: 36083 - DNA, 1706 bp, Bovine  19866880646148
  misc_feature (1)..(1): n is a, c, g, or t
natctacgtttcttaaattctctgtgcttagtttttgcacctataaaaacagatgatattagcgctattggtagaaaatatgagctaagcagcagttccaaacctttttggcaccagagaccacttttatggaagacaatttttccaccaaccagggctgtggggggatggttttaggatgagtttggtgcattacttttattgtgtgcattatttctattattaatacaccagttccacctcagatcatcaggcattagatgctggagtttggagacccctgagctatgacatgtgatgcatttagtgctatgctggcattctctaagtactcaataaacatcagttattatcatttaactgtctggcactgtgacatctatagctatttttctttctcttttaaaatgtcttgttttgatccttgttttctccagatcctcttacataacatcacaatgtcataacagaaattcagagtgagaagcatctttgttcctttaccaccttgtttctctcctacctgaaaaaaatagtcaagacaccgtttagatctcaaactaatgttctgtggcaactgctcaacatgggcagcattcaaaatacacctccagtgatttttttttctgaaaggtatacaagtaaggttaatagaggtgccatttccaaaatatatctgccctgagcaacataaaatgattatttaagagggcacagggcatacgacacactctgatattaaaaggcctagcaactaaaattaattttacaagctcccccacatacaaattttcattgactctgaattttctatctgaattacttttttcctctagttcagggagatctaaaaaaaatgagtaggaagaagaaaaatcttttcatttgcaaaccattgcacagacacctgcaccttttgagcatttaaaggtaaatgactctgtccttttcttgttccttttttctctgtagagttgagtgacagcagcattggtacagaaataaaatacctatttcccctcatcaagtctcactgctttttaaattatcttgggtagtcttcatttgtaaatatcttatctatgagaacagatgccttgaaatttgctgaagaaaataatagctttctttgctcttttatcaaaaaacatatcttcaacaaaagtaaaactgagaaagatttctggtttttgaaaaaatttatggccctaaaatacttatttttttagcttgttcaaactttaaaatagaggataaagttaaaaattagatagttttttgtttttgtctcaataacactcctgggattgacatttgaaataaatttcaagcgtaacaaattattggtcaaaatgttctcagaagcttttcaaagtccaagattatgtctttattctcttataattatttaaaagtttatctgcattaaatcattataattattattcaaaagcagctacatttttttgtttcctaactgattctgttggcttagtattttaatgaataatttttcttttaatgttctttaaatggacatggactggttcaaaacagagaaaggagtacatcaaggctgtatattgtcatcctgcttatgtactaagatggcagagtacatcatgaaaaatgccagactggatgaatcacaagttggaatcaagattgccaggagaaatatcaataacctcagatatgcaaatgat

SEQ ID NO: 36084 - DNA, 1093 bp, Bovine  19866880750776
  misc_feature (1)..(1): n is a, c, g, or t
nacattataaaaccatatttatgaacttcgacctcacagaccctctgaatcatgaccctagaagtttttgcgatggcaataaagcaggatatgattaatgtgaaactaaactgtcatattcatgccctttcatttgacaatccatcatgtaaatgcaacagaactaagatacagaaatttgtcaatgttcatggtgtttggcttggaacttctttacagacccaatacttgtaagatctgtttgatgtttcgaatcactaccaaactcccaaatctttaagaaaggcaatcaagagtagggtagtcatacctgatctattgattttcacattcacctacaaagaaaggttctttgagctagtcatggtctatctttacctaggctctagtacttgcataagagagattaaattacttttcagtaagtgacttaaacaggatgaaaaatacatatacacacattatgcacatatgcatgtatatatgcaaacatatctacttgcatgtacatatatatatatataaacatacatatgtatatggccattaaaaaatgacaagtctttgcctaataacaattttaagtgtttatatgagcaacaagccaaatggtacaggtgtcatcagcagtaaacaatctgatcctcatcttacttctccagcatggagacatactgaccatctacagatgaagagaccaccctgtgagcagagcctgcaaaacgacttgctttggaaggctgtaaaaggacatcaccgaaaaaaattttaaatagcatgtacaaggaaatagattcatttaaacttcaaaatgctacagcagaaacaattctaaaatataaatgggttatgtgtgtgtgctcagttgtgtttgactttttgtgacctcatggagtgtagccccaccaggctcttccgtccaagggattttccaggtcagaatactggagtgtgtttccatttcccttctccataaataggttaagtacatgagaaataaaagcattacttcaaatagaatgcaacaagtttttttttttaaactttacataattgtattagttttgccaaatatcaaaatgaatccgccaca

SEQ ID NO: 36085 - DNA, 1311 bp, Bovine  19866880770742
  misc_feature (1)..(1): n is a, c, g, or t
nggggcaggaggagaaggggaagacagaggatgagatggctggatggcatcactgactcgatggacttgagggtgagtgaactctgggagttggtgatggacagggaggcctggcgtgctgtgattcatggggtcgcaaagagtcggacatgactgagcgactgatctgatctgaaggagttattagattaccataaattaaaatcaactcaattcttgcaatcaaagaagagggacaaatggtcaatggcacacatccacatgttagaaatgaccatctgtgtcatgtaactaaatgccagttgacagattctgttctcccaaactgatttccaggtgcgtgaaatattcttatgtccaaatgataaacttttaaacatccaaatgaatggggagaatagtattcctcccttcaaccccacaccctcactttcaaaaaaaaagacaaaaaaacactgatattgccatagaaagaagctgctgcctctaaatagtgtgctgtttttcaaaacacaatttattgtctctatacttctgaaaattcccaaatttccaaagagaaataaatcgtaggtctcagattcagtcaggagataagcttaaaacagaagtaaaacaaggcacagcttgtctagagatttttctttagaaaacataaactactctatgcaattatattgagaattgaaaactgctacagatggcttactaagactattaataccataaaaaccattatatgcaattttgtcattaattgctaaaatcccattgattttaatctacaaaagtaataaatccaacataccataattgcttgtatttttaaaccctaagagattagacattttaaatcttcctgtctctgcccataacaagggaatttaaatttgagaaaataaatttgaagcttatgctttagggaagaaaaacataaaaaaaagatgaattctgtgtgtactatttacctcactacagactttctataaaaactgcaagataaaactaaatgttagaaaaatgtaatattcttgactcagactatgacctaacattggtctcaggtaaaaattaattttgtaactttgatagatgttagaacatatttccttgtgattatagatacacatattttagtggtattatccttatatcctaatatttacataaagacattttccaatgcagatcacaacaatgtaaatactttaaaaattactaggttttaattttaaaatttaatagtagtcaaacacagaaatctttgggaacagtctgtatacttaatgtcaaagtatacacaaagaaagg

SEQ ID NO: 36086 - DNA, 1829 bp, Bovine  19866880775461
  misc_feature (1)..(1): n is a, c, g, or t
naaatgtaaaaaatattaaaaaaaaaaaaaaatctgagtagcttccaggtgagtggaagcaaaagtgtgcattataggtttccaaagggtcctgcaaaagagcctcagaggggtggagggagtctctttttttcccctctttcatccctgtatttcctgttttctcaagcaattaggaaagcagagaaaatgctccactaaattattttcaatttatccagaagatcaaatctgggtggaagcaggctgcacagagttgcttaatcccatgagcccctcggtgtgtatagcatggccctcttctggactcctgtgatgacagaggagtaggtgcaaagaaggcaaaaaactgagtcacaaaagagttaaggaattacacttactctcacagaactggtttggaggagaaatgatgaacatgaggaaaaaaatatttgctaccttgcaagaagcccaaacgattaggtttacctctgactctatttcacacctcttttccctttactttttttcccctagtctgttgttcatgactcaaggcttgagtttagggattgtgactcaccatgccactttgccagtatggattctcactgatgcctaaatcccacaccctcttccattagagctccccttcttgctgaggtcacctatttctaattcttattgggtttattctatagaacagaaatattctgtgctaaaaagtccaaatatgtggattttatagaattctgatgacgctcttatttcaatgttcataaagtgcttctttggagaaaatacaagtaagatttgggatcttgaagacacaaactgctaaagtttttaactgtgatacgacttcatttgagttatgggaaacaaagtaattgaaagatgctttgatggatttaaaaaggtcaaatatccttgatgacactagacattcaacactgtgacagccaacttcatttttataacaaaatatttcagtttttcatttcctggttcacagatgctctctttatcctcattataccttcataaggtatagttgttgtgttacgacattcgttctggcctccatagcttactggctccctaccccttcccactaccttcaaaaaaaagtagccatgaaattaagagaaaatatccagcttaaagggcaaggatttatagtagcgcaaaaagagtgggaaatgaattatttcagaccaaaagcaattatattttgaaggcagaagcagacatcttctggcacgactgtcaagatgttacaaaaagattaaaggaggtttttttgtcatttaaaatctgtttctagttctcaaaaaaaaaaaaaggtctgctgttcagtttgtgatttttaataagatttctcaatagactcactgctttagaaaaaaaaaagtgtaagggaaaaaagaagcaaaaactcgaaggccatgtagcaaatatagccatgactttgatatagtatcgttcattttcaccattctggtggatttagacaagatttttgtaggaggttataccctatacaataacctgtcaacaaaatatactttttgcagagatttttcaggatttaggcttctattggggttaaagtagaaataccagattaattcctttgaaaactctgagaacttttgctcaaggaggtaaaagatggtatttttcactgttaacagtgtgcaaagctctccttaagctccaaatgtctagatactatttcatccccattctttgggggtattggttcccacaattcttcattatgtattgctcatcaagcacctgcttaagagacacagagggtatcttgaagaactgagtttatt

SEQ ID NO: 36087 - DNA, 718 bp, Bovine  19866880780130
  misc_feature (1)..(1): n is a, c, g, or t
nacagtcagaagacagtattggttataatatgttgtggtaatacagattagcccagctagcaggtcttttcattgtttctttctttctgtttcattgatctttgaaatgaaaaataactttttatggagagccctaagagtaagtcaatataatatatttttgttttttgccttttttgttgtggtggttgttgagtttcttgtttaaatatttatttacttatttggctgcaccgggtcttaattgcagcatgtgggatctagttccccaaccagggatcaaacctggctcccctgcactgggagcctgcagtcttctgcagtcttagccactggaccaccagggaagtcctgtcttgcctttttactttctttcattttattttccttgtagttaatacgagttaagtaggatttaatagttttaagtcttaacttcacaaaaaaatctttttcagctacaactggatgcatttgaagcagagaaacaggctttgttgaatgaacatggtgcggctcaggaacaactaaataatctaagagattcatatgccaaattattgggtcatcagaatctaaagcagaaaatcaagcatgttgtgaaattgaaagatgaaaatagcaatctcaaatcggtttgtaaagtcacgtttacttttgttgatactggggtgggtggtttttatttgatcagggtaatactgacttcataaaatga

SEQ ID NO: 36088 - DNA, 1166 bp, Bovine  19866880815395
  misc_feature (1)..(1): n is a, c, g, or t
ncaccacattaacttaattcgcacaggctttgctgaaaccttgggaagtcatcttattggggaaaagctaaaattataggtggtgtatttcctctacaatgaacttgagttattaaaggcactaattttatcagccacctattgttagccaaattgtgaaatccattatattttccccacataaaattttcaagcaattcaaccaaatgaatttatttcaattcactgcatttattatctatttttactgttgctgaggcattatgggcaatgtagagatgaataagatatgccctcccctcttctctttttctcatctaaaaggagttttagtctaaaagaaggacttttgatagggatacaaaacaccttcattggaagtcacactatgaaaaggaccaatatctgagaaattatgggatggttttttctagaacaaagctttggtttcaggcaccaacatattctcttctccaagcctaaggctcaatgaaggatgtaaaaactggaaaaaagaaatatgggccaaagttggctataaaatgcaaaacagaggcaagccctccaagtgtgcctaagggagactcatacaaagcttttgacaggttttgaagaaagaggaagattttgattggggagttattaaaggaaagggtattttaagtaacagttcagcatgagcaaatccataaatatggggaaagaacaaaactcaattaaatgaagaagaaggaagcatctttgactccagaagtttaagattagctggcaaggtacctctgggtggtatcacaaggagattagacatgacagagagccaggcagtaagcatattcatttttctttttctttttttgtctgactagcatttgtttaccttcgtctgataacagtgttttgtatgcctaggactaccattacttgtctatatttgtttaacattatgttttgttttattcttcaagttctattgagatataattgacatacagtgctgtataagtttaaagtactgtatgtatgacctacatacatcatgaagtgattaccacaagtaactcaatgaacatccatcatctcaaatagatataaaagaaaaaaaaatatgtttttccttgtgatgagaactcttagaatttactctcttaaccttcctatacaaccta

SEQ ID NO: 36089 - DNA, 2062 bp, Bovine  19866880827616
  misc_feature (1)..(1): n is a, c, g, or t
ncatgcatgatttgctggtcgatgttggcactagaaatatacgtttaaggaggcatttgggtcagtcaaggaagatataatgaactgaaacagactaagttgaaaccatcatgcttctacattatcaaagatgaataggcctgagtctcctgaatttcagtgacctctgtcctttcacctcaccatggcctctaccatcatttggaggagcccatccagtgaagcaaactctttccactgacgctgagcttgtcactttctcctacattttagagtgacagagggaatgttattttactttctgggggaaaaaaaaaaaaaaggctttgaagctggaggaaaaaaagggacagacaaaaatacagattttaaagcaagaagatatccctacattttgaaaatctgcaagcttcaaaacgtagcccacaaatgcactcagtgttgttctctatcttacctccacaatgtgagacatacactttctaaaaggattttagtcgccaagtgttttcccctagctctcccaagtttgaatgatcaattcacatgataggtctaaaatcaagtttggaaacagatttattgctatggagatacggctctatgcataaaatatcagcctttttggccaaatggcaactctctttgtttgcacactcttgcaattacttccaggtcattaggcccatcttgagtagatgttttactgtcatgaataaaagtgcatacagacattcagtgatttcatgataatagtcataaaagagcaggggaagcaataccaacaaggaagaattacaggccctgaacttgagctcaattttataagaaaaaagtattaagaagaaaatcggcactatcataaattatcaatagatttgttctacccaaaagatatactgaggacctacagttagccggatgccattctaggtgctaaaagacggaaaaaacagacactgtgccagaatgtattagcagtaagtatagcgaagaaaataaaactagatgatataatagaaaatgaccagggaccgaaaaatataagttgtccttgaagcatcacacaaacttagatccaaatgacaaaaagtcatttgaaaatcaggtaaaagctgggatagctggtacaaagcctatgagacaggaataaactttgcatgttttaggaacaataacaacaacaacaaaaaaaagtgagtctggctagagaatattgacctagaggaaaggactggagaaatagactagatcatgtaaagcctggttgttgagctgctcaatcatgtccaactctcttgtgatgccatggactatagaccaccaggttcttttgtccatgggattttccaggcaagaatactggagtgggttgtcatttccttctccaggggatcttcctgattcagggatcaaacccatgcctcctgcattgaaagtcagttctttaagtgagacactgagaaaaccccgtaaggcctgataagcatatataattggcccaaatatttactgaaaacctagtatgcactaggcactattctaaactccagagttatatgaacaaaagggcaaattcctgaccttggggagctcactttctatttattagagatagcaaacaaattttttaaaatataatgctacagagaactataaaatgggctaaggaaattaactggtatgtgtttaatagagacatgctgtattatacagagtattacagtaaatgaaggatgatgacaaatcctttgccagtccttatgttgagatgtcgagtctgattctcttatccttgaacctgggctagccctgatgactttcttcaataataggatccagtgaaagttattttctgagacttcctgtgcagctaaaacataataatccttgctgctactaccaggtctcttagaaccctttcttggagctctgagagcatcacgctgtagaagtcacatgtagacaccctggttaagataggcagcatcttaactgctacccaatgatcccaacttcctaacattcatatccttgtgtactcccctcccttgagtatgtg

SEQ ID NO: 36090 - DNA, 2094 bp, Bovine  19866880838363
  misc_feature (1)..(1): n is a, c, g, or t
ncaagtaaaggactaaggtgaaagcatgctaaccatattccaggaacatgaaggaagtgctcctgtggctggagcggagtaagtaaagaacagaggggtaggagatgcactcagagaggaagcaggacagcagatcacaaaggcgatttcaaggactggcacttgctgggagtgcaccttagggtttcgaacagtgacccaaactttgagtagaatattgtcataaaattctgtcttagttcaactccctacccttttaaattctacacccaaatggtgagcagcacaagcttacaacagacacccttcacagcatcaagcgcccatcatcaaccagtcattttctaacttaccctgaggaatggctcacggaccctgtagtcggcatgtggcctgtgcctttatttcctcccctccttctttttggtcaggccatatttgcaattcagcacccggcgctttcattttcagagtgtttacattaacttgaagctgttaacctagttgtggtgcagaatgtttcagacagtgccagaggctataaataaataaccgttatttcaggtctgcctggcaaacaagcgcccggattctgttgaggccccagagaccatgactgctgcagctctaaatacctcaaacagggctaaaagcaggtattctcaaggaatactaagcagatgcactctaggtgacacagttatgtcttcccatcgacatacatctccggatcaccatggagaccaataaatagacctctctgtcatacccatttggaataaactacagctaacctgagcccaattattacatattaccaaccagatttcttatctcacttcaaactttagtaactgacgaatgaccaaaaccaagtcttccaagaattttaatatatgttgtgatctagagcagatccgcagtttttcaattagcaagagctatttttataacatctcattaatgaccaacatataactatatatacgcacttagaccaaataagtcatctctctatgccttggtttctgtcattgttaaatggaaattaaagtacctatatcacagtgaatgtggacttaaatgagataatacatgaaacctgtttagaaaagtatccgacctgcacttaacagtcaataaatatcagttcatcattatgtaaaaatactactgattattctctccacgtaatagttatacttcaagccagtttttctaagaaaaactctaatgaccatgttacaaagaatttggtagcacttatagatgaattaaaattcatttttcattagagaattgcatatacttaaaccataggatgtagtgggaaaggaatatgtggtcattatagatttggggaacagtacatttatccccattgactttttcatttatatcttgagcaaataccatgaaaattgttcagaattaggacacgttgtaccagcaagaatctcacttaccaaagaatgcaataaaaattgtgtcagtgtattttaagagaaagatgcaggaaatatgactttggaactctttagcaacaaaactcggggaaggcaatggcaccccactccagtactcttgcctggaaaatcgcatggacagaggagcctggtaggcggcagtccatggggtcgtgaagagtcggacacaactgagcgacttcactttcacttttcactttcatgctttggagaaggaaatggcaacccactccagtgttcttgcctggagaatcccagggacgggggagccttggtgggctgccatctatggggtcgacagagtcggacacgactgaagagacttaggagccgcagcaacaaaactgataccaaaaaaaaaaaaaagtcctgattcatttttcattaagcagaaaattcaactaatcagaattcctctttctttggcaatctagctggttaagattttgtactgatatcattttgttgaagtacctcaggatgcaaactggtagtcaactgcttggtctacatacgtttttattttatgtgactcaatcttttgacaaaatatcacaatgtttagactaaggaccttgggaaatgactaagggcggttagttttctc

SEQ ID NO: 36091 - DNA, 1510 bp, Bovine  19866880893833
  misc_feature (1)..(1): n is a, c, g, or t
ntgaagtagacttccgggttcataaacacctgggttgatctgcttttgtgaatatgaatatatttgttttgaaagaaaacagtaattatattcccatcaaagttaacattaattaatgtcaagtcattggaaagacagctacattgaactgacaaaaattctttgaggctggaattgttttctgcagtcttgaagaagccttacatctaatgcttggcttctaactctactgatacatcagtgcagcttttaaacaaaattattttaaataaaatgttatgtctcattgttatcttttcccaataaaatctcagaatcacataagtattctagattttagctacttttttgataattcatacaatgtacagtctgggctttaatgagtgcttaaaacactctgaatgtgaatttattttctcatatttcatgcgtcagcttttcttatttcttaatcagattcatttgtcttctggaccaggtacagcttctgttgtcttagaggtaaacccaaagttgtgttaagaaaatactgtcattattaaacctacataagcagaagatagaaagccctcaccatagaataatatctacctactgtaaatgattgactgctatgagcctagtgctgtagtaagtgcttcacatactttatatcatgaaggttttataacagccctttggtataagaactattataccatttcaccaatgggataaacaagtaaattaggtaactcacctatattaataaccaaatgatatgtcctactcggtgtgactgagaatcaaccaatattgatcatctctgatggccattctagttatgaaatctgatcactgattttctgagggaaaaaaaatctgaggattaagaaaatcctcatctctcattctagaggagccacaaaccagaggtgctctgactcaagtggtgaccttgtattgaactagatatgacatctaggaagttgagaaggaatgccatccactcctgctagtactcccagaattagacctttagtttttggctctgtgggaaaggatgaccaactatccaggtgtacccaggaccatcctggtgctagcccctgaaagtcctgcatctgggaaaccctacctatagatgtgttccctctccattctctaccaaatctccgtgatgctagctgcctctctacatctctaaatcctcactttttgaagaaacattaagactttactgtggcaagacttgactacattaagactatgccagatacaaaggatatcaaggcaaaacttccaaatctctaaacaggtaccacctggctgctgtattatctttcatactgatagccatcctttcaaatactaactgggactaagacctaccatctaccattatactctataaatagcatgtccagcctgcccggctcttcttcctctacctagttactctagcagctatcttgtgtccaccctgctgttcccatatggtctggtctatccacccagtgtgctatgt

SEQ ID NO: 36092 - DNA, 970 bp, Bovine  19866880927139
  misc_feature (1)..(1): n is a, c, g, or t
nagtaagagctgaaaaataaggggtagggagtggaggcagatcacagtagagcctggcaccgaacaagtgttcaaaatgtggctattattgatatatgccatccctgtgttgttgatacaagttgggattacatagttttctttaacactttcaacaagtcccctttcccaaaaaaaggcttgcggaacagattatggtcccatcacttccccccagtgccatcaatggagtatttgggttctcattgaccctgggctttcagtaagtgacaattgcttttcctctttccaaggtcctgttcatcctaatgaagatgcatcgttggcacttgcctcccgcatggctgggaaagagcagtgcaaccaaaaggccccatccagatggaggagctcagtagaacatctgccttgcatgtctgtcacctccctacctcctgctgctgtgttagctgccagccattatagcagctcctgagtcaagggccctcctcttgtagtgctttcttggagctttgacagattatctgcactgtcattcccaacagcattgtgccatctttcttaaaactgcaggaagatcctgatggaaatctcagtcctttaaaaaaaaaaaaaaaccctccaaaatagattccattaaactatagttatgcctgcaaattttatatcaactggcattaggcagttagttcactgtatcaactacatggatggcctatagcgtccatgtgacactgaagaaacgagagagctgtggaaaatgcattcaccccctccatgtcctctaccaccaatctaagtccaaaccagcctcatctcctgcccagattattacagtagctgcctaattgatctggtccaaccatcttagttagtccaaatcatcacttgcctgagcattactaagtagcctcctaactagcatgtttccactctagctctccttaacccagttgattttccacatttg

SEQ ID NO: 36093 - DNA, 1456 bp, Bovine  19866880935579
  misc_feature (1)..(1): n is a, c, g, or t
ntgaaattttccaggcaggaatactagagtgagtttccattcttttctctaggggatctttccaacccagggattgaactcaggtctcctacattgcaggcagatgattctttactgtttgaaccaccagggaagcaaaaagcccaagaataaggataaaggttcttgcttcatcctcacattaggggggcaggaagttattgaaagacaggattaatgaaaaagtagatttaattagggacactgggattggataaacaaaatatgagtctggccagtaactcccatgccaggtattctttgctgctgctgctgctgctaagtcgcttcagtcgtgtccaactccgtgcgaccccataaacagcagcccaccaggctcccccgtccctgggattctccaggcaagaacactggaatgggttgccatttccttctccaatgcatgaaagtgaaaagcgaagtgaagtcgctcagtcgagtccaactcttcgcaaccccatggactgcagcccaccaggcccctccatccatgggattttccaggcaagagtactggagtgggttgccattgccttctccaggtaccctctagtgactcctaatgtcacataaaataaaacccactctgttagaatgaagatttttatgctttcattttaccctgttcgctctttgcaacctccaaccacttgctcttctgtatgctctttgaagaactcacacctttttcctgcctttgggcctagaatatcctttacctgattttttgtacagcatcttccttatcattcaggttttaactcacatgttacctcctctgaaaaagacttgacagccatatctaaatagcttattcctactttctaccacttactgtttcatcccattgcttggcaccatcaccccttttcacagcattaacactattttaaattatgctgtttgattattttttcctatctttcccctccccacccatctatgcttgtcttgaatagaagctatatgagaacaagagtcttgtctgtcttgctcacagtatccccccccaagacccagaaagtacctgacacagaatggacacttcatgcacattcactgaataaagacaattttagaattgcttttaaggtctattactactgaataaaatatatattcagatatatttttggatgtctccctcctctttgaatgtgaccccaggcctccttgggacaatgagggtagaggaccccctgaaaaataaagtgttggaaatatatttgtattcctttatctcaaaccgcttattgaaacccaggagagaagcttaaaacacaaatcctattctttttcaaagaaacacagtctctaatacctttgtgaatgtgtcatctgagattccagacttaaatgaataatttttagctgtttcctattctattttccagatagaaaaattttaagagagaaa

SEQ ID NO: 36094 - DNA, 1050 bp, Bovine  19866880999580
  misc_feature (1)..(1): n is a, c, g, or t
ncttgcattggcaggcagattctttaccactgtgctacttggcaagccatttctaattctaattcatttcctggaaaataattagcatttagtaaattcatattttaatgtgcgtcttcctactatgggtaaaagctcatggatatagtttaaagactaccttatactgaattcctctggagataggggaaaatgttgttgttcctgagttgctaagtcatgtctgactctttacaacctcatggactacagcatgccagttcataactgttttctattttaaagatctccttcaaggaagcctgttgaagagcggctcacggttggaggaggaggtgacagttctcaagaagtgtatttttggtttggtagagaattattgtcttgtacaggacttaaatctcaagtctgtagtaggtggtatgtgacttaagagccttaagggaggtgatttgtcactaaatgtcaagtgtaactctttcaaagggactaacaagtgaagtggaaatatcatattatgtgccatcttttttcagaaggattctaaatgagcagttattctgaagtggagttgtaggtttaagactggttttaccacttatctggaatcttgaaacatgccacagtgttcatggtttcattccttggcaagagaataatgaggaagctttgagtttttacctcttttgcagagacgattttccaggaaacttgattttgccagtcctgttatttttgcgtctgtctttatagaagttaccatggtggcagatgtctggagaaagtccagtaatttgacttttattacacattatatttatctctaaggtagtttatcacttttttatatcttacgggaaatttgagattaaagaagcaatggattccgttttcttttattagttcacattagtagttgcacacgtatgctgatgttatcaatgatcatgtaactaaattattttactggtctcattaatggtgtacaagagcctgtaattgtatagagtgcataaaatgtattggtacattttgatcattttattcagc

SEQ ID NO: 36095 - DNA, 1726 bp, Bovine  19866881048802
  misc_feature (1)..(1): n is a, c, g, or t
ntttcttcatctatgaaatgaggttgattatgatttctcacatacataaaagtgttaccaaagaatctagtataaaggggctagtcaagaccttttcggttataaatagcagaaatacaattcaaacttattaagcaaaaggaatatgttttacataactaaaaatcaaggccagacctggattttggtattgcttgattctgcaattcaaagaatgtgattacaaagagggacccatttgtgaggtagattctttccttgcagagggcaacgattgcttagcaacccccaggaaggaaagaaacatctttctctaagagcactggctgaatggtcctagggagctcctgccttggcttctctgtgtgcacttgaaccctgatatctgtaaactgagggatggatgtgctctgattggccaggtatgggtctcatgatctttcaaatgttttttgtttgcaggagacagaaaattcaatttaaactacctcaaacaataaaagggaatcaaatggctcacacagatttgatttcaggtgggattcagcctacaaacagagtcatcagggtgatccctgatttctccccagctctccatgctgtgtcccatattgttaatttcattctcaggctccgtacatgaccctggcaactagagtttctctctttgccgaatcaaaatgattttatttctcacactgcttcaggctgagagcactctttcagtgctcccacacaatttctaacttttgtccatcctattaatggctggcattgggtcacatgcctcctcctgtggtctgaaggatggaatatatcaattgcattaagcaagcatagcttgcttattcagctaggatacgactaagaatgggaagatgcgtgttccataaagaatttcagggaatatttggtgaaggaagggagttaaatgatggatagaagtgtattatggtgacacaaactcagtgcaggctactaggaatgcctttctcactcataagccagatctcagtactagacagaagggtgaagggatgtatataaggtagacaaagcaacaggtatccgtgacaggtatcctaatatatgttagtttgttaggatattctcatcccattcatgttgtataaacgggggtcctaaaagatgaagtgatgcctttaaggaagcagagataataaatggctgagctgataccaatatattcatatatatatattccttatgaaaaccagttatgggaagtagctataagggccaactgttcagttcaagaagttgaggggaaaaaatgaacatagaactaaggaggcagagaaatgaaagtactgaggatgagaaaacagtatttccagatttcccaattatatttgaaaatggaaatcctctgataaccttttttctggtgttttgcttgaggatctatggtccggaacttgaaaaagcacttacgtcattgactcaacagctctcctgcggcatgaggtttttagccacttctagctgccctcttagctaggtaggccagttagacaagtggcttctttttagaatctaattctctttgttttctcttttcaatcattcctactttctttcataagaagtgtctatatcaatgtgtgggaaaccacttaacaattcaattcttctcagaataattgagggtcaaggattatcaacactaaagaaaatgattgcatttcctagatcatacaaaaca

SEQ ID NO: 36096 - DNA, 925 bp, Bovine  19866881223111
  misc_feature (1)..(1): n is a, c, g, or t
nctgaagcatcttaaagcacagttttgattcttttaaaaccagggaaatattcctctgaaaataatttcggctcattactctataaattactttacttctgccaaacacaggaatgtccaacacctcgaggaactctaaatgaggaacaaaaagctgcgtagttaacaagcataattaagacctgaatatattctgtcttcctgaaaagtctatttttcagtttttattcttattagtcaagtatattaaacatgactttaatttgcatctgcctcttctcccaccaactcacagatttacagaattcagtaacaccaggtgaccagatttatacatacacacacacacaaaacaaaatgtttgaaaaagtaagtacatataaataaatgaagagtcatagctcttattatgccatcaaatcaaataatagcaaattctaaggtacaggacaataaaaggctcttccaaaatgatccaaaacagtactctgggacagtggtttctactttagcacacttggattaacttctactaaaaatgtcctagagaaagtcaagagtgaaatatcacaaatatctaaagtaggatcttcttaagttttagtgataattatactttgctattttcagaacctcttcaatttggcaaagtttcacattgatttatttgattctcacaacattcccctagagatagatctttgagtagacactcctggactttgagaagctttttaaaatacctaggtgacactggtctaaactcccactgtcactctattgtaccccacagccagtaatatgaacaggaaccaccacagtttattcctgtgacataaactatagaacagtcccactactacaggttctgagagaagcaaatacgtgtcaagcctttggttgtgtaattgaatgaaggaaaacg

SEQ ID NO: 36097 - DNA, 870 bp, Bovine  19866881260507
  misc_feature (1)..(1): n is a, c, g, or t
nattgatggatagaagtttataataactgcattcatacctcttacatcatgaaccccaaatgtaatatacagcccgatgcatttgtatttggattctaacttagaaagtaaaccttagataaggcacaaaagacacacatgctgaactgtgacatggaaaacttcatggtgggtttacaaaattaccaggacacctaaagatgactgcggctaaaacagacacaactgaaagaccatagttaagcccattttgttccaacttcacacacagtacgagtcagtcagtccctccaattcccaaactactgatggaatgtagaatattacactgtgaataaaagcctcatttgatcactaacttgaacttggaaagagcaatcagacgctttcaaccagtatcaaagccacagtagcatcaaaacttgctttctacaggaaagatatgaaacatagtcccaagggtttaggaaacagaataaaaaaacagtgaaggtatattcttaagcagatatattgaagttcacttcagcaaaaggagtgacaagaccggtagtgatgtcatttccactgggtgtacctttcgcagtgttcggtacctgaggttcttaacctttgcccccaccccactctccatcacacactgccaaaggcagactactctcaggcacgttttatatcataacacaaaggccaaggaaaagcttcagtgttaagaagcctaggttcaaatattggctacttatattctgagtgaccatggggaaaccattaaaacttaattaggttcatttgtcactgggatttttttttaaagacctaatcttttttttcaattaattactatggagtacagtgctttctaatgttatt

SEQ ID NO: 36098 - DNA, 1629 bp, Bovine  19866881263880
  misc_feature (1)..(1): n is a, c, g, or t
ntctccttatctccagatttacccctcaaatgcttccctatgtatagccagagtgatttttctaaggtacacatgtatttgctattttaaaaaatatataaattttatttattttaaactttattgatgtatagttgacttgtaatgttgatgtcatgttgtatgttgtatgtaatgttgatgtatgttgtgttgaggtatagttgatgtcatgtttcaggtgtaagcaaagtgtatcagttatacacaaacatatatccattcttattttaggttattttcctatataattacagagtactgaggagagttccttgtgctacacagtgggctcttatatacagaccactgtgtataaaatagacagctaatgatttgtcatttttaggcacagaccttttgaagacacctgttgccctcagaataatgtcaaaactgtctaccacggcttagagagctctttcaagaatgactccatctctttttgcagcgcagtttcttcccatctccaaccttccagtgtaagccctgctcagaaggaattactcctggtttcctgagttccacatctctctcttccttggcacagtagatttgtgtgtgcaacttcctcgttctcccacctcctctgtgttaaccttctactctgctaatcttcgaaggcttagtgtagagaaggcttctcctggaactctttccttgaccttgccaacacttggtcaggtgcctttttactgttctcacaaaatgccttctttctttttctttttaattggagtatagttcctttacaatgttgttttagttcctgctgtacggcaaagtgaatcagctgtatgtatgcacatatctcctctttttttgaatttccttcccatttagggcacgacagagcattgagtcgagttccctgtgctctacaacagtagattcccattagttatctattttatatgtagtatcagtagtgtatataagtcaatctcaatctctcaattcatcccccactcctttccccacttggtgtccgtacatttgttctgtatgtctgtgtctacttctgctttgccaataagttaatctataccattttcctagattccacatgtatgtcttaatatatgatattttttttctctaagttacttctcactgtatgacaatctctaagtccatccacatctcttcaaatggcaaagtttcatttctttttatggctgagtaacattccattgtatatatgtaccacaccttctgtgtccatccctctgctgatgggtgtttaggttgcttccatgtcctggctattgtgaacagtgctgcagtgaccattgtgtgtgtgttttaagtcactttatttgtggctgactctttgcaaccctatagactgtagcccaccaggctcctctgatcgtgggaatctccaggcaagaattctggagtggattgtcaagccctcctccaggagatcttcccaactcagggatagaacccgtatctcttatgtcttcagcattggcacatgggttctttacaactagtgccacctgggaaacccacagtgaacactgggatgcaggtatctttttgaattatgattttctctgggtatatgccagagtgatattg

SEQ ID NO: 36099 - DNA, 1346 bp, Bovine  19866881287295
  misc_feature (1)..(1): n is a, c, g, or t
ntctaacctgtgcgtggttctggaattctatttgttttgttttggttttttttggacttcctccattaattatgacactgaaagttctttgttctcagagaagcaaagaatcaaagttttaattaaacccatgggggcgctgctttagtaactaccatgtaccacacacttaacatgagttatttgatttacttctgattatatccccatgaattaagttttattacctctcatcttacattggagaaaactcagggtcatgaagtttagtgatgagcccaagactatgcagccaaaaggtagaactgagtttggaacccaggttagtttaacttgccagtaaaacactcccgcttaattcttgagaaaaagttgactgcagttaatacgtttttaaaacctcagtaaattaaagcattccctgatagctcagttggtgaagaagctgcctgcaatgcagaagaccctggttcaactcctgggtcgggaagatcctctggagaagggataggctacccactgcagtattcatgggcttcccttgtggctcagctggttaagaatctgcctgcaatgcgggagtcctgggtttgatccctgggttgggaagatcacctggagaatggaaaggctacccactccagtattctggcctggagaattaacatagactgtatagtccatggggtcacaaagagttggacatgactgaacgactttcactttcacttcaaattacagctagactcaaccccaagttttctaagatgggaatcatacataaggctttaaatgaaccttttgggatggcatttagccttttctagatattatagaaaagaataaggtttaattggaatttaggtataaaacatctccaattccagctggacattagaactaactcttttgcttcaaaacaaatggaaatataggcatgattttcttaggatatgtaataataattttctactttgtaatataaagtagtacacagataaaattatctatttccctgtgagtccaggaagataggatccatacctgagtcatttcattatattctggccttatattgacttattgagttgggtatagtcagaatgtatgtaatcagataagaaacaaaataaatgcaaaataatccttataaagaaaatatcaaactttatgtctagataggaccagcatcagtgcatgctgtcctatcttggagcctgaggcaaaaggctccaaaaggttttttcatgcccccttaaatattgtactcacatgggtgcctcgcttgctttaccctagtcccagccctggaaatactcctaagtgcttattcagatgggttttct

SEQ ID NO: 36100 - DNA, 1138 bp, Bovine  19866881311701
  misc_feature (1)..(1): n is a, c, g, or t
ncaagtccatgaggctgtgaaagttttcaccctatcctttttgtctggtgttataagaatatctctatctatgaatttgcatgatatctatttatccatctgtctatcatttatctattggaaggattccctatgtgtgctgcctaaaaatttgctttttattatttaaataaaaggtatagaaagggtaaggggtggaggaaagcatttgactactaaaatgaggttggtgtcagaatagatttatcgatctattttatccttgtgagatgagtgattttttgtagagtcagagcatttttgcaatagaagtctgaagaccatctcgtccaactccttgttttacacatgatggaaattttgaggtccagagataagtgacttgcctaaggccacacaaataaattgctctgttactttacttttttgaaaagtacttttcattgaaaaataaaaaatttcccaaagcggctagatttgtgtaaccagcttatagactgaacatgaacatcaccaagcacttcaaaattctcctttgtatcccctccccagtaactatcctttctcccattcccaaaggggactgctattctatttaaaacatagcttaattttgcctgcttttgaactttatgtaaattcagtcacacagaatctgttcttttttggtctggctttttcacccaacgtgatgtttatgaaattaatccatttttcatcttgcagtagtctgtccatttgcattgcaatgttttattccagtgtgtgaagagaatgcaatttatttgttttcctattgctttgtttttaatgactagagattcctaatgttgattttcaggtccatcttaattgttttgcttctggacaggggtattttctcaaaaccaacctacaaggcagttgtctgaagtcatatctttaaatacagcaaccaggaagcaaatatatatactaccactgattatttgctgtagtaatttccatttttctttcgcctgactttctgtgactattgagacactagttgagcaagagtcagatgatattccctctcttcttttatattctgcattatggccttttgctattaagaactgacttacaatttgggttttgaacaattcatgttaaaata

SEQ ID NO: 36101 - DNA, 1259 bp, Bovine  19866881331089
  misc_feature (1)..(1): n is a, c, g, or t
ncacagcaggttttatttccaacatctcttccttctcaaaactgcagtgcagattttgcaaacatgatgggttacataaataggattatgtactcttcatgcaaactctgaagccagctgtccatccggttctatttcccagataggaaaaaggattactacacagctccaacacagtactgaatagatatcgataaattctgattctctcatttcaacttaagagggaatgcgtgtatttgaaaagtttattcaaccagactcttaatgaaggcaatggcatgttgattatataattatagttttacaattatatattcagtgtgtatatcagggatccacacaatatatccaagtattatgggtttaattgtgttctccaaaaattcatatgttgatgtcatagtacaccccatacttcagaatgtggccatatttggaaatagagtctttatgaaaatatcaatttaaaatgaggtcattagcatatgactgctatctttataaaaaggggaaatttgaagactgtcatagggagaatgctatatgaggataaaggcagcaagcaaggtaatgcttctacaaggcaaggaacaccaaaaattgctggaaaaccaacagacgcagggcaagactcatggaacagattctcccttttagcttcagaagcaactaacccttgttgactcagaactatgaaacaatatattcctattgttgaagccacagtttggggtactttgttacagcagctataggaaactaatacataaagcaagaaatgtcgcatcacaagagtggaaatgaaagggggattatatgacctctgagaattttaaattttcattttttgcatacactctaataaagaaagggtttagtctattctcagaccaaatgaaagtcagaaattgagataaataccttgataacccaggccaaaacttctactattctttattcagtaaaatcagattaattgaagcaaaattaggttccttcctactgactaaataatccagataatggtctcagtcctcaactttggttgatcactatgtagtaaacttgatttcaggtaaaggagtttagattatctttaaccaaaaagacttaacaccttcatccctctctattcactgatacagggaagagaccactgaaaggcagggttttccctttctaacctgctaagcaatttagtcctagtttcagtgtctaatctactccccctttcagttccatgtgggttcatgtac

SEQ ID NO: 36102 - DNA, 1266 bp, Bovine  19866881408320
  misc_feature (1)..(1): n is a, c, g, or t
naacaaggtaaacagaattacccagggcccagtgctaaaaacttgagaagtcaattatcaagctatctagtaaaagcctcccaaaaatccaataatcctccagtcttacttttacgatgacattagaaataacatttaatttttatatatataacgaatgaactcaaggaaaagcaaccagtctatgctaatcttttaaacctattaccaacattttatgcatcataatcctagctaagccagagtatatatatatctatttaggttcttccaaaacaacagcactttctaaaagggtccctgccaggcagtaatactattcatttactaaatattgcttggggactcagccatgcatgactcacattagtgcagatgggagtttcacagtcatatccaaggtctgtggaacaaatggagtaacccattattggttcttcttctctcatatatatttaacatggatcataaaaagaatttggtctgctatgccttacacaattgccaaatatcattaggttcacatttttagactttgttttccctttgaacccaggtatcatttatcctcatgagttcacaggtaggatgaaacctatactttaagccattatcttaagactatttcttgatcagcctcctgtcatatcatgattttattggtataattacaagtaaaggaaatttgatatgtaaaagttgctacataggatataaatctgtattttcctaacaccgaatactgctaatattcacatcacaggtaactgtcctacaacagagtagtctgtcaatttgacttcctaatattaatattatccaaataatgatgctcaattaaagctatgcaaacaggtaagaggcaagaggcacttgtttctaagccttcagcaatatgatgaaataaattacagcctatctgtccaagaaagtgtgctcaagcaattgaatatgatacataggtctctacttattgtccaggacataccaccaattaaaatttaacaaacaataggtcaatatggtagttgatccaattttgagcctatagatgtgtgttaaaatggagcatggaagagtatacaccaaaatcttattaacagttatctctgggtgacaagattatagataaggtgcttgcttcttcttacctatcaatatcccatataatgataaatttaaatctaggcttcctgggggctcaaaggtaaagaatccacctgccaatgcaggagatagggttcaatctcgggtcaggaagatccc

SEQ ID NO: 36103 - DNA, 2960 bp, Bovine  19866881429844
  misc_feature (1)..(1): n is a, c, g, or t
naaactgcaaggtcccttaagacgtaggcttggaagtcccagaatactgtcttttcgccactctatacactaacactatttataggcacagccaagatgcaaagggtgggaaagtagatgcttttttctctctctctttttgatagtatcaatggcatgctggtagaggagcaggagaaattcttggcaacttttctataaaggaacagatagtaaatattttaggcttttgtagccctgtacagcctatttttgttgcatatgctctcctcttctgacaacaagcttttaaaaatgtggaaaccaattttgatctgtgatatgtagtttgtgaatccatgcttagacaggtgatatacccacttcatcattcattcttagtatacttttgtattacaagttcctatattactttgaaattattttaaattgttttcttaaaattacagttgatacttgaataacaggtttgaactcggcatgtgcactcatgtgcacctatgtgtgaagtttttactctaaatacttatgtactgtagtactacatgattcaagttggttgaatccctgaaagtggtactgtgggatcagttcagttcagttactgagtcatatccaactctctgtgacccatggactgcagcacaccaggcttccctgtccatcaccaactcttagaatttgctcaaactcatgtccattaagttgatgattccatccaaccatctcatcctctgtcgtccccttcttctcctgccttcgatccctcccagcatcagggtccttttcagtgagtcaattctttgtatcaggtggccaaaatattggagcttcagctttagcattagtcctaacaatggatattgaggactgatttcctttaagattgactggttggatctccttgcagtgcaagggactctcaagagtcttctccaacaccacacttcaaaagcatgtggatagggaagctcaaatgtaaaattctgtgcaaattttcaactgtgtggagggtgagcactcctatcccctgtgttgttcaagggtcaactgtgattttatcctgactacaaagtaagcatcatgagagaaagagcatttgttattttatttgttaccttctctataactgtcttggtccctagtaattgttcaataaatatttgttgaataagtaattattaaataaattaatgtcccagaatttatttttactttatcttgtggagctatattctgtattgatggagtcattctcaggctctgtttaatgttgaggatggctgcaaatagctccaggccaaatactttcaggttaaaatttagtgactctttgagtagctgcagaaaaatttctgggtaagatcttggatggatcttagctgtgtcagatattctgttttgaagcagctactgtcacccagaaaaataaggtctggccaaccagacctaagtgccttgtctcagtgaagtcatgaatgtccccaaatgtgtgaactgaaaggtaggtatatggctctcacaggaaaatcgccttactaggtgaatgagaaatggattcctctgttaaaatacgttcaaattatggactttttgatccagcattcttcaactttagtgggataaaatgttgaaataggccaaatgaaaagttgttacatgactgaacttctgtctcttgttgtttattccctgactcatgtccgactctgtgaccctgtgggctgtagcccaccagggctcctctgtccatgggatttctcaggcaagaatactggaatgagttgctgtttccttctctaggggattttcccaagccagttttcaaactcgagtctcctgcattggcaggcagattctttaccactgagccaccagggaagcatccctactttctaattatttatatcatgaaagtagttttatttttctaactcattaactttagtgatttatacttaaaaaatatatatatactataaaatagtaccattatctgtcttattactatgagttctctctttggtttaatttagggggaaagtgatggcagtgctattaaaataaaatggaaagacagtgatttaaaattaatcaatgaatcatatatactatatttatttagattgcctgcatcttattagttactctaagttagtaagggatgctgccttagtggaaaagaattgtcttttctgcagtaagagtttttggtcacaaatctctgagaaaatctgctctgttacatactgtttaaaatctatgtattttatctgactggtgtcttgaaaagaacttatgaatacttgtttttaaaatttggcctactgaaaatcagtttttttaaaaaaaagtgctacatgattgagcatgcattttctgctctttccctaatatttgatgcaaaatatggcatggaaagtatcagcatcttgtcccttcctatactgtcaatagctatctctattcctattggttccattgtgagccattttcagcctaaaattttcaggccaaatatgtatggaacagattcctgtattccagtgtttaatctcggcaaacatggaatacatgcaaaaacttggcagcatttgcctgtgttccttgctagattgtcacttggtctgttttgagttaggagctttctcactcattgttaaatattagttatgcactttcttgaagatagcatagctaatgatagaagaacaaagatgtagttctcaggatcatttgttttcaggttttcaccaacgcttttgtaggtttttgtaacagtcactttggaaatataggtgagattgactagatgatattattagcaaacaaccaaggctgatgaaatgaccatttcatgatgcctctttcaaccagtttagaatcaaaactgtatttctgagaaattgcataagtgccagttattccagttgttttcaagtcagtcagcaatatcgtta

SEQ ID NO: 36104 - DNA, 1121 bp, Bovine  19866881440381
  misc_feature (1)..(1): n is a, c, g, or t
naatactttagtatttgctagctatatttagttatctttgcacattcctcttcttttactttctttattcttccctttttaaaaaccaacccttgaaaagtgtaaagaccattccatagcaggcccttagctggatttgatctgggactatagtttgctatagtttctctactccaaaatcttggaattactgctgccttaaaacaaaacttgtgctgaaatttctgacagatcataggagaatcaaactctctatttcctgacttcttgaactatttctgcaattatcaaaccaagatttttctctggcatcattgagctgagacagtctattttgattctgagtctttgaaactgtatttactataaatgaatacatatgtcactatggagaaaagatttaatttctagaattttcctttaaagatatctttgagatttttttttctttcattttaacacgttttgaaggcttcacaataaagcaaaacattagtgtttgtggattattttgtccttatccaaatgcttgaggctattaatttttctttgtaaaaaatgtttttacatccttccaaacaggacttaagctgacttctagtggtaggtaaagctggaaactccatgacttaactgctttatattattttaaggactgtagaaattgatggattatcatccagaaaatgaaaacagttttcagaactacttcgcttagagaattgagcttttcaaagcataccccctcctcaaacaccaagtattatgtgatttaagctcctgttatttctgcaaagagcttaaaagaatgactgaccagcatgaaaaagcaatagagcattaattgaacagatttgaaataattgagttctacatttgttaacaacataataaaggatgttatcaaaatttcacacgtgaatataccattcccaaaactgcttatgaaaataatagactttgatgctgagaacgaaaaaaaaaatatgctttaaaaatttattaggaaacttcccttaaaaatgaattttagaaacttctgccttattatggaaatactccctgacaggctacagttatctgtttccagatttggggttctattgaaacaaaattgatga

SEQ ID NO: 36105 - DNA, 1504 bp, Bovine  19866881599094
  misc_feature (1)..(1): n is a, c, g, or t
nttcagcaaatgaacattttaagatcatttttatctctagtagcagtttctggtgcccagtgaataaagccaaaaacctaacactctgatgagacctctagacgtatttccttggttcaggggaatgcagtatcagtattccatgtgtaaataagttcaattaacaacgagttatcattgcaaagggagatgaaaattagtttaaacaagtcaattaaatcataaacatttcaggaataagaagatgtgtttgtaatccaattagtgtgttaatatactaataaatttactgatttgaatggtatcttaattgtatagtaagacaccagaagaaaaaaattgtatatcttaattgtcataaagggagctttggctgcagtatgactacataagtttggagaaaattatccatgttaatgagatcaaaatgcttctatctagaataataaataaggttacttgatactttggctaataaaaatgcatccaagggacaggggaaatgactgaacacagtgttgtctgccagacgctaattacactaagttcctgatgagagagaatgggacattttatactatgaccaaaaaaaaccgcttccatagtttaaaccctcgtaagatcatgggaataaaatattccaggggtaattctttattgctacctcaattaccacaaattaagccgatattaatatactttactgctgctcagccctaagtgaaatcagttgcacttcacatataactcaagggaatgagctgatctcctatttctgcgtaattacctgtaatttatggagcacagagagacctgtgagcagtctagccaaggtcacctaagaaggctgaattgcatcgttttcaatcaccatctgtgatctgggttggggctgccatcgccccaactggcactagagaaaaggacccttacccagcacaggggtcatggaaccagaccctcaggccaaggggcagagttgatcatgagttgatgcctcttaatgagtagatggtattccaatttaaaaaaaggtagaaatagataaataatgggttttattgctaattgcaacattttaaatcaactggaatgcctgcaaggaagtttgacaactcattctgggcaaattccaacttactcctacaaatgtggtctcctcaagccttctactcaactgtagtacaagggcagtgtcccctccatgtctccccaactcagataaacctccagccatttccaacattacctaaagccattgttactccacagacatttctcaatgttttacctcattctaataaaattcaatatgagtattttctatttatttatatgcctgttttaccaaaaaaaaaaaattgagtcaagtggataagcaattgggaaatgatatgcagggtaaatcactaaaaccagtgatgaactaggagtagctgagggggaaagacagtctgggctttcttgatgaacactgtgtgtagagctttaataaaacatacca

SEQ ID NO: 36106 - DNA, 713 bp, Bovine  19866881654905
  misc_feature (1)..(1): n is a, c, g, or t
nggatgaatgatggaaagaggtcactaaaggttaaggaatgagatacctcatctgtaataggtgggaagaagatagggtgaaagatgcaggtacatttataggttccatgaagaggaaataaaagcatttggattcttcgtgaggaaaataatgacatcaggagagtcagacagatgtgtatgaaatctgaagtgggtaccgggagagggaaattactatatattctaagactacaggtaacatgaaatgcccatttatgattgggcattgtggaatttaaagtaataacaattgttttattcatatagttttgctgacagatgtccctaggtgaacaccccttgcttgctcacgtatgtttgagagcaggctcctcataaaaatacctttcaaattgagcagtaacatcttccaggttctgcactgtactgttatgtttttcttgcaaaagcagggtggcctgagtataagcagcattactttcctccagttcagcttctttcctaagaaaaaggaatggttaaaagataagatgctaactgcatcttaatttaatataccatttaatataccgttagcttaagaaagagactaggatataccttcgacactgtgaatcatataccccacattggacagcttagatctacattcatgatctatatctgctagcatgtttatttacatgcagcttcatcttatctttcccatt

SEQ ID NO: 36107 - DNA, 927 bp, Bovine  19866881707817
  misc_feature (1)..(1): n is a, c, g, or t
nacgtagcagacttgacccatggtgggcagacccattaggaggcaacacacatctgagtaccaggggatgaataaagagcagctttccacagcgctgtgcacagatctcacaaggtgtcatttggtcgattctttttccccttcctctagactcactttacatacacctgtagcatagtctctcaaagagcactctacggaaaagggatttctcagatgcaaaccctttgaggcaacagtttttgattcttaactgtctaaatccaaatcctcagccaactgataactgcacatcatattcctttgtgtggttaaggaagtaagtcatataaaagtcatctctttcataggctgtaatgctcctttaattagattataattaaaagcaaataaaaaatgcagattaataacttcataaattgtgcttttctgtccttgaaaaatagctatgttttttcctctcataatcagcctaaaatagagtcaggaaatggttttgggcattttgatcataaactactgtcgtgtgtatatatctctgtgtgtgtgtgtttgtgtgtgtcttcccctgaaaggcactcacacagagaacattttaattttccatggtattgctattttgacctctgagaccttgcaaagtaaagtatttatgatcctgggctttttttatggtattgtttcaatatttttgtaacatttgtatttcttgctgatgtttttggcattaaaaatcactcaagctgtgctgaaatataatggtattcactgaaccataccctagaaggataattcagttcagtggggttattctagctcatcatgtacataaaggattgaaagaaactgtagaagatcctcagttctctacatgggcagcactgagtctttttttccctctaataacttgacatagaaaaaccttcg

SEQ ID NO: 36108 - DNA, 959 bp, Bovine  19866881717840
  misc_feature (1)..(1): n is a, c, g, or t
ntttttgaatatttccatgagaataatccacataaccatgaaataagctaattttattattcttatagaggagaatcagttatggtaggttcttattatttaagttgagcagaactagagggcaattatttttaggagcatgtaaatgctaaaagtggaaatgattcatatgtattcataaacattaacagtgtttataatattggctagtaagggctgtatcaaagtcttgattatgttcataaagatatcagaagaaaaagaaaatagccttgtatttgcatttttatacttaggctgatcagtattctcaatcatcatgtagattatggagtaattttacattttctcttttgtatgaactcttatttatatttataagtatagacttccttttcctgttttcatgtcaaagtaacttacagtctcattgtaatatagcaaacagaactaactcggaggcaaaacaattttcctaataaggtattaagcaacacaacaaaacacattttacaaattcttccaactgtcgagattcttgtaatgcatcaaaatgagaaaccacaattgtgttattaattaagaagaataaagttacatttgctgaaacataacatactttaacatcttcaggaagaatgtttcaggaaggaatgacagtaaatttcaattagaaaataaatactacactatacatttaaccgttataaaatgaaatatatgtagcttgactgctactttattgaatgcaaccatatgtttgtatgtttgcctcatcatcaagaggataactgatttcaggaggatgctgctgtgatttagtcaaggggggttgtataaatgtagattttctattctagagcaaagtttggaaaacaatttcttgatcttctatgaaattgaaggtaatagttttgataagcattgagttgggaagtcactgtgattttgatgtgtgt

SEQ ID NO: 36109 - DNA, 1155 bp, Bovine  19866881741432
  misc_feature (1)..(1): n is a, c, g, or t
naaaataaaataagcatttctcaaagtaacagaggaccttgggcaaaaccttctgcagacatgtcacaatatcctctgcttgcggcaatcttcaaggggttgggttctccaaaatttaacatgtttcactataaatcaagggtcttttgcctaaaatcagcagcagcactgaagaatgacctcccttgatatcattcataagtcttgggatattaatctagtccaaagtaagtccttcttttacccagggttcaaccaaaagcatcatattaatccttaagtttctatacaaaagagttctgagatgaaggtcagtggtaaaattgtatctagaaatttgagtgtgagttaattacctaccagtccactttggtgaaaatcagtgaccaacacaaatggagacaaggtgaactactaaacaggccttcactagctgtggtcagcagagccctccttctgaagggtttggaatctgtgagaagattctcccactactttccaggccaagtgtgagagctgaagaaagaagcacaaacaacctattcaagtaaacaggcagacagattacagcccatcctgagtatgtaatcttttaaagttactaaaattcataggcaacttgcctttttggtttcatgaatttcatttcccacaacacagtaaacaagatatcttaaaagttcattccatctaaaggatgattcccttccctttttcacctcctccttcccaaccacaatccaggaggtatactgataattagcttttagctgtgcacactgacaaaaaaagaagaaaaaaaaaaaggcccataatgtcctttaagcctttgacagatgctatgcttttcattttactcaatttttttatttaactattgtattaaactatttggtgatttaactttttcataatcagtaaatgttaagtcagataagagaaaggcaatatgagagacagaggccctggttaacctttgctggaatcactctgatggaaatcaaagaacaaacaactcgatagagctgtaatgggccctttggagagagaataaaaaatatagtgtattcctcaaagcaatcacggaagcctcaccattacttcaagcttaatgggtctgaaaatagtagttaaaaaggaatcaactacttttcc

SEQ ID NO: 36110 - DNA, 1187 bp, Bovine  19866881825362
  misc_feature (1)..(1): n is a, c, g, or t
nttatatgaaatatacaaattccctaaaagataccaaagctctctcaggaaaaaacagattaagttcttatctgttaaaaaaattaaatttatgacaatttttcacaaagtatatgctacaaccagctggctttactatacatttaataaattatacttattttacataagtttttccaaagcatctgtacacatcatcttttaatcctattcttttggaaaagaatttatataggaaagagtttgtctttaggttgaatttgaaaattaaggtactttaagtttgatacaaagtctctgaacttggtgggacaatactttatggttcctttcagaatgagaatactgcaaaataaagagaaatacacaatatcaatactaattaagaaaagatgcatgaacttcaggatgcaaactactaatatgatataatataaaaagggtgcaaaaggaatatctcatattgaattaatataataaatttactttcacatgatatgacagtataggaaaattatacatggactgattttccaagtatcataaattgtgagacctaagttaatacatgagcaaatgtatatggataaagattatttttaaatgtagaaactaacatatcttaaagttaattcaattaaaaacatttattaaaatctgataggcactgtgagaatttatgctgggaaaacaaaatgaaatccagtggatttttaaaagctaggttgttttctctgtccacattgtctgaataccacagttcatcacatctgtattcattaaacaatactgttttttggttgtatacatcatactcttggaggaggttaccattagccccactatagagtcacaaggtgggaaagccacaacctggagaccaattaccccaaagaagttcttgcactgttgtgacaattccagggcccacaacagacttcctatcctggggatccagcaaagggactgacaatctccagagaacctgactttgaaggtcagcagggtttgactacagaacttccaaaggacaggggaaacagagactcagggagggcacaaacaaaacctcgtgcacactgggacccaggagaaaggagcaatgacccctcaagagattaagccagacctgcctgtaagcattttagaagtctctggtggaggcatgggttgacagaggcctgcca

SEQ ID NO: 36111 - DNA, 1686 bp, Bovine  19866880195738
  misc_feature (1)..(1): n is a, c, g, or t
nttcgatgcatgagacagggtgctcagggctgttgccctgggatgaccctgagggatgggatggggagggagttgggaggggggttcaggatggggaacacatgtacacccatgactgattcctgtcaatgtatggcaaaaaccactacaacattgtacagtaattagcctccaattaaaataaattaattaaaaaataaaaataaaaaatgttaaaaaaaaaaaaaaaaaggtcagacctgatgatttcctagtaatagaattcagtgaggttcttaccatatggaggccccagaacaaggtgcttaaatgggtacagggatctgtttcacggtatctgctgaggatgggactctgtgtgtgcccatgggtgtacacacgtggacgtggcttcctttggatcccgaaatgaccagttccacaatgggaagagaggatgaaggcaggccagatttgaactggccattccttgaaacaatgtgagttaaaagccaagtcatgaaaactgaaatggctggctgccggctttccactggagtttggccaagatggcttgaggaatggtctatgaggtccctgggctacagggcttggcctgggggcttggctgtggctacctcagtggatggctgagaccccgaaggggctcatggccccctcagggccctggccatggtctttgctccagggagccctgcagcagctcaagccaggaagtgccccgggtcaagccagtgttgctcttggctgcagggagagaaattagaaaagacagggtggccggaaagagaaggagccaggtcacctacttggtcacatttaatgaacattgagatttgtaaatattaagcaagtatctgtaaccaaggaacggccttggcaagggattgagcggagggccccctcctgtttgatctcacaggtttggggtttctctgtgcacagagcatttggcatctttttcttttgtatggttctgtgggttgaataaaggggtggttgtttttcaactgtttatgtgcaggctgacagtaaaaatttggtactggaaagtgagcagcagtctgtgataagatcaatttggtgtttgcataaataacttgagaaccttaaaaacaaaactgtacatcatagactaagggcatcaaaggtaattaaatctcacctacctcattttgcaaatgaggaaacagaagagcctgcttgcaacattgcttacaactgtatacaagcttgtaaggagtgtggctttttgcaaaatgatttttttagaggttcctgctgaagcatctccaggaattctaagttggaacatggggccgctggaggagggataatggaaaaccatttgtgtttcctggtaattacagggggaatgacagggtggtggggcaggggtgcagggggaatgctgggatcgtttactccactcccgcctcctgctggggtctctcgttggactcccagagtgtccctctctgttgagcaggacaaaagcacatgtggatgtggaaaaagcccctacaaacagctcctctgagttcctgtgacagcttgccccgagggaggcactgtgtggagtcaaccctgtttatggagaggcttccagaccccactctcccctcgtctttcttgctcagacaagcccgccactgagctgtcaggggaagagtttcgtttttagca

SEQ ID NO: 36112 - DNA, 3011 bp, Bovine  19866880434885
  misc_feature (1)..(1): n is a, c, g, or t
ntatgatttccttataggcacaataggttcccatagtaatgatttaaaaatacataatgtaaacggtaatgtccacattttgccgcctaacccccaccccagctatgtcatcagtcactgtcaacagtcaggtgtgtgctcttccagggccctcaccctgcacacacactgctgattctgtgtgtgtgtgtgtgtgtgtgtgtaaaccttgatgggtttacatgttgtcttgtgtcttatttcacatattttaaggtttctgctagtgaggatttagatttacctcactattcttaatggatgcttgagattttgttatatagctttgccgtgatttattcctgtttattactatttttaattctacaatttttcacccatatagcaaaatatcagctattatagtatccacctctgtatccccatatagattgaataagcagcaacattttgccctgttggcttcagaatttttatgtgaataacggaaacattccatgcagaaaggaagccttgtgtgtgctccacccagtcgctctcccctcttcatgcccagagggaaggaagctgccttctgcagttgatacagcctgtttagtcttacatttctactacatgtggccatcaacagggtgttactttgtgcattcctcaatagtatcattaccatatgggtatctcctgtgacttgaattttcattcttttttttttttttaagatttttcattattatataattctatgttgtcttccatttgataagaatgaatacagctaatggatatagcttcatttaatccatttccttattcacagaatttgagttgtcatacttttaattccagttgttcaaatgtgttgtctctgcttcttaattctggactcttttttatcttctgtggaacagcctgtctaagattggaatgatctgttttgaaagttttgtagaattcatcgatataactgtctggtctggtgctttctttcattttttttttattagttattgaggtttttaggttttgtatttctccttgagatatttttgataggttctatattttgaaggaatgtatgttttaagttttcagatttagcagtgtcaaggcgttgttagcagtcttttgtcattaacttgatgtgtgtctatagtgctgtgcctccatccataagagtatttgcagtgttctccctgcccccttttaacgtgatcagttttgccagttttgtctgtttgattaatcttttcaaagatcagttttttacctcctgcactttgaacatgcatttcctggggcctggcctgcagttcccttgtctcatcacctggccgagtctttcttctagctctgtggcactgtgtgggggtatagtaggtgctcaggaaggaaagggaaagaaattaatgagagtctattatacataaagagctacagattcattctcaaggagagaaggccctctttcagggtgtattcccaaaaggactgttgtaaagacgatgtaactggtgttgagtgattgaaccagctgagcaatctgaggttctgtaattcttttttccataatttatcaggaagtaaaaagctggacttgcagccatggcgtgactggagtgagactgagtgtgagtcagtgagctacagaaacaggtaccaagtagtgcctttctacttatatttaagagaaagacaagccaaagtgatgagatgtccattttgcaaactctttccagtgggcttctccaggaagacttgggtctttactggggtaagtacctgccagtccatccttgattatatactcaaaacagaaactaaaaagacatttaagtgaaagaaatcaccacatcttcagtggtccaaccagaataagaaatacctggctttagtttttcttataaagtgtagctgttttcctagtaattctacagcttctcatggagagagaggtaaaacaaaggagaagaaattcaaggaaagttttgttagcaagaggctctggactgatagttaagatattaaaatatttgcaacacataaaacatgctggcaaaggtggtaatctttgaaaaggaagaggagagtgggaaaccaggaaatatcagtagaaaggcagggctcttttcacagttacattatgttcatatttatgaccatgttattgtcacctaacaaaatattcatagcatgttaaagcctttgttttattttacttacattacacaatttgtaagactgagttgtaaatttcattgtctctctggcaggagccttgccaatgaaaatggcaagtgatatcttccttactggttatgttgactcaataataataacagcaagttgaacagctaattaatatcagactctctgctaacatttgtataatacattgttattttaaatcaactatttttattcccttatatagcacattaatttttcatttttatacaaagagattattatccccattttccagatgagaagatagaggctcagggggagtagaaagtaggtggcctggctgaagtcctccagcaagaaagggagggaggcactcttggagccccaggtctgagcaccagactttggcccccatggagccggcggcagcagcagccagactcccaggcacttgggagatgctgtgggtgcagtcatcattctctgctggtgggagagagtcacgtttgtttaacgtggtgggaaaatgcgttctgtttctagccctgaggcccgtcactcctgaccttattctgattccagccacgcacactcctgaatctgagatctttccctaggtgcaccttgactcctgactgttcactcttaccttgggcatttctgtatctactgtgagctctccctagtgtggagagtttataacttttctttccagtctttcctaagattgtaacctccttccagtcaagaatctgcgcctcccgtctctgcagtctctatcctgccgctcgcccagccctggctcacatcaccccctccctctg

SEQ ID NO: 36113 - DNA, 817 bp, Bovine  19866880467018
  misc_feature (1)..(1): n is a, c, g, or t
ngtttgtctagtcaagactatggtttttcctgtggttgtgtatggatgtgagagttggactgtgaagaaggctgagcgacaaagaattgatgcttttgaactgtggtgttggagaagactcttgagagtcccttggactgcaaggagatccaaccagtccattctgaaggagatcagccctgggatttctttggaaggaatgatgctaaagctgaaactccagtactttggccacctcatgtgaagagttgacttattggaaaagactctgatgctgggagggattgggggcaggaggagaaggggacgccagaggatgagatggctggatggcatcactgactcgatggacgtgagtctgaatgaactccgggagttggtgatggacagggaggcctggtgtgctgcgattcatgggatcgcaaagagttggacacgactgagtgactgatctgatctgatctgataattttgtttttatataaaagtaatgaactgagaagtcaactctaaagacaaaattgtttctagcatctaactcctaaagctttctgatgcagctcctgtacactgttaaagctttaatgcaaaagctgactcacgtcatttattgcttacaatttgatctaactacagtgactggaacagataaaggttaatttttatgaagttcagaggcacattgttgcagacattagttttgtgccttatggatgtgagtctcttaatattttctttatggttccaaatggctgctgcagtttggggcttcatgttcaggttggcagggaaggaagcagaggagtacaaaagagca

SEQ ID NO: 36114 - DNA, 1259 bp, Bovine  19866880532122
  misc_feature (1)..(1): n is a, c, g, or t
ntcaggctccattagggctggaaccatgttttgttttttttctgaataataggcatgctcatacactcacataaagttggcacctgatagataccagtagtgtgaacagtcagtgtctagtaaaacgcatgtagttagtgaatgacagagtcagagtttcacccaaacttctcttaaatccagtgtgttttctgtattttagccactcggtaattacatatcgccattgtcctgaaacaagcttaccatttattgaaacagataatgatctcagtggggtaaactctgtgtatagaggttttatagttactgtgtagggcctttaatttctgtcctttgtttcacatgtgtttcttgctccacagctgtatttctccattaaagtacttcagtgatttccgaccttatttcactattcatgatagtgaattcaaagaatatactacccgtactcaagccccgtgagtaaacaaaataacttttattgactaaatattaacctttataaccaaagcatttagaattatttttggtaataatttaaaagtttaaaatttgaacttattgcgagattgattttgtaaaggtacttttgaggagcagctggtaataacttcacatttcaagagtcagtatcttattttctgtaaatgatctgctttacctgtggaagccataattgttattaatagctagctacccaactgtagttttagttctctttgttctttgcttcatgacctcttacagtatcagttatcttttcttgctctgtaacttccttttccttccccttcctcattgaatcaccatacaaacatataaaaattcttctcagtctataaaaggggaaaaaaaaatatcttgcctttccctcttagctcttgctctattgctcacctttttttcatagcctagtttctagaataacaataaaaatttccatttactgtctccacttcttggtttcctagctgcttctcaattcattgcaagttgatttcttcgtctctgctgaagttgtttttgctgaggttaagaagacccttctcactgccttgaacctgtggacacattattgccctgttttttcctgccttcccttttctcatgacattgaatccactgaccttgaaaacactttaatctttgatgccatctcacctgactgtctggtggtgcactcagtcttctctgcagacttctcttcctctgccaaccccttaaatgttggtgttctccagtattgtgttctgggt

SEQ ID NO: 36115 - DNA, 1506 bp, Bovine  19866880565425
  misc_feature (1)..(1): n is a, c, g, or t
ntttctttttctaatttgaagcccccacaaattatacacgttttcagattcttcaaaactggatctgcccctacgtaatgcccagacatttccccacctagttctatgttcaagaccacatcacattcagcggcaagaagggtattgtcccaccaacccctaagcaactctagccatgacgagcagtttgatttccaatccccagatggcaactctggtggaccgaggagctgcccttccagagacacccaggatccaccaggaagctcatggagccgaccagtcctgagaggagcctgagggcacccgcgtccacagaaaggaaagaggaacgcctgctcacacacgctgtccttcagtcattccttaggtccactgaaatctcaccatccaatgatatttacgtattttcatgacacacgtaatctgtactctccaattacagagcctctgtaatcagagcacttccaaataagtggcaggtggatgatctaaaactgctttctaaaaaagcaacgtggcttggaagaataagaaaggggggatcaaatcacacagtgtgcgtgcaaacagtggacaactgtctatttaaaagaactctccaacgcacagcacagccgttacggtggggcatttacatcagtcaggagcctccggagtccagttgtccaatcaaatgcctccccccaccaaaggtcagagtggagagtgtccctccctggtctattcttatccccctctccctggtgtgggggggagggggcatctctgtggagtgcagcttggcggtcttgataagcaggtgtcagggagttgaacatgaccttgctcatcagctggtgggaaccaggcagacaagggagtctctgtatcgctgtccacagggtcccagccccagaaacaagacacagtgaggcctaggcgggagggagggaggaagggagggaagcttttacacaccccgcccccgacctgctccccccaccactacttcatacaccggggggaagtcaccagacaaaaggaaatccacatcatttcactcgggagaggaaaaatttccaccgagaggaaaagaaaaatctgaccataaagatgtgttgaagtgtttcccaaacagcagagtaggcaaagataaactgaggagatgggttttgaggaaaatcaagaggaaagtcaacattgtctgtggagctggcaaaatcaatcaggaaaactgttggcagaggtgggaggagatgaatgtacgttcacctagctgattccatcgtacagacagccagggctgtgtcaatggctgttactgtaccagcccctggaaggggtccaacatgcaggacccgctctgaatgtccactaacccagtttctaattaaatgtgggttaactggcactgctccttacagctcaagggaccaattcagagccgaaaggagcatttttcaaactaaaaaggccaagccagcaccttttattttctcacatcctttcagtgctcaacggacc

SEQ ID NO: 36116 - DNA, 1364 bp, Bovine  19866880681040
  misc_feature (1)..(1): n is a, c, g, or t
ngtgatagttcttttgtatatgcatgggagtcgcagaactttctgattggatgagataggaaagttcatatattttatagatagtaaaactgagatccagagaggttatttcgtttgcttaaaggcacagaagctaataatgatgatgatgatgataataaattaatgttttcccctaagcagataggggaaaacatttctatctatgttcagatagaaagcagatgacttatgctcagatataattaggtcttattccctcagtacatggttagaaaatgttctgatctatcaagtttgtggtttatgttgcaaaattgagttttcttcaccttcctagctaaagacacaggtgacagaaacatatatgccatgtctcaaccatagaatcattgtggtggcagccctttagggcagcccttgtcacccacctctttctctgggtttcctctttctactccgtccctctgtctgtgtgtacagacttgggactgcagggagggcggggctgggacaggccatttgtcaagccaggggtggaaggtgggttagggcggtgcaggggaggaacttgttcctgcagagtcctggaaatcttatttggagccactcttctattcttagtttcgaaggcactttgttctctggtgcattgttttaacaggcaccaggaaatcaggctctgctggggtcagcgatgacactggttcctgcctgcagccacccaggtgggaagtctactggtttgtttcaatttgttcgtcatcaagatctttgctgccctttctcattttgctgcccaacctatctgcatgaagcagggaagggcgaggaggagaaaagagattccagtgagtctctttttctttataagcaatagtaactgcacttatttctgtgtaaaaggaaaaatgctaaaacccacatcttaagaaggcagtgtgcccattgaagcagcattgttcactagaaatagagtgtgagacacatataaatttaaatgtcctagttagccacgtgacagaaataaaaagaaacagatgaaattaattttaatgatttgtttaatccagtatatccaaatattagcttttcaacatgcaatccacataaaaattattaaggagacgttttacattctgtttttacaattctgagtcttggaattccagcatgtattatccactcagagcatatctcacttcacacgagccacatattgaatgctcagtacccacatgtgggttcctggtggccattggacagcgcaggtctagagcagtactatccaatagaactttacatcatgatgctcatgttttgggtctcctctgtctcacacagaaaccaatagccacggatgg

SEQ ID NO: 36117 - DNA, 1599 bp, Bovine  19866880707126
  misc_feature (1)..(1): n is a, c, g, or t
ntttcaaataaaataattgaaaaataaacactttatcttccttaccagcgcctggagttgttaacaatcactccattgtctacggagaaagtatctgtaggcaatccagcaatattccaggctctgattgttactggatcacccagggtcttactcagtgagaactcctctgaacacgggatttttttctcctgttagaaatacacagatttatttttgacattttctcttatcttattgattaaaatatttttagttaatatattatttgttgttagacagtatttaataattcttaacaactgaaaaaactgaatgaaaagttagactatggaaatattttactgatcaaataagaagaaaaaaaacttcatattttcagtcatttctttccttctctatttttattatcaacctttcccccccaaataccccaacatatattttaaatgttctaaaaataaactcttaagaaaatataaaaccattaccttgcacaacatgctccaatcttctgtacatgtttgtcgaaagccagaagtgaaagcaccaaggtaggctattactcctgctgatattaagacatcaccagtcaaattttcatatactatctgaaggtcatctgcagcttgagaccatctaggagaccaatcaaaggcaaaacagcctcaccaaagagaatgatttaaggcagtaatgaaacagccagaggtttctagtccaaattctataacaaaatgccatgaaaagttgggtacttgcgtatctataaaatgaggaggttagggtcccttctagctctaatgtgctataatatacatttatgttttataaacaataattcactattcattattagaatattacgcatttcttataggacttgttctttcaggataggaaaacagaaacaaaaaaaaatcaccagaattttgtctaataattttattcaggatgatttggcccagtggccctgctatttgtttctgaaaaacacaggaacatttgtaattcattaccaaaaattacatttaagttgtatagcagttggcatactatagctaaggttggtatctttttccatttaatgaaacttttaccataaaaagtgcatttcaaaaccatctaatctgcactacgaagtactgtcaaaagtatgttactttatcatgctattcattcaacaaatacaattaatagctatgatagttggctgactagtataaatagattagaataaagctaactggctttgttacatcaagtcagttatttaaaataaatttaacaaaataaaccatatattcactactcccttccaaacactttattacaaaacatttgaacacaaaattggaaagaactgcacagtgatcatccacatactcaccactaagattaaaacttgtcttaagccttatttgcctctttctctttctctctctcttttcacatttgaaagcaagttgcaaacaccatccttgacactgaaattctgttaggagaagcctagccaggtgctttatagaaagtcccatattctcaaccagccatttaaaaatcagtaatcaaaataaacaactcactccagtattcttg

SEQ ID NO: 36118 - DNA, 1273 bp, Bovine  19866880715564
  misc_feature (1)..(1): n is a, c, g, or t
ntagctttgtatccatcagcgcaagaaagggtgctccagaggtcttctgtcgttcaggtaaagtgacttcgccagtctctgtacatactcgttctggaaggggtgccaggggtgggggtgcttatagtaaagatgaagaccagactctactgaaaaagtgtttgctcttgaatcttaagcacgtcatttagccttcattcattcatggagcaaatactgagtacctgaaatgcgccctgcacgcttcaggttaccttgaaaaaagacgtgcttacgatttcgtttatttagctaaataagaaaatttagtagttaatattttattattacttaccaaacactggtgacacattttgaagaacttcaaatttaagcctccagcatctttgtgctccataaatattagcttttaattttggctcatagtaatcctgcagttcccgttttatagatgttactctaaaactctgtccattttttaggtaactgattttgttcatattaaaaaaattagcttccatttttttgagcacctactgtgtatcatgcacctctgagtaagctcatttaattcacataattaaattttctctttgaagtggatgatattgcttctttttcactcatgatgaagctggtttaggaaaaagaaatgtcactttccaggtcacactgctataaatggttcagtgggtattcaaagctacttctgcctgactcctatgcctacacttaccacttaaaaacaccatctccaaccttagtgttaccatctgaactgtattaatcttcctctatatgttaggttgttattaaaatattatgctgaatcccattcatgtatactccaaaatttaaaagttaagttgcataatttctatcatacttcatcagcagggaaggttttggaataaaatgtcagttcatcatatagtcttagatttaaaaaaaattttttttcagaacgggaaatagaaactgaagtcagcattttctgtttatcttaggtttctgttcttcagtctacaaaggactcttctaaaaagatatgtgttgctaatacccatctctactggcaccccaaaggtaggttttgttgattttcacaagtggcttaaacatggtaacttaaagttggtaaaagctgttttacacaaatacattttttctttgttttgtcaaaatatagtttataacacagtgctgtacaatttaaggtatatggcataatgacttatgtatattgcaaagtattatcacaataagttaacat

SEQ ID NO: 36119 - DNA, 1089 bp, Bovine  19866880749564
  misc_feature (1)..(1): n is a, c, g, or t
ncttttcttaggattattttgctgggcgacatggcacaaagaaagcagtccaccacttgcagtctgaaggttgacagtgctgctcttgtttgaatgtgtggctcctctatgaggccaaggcttggctgtccctgctctacaccctccagggatctccgtggcaatgtgcatcattcatttaaagactcatgcaggacaaggctgctgtgggcagctgaccaaggctgaccagcaaattacatctcctgcctttcctttggccctgccattattattattattattattattttaggtcagtgaaaatgttatcaccactcctccactggaaaatgtttgtggttgcagctaaggacctgttacaactgctgacaaaggattcaaaaatcctaggcacaggagaaataaacgaacccccttagcaaaaactcctctagctttttccacttcatttaggctgtgtacactgggctgcttcattagaacctctgctttcactcctactcacatgaaggttttgttttgtttttctgggaatcacagctggtgtgttttaaaaagccatctgctatggactgaatgtgtgtgtcccctcaaactcatattttgaagtcctaaaccccaacatgatgatgtctgggggtgaagctatgggaaggtataggtttagatgaggtcctgggggtgggaggtcccacaagcagattagtgtcctcataagaaaaggaagggagaccagagctctctctttccaccctgtgatgacacagaggagagaaagcagtcctctgtgagccaggaaaaggaccctcactaagtaacagatctgctggaaacctgatcttggatttctcagcttcccaaactgtaagaaataaatatctgacccagaaccaccttggggagccatgtgagaaagaaaggaatgtttttgtttaagctactatggtattttgttatactagcctgagttaagattaattaaagagctgtcctaattaaagaagagtctagtgtttgccatggtaagaaataggaaactatgcattagtgcctctaactgcttatgtattcttccatcatacaagg

SEQ ID NO: 36120 - DNA, 1744 bp, Bovine  19866880751387
  misc_feature (1)..(1): n is a, c, g, or t
nttaagacttgggtatgagcgttgcgcccatatttctggaacctttcccaacaagcagactgccagacagtgcctccaacgcagaatccatcacgaccacacccctaatagctttttcaaggtcccgtagagtgttgcgtatagttttaattaagctgcaaggaaagcaattgtgtcatcatcatatatatgataataaatatcaatatacagtccatccagaagaaagagtaggatatcattcacggttttatgggagtatttcccaaaatttggtcacctcccacttcataatgtaaggtaattttaggtgatacttggatgaacatttttcattttaattattacatatgcattttaaatatagaaaataatataacttgcacatcaaaattgctttctgggtaatattgcttaagaccaggctaatttaaacagagaattatttaaggaaaagtatcaggtaaataatgttacaggtgacatgcaaatatgggaagagttataaaggcacaatgcaatggttgaaactttggaaacactgcataaaaatctaaagtgtatattcattcatacccttataagtactttgcttctcacttagatcccaaattctaagaacatcataaatatacctcaagtgagggttttgggctataagcctaaacaactgagagacaatatgttattatgtacaaacacatatggtctttgtattgttgttgctgtttagttgctcagtcgtgtctgattttttgtgatctcacggactggagcctgccaggctcttctgtccatggcatctgccggggaagaatactagagtgggttgccattttcttctccagggggtcttcctgacccaggggtcaaacccatgtctcctacattggcaggcagattctttacaactgagccaccaggcaagtctagatgtataagatgtataagtctttgtataagagatactaaattcattaaggcatcatagggttttaatatgtcttattttaaaaagtctggaaagttaaacttggaaacactagaaaattcataaccaaaacaattctccattccttaagccagtattgagctttagaaaattcaatttaaaaatttaaagcaaataatctgcttgctattttagggtacctaccaatctagattagacttaggaagaaagtgggcagaaaaatgactaaatatgtatctacacataggcttagataaaggtcattccagctttatttcctgaggagaagagcaatggatagatgaaaaattacgattaatgaatatttttaaccagatctcttttttcatcatcatttttacattagaaaaggtatactcccttctggggcagtatgcaactctaaaaaaggagacaaattctaacaaaatggcaagttttgataattttttcttaaaattttgattcaatactggtgtatctttttatcaactttggctggtagctttctgaatcactgggtgtagagctccttacttgttaaatctttccatttcttgcactaacacagtattcatgctctcttcatatctcacaggatacttgagcagtgctgattcaatgtcaaagtcacttggtagctaagagaataaaatttgaagatcacgtattactctcaaaatgaacagtgtcattcggctataatatcaataatagttaacattaggcatttactatgtgccaagaattatgttaaggctttccaaatat

SEQ ID NO: 36121 - DNA, 1362 bp, Bovine  19866880835398
  misc_feature (1)..(1): n is a, c, g, or t
nggttgcagtgatctcaacctccgaaagcctagttcaatgagattatcactaaactaccttaaatacattttttcccccttttaccattggctatgaggctggctctggtctctgagcagaggtaggtaacacacattgagtaagttaagcgctagtctttggccataggacagtcttgttttctagtctcacccctgtgtcccacctttttttttttcacttccacagctaagttatgaagtctggcaaaaataagggattcaaaagctgcttaagtttctttcttttttttttttttttttacataaacatgaagaaagagagagagagaagcgaaatttaataaatactagagtaggaacccaacaattaacgcaacacctacaatgtggcagatactggttctggatgatttccttgtaacaacctttgtgaaatagacattagctcccattttagtgattaaaaaactaccgttaagttgcttgcacaaggctaggtagctaacaaatagcagtcaagactcaaatccagctagattccccaatttcaaagcctacaatcttcctgttttcaaaccttcctcacagcttctctgacagtgaagacaaaaagtagatggctaggggggaaaagaagaaaaaaatacaaaaaccgaaggatcaaatgcagatatatgtaatattaaagactttgttctgcattctttgctcacctccatagtcccactgacaatctggttcccaactaaaaagtattcaggaggaaagtcatgagtcctaaggtagaatgctacaattgatgagaagattcggaccatagtttcatcactgaaagtattaatggtgcagatgttgaaatgccgaataaaacggggagtaactggatttcttccaccacctggagggcccatggcagcaatcagctgtatgtcaaccaatgtgattttacttgtgtccttcaggtcataccttgaaagcacataaaaatcccaaaacagtcagtaataaagccaacaagatggactgaaaagtagagttcctttgaaactttatctgattttagcttttctaaaaggaagaagattagatattacttggagtaaaagagaagtttgtttttaaggattcatataatttttacttcttttttttattgaggtataattgacataacattagtttccgtgtactacataatgatctgatacttgcatatattgcaagatgttcaccacaataagttcagttaacatctgtcaccagatacagctacaaatttttttttttcttgtgataactttcaggattcatcctctgagccattttcaaatatgtgatacagttttattaaactacagt

SEQ ID NO: 36122 - DNA, 2246 bp, Bovine  19866880891060
  misc_feature (1)..(1): n is a, c, g, or t
ntactttttttctttcttttcaaaggctgcaattttattgtaacttgagtcttgatccccccaccatcgccaagtaaacagggtaaggagagttccattcagaggcagctctgggtggtgatgatgtatccagggtgagaggtacctttggtccctgctgcccagcgcctttgaacgtgttatgtaaatcattgcttcccctgagccttggaggtagacggattatttctgatgtggttcctttttttccagatgaggattccaaggcacaaagagccaggaagggattaggatgggaggccacgtgactcagagaggcctctctccgccagaaaccagttcttaccctgccccctgcccccagcaggccaatttgccctgccttcccagcacccagcctgagatggacatcagccatgtgctgcagaacagctcatgggggtgggaagagagcaagactagataccagcgagtgctttgcagagaattaaaccacgattcggcatttaccctggaggttcccaaacctggctgaaccccagaagcaccggacggaggaacattcttgggggtaggcgggggtgggagattccgggactcaccccagatctgcttaagtgggatttcccggggaaggctgggaatctgagtttttttttaaaagctgccagatcagtgattgccaggatttttggggggttggggtaggggtggatagagggtttgactacaaaggggcagaacaaggggatttttgggagatgatggaattgttctgtgtgctgactctggtggtggatacactgatgtatgcatttatacacctatttatatatttatacacgtgtaaatgcatgaaacatcttcccgggcagcactagcggtaaagaacctgcctgccagtgcaagagacaaaagagatggaagtttgattcctaggtcaggaagatcccctggaggagggcacgcaacccactccagtattcttgcctgaagaattccatggacagaggagcctggcatagcgtcgtaaagagtaggacacaactgaagcaacttagcattcactcatgcatacatttatatgtgtgtaaactcctggaactgtacaccaaaaacgtccatatttacatgtaaaaaaaatgctgcttcagtgaaactgagctatcactgaggtgtcaggtgacgagttttctagctgtgggagaatgctacctggaattgcagaggcaggtaggcagatcctatcgagtggaactttgtgtaacaatggacatgttcttctctgcactgtccatttcagcagctgttcaccatggtggctgaagtgtggccagcacagttgtgggcctgaattttaaattgtactcaagtttcaatacctgcacatagctaggggctgccccttgggcagcttgcttcggaggcagacattgccataatggggggctttggctttgtgccagctgcacacagggccctgtggtccttcgtgcttgaggaacaacagtaagtcatcccaggtagagggaagaacaggcacacaggccagctgtctgggttggtaggggcagaggaaaaaggaactttggaaagaacagtgatgtgaggtgggcccaggcagggaacagtctcgccaactggaggaatcagcttttcttcccttatgtgcagaagtctgggccaactgtgggccatttcctgccccaacttcccaacctcgttcatcttaaaaagacacaatagttagcatgttccttaattgagcttttctgttccctgagatgctgggaggtacaggaagccattggagagttcaggggaatgatgtgcggatagggttagggggtgcttctagcttcacaggggatttgctgggtccccgtgtcaacttggacagggtgtgatgaagaacctgcatgggcatatcctgctgctctttggggacgagatcctctgaagaggcgcctgggcgcaaacctcccaccttaggcacccagtgcacggcttccgtctcagtgtgtgttcagacactcttaagcctatctccccaccctcatgtatttatgctgtcttaaatagcgttacttttccaaatgcattataagagtgagattctgagagtgtgaccttttattaatgcaaaccaaatggggacagaaataatgttccaatttgtcaacatatttgttcttaaattggctaaatggctaacaaaaaaattcatgagccacaggtttttataa

SEQ ID NO: 36123 - DNA, 1647 bp, Bovine  19866880914277
  misc_feature (1)..(1): n is a, c, g, or t
nactatttgctctattaaaatgccttggtatttcctctgtttaaccacaggccacttcctttctgccactctaaacccggcagggccaccggctgattgaaaagacacaagcccaggagtgatcacatcctattgaaacagatagtcttactgcagattaaagctggggcaagaagagaccaaatctaagagggattccttgagatgctccttatcttgctcaaatttagcctgttgatatcattcacacttaaagtcatgaatgcattctttttttgttttttttttttcagaaggcactcctcctaagttgtaaccaaatgagttagtgtgtgtttcatttacataaagcaggttaaagtgacgatccactgaatttctcattgtgtgagttgggaacgcttcagtgtctgggaagggcatgatgtctgttcataggaaaccatacttggcttattctctgcttgtagatcctgcctgtttgttctcatgtgctcagaaacccaagtaagacgtttatagcttaactaataccaagaatatatctggggagactgtctctcctgctttcccgagcagtatcttgagaaggtttaattaataacaccaggcatgaaactaaaaattgaacaattgaaaaattacctacagtaaacaaagactgaaatttaaactccatccgtaccctgtttcttttgaaggggcctaaaaagggaatgactagtgagtctctaatgaagactattattttaacatttgcaactccattgttcaaagcatccatgataaaaacagctttccttttctttggttccttgtttggaaatgttggggaaaggtggatgtagctaattaaggctacaacatttaaaggggggagcttaataagtaccagctgtcctcaacaaatcaaccgggtggatgacaaaataaagatgtgatgtgaatacacatgtaattctcttctaaaacggaagttggcctataaattgtctgatttaatagggtaaatgaaaactacctctactatgcacttttaagaagcatttgttttatagtaaacctcatgtcttatttgcataaagcctgtgcattaaaagttgtaagggcagtagatggcaggtactgtggaaagtttaatacactgtaattcttctgtccgtttcttcactctaaagctgatcttaatagacattaatcatgaggcttttcattaaaattactacatcatagggaagcttgcttgaacttatcagaaatgcctataaaattgtagccatgactttgaaaagagaatttggaaattgatagcattaatgaaaatgttcaggtggaaatttaccttttacacattaaatgaatatttcaaatgaatccttttaaatcataagggatcaggctttaaatatagctgtttttcaaatttgaaagtcctttactccctaaaaaaccaggagtttttccaagtgttctgttttgtcagttttgtagattttttccccccattgaatggtaaccctttaaaaaaatgctggctgtggccccagacttctgttctgagctgggctgtttgacttgctagtgggaggttgatggggatagagggagggtttcctggaaagaagaggtacgtttccctgagacggg

SEQ ID NO: 36124 - DNA, 1138 bp, Bovine  19866880950582
  misc_feature (1)..(1): n is a, c, g, or t
ngaaactaaactgaaaggtgaaatcgttgccgcccagcgcccatgcagaccagcagtcactcgtgcctggggcttccctttactgtactctctcccacatattttggattgtgaaaatttcaaacctgtagaaaagttgaaagatcagtggggtgaacacgaatttccccttagctgagagtcaccagtgctttgtccccgtgtacctcagttgtctcccagtgtccttcatgatttctttctgaatcacattccaggattcagacaagagccattcacggcttgtagacataccctgtctctttagtctccttgcatctgatggagtccctacatctcttttttgatcttttgtaacatatacattctgaagagtcggggtcacttgtggtatagacggtcacacaatttgagtttctgattgtttcctcatgattagggtcaagttaaaatttcgcaagatctctctaaaagttcaagtgcgatgttgttggattttaggtatcagtaggtaacaaagattgctctagcaaagagcaaaatgtgttttttctacttgaaattattgcacgtagagacctttctaatgatttaactcagtttggtcttgtattattcattctttttttttgtttgtttgtttaattcagtgctatacagaaagacttctcttttactttactgggagtccaaagaaatggcaaggtgtcttttgcactatcttgtaatttaacttttttccatgaagacgatctggaatcagctgtgctctcaaaattgggagtgtcacgtcccaagagtgcttaaggtttttgccattcactggagcttgtttcaaagagttgtagatgtcaccctcagcgactgaccaggaatgagttcctattatagcttcagctttggcctgggtgagtgcatggccgagtgctccctcacaccaaactcagccgcttctttcctttgtgctgagaaaacattgagctttatttccagaaaaggccttttccttctccactcagaacatgtccttaaagtcagtttccagccttctccttctgtgagtacatgttgcctgaattattttattagagacccttaagagagtttatttgtttaacgtaattactatcttctacct

SEQ ID NO: 36125 - DNA, 1005 bp, Bovine  19866880991750
  misc_feature (1)..(1): n is a, c, g, or t
nttggttattaaatagaaaagccctgtgattaaatcacaggactgttccaacactaatcaattaaatctcggtcatttaaaattaagtcaggccttgcacttgccctgcctctgtgacagaagtgggaaccacacactgcaaacgtgactgaaggtatccagagagcatccgtttatagtcctatgtgatgtgggtacttagaggagggtcaggctgcatcccaggtaggattgcctcctccaccatctctaatacccacatcttctttgcctgcctctcaacatccagtaacaacaaatcagcagtgacaatagtagtaatagtgattatgatagtaaccacagaagcaataataattaccattttttaatctcttgccatatggctggccctgttgtaaatattttatctgctttaatccttcaaataagcccatgatgaagaaatcaacgtttatggaaatatatcatagacacttccatatctcacacacctggaacctgcctggcccatagttcatcctctataaatatttgtcgtgtgactgaagtgatagagagcatcagtatctgtgatacacatcagttgctatggtaagatcagagcaaggagaagtgatggatcctgaactcaatctgtctcatttattctctttgtttccttgaggtatgtaggtaaatgtcttatgagcctttttatattgttctaaggcacatattgttttaaacgtaaatttactttatgtgcttctctgatggctcaggtggtaaacaatctgcctgcaatgcaggagacccggattcaatccctggattggaaagatcctgtggagaagggaatggcaacccactccggtattcttgcctgagaaatcccatggacagaggagcctgccaggctatggtcctggggtcgcagagttggacatgactgagtgactaagactttcacacttcccttcacattttttatattaatttaaataaatcacacttgtttttaaa

SEQ ID NO: 36126 - DNA, 1330 bp, Bovine  19866881028118
  misc_feature (1)..(1): n is a, c, g, or t
nccagtacctctttctttgctgaggccctcaatctttgacctgcatgcctgctgccagctagatcaagctgcctcctttctccccgtcacatccattccccacatgaagccagaaggatcttcctgaaacacaagttgggttgtcactctgctactctacacgttttgctgccacttcctgttccctttagagaaagctggacgataaagcctgcttcttaatgtggctttcaagacccactccctgcctgcctcttcatctttccccagttcccttcttcctctgaacgtctttaatcatagtcctgtccacttgctggtccttctgcctgtactcttctttccttcatcctatctttgcctgattgtcattcagatctcagctttcactgtaacttccactcacaagtcctccctgaccctcaaggagtgtggtgtgccccttctggaggcttccataggagcctgtgctttcatttactatgtaagtccctgcagtgcccagcagaactcttggtgcacaggatgtgcttcacagatactcaacaaagaaaagcaaaaatgaggattcatagcatgtgaaagaggctctgaaaattctaagacattaatttcagttcataacagaactataataaaaatttggcaagaaaaccttgtataatgaggtaactcagttatatttttgaggatggaagatgtgagctttcttctacacaatcaccagacccttttgttggtagatttctgattctcgtattccctggaatttcctctgatgatattctgtcatccattcttttctctctgcaccccttgctcaggtgctaagagaaaagtgctgcattgaaagaaataagaagcaaggttcataatatgtacagatttccatctttggatcaaactcagtattaaaaatctgtactgtttcaaagaggtcttattttcttaaacacaaaatcccttaaacttcagacagagactctcagctgaagccgtctttggctattcttagcccttgctcttactgctttttcaaggctgcgcgtgatctatacatccattgagtcgtctggcttcctctttgggaagtaataattctggtgagtcaaggggatggttggtaggataaagtggacatttcagatcagggtttgatgaatcagtcagccgagcctgaagctggaaagattacccactgcatacttcacattttcttctccaagtttaccattaagaatggcatattgtacaaatgggtttttttgcagcatgtgaatcagcttgtgacaattctttagggttttttcctttaatctcataaataaaa

SEQ ID NO: 36127 - DNA, 1410 bp, Bovine  19866881114615
  misc_feature (1)..(1): n is a, c, g, or t
ntgactctctaatataggacctaccacagtctccaaggtaattagaagctccataaatgctgtttttggcactgactggggccacacattaaaacatgtttattcccaaactgtcagcgaaatatggcggggggtgggaccacatcagacttgctgcagcgtatgtgcagaaaagagaaaggtgatgctaagggcaccgttcaaactgaggtaatttcatcatatgacacacagcaacccacccccaaaattctgagtaagagtaagagaattactcagaggaagggaattctgagtaaaagtgggaactattattaccaatttaataagaagaagaatagtaataccgctgctgtgccttttctgtggcttaattcatttcatcttcatgggggctctaacagaaataagggccataacagaagagaaggctgaggcactgagaacttagccttggaaatgccccagagttagaggtcagggccagacagcctgattccaggatgcctgctctcagccagagtcccaccaaactgcctaagaattttctgggaaaaaaaaaaaaaaagaattttctggccacctaatccacaaaagccataaactgggagagaaaaattaaccatgttgatcagttatgtgctatttatcaattatttctatcaaagatggtccagcccattctcttgggcacctcatcttccagctcaccagctggtctccagtgagaacagggccagcacttgcatcagcgctaccgtagctgctgccatgacaaccgcatcctgccacccaggcacaggtgctctccccatctttgctccagagccctgattcagggatgcagctcctgagttcatctttctacctgcttccaacttgctcaagactttaccaaaatgataacctcctgggggttcctcaggtccctggatacatctggaccagactaatatgtatgaaggtggacagggaggtgggattcatgaggctatccagagctgcagagcaagtggctaacctcccgaggggcttcagtgctaggcagggccaggtctgagttctggctctctggcccttgctttctggggatcctcagcaaatgatgtggtctctaggaacctgtcttatgtgtgaaaaccagggataatattagattttacgctgcacagagttgctgtgaggtctaagcagactggagcatgtaaaggccatgcaggggagatgctggctgttaccgatgactactgtcaactactgtcaccatgcactggcccggtgctgatgctgagagaggtcaggagccctcatcctcttgctgccgccttgacagatcagcagcctgacattcaaaacagaaagtgctcctctgggcagctcatgggcactgatcccagggctggacaggcc

SEQ ID NO: 36128 - DNA, 955 bp, Bovine  19866881207030
  misc_feature (1)..(1): n is a, c, g, or t
nagtaggtattaaaacctgcttttggtctctgaggaatacagatatatgtctgctctttgcagggttttttaccaaacacagtaaatattaggttagttttgtgaggctcctctggcaccagaatccttaagagtgaagcagaggatgtggggcagcgagtgttttctgtgttatttataaacctgaaagggaagtatgtaaaatacattcacaaggaatatatttagctcttaactttttttacattggtattaatcatgatatctgagttcagactgttttatttgctcaggattagaggaggatgtgagaatcccggggacaggggagcctgattggctgccgtctatgggggtcgcacagagtcagacacgactgaagcgacttagcagtagcagcagcagtagaggaggatgtgatattacaaagataaatacagactattaaattataatttaatatgacggctatatttttaattaaataaatgtgggatttaaaaataacaaatctcttcagtgttctgttataccttcaagtattatacatatatatgcttttgtatataggaaggtatcttataagaaaggctatatgttacttctactaaaacttctatgttagttaaatattgaatactctcttttagaagggaagcactgtagaaaaaaatgctaatcatatttttctattttttcctcttgcagtggatctgtacaataaataacatttctaaacaaatatatttaagtgaaaacccagaggtaatatttttattttatggtatccagatctggcaaaatttagtaatttggtggtttatatggcttttattacattttctcaagttctgtaatcttttaacttgctcctgaatgttttataatgatcttatgaatttaagaaaatcagtgctaactgtacaggagtcttttgctttcactaacttaattt

SEQ ID NO: 36129 - DNA, 1489 bp, Bovine  19866881257712
  misc_feature (1)..(1): n is a, c, g, or t
ntgaaagtgaaagtgaagtcgtgtccaactcctagcgaccccatggaactgcggctcaccaggctcctctgtccatgggattttcgaggcaagagtattggagtgggttgcaaaaactcaaatgtaatagaaaaattcaatcacagagatggcttttaaacacttaaaactttctgaaataacactttattctaactcacatacaaggacattttggtatgctatttacacagttttcgtgaaagtgaaagtgaagttgctcagtcgtgtctgactctttgtgaccccatggactgtagcctacaacgctcctctgtccatgggattttccgggcaagagtacgggagtggggtgccattgccttctccaggggatcttccccacccagggattgaaaccgggtctcccgcattgtaggcagacgctttactgtctcagccagttttcttagtgtttcctaactttgggcttcccaggtggcacagtggtaaagaacccacctgccaatgaaggagatgcaggtttgatccctgggccaggaagataccctggaaaggaaatggcagtccaatccagtatttgtgcctggaaaattccatggacagaggagcctggtggggtacagtccatgggggtcagagtgggacacgacagtgacagcacaactttggacaaactgtgtgaacgtagccgtgtactagagatctgaccagagtatatggcacttcaaaataatactctatattctaatattctgaaatgcctgtgtgatcattgtctagtcagcaaacaccaaatttgaagagtcaggatgtggatgtttaacaagtatgtagaatttttgtgaccagagttcaatatagctagctgtagtgttgttaataatacaggacttgtatgtttttctcatgggcacgaggaagtcatattacactttgtttctcagctttttgttttctcagcttactgtcaaagtgtcaatatgtatgaaacgaaatcaaaaccagattttaaatggaaaaaaaaattgcaaaagaatcagattctggcttcaatatattttgtatctgtaaactgatgttaaaatgcttttaaaatgctatttaggaaggcacaatttggtagcttcaatttttcatttatagcttttagatcccaaaacactgccaccttttttttgcttcaagtacttttaagcacttcaaagttcaatctgaagtgcaggtaaaaccctctcattttcaaaattactaagagtaaacaatacactggatagtgagcagaatatgaaaataaatgcaggctacttcatcaaaagagaaaagttcttaccaggcttagagattaaagaagatggaacaaagggcttcatgactggaaaatcagagctctggttgaagtgagctctagctatctaagctagaagttaaatgcagaaatacaagatgacattatggttatcctgaacatgaggctgcagctaaagca

SEQ ID NO: 36130 - DNA, 2818 bp, Bovine  19866881273688
  misc_feature (1)..(1): n is a, c, g, or t
ntaaggttgctattgaaagtggagaggaaggaatacttttcagagtatacttcgtaagtagaattgacaagacttacggtaggaggaggaacgaaaaatgagtcctaaaattcttggatgatgggatggatccaggaaaaattaagagagctaagtagaggagcaagttttatagggagcatactgtcttcagttgtatacgtttttagcacacacacacataaagaacccccctggagatctgcttcgtctgaaaactgagagaatgaggggcaggagataaaagctggggagtcattggtgtattggaatattcttggtacttgatttggtattctaaggaaagcaggaaaagaggagacagaatgtattatgaaacaggtgctaaatgagtatttgtcatctgagtacaacaagggacatggtttaagtgtgggtgaaggaaaacaaatataagaaaagaggcacagtagggagagaaccagagaactaggaggagaatggtatgctgtgaactcaaaaaggtcaaagattaatggctaagctaaacccagactgttgtttgcttttcctccaggctgtagttcagtcactataccattctcagttatttgcagaattctgcttttaatgtgctttttaaaaagaaaatggttgatagtaaaacaggaaaactatcttatccaatattctgccggatttttatctcagaaaataagaaagctatgtacaattgctggcaatgcacttttttccttggatagtctcttccccttggccaccactaaaggtaacttaaaatcaaataaataattgtatttttaatcttttcactcaaaggtgaagtatgaagtaacagaagatgtctacacttccagaaaaaaacaacatcagaccatgatgcattacttttgtgcgttaaatactcttcagtacaaaaagaaaatagcattgttggaacctctacttgggtatatgcaagctcaggtgaataatgtactgtgttttggtttgtaactgtcctaagaactttcttttaattttgacttttatgttaaatgtaaagatattacaaactaaggtcagaatactcatttttgtctgtttttaaagcatttttaaaatgtcatcagtgtgctagcttaaggaagttagaagggttttctttgcaaatgaagatttcagatattttagggtaaattaaacacacttaccttggatttagaccttgtccatctcagctgaggacagggaacagaaagctaaaggaacttccgagctactcctattgctcaagcttccagtcactcttgttttataataaatctgaaagagaatggacatgcttgagtttgtctcatgttccttgcatacctcctgagttaaactggataaactcctaagtattccaagagtggtacatcaggaaggaggctagaaaattaagtttgagtaacataagacaaaatggcagtgccctaaaaggaagagtttatgaaatttgaatattcctttgaaaatgagtgcttattattcctctgatataaaacctacttacctttgtagtaaacatgaaatagtttatctgtgtgacttacttgaaatgtttgaaaataccttttctgattttaaaaacttaccatatgtatgtgttactgtataagaggatgcatggtgaaatttaagtgtagtctcttcagtgactctgctcagtaaaaatcactgtaaactgcaacctatttttacacaaatgggaatagcgctttttacttacctatgtatcttggcgattgtgtatatgattcactctaagtattttgtttgtgtgtgtgtgtttctgttgttaaccttcccactcccacaccctgttgctccagataagtttctttaagatgggttctgaaaatctcaatgaccaactggaagaattcttaactaatattggaacaagtgtacagaagtaagtattttcttccttaaaactgaaaatgaaggttatgagaataagctaacagctaaataccataatctaaaaatatttagcacttaatttcagatgggctgttttccctgccatgggagtgtttcttgagtggcttgtggatgcttcttggttttctcaccatcttttccacagcatttgaactctgaatttcataacagtgtcaaatcggatggtattcttattgatttgaaactatgttttgtgtctgaatataacaggcacctaatagtaattatccataagtgaattatcttcacagttacctgaattgtagagtatggatgggagattattaaataaatcttgcttttccaagccatgaaagtttaaagagagaaaaagcagttctaatcagcttcaaaatcctagcattcatgtggttaaactgtgatatggagagagatgaaaatgattactgtttaaaggcacaggacagagcagtttgaaaattcctccaaagtgagtcattcggtgtggattcactagctttggaatttggtattgttttcaaaatatctaaagtttcaaaatgtaaagctgctataagcatgctactttaatcagccacgctactgctgttctttaggaaaacatacagaacaaatatacagataaatgagattggtgaggtgttctttgttgtggttggtagtaaataatctgttctctctgttagtgttcgcagggaaatggacagtgatgtagagaccatgcagcagacaatagaggacttggaagtagccagtgaccccttatacgtgcctgacccagatcccacaaaatttcctgttcatcgaaacttaacccgaaagg

SEQ ID NO: 36131 - DNA, 1427 bp, Bovine  19866881315483
  misc_feature (1)..(1): n is a, c, g, or t
nctgagtagtattcccctgtgtgtgtggatgtatgttatatatgtgttccatatatatgtatgtatatatgtgtacacacacacacatcttcttgatccactcatccattgattagtacttaagtcatttccgtatcttagttgttgtaaataatcaagcattagccttgagtctttaaaagatatccagggaaggtgcctttgtcaactaatttaatacacattggtggatcgccttctttgtgtagagcactgggttatgctggaatccggacacagacattgtgtttcagaaacaatacagctagaattattgtcatctgtgattttgaggccaatgtagaatatcatatttttttctagaaagtgttccccaatctctgctattctcattgcccatcttcccaccttcacccagcagtctccttggctacgtgttgtcatccaccaaacacactgttaggaggagactttggaggacacctggaccagtgagtggtcttgccttacagacaataaacctgagatccagagcgagaaggtgagatgcctaaggtcatatagctagtttgaggaccttaaaaagtagataataactaggtaactaggtaattattctctagttgctccatcttactacttacacatcagataagagaaaggtaataacacttgaaagtcttccctggtggctcagtcagtaaaaagtctgctgcagtgccggagacctgcagtgcaagagacctgggttcaatccctgggtcaggaagatcccctggagaaggaaatggcaacccactccagtattctagcctggagaattccatggacagaggagcctagccggctacagtctatggggtcacaaagagtcagacacgactgagtgactaatacacacacacaaaaacacttgtgatctggcaacttctcataaccttttatagaacagacttctgtaaattgttcacattgtagtaaagctagaggatgtacacagatgtaagttttagaactatttaggcttaaacttgcttttttttcccttcacagaaccattttgtatctgtgaccaaggtatccggacattttcaacagagaaggtttttaaattcctcatttgggttattttcgtcaccaaaatattttttatagtatatcctaaagtgggcatcacttggtccccctgatacacagcagagatttgagagccagcactgtgacaacagagaggggagacgccgcccacaaagccaaccaggaaacagattcaacaggcctcacttcccactcactccccaaagctgagcctccacccctcccctcccaaaaaggggcaggaagaaggttcagaaaagataatgtgcccatccttcaacaaagcttggctcaccctttgggtcctccacactctcccgtttcctgtg

SEQ ID NO: 36132 - DNA, 1620 bp, Bovine  19866881338272
  misc_feature (1)..(1): n is a, c, g, or t
naaattggcattctctgggtttctgcaaatacaattatgcaaatataaagtctatgaattaaaaaaatgtattattatctattcaggcattaccccctcagagcctgaaggagaaacaagaaatccagtgtgaaaggaggcaagatctgagagcaagatcttaaaggcaagacattttctttcttcataacattaaatggaaaaggaatagaaaagtaacatttctgtactttaatacttttggtgaaaacttggtaattggttcttagctatttcaaacagaactagtaaccagtcaacagagcagtaacaggaacttccttgtggaagaaataaattatctttttcaatggaaaacaataactaagttttttttgcacagcctggatccaattattagcaactctaacattttggattctggttacaaaataattatgcccaaatgacatttggccaaaatgcaacctagcttcagatgtctcaggagttgagttgtgaattaaattctaattaaatgccaaagaatcagaaagaaaataatgaccaagagacagacactgacatgggtgccacgcatctagtcccatgaaggaaacactaaggcacttttaagttttataggtatggatcctctttctcaaaaccccacattaaattagagatgcaaatagttgtttgcagctgaccggaaagttttgaactttgaacgtaatacaagatctcacaggaccaagaacatattattagaaattaactttctaatctaaagaaagatcccttacacgtgtctttacttagctgaatcaagtctcacggacttgcaaatcttttcttaccatcataacatttacccagaacatgcacgcctcatggacgtgaagtatccgagtttcccatgttaagtcctcatcagtgaaagcacccatgtcagcaactgtgggcgtgaacttgacatccgtacttgtatttaaaattgttaggttgcacacatgacctcaaaaaccctgctttagctgtgttgattccagaggcccaagtgtgacctccagcccttactcgtgattctccccaagagacgaatcaaacatcaggagtcactaatatgaatcaatctccttcctgtcaacattcttacctataaattatggctcgtaaggctaaaattgctcataattctatataattaccttctagggcatgaaagcagatgctcagagggggttctacatgcttcatcagaaaaaaaaaaaaaaaaacccaacctgccctcaggaaacaatttggtctgaaaaagtcacaattccttgacagaagggcccaaaaaggtgcttgggttccagctccagttgaaatgacttctgatagtaacaggtatcagtcactgagggcacactgaaggccagatcccgagatgagcagttacaagcattacctcacttaagtctcaaaatggtgctgaggaagttaatcattacttcacatgatgagaaaaccgaggtttcgaacagtggagtcgttggccatcgttcacggctgatgaggtgggggacagggtgagaactcaggcccccatcagagatggctgactggagacgcccaggcccatctgagacacag

SEQ ID NO: 36133 - DNA, 1386 bp, Bovine  19866881362247
  misc_feature (1)..(1): n is a, c, g, or t
ngtccccgcctggtctggctggatgcttctggcagcttttttaggatcgtgcagactttgaaagtgtacttagcaacaccaggtggcacagctgctgctctggcgggtggcaatgagtcatgtcctcagacaaaatcaaagaatcagtggttttcgttttttcaagcaccatgggagtgtttggattcagtgggtgttgtgggtgtctttgatgaggtagtgttgggaacaaaagttgtacctttgtcacgctgtgttaacatccaaaggtgctctgcttatcactgagtctcttggtccctttggcaggtcctaattggattctttaacagcctggctgtgaatgacgccccctcaagttcacatcctcctaagagttcctcttccgcagtcaccttgccctctaggcttcttctgaaaaagaataaaccccagattactgggtcattgtttggtttcagatcactctgtaacattggaaaaaattttgaactaacctgagttattactgatttaggtaaactgtcagagtagtaaaaaagtgaatgtctgatacagcaaactccagaccttacataatcctccaaccactttaactcaaaagcgagggggtgatagtgttatacataaaccccactgcagcatcttaacagttttccacacagctaacctttgatgtcatctgtgggctttgaggcacacatctttaaatagagtagatttggctaactccgagcatgctctgtataatttgagaagatgaacttggaaaaagaaagaaacaaatgtttaaatctaactgtcctggttctcccaaccctctagactgcaccacttacttgaatccagtggggaagcacatgatcgctgacgcccagaacatcaccatcagtcagtatgcctgccacgaccaagtggctgtcaccattctttggtcccccggggccctcggtaagtggtccaagtggagtctacgatggtgggtggtacccaatacagaggtcctaagtgcagtggcctcctggggccaagtaggtcttgacacaagtgtagcttaggtgtgcctctgcacagacactacttgattgtaactcttgctgcttcatgctgtgcttcatggctcatctttttttcccttggctgttatcgagagagatgtaggtttgtaaaataatagtgtgtgaatggtaaatgtcactgaggtctttgcttgtgtgtctcagcaggagtggggggatgagtggcctagccaagaatgtaatggattcaggatccagcatttctgtggccacatcgagatgcaccagcctagccttggcacattttgtgagttgtcaggacaaccccagttttcaggagaaatcacggaatcaacaatttttaaat

SEQ ID NO: 36134 - DNA, 1157 bp, Bovine  19866881364072
  misc_feature (1)..(1): n is a, c, g, or t
naattttatgtaatgttttattttccctcctttaaaacactaacaacctcatataccagcaggtcaaaatcaattatatttattatattaaaaaaaattttagtcatttgaagtactaaagtaatacagtacaaagcttatcataacagactgagtgtcttaaacagggattcttaatctaaaatcctcagaagcccaaggattgcatggattcaattcagagcatctgtgagcttggatggaaaaaaaaccccactgaagatcaattttactaacaagtgaaatttagcacttcctttatgaatggagaccacaaatcacagaagcactagcagacccatgacgtggtcaccataaaaatcactgtgttttcaaatcacagtgtggctggtgagggtatttcaaaatatcatttactcttatcatttcatggaaggtgtatgagatgttggatttgttgccagatcttgttacttaatgcactaattaagcacatatgtaactcttaccacaattttgtttttaaatattttgataactatatttcagtaaaagtgggttttgttctaatcatatattgtattttaagcacatctaaacagtcttggtggtggtgggaggttcatgggtttcacaagatgcaaaaggttaagaacccctggaactcaaccaccccttcctgtaaacccattctcccaacgtaaccactacccacaatgtagtgtatgttcctccctgagtgttccttcaagtggacacatatatacataaccatctagaggcgtaacttacacagttatgtgctctgtaatcacgcgttacacttctattttgcaatacatttacaagtctctatataatttagtcactcatgctgtttccagcttaaggctattattttaaaacactgtaataaaactccttgtatacatctctttatattctgttttttttttaatttcataatcagttctatgtatggaacatttgtgacaatgacatcttcaaattgaaccacagaatcaatattgtattatgaaatcaacagcaacaatagctagtgtattttgtgcttaccaagggccaggtactatatgctctacatgaattaacttattttaatccttataactctaaggcaagacactgctatgatt

SEQ ID NO: 36135 - DNA, 1033 bp, Bovine  19866881364431
  misc_feature (1)..(1): n is a, c, g, or t
ntccaataaataccagtcaattgaattagtgcatgaatcacttcccatgagtgcactaaacaataaacaagtgaactcattaattctatagaaataaatatctccttggatagaattcatacagacctggctagcaaaagcatcactttggcaaataaaggcgaagaagatactttagatttattgacttttgtgttcactagaagatttcagttttagaggctgatgttttgaggtgtgtgggagtaaaagaaatctcatttatgtaactacgagaaaaaaaaaaaaaaaaaggttagtctgctaaagaaagaaacaaaataaacactttcaattccctgcaggatttctaaggagttaacccaaaactttgcatttggatcactgaagataataaacctgtgattcaaacacttcaccctcagctctccacaaaatgagccaggcatagcagtgttaagttagagagctgggtggaggaagacatgcaaatcctgagtattctcatggatcctttttacatttgtaaaaagaatctcatggattctttttacatttttcaaaagttcctccaaaatacaagtactaatccaataatgtaaaaagtttatatacaataaatgtttagggaacaaagtcaacccaccaccttttcttcacagagaaggggcagcagacacaaataagaagagaaagaagaaagagaaacagcttctgttactgaaactaggactatataaccagatcaaagatgaggcttgatgcaattacataagtcatttagaggaaaaactcaattaggtgggaatataagcccggatggtactttctaaccaagattacttatgtaattttcaggtggacagacccagactatgtttcagaaaaaaataaactataagaaaggtatttgtaaacaattattttctagtgactttttactgcaaataatctgtcaaaatagaattaatgataaactgcaaaaatttaaaagcagttgagatgtaatctggtcaatataacaagacttttc

SEQ ID NO: 36136 - DNA, 1438 bp, Bovine  19866881364912
  misc_feature (1)..(1): n is a, c, g, or t
nagaatgaagccagcgatgaagggcaagatgccaggatcggtaactgcatttgcatcccaggtaaaaagctgcctggatttttcagttacatgagggaatgaatttaatttttgcttttatcaaaaattttactaaataatcaatcctaaatgatatactgtctttcatcatccaggtgtctctaagccctcttcctttatttgcagtgttcaaaaccattcatcctttagaccagctcacatgctacctcatccaaaaaccatctgctttcttatgttaaaaaaactctctcccttttttgaattcccggagcattttacatgttggtcttttatgacacatcccttactatactgaattacataggttatcatctgagggctattggcaaactgaaggcaacctggcaaccctgtctaatgacaagatgcttttgacaaagtgagtctcaattcacatctgaatgaacagatgaatcaataaaatgaacgttgtctctgagtgagcagcacactatgggaaggagtcagctttgcttcctgggaagaagagaacaaaccactgctggagatgctgcaactgtacaagctgccagatcaagaagaggtaaagaaagagatggagctcagtaagggtacaagccaggcagaacgagcaccatgcagagaaagctgtaagaacccagaaagcaagtatatagaacattcccttgctcacttcaggtcttcatttagccaagaatgtcatgaatgtctgggtcagctacttacatatccataaaatctctgaactagctaccatttattgtttagtgtatgccaggagctaggtgatttacatgcatcacctcatttagtccataattcagtgagttaggtattattcctcccattttgccaatgaggaaatcaaggtgcaaaaagatgagtatcttcttcaaagtcacatacatactaaatgttggatcctggatttaatctgagatgccagccagtgtgcaaaaaacttaaaaaaaaaaaaaaaggcacaggctggaggaaaggaagataagcagggtgaacggtgagagagaaatgagaaaaggggggaaaaaaactccagaccactcatttgtttaatttgttaattctaagaaccattaggaggtgaaaagacagtgtcttcaataattattactgggaaaactggacagccacatgtaaaagaatgagattagaacattctctaacaccatacaaaaaaataaactcaatatgcattaaagacctatatgtaagaccacacagtataaaactcctagaggaaaacacaggcagaacaggcttgcacataaatcgcagcagatttttttgaatctgtctcctaaagtaaaagaaataaaggcaaaaataaacaaatgggacctaattaaacttaagttttgcatagcaaaggaaa

SEQ ID NO: 36137 - DNA, 1552 bp, Bovine  19866881366232
  misc_feature (1)..(1): n is a, c, g, or t
nttcagaatctaaaattactcacttactaattgctgcagcctgaataatgatttatggcaagaattctaatattacttattacttgtcatattctctagaagaagccttttggctgtggaggatggcaggggtgaagggcagcagacagcttatctcacctatgattcacctactactaaagagtctttgcagttgaaactactgaccttgttctgtcccagcgggctccatcaagatataatccatggatataaacaccatcttctggtgcttccttagaggtatcagaaggaataacctgaaggcagaaacaaatgctagtagagatttcctccctaggtaaatgtctcataaagaaagtattacctaaattttcagaacacgttcagagaaacttgtccataaaatagcttcttaaactatacttttttctcagtgaaatgtaattttaaaataatacagttctttttaaagtattttatctggttttactgtacatcatattgatttctgctaaaatagaaaagcagtgttggattatttgaattgaatattgagatgtataaaaattctctcatggagacagcaaggcaaatactatatactttcttcataaatacaaagaatggaaagaagaagaattatttgcaatgggcaataaaaatatgaattcttcatgtcctccttgcttaaatacatgcctttgaagtaatgatatgctctggagtttaaggagtttactgtacctcaaattcatatcccagtaagtcaatagggatggtatattttctggcataattctgcattgctccagttaaaaaggcttgggtaaaaaagaagcctgagagccaaaacacacaaggttttcctgaattataccagtcctataaaggaaaaacaaacattatgttccttttacttcctcaagaattacctgacatacaattactgattctggtttctgtgtatgctgcccacactttccatcatgggactctctttcctgacaccaaacatacaacctttattggccctcctacctttatcccttttagttactcttcttgggaaattcaaactaattttaacattaacctgaataaaacaaactttacttgttgtgaaagattaaaatcttctgtaaaaaggcaaattaaattatttgagggcttactatattacttaatcccactcaaaagcagccatctttagaaatcctatatattgtctaactacagccctcatgtattggttccaattccttgattctcttaacctccttgcctccacaccacgattctggctccactttagataccctggtcttctttcccaatcatgtgtacctctttttgtttcttccctttctctgttcaatacatctataatgatgctgccagagtacacctctccatgcatggtttggatggctcaacatctcatacaatacttcagtgatctactactaccctaccaaagtaaagcctaaaacaccctcaagtctcccattcaagatacttcataagctggtcccagattggatttatatat

SEQ ID NO: 36138 - DNA, 2699 bp, Bovine  19866881420808
  misc_feature (1)..(1): n is a, c, g, or t
ntgatgtcaagaggagtaatatgtgcattcattgtaattgtagttttcctgtgcatttgaagtgtgggatagtaaaaagcaaaactcaaatggacagagaatgtatttgatttcatagtctaattatcattttaaagaataacagactctaagagtgaaaagataagttacaaaatcaaggcatgttttctctggcaaccatctttcctgctgataccaagttatataattcgattccaggagttagagacatggacgtgactggtttcacttgaaaagttctcatttctataggaatgcttgttcactgtcagcagcctcctcatttgtcctagcatttcatatgctctccttgttagcatgctggacttgaacagagcagattggattctcaaaacaatatgcccagtgtgcgaccagctctgtaatttgacgggcacagtacaaagtaaaaatgagggaccttttgtttaaaaaaagtattaagaatttcgagacaacagagtccttctcaatgcagaccctgtgtaagttcacacgcttacgaaattggccctacacaaagcccagcagactccaccaatggtctcctcccaccaaaccttatatgctgggcatgcttggtgggaataggcgtggaggaggagcaggaactctagactcattttacgagtctctttactccatttcaaccaaatgtcttaggaatgcttgcaatcaaagattccatctatgaagtctgtgaattattaccattcagtgagatgcttttgaccattatcaatgacactgctgtatagttatagaacaatacatttatctgaaacaaaagctctaatgtagcttattaaaaggaaataaaaataattatattaatattaaaaaacaatgatttaaaatgttagtcttctcaaaataaagaatatactttaaatattttttaaaaaatcactagatgaacaaaaccaccatgtataaacagtctctgatattttgattggtaactaagttatttaaaaacaaaccccaaatataccagtaaaaattgagaaagaaaatgcctcatgtggctttttgacccatcccttttattcttaagcatttgctgcattccagctaacattcttaaattgattataaaaagcaagagaacgctcccagtaatcaaaagaagacttacacaagagtgaccgaaaaaacacagtttcttatcttcttctttctccccctaatccaagctttttgctattgatataaaatatttatcctatctagcaactgaacaacagcaacaacaatagtatttatcacgtttagtaataaggctcctagtgttgatttttctatttctgataatatgatattttaaaaagggcatgcctcaaatgggcttagaaaaacatctggaaggatatagctaataaactgttaacagtagcttgccctgggctgaggatttgtgatgaggatagagagaatttttactttccttacttttgcttatatgaatatatgcaatgaatatgtgttcactctatcaataaaaaaatcaataaatttttcaaaaagaacaacaaataaagcctatactttaggtctagcatggcgatttagaatcagtcacttaatctctttagtctcagtttccctacctataaaatggggttagtaccacacagagatgttatgagggaaatgtatggtaaatacactttcaataaatgttccttctctgagcctcaggttctttgcctgcagaatgagggaacttgattagtcgtccatgatctttctgaaagttaatcttcggattccttctttttatattcacagaaaaagactgctatgtgaaaaataaatctctttatttgtgtgcaggtaattgtgtttcttttatttcctgaagaaccaggaagccaaaaaccaatgagcagcacctctggaatgtttgggtaactccaccctgggcacctgggaaatgacagagtatttccactcattagaatctccctgatcagagggggatgggtggtgcggggagagcttttcttattgtgaagaagataaacttcagtttcaagaagacagtgtgtgccattaaaaatagtatatcctctcagttttaatctttgactactccagttcttctctttaattagttcgcttacttatatgtgtttgcaactcagatactctccttaagcagttatgcaagttattcactatatcatctgccattggttaaaatccaatttgatgattatcgaacgcatattaaatgagtttacagagtaaactctgtaagttgagttgtctcttacacatctgaaatgctaataattgcctatctttcatggtacttgggaaataattttgcagttcttcctttctttttcttagattgaaaagtagcatggatcatggcagtggtagtaatgatcagtttatttaaaaaataaaaatcaaagaggaagagaaagctactcattgggaaatactatcattccacatttctcaaaacataacatgctttttatttaattaaagtattgtatggatacagaatcatagagagcaacacccacatggcttagaattcaaaatatctcatgtttgagatgtcttaatttaagccttttttgtgcctaccaaataccagtgggtgaagaacgccttcaatgccattttagcatttccag

SEQ ID NO: 36139 - DNA, 4021 bp, Bovine  19866881456963
  misc_feature (1)..(1): n is a, c, g, or t
ngaagttggcagattggcctgactcaagccactgcatggctcaaaggccagaagaagtgtctggcagcatggctgagggaatggctttggtttcagcagcttagtttgaatgaagattctatacttagatttgtatgacacctatcttctcctgttttctcatgaggaaaagacttaacagaattgttgtgaggatcacacaaaacaatcaaagtgagagtaccaactgcatagcctggtacatagtagacactcaccaaatgttaacctcactatattttcctttaaaagcggaagtttgcaaaagatgtttgagtgacctagtaactgtgctagtgatgacagaagtcaaaagctttcttggattttttcaggcccacatctttgggtgctgaatttcagtagttttctttgtgtggcctccttgtctccccagtgacacagttggggaggctccccgggcagctggtgctctcattgtctagggccggggggtcagggttctggcctccgctgtgctcctcatgtctgttcatcgttcacactccctggaactttaatcttcatgcgtgcatggtggatccatctaacattagggcctggtcctcctcctccacagacactgcaaaacccactgttgtgagatgaagcttctatgctaagaattaagaactggatcatggtgctggctctgtctgtaactaatgatgtaatgttgggcaagtcagttcctctctatgggcctcatctgtttaaaaacaattttgagatacagtctttaaaccattgtaaaaatgtgaagctctgttgaacacagattactgggttctcacctgataacatttgtttacccatataagcaatgctctcttagttatttttaattgcggcagagttttctatgatgaacatagctgtggtggagggagcctgcgctagctaggtaaatgtattcgcacatctttatttaccacatggtgtttgttccagtctttagcccatcatatcggtgggttggaccagtttattctgttgctatggtaataggacaaaaaagacgatgttattcttgcttactggaagaagctgtgtggccagcttcttcttactcattgaaccttttattgttgacaagtgaagtctttgaaactttctttattgacaacgagttttttggtgttagcaaatgtttttaattttgtggcaattattagaatgattggtgttcagaatatatagagcccttagccgtcatatatccagtcccctcaatttgaaaatgaaaaagtagaagcccagggaagtgtagtgatttaataagactttaacctagatcatttctaagatcattcctcatcctatgttttttcctgaactatgtttatttttcagaaaaacacgtctctagaagctttattcaaagaactactaaactcttttatatgaaaggattatttgcaatcatgagttctgatttggttttcatgttgatcggcatccatgagcttaccttctgatcagagtcatctaagctcatataatgaattatttgatgtcttttctccttatgcacatagaaggtgatggcaccccattccagtactcttgcctggaaaatcccatggacggaggagcctggaaggctacagtccatggggtcgctaagagtctgacacgactgagcgacttcactttgacttttcactttcatgcattggtggaggaaatggcaacccactccagtgttcttgcctggagaatcccagggacgggggagcctggtgggctgccatctgtgggggtctcacagagttgaacatgactgaagtgacttagcagcagcagcagctctttacacagccacaaaagatacatctccctcccttgctgtatctcttaaccatatcgtatcatgttttgtcacagtaaagagactttcatggaagagtctacctttatgcttagggattcacctgtggccaaactcctttctgatttctctgttattttttcctgtttcttggcaaacagattccagaacctggacagtttcctccaaatattatcatgtgatattataatcattataaagcttaaaagaatcctagaagctgttggaggacatgaaaactggtgttttgcaagtttactgacagtccaagctgtacagagatgatggggtatgtggcagatacacatgtggccatagaggaagtactactgattttcagtgccttgcacctaacaggtatttggtagagacgagttgaatgaactagtggatagagccactcatgagaaaattgtagccataaaggctgcaatgtctgagtaaatatctgagtcccataaattaataaataaatggctttgtagtctccccaaaggtgctttttaaatggtgatgttcagtagagtcacagcagcattaatgaagagttgttttgagcctatttctatgtgtagtggaaagtatctgaaaaaaaggtgggttccagtggatgactcataccggaagatgtgagggcttgggaaagtaatattagtaactctcaattttgattccacttcataagtggaaagacggtcaccagatgtatgcttgaacatgaagttgcttaattggggacagggatctttgggggtcaagtttccattgagtcctagcccaatgctgtacaatgagctcttcataaatacttattggttagtgaattttaacaacaatgaaaagagtggatcttcccagtgtgtatgtggaattcaacacatgtacccccgttctagaaatatatctgtggcctaaagttgggaagtattaacacaaaaactttccccttttgattaaaagcacatattggtgtctgagtgtggataacaccaaatattctcgttgatatcttgctttattttaaagcctcagatgacaattctggtacgtgcctgcgaaagggttttccttctgaactcctctgcaacctcctattgaacttgaacttagagaccaaacaggagtgggtaagctaaggaaagagtgtcccttacagaacagggatcctgttgtttgagggccgggtgtgtcatggactcttaagaatctgatgatagcactgggctccagacaattttacaagattgacatatgattttatgggtctcacagagcccagccaacaccccaagtgaggaattcctcttaaaaaggaaactggaagggtcctaaggcatggtgacgtatctccgcagaattattctcccaccctccacctccagcacttggtgaaaaatgaattgtgactggagagtccacactattggacagtataattggtcttttttttttccccaccactttacgcagtccactggctgagcccccggcttcctggcaggataaaacgcaaactattccagaggggggcgggaaaagcagactatattttttaacacttttgagaacaatttgcagagtggagaatgctcccagaagccgcctacaaatcttctctcacgtcagaggatatgagtgggatggtttcagggacaccgcttcccccacagcacttttctcatttgaattcgagggggcgagagactcccgagtaaagagctgggtttcatggtccctcaagcaaggcacttggccgaagagccaggtgtgaccctgatgcagggcactgcttagcatcaaacatcctttatcaagaaatatacaaatgttgggataggcctaagaacagtttccaatgaagaaacagtgtaaaagataaaaaggagtatatgttctttgttgcagatttggaaaatgtgagcactagaattcactatactcttacctcaaagtagtggctacatttttaatgtattaactttctagagttatatacacactcacttaaaacttttcaattatgaaatatttcaggcaaagtggtataaaggataatgtaaaattccaggtagctaccaaatgcaactaaagacatgtgcccttaacgacgccacaggcccttaaaaaaat

SEQ ID NO: 36140 - DNA, 642 bp, Bovine  19866881575104
  misc_feature (1)..(1): n is a, c, g, or t
ntcccccgcccctaactgcggcggcgcccttcagacgggattctctgagcagagcagagcatggtttccctcaaggaactcctccccactacttgagctgtatgacaggaagtgacagggggccatcagttacattgtcagaagccgagaaccacaccagcccagagctccccacctccagcggtttccttgccggctgctgcttttgcagagcaccctgcctcctggcattcaaaggcacaccagaaactcagtttctggctggcaactcccagcctgtaaggaacaacaatgcttaagtgggtccccacctaaaagccatgctgggcattccggcagctctaaagggctcactgccaggataccatgctttgtagacccaaacgttggggtgaaatggatagagaagggacactgggaggagaactgtgtgtgtgctcaaagaggaatcaacagtccacttgaacttcacccaagagtcagggccctgcctggcatgcaaagtctatgctgaatcctaatttcatagcaactcaacaaatgagagtgatggtaaacaccccacccatccgttcctttctttttttcctagacaaattttctcttcagagccccttaaaagagttgcttctggaaacctct

SEQ ID NO: 36141 - DNA, 2246 bp, Bovine  19866881794490
  misc_feature (1)..(1): n is a, c, g, or t
ntgttcttttaatttccttgcacagggtgttaactgacccagtcagcaacacagaaggagtctgcagtttaaactttgggcccagtgcaaacacgtgacagggtcactaggtcatgtgctcattcgctgtgttcaccgagcacttccgatgtgcgaggccctgctctgggtgctaggatccagcagcgaacgagccaggcatgctcccttcccactaactgggaataaaaagaaaacaacatattttagactgtgatctctgccgtgaatgactcagacaagctgcagagacagagaccagcaggagagactcacttcagagagatactttaattttctgttttcgggttgactttctcatgagatgcaagcacacagaggcaggatttggtctgtcatgatcacattcttagaacaggctacagtacctggtacctagccaactcccccagaagagtgtttcttcatttcttgttgttgttgatacttctgaccccgctgcctttgagaagcttgtcttcttcactattatccaacttcggggaaggagggcacggtggaggggaacaaacggggtacccattccaccagcccagcaccacccttccgtgcgcatcagaagtcatggagagatgacccggggcagctccaagggaggaagaactgtgtgtctcaaacacctgcatttacatacttggtctcatgggttctcagcctgtttgaagagccagagacccaccctgttattcttgtcccagtcactgaggcgaatgcacagtccacttccctttcaactatgaaaaacagtgcaccgtgggtgagcccagggactgtgctggagtctgggctctctgatttgagtgcataacttaaaaccccagcgtcctgtgctgagcagcaggtcaatgaataatctctgaatgagtgactaaaaaaagaataaataaaggaggcccgtgttcttggggcgacacccttcccttccgctaaccacctggctgccaaaattaaatcaaaacctcaaaagcaaagatcactgaaggctaaaattcttcaacctcaaatttccttggggactcaaaacatgcaagttcatgctataatttttgcttttcaaataagagactctttttcttaaccagcaggggcatttattttccttaaattatacagataagttaaaaaaaaatgacaacttttaccaattacaattttaccaataagttaaaaaaaaaattcagacgttggtccaagtggaacactggtgattttcactcctaatgtgagaagaagtgtcaggtctgttcaagggtgaggcacacacatgactaggcagcaagcatgcacttccctgagtaacaccatgcacacccaggctctgtgcttcaggagcaacgagtccaggattgataacagcccaactgaaatgaaacagctggctgaatccaaccataagcgacctgatttggcatctgaaccctttttctgaacacctatctgagtcagggaggaaaagcagttacggaagggaatgtacgggaacaaagggctagagtatacggtctgattccttaaccctgcaggctacatatttcatggagatgctttctagaggtgctcgggtgctggaaaaacctcatgcttcttggctcaaaaaccgaccaggaggctctctgttaatctgcaacagggcaaagtcttctgtacatgtggatctgagttctaatggagatacaggtctctctggacagatggggaggactctgagactcattcctggtgacaccatccactttcacagcacatcactgttctccaggcctctctgtgaccacctcctcttaggcttggctaccttctgacagcacaaggcagacacataaatctcatcagtaaatggtctgggaacaagtgtttttctgtggttccgggtaaggctctctgccaagagcagtgaccctacctgtcctcagctgatggatttgcagaagagctggtcccaggtctaagcctgtctgattcttattaggctcagcttacagtctctctagacccaaatcttgggatcctttgaggttttgagtcttggaagcagaggagaatcactctcagatatacagtgggggtggagagaagtgggtgcaggaactgggtgtctgctatgagccactcactgtgctcaccatttaaagaactgttcctttccagcttctcctcagcctggcctcagtgagcatgcctggtgt

SEQ ID NO: 36142 - DNA, 1244 bp, Bovine  19866881871359
  misc_feature (1)..(1): n is a, c, g, or t
natgccctgagtacatttcagatttggaatgcaaattgttgtctgtagtaattatagtttgtgccatggccctgctcggcccccatggtcattatcttggtacagaataagtagctctgtgctttcggagtaggaggtaatgagggggagaggggcatgtgaaggacattaaggggtgttttcagaacctgtctccaagcctgtgtgaaagtaggacagacacagatgtgtggtgggatgctgccactgacaagctcagtgaccgtgggccaggacctcaacctctctgagccccactgtcctccagtcgctgtctcagagcgttgccatggtgatgagatgtcagtgatgcgatgggacattcagcaagatgcctggagaataataggtgtttaacagcagggaatctcattgcctagcaaatgcctgaagggtagggatctggagtggaaaacacacacccttcttaaaaggtaattcctgtgcacacaggagtttcctctctcgtcctgcagaggagctgtggtacatccttctcatgcttcttgcgtctgcagaacttgagggctggcttagggtgctggcttgtatcagactttctgtgtgtccttcagtgattccattaacatctcagagctgtgggtcttctcacttgtaaaatagacatcataattgtatatgattcacatgactgttggaaagactttctgtgaaaacatgtaaatttcagcaccagtgcttggtacaaactctaagaatttaatattgttatctcctttgcagagatgaaaaactcaaggtttgaaggactaagtaactttcccgagcctgtagttcatgggtggcaaatcccagactctgacccagcaaattggctctggagtccacattgatgtcattgttactttacccgaaggggatcaaagtctactgaggctcccctcctcagacccttcatttttgttgacacattctttcttcaattaggttacaaccaatcataataaaataattgtattattatattaggtaataattacgtgttctgtagcacagtgttacgtaatattgggttagaccaaaagttcattcaggtttttccattacgtcttacagaaaaactcaaccgaactttgcggccaacccaatatttaaaaataaagttttattcaagatacgtgattatatactataataaatattatatattttaaataatgatagtagcaacagctatttgcata

SEQ ID NO: 36143 - DNA, 1078 bp, Bovine  19866881917235
  misc_feature (1)..(1): n is a, c, g, or t
ngcttcattacctcctaaggcaatccacatcctgcctctccaggtcacagcccggcagagagcggcttcacgtccctccggaaaggataattagctttctaccctttaatcaaggagtagcagattgttgtttttctgaagttttgcctggggagagcctgttctttcccgagcgtgtgtttttctaaccaggactccttgtacgcgccttaccttccaatgagccaacagtgagagcactgaccccgacccctcatctgaaataagaaactggagctctccactgatgagtcaatggcccgcaactccaaggatgtggaatcaggtctcggtcaccccagtttatcaacaccactgacctctgccttatggaccaggagaatactcaacttctctgtcatgaaaatgacacttttaaatgtttatttatttttttttaacacttactatgtaccactatactcagtacttaataaatattaactcatttagtcctcaaaacgattttacaagtaggcattgctattattcccacttcatagatgaggaaaacgaagctcagagaggttaagtgacttgccccaaatcacacaaccaggaggtgcagagctaggattcaaacccaggcagcctgcttccagaaaacctggaaagagaaacggatgtgaaaaccaccgcagaaccagtgacaacagaggaaaggagacgggaactaagatgcttactacgtaccagacccagagccagtgttacagggttggttcctctttatgtgaaatgcaattaatcttaaacaatgataataaataatcagagattagtcttaccagtttttctacatctgcaagtaaaaatccattcaaattggtacactttactgtgtgcacattatgctttgattaaaaaaatagttgcagcttgaaaaagttagtggctggacttccttggtggtacaggggataagaatccgcctaccaatgcaggggaccagggttcaatccctggactggttaagatcccatgtggcacagagcaactaagcccatgcaacacaactactgagcccgagctctaaggc

SEQ ID NO: 36144 - DNA, 1246 bp, Bovine  19866880444876
  misc_feature (1)..(1): n is a, c, g, or t
naaaatttcatggatagaggagcctggcaggctacagtccatgggttcacaaagtgttggacacaactgggggactatcactttcacttaaaaaaaaaatatttatatacacacacacacacacacacacatatatatatatatttgagtctttctattaagttagtttgcctgaaaaaggtggtgagcaaatgccagggttgtaggagtgaacttggctttgtacaataaacatattctttgaatttgaatgtaggtggactcatattttaatttcacagaatagcaggttactaaaagtaatcctgtgtgaatcactgtactttgaatgcatataaacacttctaaagtacgataggcttggaatttttcaaactactttcttttttaaaactgtatagtaatttatgtgaaaaaaatagatcagatgttctttataacagtataaaagtatataacatgcaagtactaaatgtgaagacatttgctttcaaaatgtggtagatatatttttccttttctgccttctattctaaatatttaataatgccatgaaaaaatttaaattgccaaaaacacagtaaaaagcccttttaaaatgacatatttggagttagttactgatcatcatttcaaaaatctggtttaatatccctttaaatataatatttaattaatgaagtaatgtagaaattctcccctgctctctcttcattcatattatatacataatatatgcatagcacgtgtgtgtgtgtgtgtataatatacacagatatacatgtattttgggacatagtcagcctgaggctttattgtgtgatattatgataattaaaatataaaattgctctttggaacaaaatagataaataatttgtctctgtcaatcagaatgcacatgttttgctgttcacttgaagtattgagttaaaaacaagaaatcacagtagaacatctcattgacattcaataggaaaatagtgctgacagaatgctacaagaactacagtggatccaggccaagagagtaaattaaaaacagtcttatagctgtcttaacattttacaaggcaagcagtatgatcaagttgttgagctggcatcataaaatcatttgaaaccaagattcggtttctgtttaagatacacactttttataaccttgctactttgattaaacagtacaacttgaagctttgaaagtaggacttctatacagattgcatacccacagcccactcat

SEQ ID NO: 36145 - DNA, 1018 bp, Bovine  19866880752303
  misc_feature (1)..(1): n is a, c, g, or t
natacacagcaatacatagcatagtgaaaaacccttgaaatactattgggtaaattcatctgcaagcatgacaaaagtatgaccacaaaataagtattttgatccattatctttaagttccctttttattttcaccttacgttttgttcactggagtcagttacaagagtggtgtccagaaatgaaaatgtctgtgaaatcaagtgaaaatagattttttagcatgtatttatgcacaagtactctttgtgtaaaataagaaaggaccacagaggttgtagacatattatttttgctctgatttgaaatatcctctgaaattgttgaacaagtctgaaaacacttttgggagtctcttggtatttagggtttgaaatattaatgattaaaaataaactaaaattggaaaatgagatattcctgatattaaaatgacctacctcacaaaaggtaaattaccaagtttaagctcttggggtttcatgtaaagatgctaaatttttcatggacccatgcaagatttgttcatttaaatgttgaacatatatctgcccttgcacacctgtgtatttgtgtataactgaagcttacatgtagcatttttctagttgtaactgttcatttctataataaaatagttcattggacagtaaaaatttatagaactttttcagtcataatatatactaatatatagatagatagatagattcatggtaatatggaggaaagttgtagttcaaatttgccaaagttttctataggccagtgtgaatgggctagtttagcctgatgtactgtgatgtgaagcattatgaagtttctcttaggctgagttaacactgcagtcacttagattaatggttctactaaaagagaagaaaaactagctgtgtgtttactggtcatttgctaatcctattagggtatggtaattttcaccctagttttgattctgccactaatcactaaatttcattgactaaatcatataaactctctagccctatttacatcc

SEQ ID NO: 36146 - DNA, 724 bp, Bovine  19866880792479
  misc_feature (1)..(1): n is a, c, g, or t
nagaggagcctggtttgctacagtcctgtgggtgtaaagagtcaggcatgactaacacacacacacacacacacacacaccacgtgggtatgttaggaaagtattactatactccaagtgagagaagacagtggatgacaaaggggttaatagtggaactggaagaaattcagaatcttttataaaggtcaagctaatagtacttgcttatagaactgttgtggtatttgtgagaaaaattaaaatgaacagtaaattctgggttttatactttttattcagagtcacaataaaaatgatgatttcactaggggtgcttaagaaaagaaaagcagggttgtttgaaagaggatataattgagaactcagttgatagattcctattgttcacccaagtgaagatgctaaaaagctagtgaatatatacaaatcttgaatgtaatgaagagctcaaggctgatgctattaagcagagactacatttagaagttatttaaagccatgggcctggtcaaggtcacccacgtaatgaatatggacagagatgagaagaggcacgtgtagttccagcaaagagaatgatgatgattatgcaaatggtatttattatttatagaatatgggaaaattctaccaatctgactaaaatacagcactttttataatatctacaattaagccctattttctgaatatttgtgggttttcaggaagtgaatacatt

SEQ ID NO: 36147 - DNA, 1597 bp, Bovine  19866880798816
  misc_feature (1)..(1): n is a, c, g, or t
naattctaggatatatagaaacatatgtaagtattattgtaagattattataattctgtgcaaccacacagcaggctttcttagctacagtgaaagtcaaaatgctcaacctgacacggtggtgatgatttatgagatataaatctctttcagtacatagtaaataaaccagtgctttaacctatatatttgaaaatattcagtatagatttgcagttgccaaaatacctttatatgctgtttccaaagcattatgtaagtatttatgcatgtcttgacttgttccagaaaggattaaatgtgatcaaaatacatactcaacagaataaagtaaaacttggcaaagatgaatgtgattgaagtgctgggtgatacagagaggcaactgctttgattaaggatagagggatattttgactgaatatcttcttttaattcattggaaatcctgtgtgccacatgtgtggaaaaaaaagattctcagaatgtgagggtatagctaagtaagtgtttagttcaatgtttattttacatattagttacaaaatatgtattccttgattttaaaaagtctaaagtagacatacaggaattgtgagcctgtttcctctcctatatggctttcactttttttgttgtgtacagatgtgtcattttacaaagtataaaatgttgggtagaatcaataccgaggctattaggagagacggaagatcagtttcactgatgtattcaacacacatttgttacacatctatggtacaccggggtatcttttgggcttcttacaaaacaatggtggagaaaaatccacatgtgccaggcctctgagaactaggagaggcagatgcattattcagatgtaccaaccactgcataattgaagttctggatggatgccatgcaggctattaataaagctgagtatctgacctcagcagatgatcaggaatgatttccttatttgaagttattttgaacagtggaatcatgcatgagcaaatcaaccaggtaaagaatacagtgggaaaagggactgtggaaacattacctgaaggagggagcattgcaaagcctctgaagttggaaagaaataagttaatatatgcaaatccaattagaaagaggctggttaatacagggaacttcaaaagaagtcagcatattttaagtctgggggagagtgttgtcaaaaggagttgacagagacataggaaaaggctgggtcatgccgtaggagactggattgtgggcattttgctgtttgtgactcctttgctggctaatccactacagaatctcatttagataaaatatgaaaataagactctaatcatgtgcaataacaaaattccgagactcccttacagccttacttggattaggtccttacgttgaagtgtcaggtatgtccccaaatagctaatcagtgtgtgtgtgtgtgtgtgtgtgtgtgtgtgtgtgtgtgtgtgtttaactgttaagtaatcactgaaaacagtatagttttggtttcactatttgtgatgggctcaggagaaatgcttcttctgtggtacttaactgtttctatatccacataaaggaattactcact

SEQ ID NO: 36148 - DNA, 2860 bp, Bovine  19866881008518
  misc_feature (1)..(1): n is a, c, g, or t
ncggacagactgagagactgaactgaactgaactttgtggaaataacaaacatcatcacaaaatgtaatattttaccaaataattaagtaattggcattctgagacattcatattacttccatgaatttaacttacttctgtgcccttttacatcatgtgaatgaaaccaaaatcttagtttagatataatgcctagtaattttttacatttttttccaaaagcagagaaaatatgttggtttaaattgcaagtgtatttggtcctagatgggatggtggtttagtcactcagtcgtgtctgactcttaggaacccatggactgtagaccttcaggctcttctgtccatgggatttcccaggaaggaatactggagtaggtgtcatttccttctctagggaaacttcccgatgcagggagtgtacccggctctactgtactgcaggaggattcacaaccgactgagccaccaaggaagccctagaaggaataacaatgtgattaaatagaaaagtggatataagcatgcattttcccttcaaaaatcagaatggaacacatcataataaatatgattctaggggaagttgggatcgcattactaaaaataaaaaaattccttacaatgactaaaagaagagaaagaatttgcagacttgctaggaagggggtgataattgcttcagtgaatttaataatgtaaaacccttcaaaaatactagtggttttgattggagatctactcaattcaagaattaaagtgcctgtaattgtgaatagacaacttaaatatcccctaccaaggagatataaaagcaattgtattcatataactattaaaatagtattatatattgagaaatgaaaggtgtttctttgattaattttatcttcaattattttatatttgttacagaaactataattctaagtagaagacataattagaggaaagaataagatttttttaggagagtataaatttagcaaggggaggtgaccagcccttcgtttctcacatttgattaagggatttatgcttttgcaagatatattcaggctaattaaaatcatgcttgtgttttcattaatgggagcagaacagaaatttctcaagctcatgaatatatatatactatgtgatatcaagttaggttccagttttgatcatcagaggtaagaaaagtaaatgattcagttttccttttatgaaaaatggatttttttttacttatttacttttaacaggaaggaaaaatgtttaaatatacagagacttgcagatatacagagatatacagatacatagagacttgcagatatacagagatctcagtttccctttggaaacatactttactgaataataaatgttaaaatagtaacattaaaattctgcaatgcctgccttttttcatttagcaagaaaaaataattcctgtaccctcaccaaggtctaaaatgtgaacatattaaatggtgtttcgaagttaggtttggacagcgcccttttcagatccttttatatgtgtaccaatttttttcataaaatattgctacttgttattaaaacaatattaatattagtgactcaaatactttggccatctgatgcgaaaaactgactcgtttgaaaagaaactgatgctgggaaagattgaaggtgggtggagaaggggacgacagaggatgagatggttggatagcatcaccgacttgatggacatgagtttgagtaaactccaggagttggtgatggacagggaagcctggtgtgctgcagtccatggggtcacaaagagtcagacattactgagcaattgaattgaactgagtaataataacagcaagagtaaatagctaccattcattaagaattattactgaaacttttctgaatgttttactgaaattaactaagatcctaaataatgtagccactatcttcattttacaaacttaaagattaaggttttaaaaatttaatcactttcccaactttgcagttattaagtagcaaagctgagaacagaaaaaatatccagcactgtccaagtcttatattatctgcaaaaagacagtgaaagacatggaaatattaggaattcaaattctatcctaagacaacccagaagggttcacatttcttatggaaaaaaacaagggtggtatatcactgcaaaggaattgccgtgttgcaaaatgagaatgagattctcatctcacaggcagagtaatgaggctatggggcttccctggtggctcagtggtaaagcatctgcctgccaatgcaggagacacaggtttgatccctggtccaggaagatcccctggagaaggaaatggcaacccactccagcattcttccctggagaaccctgtggagccttgcttgtcacagtccatggagtcacaaagcatcagacatgacttagtgacatgaccacatagatgataaagttgctgctgctgctgctgctgctgctaagtcacttcagtcgtgtccgactctgtgcgaccccatagactgcagcccaccaggctctgccatccctgagattctccaggcaagaacactggagtgggtcgccattgccttttccattgtgtgaaagtgaaaagtgaaagtggaatcactcagttgcgtccgactcatagtgaccccatggactgcagcctaccaggctcctccatccacgggattttctaggcaaaagtactggagtggcttgccattgccttctctgcatgataaagttaggaagtgaatacaggccaccagggaactaaagaaagataacttttccacatgttttgttttaatattgtgaagtttcttagtgtttgagcaataaagaaa

SEQ ID NO: 36149 - DNA, 1849 bp, Bovine  19866881237862
  misc_feature (1)..(1): n is a, c, g, or t
ngtttcccctgtcttctacaagtcgttgtcttaatcccttttatacatagtagtgtatatatatcagtaccaacctcccaatatataccacctcctcttttccccttggtgcccatacttttgttctctatatctgtgtctgtgtctgctttgatgcagacaacatgttacaacaacaacagaaaattaccaattcaaaatttgtgcaaattaatttattaaaatagtgttacctgtacatatattttataaaatggttatgatattttgctgctttctatgttctgtcgtgaaactagaggccctgctttcttaataaagttatgaaatacaaaattcagaaaaaattataaaaatttcatctcaatgtcccaaagcatataaacttgagtgcttaaattttagcattaatattatctgattacaaggaaatgaactcttaagagtattcagttgcttgcctctttatatcgatgaaatcacatagaatttttgttatctttgttagtatctctaaaataacttctgcaaaaattctctgctgcagagcccagtcgcacagacctcacatcattggataaggagatttctggcctaaaggatgttacatttttctgtattttatataaattttcataatcacttgtctattgcttagagatgaccatagaagtatttgagggtcttcccatgaggtgctactggtaaagaacattcctgccgatgcaggaaacacaggcaatgtgggtttgctccttaggtcaggaagatcccctggaggagggcattgcaacccactgcagtattcttgcctggagaatcccatgggcagaggagtctggttggctacagtccacagggttacaaacattcagactggacatgactgaggtgactaagcagcagcagcaatttagaatatttgatcattttgttatcagttatagagtatataatacttaataccattaattttcaaagtaatctttataagtgagtgatcaaattcactgatagagaagtgatacacgtactcaggagactcagttcatactcatttgcataagtactttttaaaggcaccattaataagtacacttatttaaggtttgggggcatttgtcgaacttcagtgaattagatacccaagtactcttcacatctcattttcccttataccccttatagttaggagtaagctcccagcgaaaactctgcaaggcctatttctttgcagtaaaatcaatccattaaaagtacattaatatgaaatctgtgttaaagtttctcctggatacaaaatttatcattactcaatgaagaaataaaaagctacaaagttagcattaatcaaattggtagtagcacatgatacatattaaccaagggcagcctttttcaggctgcagtcctttacaaacctataaaaaagaattaagtgcaaataatttatattcattaattattccaggaagaacttttattttgccaaaagttgttattctacttaaaattactataggcatgtggaaataatatatgactgtgtttgtgtaaaaagaaataatcaagtttatctttatcagaaacactatgagatgttgttgaaaaggaattatccaactgacagtataaaatcaaaatatatgtattgagtatacttatgatttcagaaaagctggaggtagcacaatgacagctagagtattgataaatgacttcttgaataaggagattatgaaaagggaaagcttggctaacaataaggactatgtcagtctgaagcggaaaatgaaacaatggtttgctaagaacaatgaagactgcagctatcctgaaaagaaattag

SEQ ID NO: 36150 - DNA, 1249 bp, Bovine  19866881410171
  misc_feature (1)..(1): n is a, c, g, or t
ntctctaaagttaattggactgttcaagtcatagaatctttgaatgagcaatgaagagtacccaattaatattgatagccagataataaggtaataaagtctgaaggagactaataaaacctcaatgcaaatatacctccacaattatctcagtgtaatataccaattacagtacctaccatttatcatgatcaacactgactacttttccatttgccttttatatatacctgaatctcttttactactgatggaaataccttcaatacatgcagttgtagtgggggagtgatcttctgctaaattaatttgttagaagtaatctactgactgccaatgtatcccttccatactcagacactctagttatttcaggtgttcaaactaatagtcctcccagtaataatagggatcactcaaacctcctgaggaccacttgcatctcatggtttatggcagacagatgaaagaattttccatgatacatctctgaaacagggaaacaggatactggtggctatcttgtgcagatagaagaataaagagaaaataaattttatcattgcatatagatatgaagatttagaaaagtcatttggaaaatgaagaagaattaatattcatctaaatagctagcaaactgagatagcaaattcatgggaatttttaaaagtctggttttatttacttagcatttttcatatttcttctcattttttctttctcactgagtcctgtagttattgaaaatcaccttcaagactgtatctgtcctaccttttatagcatatgttacttctgaataggtatactgaaacaaattgtttctaagcaattgagaaactacacctggaataagaggcaatcacacagtagaaatattggcaaatggaattgtttaccattgtatgtaatgggacagctcgcaatgatttggttttgtgtttcctgcctaccaagaagctaaatgtagatgctattttttcttggcaagtagctcactttcaatttcctgcaggttaaacattcttttgaggtttctttgtagtaggttgttgattttattttatgtaaaagacagacaaagtagtagtagtatgtatatatatatatgtatatatatatatacacacacatatatacacacacacatttactaggcacatcacagtacagcttatttatattaataagaacatattaaactaagaaagattcctatgcctatatgtttgcagtggtcttacaa

SEQ ID NO: 36151 - DNA, 788 bp, Bovine  19866881425138
  misc_feature (1)..(1): n is a, c, g, or t
ntttgcttcttttcctgttcaaatacacctttagattctatcaagatcttagcaagaaatgtactcaggatcacagtgattattttaatctctgtattactagaaaataaagaacatttaagaaaaaaacactttaatttctcaaatcattaatggttttaaagatccataattgttcaacagatatgaaacaccatttttttcaacaaatgctttttcaataaaaattgaacatttcccattttgttcttcactgaaatagtactatttaatctttctaattttttattatcagcttacagttttttattatagaaaaaagtaaatctttgcctcttttcttgctaactttactcttataactagaggtacatttttttatcctcactgaaagcattatttctctcagtattccccttcgtttcaattttggaacctctgttgatttttctctctctcttccttctcttgctctctcatcttttcttcagtctcaatctctcctctcgccttccctccctctctctctcttgttcattgtgcttttgtatttatatttttaggtacctcaaagttcttcaataatgctagcctttagtttaccatcaagcaccaggattcattactgccaaaggtcttcaaatgtattatcataacactttctcttttcctctggctgatgaaaataaaattacagttcaccctttagtcatgtttcattaagaattcattttcaaacacagcatactaataagtttcttctcaaacatccctgggatggtcaaaat

SEQ ID NO: 36152 - DNA, 1385 bp, Bovine  19866880357108
  misc_feature (1)..(1): n is a, c, g, or t
nctaggctgctctgggtcctcctggtgtgctcaggcacccaggccatgaagagtcaggcttagcccaccccagaccctcacggctgggaggccggcgctccctgcggagcactctgggacgacgacgggcaatcacgagatgtggccaaggggacgtgggggtggtgcactcctgcaagccaagaaatgcctgactcagagcattttaattagggtcagtcccactctctgctccgagctgaaagagccaggccctctcggccttgcctctctcatagatgcgtagccatgaaatgatttttagttttatggttggtatcaagaaatccttccagaattggtccctgatagctaacttaagggcagctctgacaggttaaaaacagccagaagaaaatgagccggttacaggtgtcctcccatctttctccctggtcagtcaagaccaaagaggctgtgatgcagcccagcaaacagacagggaatctggaattttgctcggctggctactcacaggctgtacagggtggagggggtagggcggcatgggggcatcccattcctatatttcagagcaggataaaacccctgccccaataaagccaggagagtctgcgaggctggagagacccagggctgacgacatgctcacgtgaaccgcccaaccactttggggctccatcctcgctcagcacacacagacctcaaacacaggagtccctcctgctgccagggaggaggtcgccaggtaacagtagccaccctagtggctccatggagaccagatgtatttagatgagagtgtttagagcagcgtcctcagtccaggtctaggaagtagaaatccaaaagcagaagagaacccaactgaagggagggtgggccacctgacctcagagcaccttttacctattaagccgatggtggtcctggtcacacaagctcaacccaggctcagagccaccatgagctacagggcctcctgggacacttcatctctggggctgcctctcaagggttgtgggtgcgctgagggcgatggacgaggcctgtggggagtgagaggcttctgcctgacttgcctttgggattctagccaccgagggtctcctgctgggtcaaaccatgcctgtggtccttaggaacacttgctcttctttccgaggcagacactccaaggacaggcagacatcaggacgtatgataccatctattacctttggggtcagaatggccccatatcttgatgcctggacatgcccagggagagggacccaaggagggctcgtccttggcagagatggcaggagaagtgttggggtggctgcccaccctgattctgcaccagcagtttgctctggcttcagatactgcctctcatggat

SEQ ID NO: 36153 - DNA, 3177 bp, Bovine  19866880372509
  misc_feature (1)..(1): n is a, c, g, or t
ntcaggtggccaaagtattggagtttcagcctcaacatcagtccttccaatgaacaccccaggccagatagtaaatatcttagccttttgggaccaatctgtcacaaccattcagctctgctctggtaacaagacagcatgcatgtgtgctcaatcatgtccaactctttgcaacccggtggactgtagcccacccaggctcctctgttcatgggattatccaggcaagaatagtagaatgagttgccatttcctcctccaggggatcttcccaacccagggattgaacctgtgtctcctgcgtcggcaggtggattctttaccattgagccacctgggaagccccaataggacagccttagacaatgtgtaaacaaatgagcgtggctctgtcccaatagcatttcatgtagggaagcaggtagagggcagggtctggcctttgggctgtagtctgcaacccctgtgctaggctaacacaactgggcctctggaggcccaggttcagggagacctcaacgactaattgctgatgttctgtggtgtgtgcatgtatcgggagtgtttggaaggatgagaccctctctttccagaaccaccatggccctcccaatgttcagaaggatccagaatggctatgttttggtgggacgtcctcagactctgccaggggcttggccagcccctctaactctgtagcctctactgagctcctggctataaacatgagttattcccactctcagggctgagacagaggggaaataaaggccaggattgatggaatcccagacataaaatctggcaccataatgcctacattttggaaattgcctctaattaatggtttatggccacaaaggttccctccccccacccttcatccttctgtagcatcttctccctggtgatcagtcctggggatgggaacagggagggggtgaaagaggagggctagtgaatagctggtttttcagaaaccaaaatgtgtggttttgcttatatgaacccagcttggcctctggcattcctcgagcctggactccataaataatgtgaattgaaaagccagctccctgcacaggcctgaggcctgttagctacagactcacccacacacacgcacaaaaacacatcaagctcaggaaaacacacactcacaagtgtgtatacacacacacacacacatacacacacaccggaaatttgcttttttatttttttggtccacttatcagtctctccttcttcctgtttatcttgctgtctttgtgttccgtggcactatttcttccctgaagttctgctctttgagtctctcttccgttctctctcctgtctttccccttcccatgccctttgatctcccctacttggggacacatagccaagctacacaaacacacccccagctgcccacctcagcagagaatccacaaatcctcccctcccatcacagacacccctgcccctcccacctggaccaggcttgactctaaccaggacaatgaacttctgcccaggtgcaagaagttcaattaggttccctccctaagcacctgagctgaactcaaaccacatttcatcccaggaatacaaggggacggaggcaactctgccaaattctaggtatagccaaaaatattgcccaagccccagggtagaggccctttattaccaataatagccaccttgactgagtgtctactatggcttcatattcagaatatataatagtcatgttaacctaagaggtagatattcttattattctcattttataggtgggaaaactgaggcttcaagaagtaaaggaatttgcttaaaaccaaagtctgttcaactccaaagcctagtctcttcccacatgctcagtcacttcagtctttgtctgacttattgcgaccctgtggattgcagccctccaggctcctcagtccatgggaattttctaggcaagaatactggagtgggttgtcatgccctcctccaggggaccttcttgacccagggattgaacccacgtctcctgtgtctcctgcattgcaggtggattctttaccctgagccactggggaagccccagtctcttcccacagggctggtccaaatagacaacatgggttgtgtcttgggatctgggattaccagattcagccacatatggtctctcatctccccagaaacatgtaacagagacatgactccaatacaggaataaggcagaggttctcaagtctagccaacaggcggacacactgttcagatgccagtggtcagcagctgtacacccaaccagaaaggcttccctgccagtcaagcctgtccttgggggcccagctctagcagtggagggaggggaacacctaggctgaggcccctagccaggcaaggacttggagcctcccaggcagggctgcagaggcagccgctgtttctgcattccctggcgccatggcaacaagagtgctcaaattggtgacccgcagagtctgtaccatctgctgttttcggggctgggggttgcagggtcaccttctgtctgcctgagaaaggaaatatagtaatgtggcaatgacctctcacccttgtctatgcagtgtagaaaggccccatcagcctcgctgtcactgagtccgcagagcagcccaggggtggaggcaggcagcagagagcagtatcacgacaacatgcagagatgggcactgaggcatgaggcaccatctctgcccaccctgcgttaggtcgttctgcctggcgccctgctggaccagcccggcatctttcaggccaggtggctgtgggccccgaagggctcttagctgggtagttaggtgttggggagaaaggtttcggtggagctgagatgagggaggtgggtatggtcaccaagctgcagttccccaagagtcgtccaaggcgtttcaatggagggaggcaagtgactgggggaaagggcttcatacaaactcagtgacttgaagaagtaaggtctttagtctgtgggggtttttttgtgtttttttttttcaatttcaaaaataatatagccaatgcagaaaacttggaaaacagaaaaatatgcacacacattctggcacactcacaagttcatgacacacacacacatgttcacacacaaatatcatccctttccagagataaagacttttagca

SEQ ID NO: 36154 - DNA, 838 bp, Bovine  19866880397257
  misc_feature (1)..(1): n is a, c, g, or t
naaaaaaagcgagagagcatcccaggtcctgccccctgccttagtcccgcccctccagactcccacgtgaacccaccagcaagccttgtctcccagcacctcctgctcccagaacgtgacatcacttccggcaggtgccccacccagcctatgtgggcgaaggggcggggtctcaccatggccagctccgcctccagctccttcatccggttgtccttgaggtccagctgggagcgcagtgctgtggcgtggtccgtggcctccttggcttggcgccgcagctcccacttctcgcgctccagcaggtccttctccttagccagagctttcacggcatcctcgctttcctgcggggagaggccagcattaccaggggcatgggtggggccaacctttggccaggagatgcccagaggcccttgacccctggactagtagaacgtgcgggggtgggggtgggggtcccccatgctcggggcctggaggaagaaagccctgggttcaagccagtctctgccacacactagctgggagactggaacaaagacgaaccattagtagatgctcagccattattttttagtggataaatgagcaaacgaatgtcatgcataagttcttttaactcaagtctttgtccgtatttgaaatgggggcagggaatcaacactactctatcaaaaaacttataaagattaaatgactccatgtgaaggaaatagtcaaacggagtctgataaagggtcaacagtgggtttgggcttggtcttctgtcctattgtttggtaatgtgtatgtcccgggaaaactgacagaggagacatctacagcccggcca

SEQ ID NO: 36155 - DNA, 1082 bp, Bovine  19866880470448
  misc_feature (1)..(1): n is a, c, g, or t
nctcgagcttctacagctagtgtaacttttcatgcaggtcccttggtgaacatggatgcatgtttatcgggcaggcacgggctgcggtaggaactgtttattccttttttacaatgtgaaaatatgggatctgtgacggcctccaggtcacacctctcctgaggggccaaactggctttgaacccagacagtttagctccaggatctgcttcctgtggctgctctccttctgctgggactctgctggagagagggcatcgcaagaccagcccccaaatcactgggtacccagggaaacttcctgaaggctctagagggcctgatggaccaccttgagagtatgacaccaaagcccagagagggtgtgtgagttcccaaggccacccagcacactggcttgcacccttgcatccttcctccctgacctctgagcattccctgcctcctctcagggcccagccagcaccatggtctcgtctgaaatgacctcacactaacatgagcctgaataatagtttacactgtgtggagcatggagcctgtgggccaatgctgtgtttccagaaatctccccccgccccccggagtctagggaatgtcacagttccgggcccatcccctgccactatttttagtggtgatctggaggaaggaggactttcctggacttgccttcagagtctggaaaacaaacaccaccccctccccaccctcaccctcccagttcccctggcaggaagcgggagcccggattcccgggcctgccactcaccctccatgcttctgcttgagctctgagctcttcagagctgagggacgggcggcagcaacagtgtgcccctgccctcaggtaggacctcagacagcctgcaacaggtcccctctgccccctacagtatctcttcttattacactgtctgcgggtgtctgatcccctcctgagggttggccttgccctccgtctcaagtgtttcccagggccccaggacttccctgatggtccagtggttaagactccgctttccaatgcatggggtgagggttcaatctctcattagggaataacgtcccacatgctgtgg

SEQ ID NO: 36156 - DNA, 1335 bp, Bovine  19866880565763
  misc_feature (1)..(1): n is a, c, g, or t
ntcctctttcctcttagagaggcatacctccttctgcttggttatacggttctccagatcttggcacctttttcttttccttctctatggcctcctttgctttgtttttctcataggcgatgctgctctcggaaatctggaagtcaacaacaagcgttatgagggtgtgcgcatgagaaaggaagggaagtgacacccaaggggaaagctagcattagtaatagttgacaccagtgagtcagggctggggagctagagctcaaggaagatgatgcccgttggagagagagacatgagaaccggaagtcaagtcgtggttagttatgtcctcaacagagagagttattcgtcattcagggtttctgggctggtgtgcaggaagtgacaggctggtgagtgctcaggtcaaggcgtttgattctgagccactgactgaactactaaacggacagacggtggcaccaatgtggtcctttgttggtacctggcttctgggaggtggggcaagtgaggccaagggcaggggtgggggtggggggatgcctcctgtcccagtaggcctgaggtctgtggtttcaaaggacaccggcggtctctctccaacctacgaaggcttgggtctaaaaaccgaaagtccaggacagtttgctgcagagaacatttaccccatagatcctgagatggggaggggattggaacccagcctcacctacacaagccccaggagggacacagccagagtggggtcaagaaactatttgcagctgttgaaactcttggagtgatgcctcccacataaatataatgtccacgagaacattttaatgaaataaataatttatctatgcataaacaaaagactggaaagatatgtaccagaatgtaaataatggctattttggggcaattgagattatggtcatttatattttcttcttttcactggtctggatcttctaaattttctttagcgaatgtgcattattgggtaaaaagggaaaactattgaaaactgttatgctttggggataggtggtcctggagaacagatgatcttcccaacaaccctttgattctcgcatcgcgcccttggcctccatccccactgccccgcgctgcacacaggcctcgccgctgcacctggactctgattctcctccctgcatgggcttggcattttcccactgccaagtctgcctgagaccatccagtccccaccctgccaggctgcgtcctgcctgatgtaagaggccaccgcatgctctgtcggagggcgtgcgcccttctcttattttgtgctgctggaaaattacagatgaaaatataatgacgatg

SEQ ID NO: 36157 - DNA, 2458 bp, Bovine  19866880605698
  misc_feature (1)..(1): n is a, c, g, or t
ntcgtgtccgactctgtgtgacctcatagacggcagcccaccaggctcccccatccctgggattctccaggcaagaacactggagtgggttgccatttccttctccaatgcatgaaagtgaaaagtgaaagtgaagtcactcagtcgtgtccgaccctcagcgaccccatggactgcagcccaccaggctcctccatccatgggattttccaggcaagagtactggagtggggtgccattgccttctccagcccagcaatagggaaactattaaataaattgcaatacatctatatgatgataaattatgtggccattaaaatgataaattgtgaggatctgaatgttaatgggaggggcttccctggcattctagtggttaagaccctgagcttccactgcagggggcacagattcaattcctggttgtggaactaagacttccacacgctgtgcagcgcagtcaaaaaaaaatgaaagaaaaaaaattgaagtgttacgggaaaatgttgacaatgtactttgactaaacaaagtaagggatgaaactgtttactatagttcaggccacatgtttaaaagatatattttaactataagaagaaaaaagtttaggaaaaaatatactacgatgtaaactgcagctatctgagttattaggtaataaataatagtgttcttctttctccttttgtgtatgttacaagtaatgaacatgtagtatttaacagaaaagaaatatatgaaaactacctgtgaaaacaagcatgccaaaatcagctacaaaagcaattttcagtttctgttggtttaaaatagtgttttacaaaccacagaacatgctgtatgcagcttcatttccaggatcatacagttactgctattatttggtatttaaatacgcctttcatttgagagtacttacacaccttgcacactttttttttgttaaccacatgccacctacaggggtaaattataacaatgtttcaaaaatgcaaagatattaattgcaagtgaagttaagttcctataattgtttgaaatttctccagccaagtctgcatcaaagcatcaaacagggccatgcctggcttccaagcccacacttgtgttaagagatggaacatgcccagctttaatcacatgtagagattgtgtctattctaaatttgttatcactgcattataactattacaacgactagagctgttaaaaattaacaccttttcccattgtaccctcatgcacaatccatgccaatcttgaaaaactgaaatataaaccagtgatctttaatgtgggtcagacattcaagatagttcttcaaggatgcaggaagaaaatagaaaatattagaattttcatttccattttaaggaagtttatccttccttaaattctatcctgggcctgtttatactgtacctaacgtattacttcatgtatgtaactgatgtttacagctattatatatccatacatgtaatatacatgcatttatattatgcatataccactagttcatatatattaattatatgtatcacaaagatgaatatttcaaaacattttacttagaaggataagtaagcaaaaatgtttgcagaccagtggtctgaaaacacagtgacaggaagaaatagtcaggaacaagaaaaaaaaaattcctttagaaacggcatcagaaatggaggtgaaggaatgagaacagagaaggtaaataaggacagtaaaggtaaagagaccaggagaactctgagagggagtggggggaggtgagaaacaggggagaaccctgggaggtaacgcagtggaagggaatacgccaaggaagtgaaaatgatatatatgtgtacaaaaactacaatgatgtttactattatgatttggtgaaaggaaatgactcaaatgtctagggtggatcctgttcctgcctgatgggcaagcaactgaaagacaaccgaccaccagacatcctaaaatagacactgtattaggttacaatggagccaacagaagaaacttgaaaaacaggagttgtttactggctacttaagacaggcttaacaccagtcggagcccaggtttccatatgctaatttggcttgggaaggaagtaaatgccaaaacactgacgatgaataagaaagaatttggagttagcctaaacgttcaattagcaaggtatttcaaacctgccacgctggcaggacagtgcgtgccttgaccatacaattaatcgtctttgactctaaccctctctttatttacatttttggctacagcaatttcaaaaagtgcaggaatacagaaatcacaatctttgtcttctctcaagcccaacaacaaaatcaatttacatttttttagtccacttactaactggtgattgtaagcagggtaaaaagaacagccagagggaagagaaaaactgaaaaaagccaccttaaaaat

SEQ ID NO: 36158 - DNA, 1711 bp, Bovine  19866880617831
  misc_feature (1)..(1): n is a, c, g, or t
nactttgtacaaatgtaaatataaaaattaaaatatactgcgcactataattttagaagctgtactttttactgagcatagggattattcagtaaaaatttgctgaattaatctggccctaagaataaatttcttttaaggcgggtttaaatgatacaaaataatgacttagcattgtaataaagtgttgtcaatttaaaaaaaataaataaataaatttgcaaaaaaaaaaaaaaaagaaagtgaaagaggagagtgaaaaagttggcttgaagctcaacatccaaaaaacgaagatcatggcatccggtcccatcacttcatggcagacagatggggaaacagtggaaacagtggctgactttgttttggggggctccaaaatcactgcagatagtcattgcagccatgaaattaaaagacacttactccttggacttcccttgtggctcagatggtaaagtgtctacctacaatgcaggagacctgggttcgatccctgggttgggaagatcctctggagaaggaaatggcaccccctccagtactcttgcctggaaaatcccatggatggaggagtgtggtaggctatagtccatggagtcacaaagagtcggacatgactgtgagacttcacttggtcttagtcactttactccttagaaggaaagttatgaccaacctagataacatataaaaagcagagacattactttgtccacaaaggtccatctaatcaaggctatggtttttccagtagtcatgtatggatatgagagttggactataaagaaagctgagcgccaaagaattgatgcttttgaactatggtgttgaagaagactctttagagtcccttggaatgcaaggagatccaatcagtccatcctaaagcaaatcagtcctgggtgttcattggaaggactgatgttgaagctgaaactccaatactttggccacctgatacaaagagctgactcatttgaaaagaccctgatgttgggaaagattgagggcagaaggataaggggacaacagaggatgagatggttggatggcatcactgactcaatggacatgggtttgggtagactccagcagttggtgatggacagggaggcctggcgtgctgtagttcatggggttgcaaagagccggacacgactgagtgactgaactgaactaacccaaagcaatctacagattcaatgcaattcctatgaaaatgccaaaggcttttttcatagaaatagaaaaaatcttaaaatttggaacctggctctctggccagtgatttgcctgggcatctccatgcactgggccagcggcctctgagaccatctacaggagtgcacagggagccagcaggtggtagccctcaccagggaccctccagtgagcccagtgggacaaaatccagcatatgcatattgagacaagtcgaaagatttattatgaggcacagaagcagatagtgccaaaaagcaagcagtagttggtacacatttagagtagggcagcatttccttctcccactgctgctcagatggcagacattagtcaaattcagtatgaaatggcattcactgaaggcattagtgaatgagggtcctggaaaaatttaaggtagcaccaccaaatgctgacctggaacaaggattccaagaaggagtttcaaatgctagtgtgattctgcagttccagagagaat

SEQ ID NO: 36159 - DNA, 723 bp, Bovine  19866880621913
  misc_feature (1)..(1): n is a, c, g, or t
ncccgggtcagggagcctgggcgggggcaggggaggaggacaggccggccgccagtgtggagcccacaggggcttccagaaggcgccatctgggatttttcagaggggcactgggatcacgtcctggtgtcctgatgtgaaattggatcctcccgctggaagtcaagccccaagccaacggggggcagaggggagggcccttccgggcctgggatgctttcccacactccaagggcgccccggtttccagccaatcaagttaattgaaaaattaccttgggctgagaaagagcagacccgggacacgtgggctggttcacaggaaaccctgcttggtctctggcatgactatatcttcaacaacctgtatttggaaggccagggaccgtgctcagcaacccaggaacagaggaagctccacatgccaggcacacctcggagggtaatgtgatgcccacattacagacgaggagacgaaagcgccgaaaccagggctggctggctcccctgagatgcttcttcccagaatgctcttcttccacttgcctgggggccccccaaccccaaatcctaacaaacagagctcaaatggaaatacaggatgtacaccagctagcaaggccggctggaggccttctgcccaggctggagcaaaagcatcttcacattcagaggctgcctgcactcgggctgatactgttaagctgagtacagtacttttca

SEQ ID NO: 36160 - DNA, 1655 bp, Bovine  19866880752822
  misc_feature (1)..(1): n is a, c, g, or t
ntgtggggactgaaggggttcatacgtgacaagcacttagcacagctctggctccagaaacggcagctaccagcactatcatgagatttagttacttttatgaagctcctactatgtgccaggcagtttctctccacacctctatgctcagcaatcctggggggtcagttatggccccacgtgactgattagagaacagggactataaacgtctgggcactggccaggggtccagccccccatccctgcgcttcccacacttgactctctccaccgccccactagcctctcctgagtctcagctctatttattgctcaagggtttctcctgcagccaggggtggctcagtttcagaggaagtgcagataaagtgtccacacttggacagaaacgagggctctggatctcggtctctggcagctcccaggcctgtctgggctgcagctcaaaccgcggcctgaaccgctgtctgcgtcaatcaagcatcaatcaattaccaggtctgggctcccgcccccagggggacagtgctggccgcagtgccggaggatcagccaccaaggggaggtgacagagagcagggagaagcaggtgctggagtgggaagtggggccccagaggtggtaacactggaccccctcccccctcgggggagtggacctccaccatgtgccctgggctctgggtcactggatcagctagattcttcctgggtaaaccctggaggtttgtgctcacagcacctctgctgagactgacccgagtccaagccccagctctgccatctgcgggctaggtgaccctgttcaagtcacatgaccccaggcacctcaatttccccattcacaccatggagatcagacccatctcaggctcaaggcaagggttaagtgagggtccacaaagattctgagcacagaggctggcccacaataagtacttaattaatacacactaattacagtaccactgctgaattattattattgttaacatctatcattagggtttgagagtaaaggagattatggatatataaaacgggctttccaggtgttgcagttagtaaggaacttgcctgccaatgcaagagacgtgggttcaatccctgggttgggaaaatcccctggaacagggaaatggcaacccactccagtattcttatctggaaaatcccatggacagaggcgcctgctgggtgactgtccatggtgtcacaaagagttggacatgactaagcccatactgaagctgaagctccaatactatggccacctgatgtgaagagccgattcattagaaaagaccctgacgctcggaaagattgaaggtaggaggagaaggggacgacagaggagatggctggatggcatcaccgactcaatggacatgaatttgagcaagctctgggagatggtaaagggcagggaagcctggcgtactgccgtccatggggccgtgaagagatgaacacgactgagcgactgaacaaaacaaagcccacacacgtacgcacacaaggatataaaacacctaatatgtaatatgtgcctaaaacctgctaacttgattataatagctctattgagaacttttaatgtgccagatactacttaagtactttgtatatataatataaaaatagtgataataa

SEQ ID NO: 36161 - DNA, 826 bp, Bovine  19866880804881
  misc_feature (1)..(1): n is a, c, g, or t
ntcatcttccttatatttaattaaatcttagtctatacaggaatctgaaaagtctggaaacataggggatggttcctattttaaaaagtattttagttgtattttcaaataatgtgatcaaaatggtttcctttcatatccagatacctttcacagatgaaatagccctaaatttaaaggcactggctccttaatctgaaagagcaataagaagtgttttccctgtctttccagacttttcagatgctatgtatgcatgaggatgcctcagccatgccatgcccagctaattattttaccatttcctcagcaccctcactgccctactgttcagtcatttacctggctcctctcccagatctgcaggggtctgccctgtgtggggcactctggtagcaacagcagcattctccctcttcaccgagcttcacaggctctccctgacacctggcagaacctactcactcttcagggctcagctctcagggggatcttctctggcacagccaatcatttggtcctaaagtgccctggactgacatacccctctattatcatagctgttcatctatgttcatctgtttgcaacgtgaagcatagattctgactgtcccagggtcaatgtttaactgcctttcagtaacatgtgacatgatgagcaggggcaaggccttcagtccttacttcctttgtcggtgagatcgtttcacagggcagagttcatggaacaacttctggctggtgagcctggctgccaacagatacttgttttgggtataaagtcatcaagacctgcctcttcatacctcgggccggagaaaaacca

SEQ ID NO: 36162 - DNA, 1726 bp, Bovine  19866880815892
  misc_feature (1)..(1): n is a, c, g, or t
ngggctcggcggctttccggcagagccccgtaagggagctgccgagggaggtcaaggccacgggagctgtgcgatcccgcggcgccgggagacccggcctgggtcggatcccgtgcctgttctgggaagcgtgggaatggggccaagctcgcggtgagttggggaggccccctgtgaccgcacctgtaacccacctggcaagcccatcaagtgccgaggggagcgctgccttcccgccgcccttcgcagacgaaagtgatgactcgcctttgctaggagcgaagagatttctcctacacttgaacgactaaggcagaaagagaaattgccgcggaggagacacaaatgcaatggtctaattatgtatcgttggctaattcgccctaagcggagaacagcgtttgagcgttaaaggttccgagtggatgctccggttccattctgttccggcctcagctggttcctccccagctcaagttaggtcatggaaggtggggcacaggaacccctggattctccagattctagggtaggaagctggaagacgaagggcttccgagaagactgtcatcatcagtttgaagttcgaatactttttctaggaaaaatggggtggggggtggggaataggtggaccacatgattcttcattatttcttgaacacccatgtgttcctgtaatttacttgcagtgtcttaaaatcttattacgaccttggcagtgaggctgttatctccaggaagatgagatcagaaaaggctggagtttaagggacttgcccaagtcccaaagccctgaagccctggtactggaatttcaaattctgtctggtggggggggggaatgcctctcccaggcagcaagcttaccaactgagaaacaccaggcttatttacctaataattctttcctaaaaacagccaactgcaagacctcctaattccaggctgcccatattggtttcctcaggagatgagattccagaggtcagagttctagtcacaggagctgggaccaccaatcaactgactctgattagttgagctgcactggtgttctggaacagctggtgtcttgggtcaccaagggtctggaagcgggacactgaggcctggaaggagcttgagtccctgggcctttggtttaggagctaggcttgctggacccaatcccacctcctcccctgttgcaaagagcagttagaacccgagacagcttgctgtgaaacagaatatagacgcagagaataagcaaatgggagggcttgggcaagttgtttgatctttctgagactcagtttacatctgtaaagtggagatattaataatgtcagatacattttgatcattcagaagctcatgtctgcaaagcaccttgcctagttcatatttgatgctgatgaatataagtcatcagctttacttgtggggcgccttttgatgcccctactgactcagtttttctttaggatgaactgttaatctgtcccatctccctgctcctgaactatgtcgaaatgacatctgttttgtctgtaaaatacttccgtgatcccaagctgactgttgggccaatggaggctgttattatgtacacatgtagaagagggctggttggagataaatctgtttactttttgtctatatagactccacttatgtatcatgataacaacatcctaatgacatgatgtagctgagaaaagcctgtctctaggtctggggg

SEQ ID NO: 36163 - DNA, 907 bp, Bovine  19866881028676
  misc_feature (1)..(1): n is a, c, g, or t
ngcgtcgcaaagagtcagacacgatttagtgactgaacaacaacaacaaatataagtcactttatgttcttaggacaggccatctcacttgaccctttcaataactctgtgcaggacatgcagtgggaggtgaaataacttgtccaagaccgccaagctaataaggggttaggacagggccaaactcacataagtgtgaagctggccgccccgccaagagtgcccagcagtccgctctgccgcaagtctgcctcctgggctctggagaagaattcctggacttcacctgtgctgggcctttgcttcccaagccctgggcatggcctctcctctcggctctgcccagcctgtgcccaccaggggcccccaaaggcttctcctcccactggtgctcgctgactgcccctcattctccctgatgcctcaaaccatgttccatggtctctggtctcattcccattcttgctctgggattcttggcaacaacctccgcagttctaggaatgctggccctgggcttggaggttcttgtccgaaacttggctaacagcctgtggtgatgccaggaatccttcctgcccttttgacctgtgatttttgttttgcagagatggtgtcatctttgcaaaaggatatgttagcaaaggatgagcaagttcaacaactaaaacaggaggtgaatcaactaaaaagtgagaacaaagaaaaggatcaccagcttgaagccctcaactccatagtgagtgtcgggtcatcatcaaagtgtagcttcgaaaagcagacacggtgcagtcaggtgtctgcagagaagtcaacttcttggcagcttttaaagtacagtatgtggctcagaatagcatgatatattttcaaatgcagcaaacattttttaacccctatgataaat

SEQ ID NO: 36164 - DNA, 1377 bp, Bovine  19866881049717
  misc_feature (1)..(1): n is a, c, g, or t
ntaattccatagcaaagccctgcttcctatctccctgacctccaaaggcaagtccagctcccaattccttctgccctctcccgtctcttgcactctgatctgggggacggtttcccaggaggcctgggctccccttcccctctgccatggaggctgcagatcagggtggaagtctctcggcaaagccctggctgtgatcctccagccctgcttggacccaggaggctgcagcccctcttggatggcagaagcagaacgggggttttgtcttccatgagagcctgtctgttggctgttcacagctgggactcggctgggctgggctccgctggcacagtgaagccttgtttccttgaatacaaaatctgccgccttccctcctcgccagggccccccggcgggcggtacttccttccctagaagtccagctccctggccccttcctgccctcctaccccatccctgccaagcagcaccccatcaagcagcagtggtgccaagatggggctccaggggttcatctccgctcaattttcaccaaagtatccctcgtcaaactcataccaaaaacagcctccataaaacagtgagcttgctctgcaaatgcaggttcacgatcactccccaagccacgtgctccttctaaacaagctgcagcttcccatttagtgaaggtgttagtcactcagtcatgtccgactctttgtgaccccactgactgtagcccaccaggctcctctgtttatgggattctccaggcaagaatattggagggagttgctgggcccttctccaggggatcttcccgacccagggatcaaacccaagtctcctgcattgcaggcagattctttactgtctgagccatcagggaagcaatcccaagtccctgctcatttggcatgtctgggttctccaaactgttccttctttttatttttcgtgggggtagaagggatgtcatggaagcccaagagtaggaggtggtgggtccatgtgggggaaaatcagccatgaatatggaagggggtgctgggtgatcgtccccttgtggaggcagacatctgtgatgggaaacccaggagggaagaacatgaattctggagtcatagacctgggtttagagcctgactccatcattttctagctgtgtgttcttggcaagttacttcacttctctgtgcccagactgcccaactgcgccacagtggtgatgacagttctgtgtcatggggtgctgggaggaatggaggagctccttagtccttgggcactgtgaatatagggatcaagcagctgaataatctctcctatacttccctgtggggggtgggaggggttcagcagagtctacaaggaagttgccctctattgggt

SEQ ID NO: 36165 - DNA, 800 bp, Bovine  19866881057837
  misc_feature (1)..(1): n is a, c, g, or t
nattttcagcttgtcctgaaaaaccacaaaggtctgacccatcaggcccttatcctcaaagagcaaaattctggcctgtggctgggctggggccaccactttggtcctttcattcacagcgcggcccctggacggcagcatgggcatcgtctggcagctcaggagaatttaagttctcattcagagcctgtgctttgacaagacccctgtaaacacaaagtttaagagtaattgctttagagtagtcgttctcaatgtagctgtaacagaggtacccgaagggccagatatctggtccccactacccaggtttctgatttgggaaatctgggtgggaatttgcatgtcttgtaagtttccaggtgatgctgatgctgctggtccagggaccacattttgagaacaaccaatctagaggaagctggccagtgttcttgagttaggctatctggtgcttataggcatgtgagtttgagacccttggaattgaggctgcccgggaccaacctgctgtgtttcactcagccttgtgctcccggtggaaccttctaaatgcttggtccccacaaagcctctgcacaaacaggccattggattcctactgtaacttcttgggtttgtcaccagagttcttggtcttctaggccagccacctccagttcccaggggctgtttatggcacagatggatgtcctgtgtccgtcgagagaattgtgaacactttcaatggtactggctgccccagcttgagagggaagcccaagctcttcttcatccaggcctgtggtggaggtaagcag

SEQ ID NO: 36166 - DNA, 1675 bp, Bovine  19866881058655
  misc_feature (1)..(1): n is a, c, g, or t
ntctttgagaccccgtggactgttagcccgtcaggctcctccgtccatgggattatcctagcaagaatactggagtgggttgcattttttttcctccaggggaatcttcctgacccagggatcgaaccagcggctcctgcattggcaggcagattctttatcactgcgccccctgggaagccccctcagccaggcaggagccccctaaagttccttctgcttaattagctcatgtcccttgtttttaagatgagaataaaaatggcacctaactcggtagccttggatgaaatgggaggttgcttacaaaacccttggtacatgggaccacgtaggatacacgctcacctgccatcatggttatcctcactcttctctttaactcaccattttccaggatttccttgggcccgcgtgttctcaagatcctggtttcctcagcaccatttgtgtgtttttagccaacaagtagaaattggtagatgttgtgtaggaggagcgtgcgacgggaggggcttgtgggtgcccacgaagatgaagtagggcaatgtggctaggctggtgcagcatacagacagaagatggccaaagaaaaagaccctcacctgccccttcttctgcccaccaatcccagtgagtcccagcgtctcctagcaacctcagaggtgtgtccccgaatggaacaggtggggacacattgaacactgtcttgctcacctgatattttcacttaggaacgtttagaggacctcgaacagagaaatgccaaagagtcagcagcttgcaactgttccttcaaagagaaagagaggcaggtacagagaccctttctgatcttgcagccagacacaaagtagataccttattttcaaagggtaagagcatgtggggtgcaaacgccagcgtgggcagcccaaaaaacattccaccctccactcccttcccctcccccaccccgggccctgcccctgcccctgctcctgcctgcaacccgcacaagggacctgaaagacccaggatctggaagtgagagaaggcagaagggcagcgcagccatcctgggtgctaaatgatttggggacatagagacaaaaccataagaagagaagagggtaggagtaaggaatcccagaaacctctgccctaagaatgaagtacagtaggtggaagaagcggagaaggcaatggcaccccactccagtactcttgcctggaaaatcccatggatggaggagcctggtaggctgcagtccatggggtcgaggagagtcggaaacgactgagcgacttcactttcacttttcactttcatgcattggagaaggaaatggcaacccactccagtgttgttgcttggagaatcccagggacaggggagccctggtgggctgccgtccattgggtcgcacagagtcagacacaactgaagtgacttagcagcagcagcagcagcagtttctagtgtacagcaaagtgattcagttatacacacacattctttttcagattctttttccattgtacgttattacaacatattgaatatagttcctgatgttatacagtaggtcagtgtctcttttatatgtgaaagtatgtatctgataatcctaaacttctaatttatccctccctctcctttcccttttattaaccttaagtttgctttctattt

SEQ ID NO: 36167 - DNA, 943 bp, Bovine  19866881135106
  misc_feature (1)..(1): n is a, c, g, or t
naaggccctggagagagggtgttatagcttctgtctacctttcatactaaattaatgcctctcaacagggggtgattcccctccccctccccccctaccagggagatgtggcaaagtcagaagacagttctggtggtcacacctggggtagggtgccactggcatcttctgggtggagctcagtgggtgctgctgcgcatcctaaaatgcacaggacagccccccaactccccatgagagtcacccacccagaacatcaacagtacggaggctgagaacccctggtctaaaccacacacggcatcatgatcttgcgtcgaagggagaattctgccttccctggaaggcactgacttaccattttcgtcttggcagtttccagttcagctaatgtttcatttaatttcatggtgaggttctctgctttcagactttcagctatctttgttttctgagccttttctagcatggccagtgcatcatttaatttattatttaaaatgtcttctttttgcatttttaaatccatttcctagacaaacagcaaacatcaaatgaacagaaattcaggtgtaaatatttaccccagcctcccccttcccctgttttcagagaggaggggacctctgttctgttattgttctgttgatccttttaaagtccaaagtccatgctttctctggaaagttccaattattgcagaactcaaattcagctgagatctatctccttgagatttctggcccctgagctcagttctgttacttggagctcattgaacaagttttatttctttcgtatgagacagccctttaaatatttgagaaggctgtcatgtttctccctaaatctgtcttccaggataaatgtgccgagttcttcacccttgagtcataggatctgtgttcaggacattcctccaacttactccgtgacttaggcc

SEQ ID NO: 36168 - DNA, 668 bp, Bovine  19866881157712
  misc_feature (1)..(1): n is a, c, g, or t
ntaattttttctttattatatgccttctatctgcttatattttgagtgaaaatagcatgctctgttgtggaaatcaattaggatgtttaatcagcttattataaattatataattttgtgtgctgctagcttttttttagtatgtggaagtatgctttgcagtgaggtgttcttggtgtaatgttaaagtattgagacagtcacatttttttccccttacatgtgtctctctctgccaagttaaaaattttaaacatcttaaaaaaacccacagtggtatgtctctataaaatcctaacttaaatttagtgaattcttggattaattacttaggatttcattttgattataggatgaattgaaatctagcatgtttaaagatttttattataagagaactgctccgtttcttacagttaaggaatatttgtggaacattcaaatggaaaacatttattattacttttgttttatacttggttctaggtttttggtccagcattaaacttcgggattatgtgtatgtctttgtatctttgtattagatgctgagtttcggttacattgacaaatgaaatgaagatttttctggttatatcttgtattgattttgttacagtcttaatcatgtttatgcacagtatatgtactcttacatatgatccatt

SEQ ID NO: 36169 - DNA, 1234 bp, Bovine  19866881334636
  misc_feature (1)..(1): n is a, c, g, or t
ngatctacttctagagccgctgccgctaggggaccttgtgggtctagacgcttgactagccgcctctgaggagactgatttctagactgggatgagtgtggtgaccgactcctgctgtgctggtaattccgctcgggccttctgcctcgtacctcccgggtaatgtcatccctgtaggtatccctgtgtaccacactgggcagtgtaaactgctcccgagccctaggttcgtatcgggggtcatgagcatcaaaacggtttggacttcgactccgagaagtataatagagcccatgttgtaaagtccgctctcgaggatctctatagtaatcctgatcgtaatgtcttgtccgatcaaatcctcccgtcccccgttcatggtgtccataggcactatgttcataagcacgctccctgttatctgaagccctgcatttaggaggggggaaaaatatttaatcaatcagaaacgggaaagcaaatctaaaagcaagtcatgcaaacattcacttcagcactttctttgtgcaactggtcattttctaaacagcagtaacctactttagtaagcaaacattaacaagcttaacattttacttgactccaaaacttatttccacagctaagcaataactgttgtaactgtatattgggctttcatgactagtgttctgtaagtcaagctgctctttttattagggattttctggcttatatacagaaatagacatatgccatttccttttttattttaaatttaatggaacaagaagagacttttattttaatatgaaaattaaactttctatactttcattggattaaaatatatgccaaactgtatttactttgtaaatgtatttcaggcaaaattttcatgatatgtttttcacacagacatgaaagcctcattgcaatgcatgcccatgtcccagcaataggagggcattttcaaataagtatagaaaaaaatgttaagtataactttttcatattaactttcaatttcttgggtaattataacattagtaaattatgtaaattgctgtgcccaaacaatcacacttaataataaaaacaggatcttaaaaaagaaaatcaaaccaaaaaccacttaggatatcaaaatattgggctgccacatgctattctatgataaatttaactaattaaagaataatggggtattttatcttcttgtgctatcaaattacaaataatttttaaatgccta

SEQ ID NO: 36170 - DNA, 695 bp, Bovine  19866881366177
  misc_feature (1)..(1): n is a, c, g, or t
ncctcgtggcgccggcgctcatcgaaaggtgatgctggtgggcggtttcgttggttttttcttttttttgcaagaagacttcctggccgttactgaagccccctgagatttcctggagggtgaaccgcctcatggttcttggaggcctggcagatctgctatggccctccaggaaacccaaggcaggagaccccactgccaacagcttgcatgtatcccccaggggaactgaacgagaagcagaagatagaactggagcggaacgtggcactggtccagcaacaaagcagtgagctaagcgtgctcaaggacaagatggtgcagatgaccggcctggtggagaagaaggacaaggagctggaggtcctcaagcaggctctcaggtgggtgggaaggcctgcacagcaggtgtggggagcccaggcatacccaagtacccagggagcctgacatagagagaggaagggctcagtcaatgatggttaaagagttgaatgaatgagtagatgaatgagtgaatgacatatgtttcattgcttcacaacctcatcatttagaactttgctcagttctgagccttcagagattcctgcccaatatttcagataagtctcagtttaaatgcggcttcctccaggaaatcctcctttactcaccctcaccaaacatagccaagggctcctgctctgcccagg

SEQ ID NO: 36171 - DNA, 812 bp, Bovine  19866881495441
  misc_feature (1)..(1): n is a, c, g, or t
ncctttgccctaagtttgaatattgaaagcgcttttcttttttccctttggtcatccggaaacatattttggaaccacccatcttgtttccttaaatcattattttcatcacatttagctgagtttttttcacactaatattcataacaggattaaatactcaagggaggaacaatgtttaaattcaccagccaacaatttgaagttcctttatttttagagaagtcagaatattataattcaaatatgttcctgctagaataagttagtcaagttgtaaatttctttattcaaatgtacttggtactgtttttagtagtcatttgcttcccagtggattgtttctctttccagaacctttgctagaagaactttactagaagttagcagtagtgattattaaaaaaaataagctctgaaatagaatctcttaataaaatgaacattgaaaaatcagttggtataaaacactaatttagatgttagagagttctaaggaagtaaaacccggcccctactttccaagactttaatatcgccaaagctgaaattggtaaatgtaagaatattacagaataatatatgacagcaagatagatacagttaattgccagctgtgtataatagcaaatgttagttccaatattagttgaaatcactttgcataaactgtagactttcctcacatttttaaaacatgtgaccttgaaatcattatccatttgtaaataaaaggcaatgaagcagaatggaataaccaggataatattgaaaattaaaacgttctattgagcatcagcaacaagatactg

SEQ ID NO: 36172 - DNA, 724 bp, Bovine  19866881499949
  misc_feature (1)..(1): n is a, c, g, or t
nctgttctcccgcctctattccctctccagaaacctggattactattttggtgctgtccctcccccatacttccatctggagcctggtgcccagatccaggggtaggacttgtccttcaggtcctaaacctgtccaatccacacttgcatcccctctcccaccacaaccattggttcagagatggtcatgtgacctgaggcaggtccaatcagagagagttgcaggacttctgtgggaacaaccaggaagctctcgctcattccctgatgggtttgaagatgagtgatgtgaggctacagtagcaaaatggaggggatggttttgctctctagaatacgttcaacaatgagtagagacacttctggttgtcacaacttggaggaggagggaagagactactggcatctagtgggtgggaaccaggactgctgctaaatatccttcaaggcacaggattgtagttcacaggattctgggtctcataacaaagaaccatcatccaaaatgtcaatagcgccatagttgagaaaccctggaccagagattctgtaacccgcttgtccccataggacaacccggagctcctacaggccatgtaatggagcctgagagtggactctcacagtgaaaagcagagacaaaagatagagataaccctgagtgctggggacatcaccagagccctggatccagccgtgcctgaaatgagccctgctcctgggg

SEQ ID NO: 36173 - DNA, 749 bp, Bovine  19866881539197
  misc_feature (1)..(1): n is a, c, g, or t
ntcgtgtctgactctttgcgacccatggactgtagccagcagcctcctctgtccagggattctccaggcaagaatactggagtggattgccatgtccttctccaggggatattcctgacccaggggttgaacccaagtctttagcgccacttgggaagccccgaaaaacactaactggtttaatctcatgatgcaggggtagttagcctccccatgttatggatgatgaaactggtccaggaggtgaggtggtctgccctagggtcatacagctgttgagtcttgtgatgtgacatcagccactctgatcagcggcacagctccccatcagcctgctttaccacctgctctacatccgggtaccaaaacacagtcttgcatctggttctgaagctgcttccaagggctttcggctgccaccacccacgtcctctctctctgctccccatacctccttctgctgtgttaagtggttctccagatcttgcactttcctcttttctgtctctaaggcttccttggcttttcttttctcatgggccatgctgctctccaaaacctgaaaatcaatgaccggtctttttggttgcctgcacatttagcgggggaaattgctagtaagcatgataccaatagtaacgacagtagctcaaatgttgggggctggtcttatgtgccagggcccaaggccagtgctcctcacccagtttattctcatagcatcctcatccacagagaagttgtgtccc

SEQ ID NO: 36174 - DNA, 1932 bp, Bovine  19866881723477
  misc_feature (1)..(1): n is a, c, g, or t
naaaaaaaacaatgccattctatagagagggaaataaaaccagaaagaacctaaaaatcttcaaaaccttcacagaactctccacctgtttcctctctcttctctgtttaatttctcccttcccaaatgtcttattttagtttcagttttggtttgactgttttccactgtgaatgtacagtactatagccccagcctgttcaccaccaccttcggcaccagcctgggccctccagatgcccctttgtaacattgattccaacagacacagggtttcaagggctgacatcaaacccccctttaatcacgccaaacttcagagggcacaccaccccttgcagaggggaacacaaagccagggacccacagacagacagtacagctgctcatgtccactactgtcccattgagggtcattcttccccagacacttacattgattggcttgaccccagggactcatccagaagtatcatcgcaggcttgagtgctaggttccccaattttaaatgaacatggcactgtcaccccccaccctttctaaaaatatgtgtgtcaaaattcattaattaagctcctcacaatcctgacttgtcttaggactctgcttcaatggtaagaaattctaggttcccttatagagcttctctggtggctcagacattaaagaatctgcctgcaacgcaggggttcaatccctgggtcagaaagatgccttggagaagggaatggctacccactccagtattcttgcctggagaattccatggacagaggagcctggtgggctacagtccatgggttgcaaagagtcagacacgactgagtagctaacttatgaagctatcgttcttttttaattattattatgatctgctaaccacatcccttttaattattattatgatctgctaaccacatccccctgacttatgcacacactaatggtttagatcaggggtcagcaaacttctcccataaagagccacatagtatctgttttcagttgtgcaggtcatgtctttgtcctgatttctcagctctgtggttgcagtgccaaggcaacccacgatgagcatggtggagttccaataaaactttatttacaaaaaaaagcagacagtgggccacatttggcccacatgccgtagcttgccaactactggttctagaatcaaagggaccagggttcagtttcccattgatgtgattcattggtaaacattcctaaactctctaagcctatttcctcctcaagaaagtggaaatgacagaagaaatgattgatctttactagtgaatgattatcatgtgacaagcatttcatgttcatcatctcatctgctgcttctatcaacccaatgcaggaagcactcttactgtccccattgtacagatggagaaactgaggtttctaaagcttctcacttgcccaagactatacccctaggaagaatcagccgcaggctctaatctgaccccgccaactccagaccccattatcttaggccctagatatactgtccacagttttccttgggtttgttgtgtgttgagatgtgaaagagttaatctgtgaagggcctggcctggagtccagattcctaccatggtaactatgtctattaaacaacagtcatgactttcaggctttggaggaaagcattactcaagagaaaaacagagcgaaagaagcattagaagaagaacggaagagagcccaagagctggaggactggttaacccgccagaaaaaggtatgagctcggggaggcagagccggcctgagcccagggcaaggtcaggcagccaggacggactcacctgggacactcatctgggcctgcccaccccagctgccaggctctcagctgcccacagtctccccatggggatgctgtgagtagtaaagagttcacctgcccatgcaat

SEQ ID NO: 36175 - DNA, 3916 bp, Bovine  19866880113610
  misc_feature (1)..(1): n is a, c, g, or t
ncagaaatagatgtttttctggaactctcttgcttcttccatgatccagtggatgttggcaatgtgatctctggttcttctgccttttctaaaaccagcttgaacatctggaagttcacggttcacatattgctgaagcctggcttggagaattttgagcattactttactagtgtgtgagatgtgtgcaattgtgtgtggtagtttgagcattctttggcattgcctttctttgggattggaatgaaaactgaccttttccagtcctgtggccactgctgagttttccaaatttgctggcatattgaatgcagcactttcacagcatcatctttcaggatttgaaagagctcaactggaattccatcacctccactagctttgttcgtagtgatgctttctaaggcccacttgacttcacattccaggatgtctggctctggatgagtgatcccaccatcgtgattatctgggttgtgaagatcttttttgtacagttcttctgtgtattcttgccatctcttcttaatatcttctgcttctgttaggtcccataccatttctgtcctttatcgagtccatctttgcatgaaatgttcccttggtatcacacacacaatccttcccaaattcttgctcattaattcctctacatcctcttctccaacaaacacattcccaatcccacttcaaatgctcactcccaaggtcataccttagacctacttagtattaatgagtgtaacccctataaagtatcactttcaagcattacaccccaactaccagctcactccccctaatagcctaactccaacaatcccaagagatattcagtgcattaatccttatcttttcacttctgtgcacctccccaagtcctcaatgcctttcttacccaagttcaatacacattcaatcatttaattagtcccctcccttgtatacaccctgtaatacttgttctttctctttctttgcatacttccgtggctaaaactggtaccaatccaattttctgcatattccacattagaacccacatagctgaatgtggtaataaggacacacaaacacacacacaaagtatgataattggtttccctttaaactcatgatcaggaacctcaaatgagacattaatgctgcctagcaatttcattttatttttgtgattcattcattctgccactgtcctcctacatgactaatgtacttttctctacttaaacttccattaccttccctctcattctcactcatttgatgaccttgttcactatttcattgaaaaaatagaagaaataagaaaagaacttccacaacctctcacaactatatctacccacctaactgcatttgtgctcacatattttcatttctctttcattaccattttggactatctctgatcctgacctttgtacctgtgcactagatctccactaaccaccaccatcatcgctctccttacctactcaaatttgccctctctactgcatctttcccagacccctataaacatgtgaattttctcatctaaaaacaaaaatttcttctgaacatctcaagctactactatatttcttttatccttcattagcaaattcctcagaagaagcattctttctgcctgtctacaatttctcacttccttttctcaagaatccattccaatcagactttctcccaccattctaccaagtctgctattgtcagaaccactagtaaattccacattgccaaattcaacaatcagttctcagttcctcatattatttgaactatcaggagcatctgacagagatttatcactccttccttccttcactctatctccctctttcttccccagcaacaactcttgttgactctaccttcaaaataccaattacttaccatctccactgctaccactttggtctaggccaccatctctcacctagattattgcaacagcctcctaagtggttttactacttttgtgtctgttcagtctgttctcaagagagtaggcagaatagttctttaaaaggaaaatcttatcacatcactattatgttcaaattcatccaaagtccttctatatcacataccacttagactaaaagtgtaggtctttaaaataacttataagacctggattgatttaaccatcatctgcccacctccaccgccctctcacttcatcctccatttacccctttactccactgtgaacaggctctcagaattaaatacctcaggcatgctccagcctcaaggacttggcctttgctattttcctggatctacatctttatatttgtctgcatacctcattcacagactgccttcatgtcattatttaaatataaccttcggcagtgaattttcctagcaatactttgaagtgcaaccactccaatactcaactccactttccctgttttattttccctctttgttacttatcatttaacatgctagtaatggtagcatgttatctttttttatcatcactgatgtgtttccacagcctacagtgtgcttggcataaagtggtcataaaacatttgctaaataaatgaaaccatttccctccttcaaagatgatatcaaattatccacaatatcaagattatatagaaatgggccaatgaaaatctctctctcaactttattttaaatacatctagttagtagctggcttatgtaggattagaactagagctagttcaactaataactatactaatgttgtttccatgaagatttttctggtctctcttttctaatctttgatcaccctgagctctcaaagcaataaatatgttctgcccttttggaacttaccaagttctgttctttgttcaggattgtttatatatctttattatctccccataaacctaaatgtacatccaaggactccatctatctagcacaggtagtctattctcagtagagtctcaaaatatttgtagaaatgaatatgtaagtcaggcacaaaaaggatgaacgtcaaatagaaacaagtgctacaaaacaaactattctgctttgtttatggcaatactgagggctaagaagcagagacagtgaactgatttagcagattttattcataaacaatttatatacctaaaacttacaatgtgagtgcttagcttggggttcaagtaaaagattttgggaaatctgtgaacatcttaaaataatacataaagtttccttttgggctgcaatgtttaaaatattctcaaagaagtctactaagaaagcagttgcaagcaaactttttaaggaaaccattttaaagttgtacttcctattattttctaatgtgatattgactgaattcgtacttttaaaaaatctaatgaatgactccagaacacatttcactacaatttaaattttataattcttcacaaccccatgactgatgagatggctaactataatgctccacttaagaatggcgcattatatttgccatgtttctaaaatattaaattctagaatatgcaatcttatcatttaaaatcatagttcaacatcaataacatatttttcagactacaacatagatattttgtcagtattatggcatcacaggtattaattctgtttagaaaaagaaagataattattacctgaccctggcttgacatttttctttaacaaaacatttgatcccaggaaggtagtttggactgagaacactaaatcgttagtaaaatacattcaaagcattttaatagtagaaataaaagcaaaatgaaagttcatataagttcccttaagtttgcattttacctttaaaaaaaaaactttacaaaatagattataagccttaggttttctcaaagggaaaataaagggtttgtttttttttaattgtatggtttgccatatatcaacagaatccgcc

SEQ ID NO: 36176 - DNA, 2487 bp, Bovine  19866880464286
  misc_feature (1)..(1): n is a, c, g, or t
ngatacgcataccttagaggtgaagaaagcagatactcaaacaagcactcactatacatagaacttagcacatgccagggcctgttgtaggaactttacctatggaaactcattttcaccacagtcatataagataaatacattttaactctatttacagatgagaaaacagaggcacagagactctttttaaaagtgacctgccaaagtcacataactggtaaattacagagcgtctgtttgtatgttggtggttcaaatcatcttgcagaataccatcctcagggttactctgagactatgatcagagtagtgaaacaaaacaaggtcacttcataatgttaactaagcacagatgagaacaagatcactatgacactcagaaaacactcaacattttttcagttaaaatgagtgattccttcttctttaccaaataaaattttattctaattctagtctgccatccgataaataagatttattgagatacctaatcctagaatttcccctgctttctgacagcatccagtctagagcagacctctgcttccttagactttcttcccaaatcgcccagtttagagtcctgtctatagtacacgttcttccttgctgcaaagaacagtaagcctaacttaactactggcttgttcctggtggcctttgcttgaagggcattggcacctatttgtcagtgttaaagagctagatgtggtagctaattttccagatgactaaatcactatgaagaagattaatgccatctaaaaaatgggccaaattcaatgaggtaaaaatttgtaacaataaatataaagtcctttgtttaggtttggaaaaaatcaagcacataattaagaacagataacttgacagctatttgtattaataggaaaaaagacttgggaaatgaacaaacattagcaacatcaaaatgagtcaaatgtggaatatgactactgaaaagcactactgtaatttaatgttctatgaaaagtgcagataaacagggggatattgctggttttctctgttacatcctgatcatgtctgggctgtcacattctgtgactcatacttcaagatgtcactatcaaactacagaaagggtggccagtatgctgagggagctataagctgtatcataggaaggacttggtcagtttagcccagaaactttgaaaaggccttccagttcaccatgtttaagtgtttaaagggatgtccccaggaagagaggaaggagactttggtccttaaggaggagtattggtctgactggggacattccaggaccccatgggtgtgaaaaagccactcctggatgaacatctgctctgggtccttgtcttatggccttcagcagtggggcttgggtcccactgggatgggagatctaaggactctgaaacattggggtggaaatagcacagagcttctggacctactgagtggagggacagggcttcttctaaggtgttctcctcctgaggcatggccctgggatttgaggctaaagcctgctgctgctaagtcacgtcagtcgtgtccgactctgtgcgatcccatagacagcagcccaccaggctcccccgtccctgggattctccaggcaagaacagtggagtgggttgccatttccttctccaatgcatgaaagtgaaaatcgaaagtgaagtcgctcagtcgtgatcaattcagcgaccccatggactgcagcctaccaggctcctccgtccatgagattttccaggcaagagtactggagtgggtcgccattgaagataaacagaaaaggaaggaaaacagaaattcattaacaagcattttgtcaactaataatagtaggtacttcatgtgtttttcatgtttctcattttactggatgtctgtcttcataatcattacagaagatataaaacaaacaaaacagagtgcaaatagcaaaagatgaaacactaaaactcaggctagtttcattaaccccactggcttgattccatggcaattagatgggctacagtgagcttttatattttactgctggtatctggggctttgtcttgagttcccctgcccccatccctacatcccagtgctaaccactgcatttttcaaccaatttttatctttctttcctgcatgtggatgcacagtttctcttccattttattggctagcaattttgaaatctttacgtggtaacaggatttgagcatggtttatgttgaccattaccctttgtttgaattcaaaactgcaaggtgtggggatgtctgtgaggtcaagctgcagagcctttattagcctcgagtttcatttgatttctaccagcactctgatagtgcctttcctctctgtgatatttccttttaaaacaagatgctttccattatttcagacctcagaagtgcactgcatgaagtaacacagaggaatgaatcactactggctcttttattaccaagtctcattacatgaata

SEQ ID NO: 36177 - DNA, 1578 bp, Bovine  19866880468494
  misc_feature (1)..(1): n is a, c, g, or t
ntggtcagagttttcttttatttgctataaaataacctatttctaattatttaagctagaggaaaactttctttatgcagatagtatattgatgaaagtgaaagtattagttgctcagtcgtgtccaaccctttgatcccatttgatcccatggactgtagcccatcaagctcctctgtccatggaattctccaggcaagaatactggagtggttgccatttccttctccaggggatcttccccaacccagggattaacctgggtctcctgcattgcaggcggattctttactgtctgagccaccaggaaagcccaatatgtttactggtcaagacaataatatcagtcaggtagaatatggttgaatatagtcattagcagctatagactaatccagatgtaatattatagcctaaataaccagtgtgatacttctaggcaacagcaccttgaatgaaatacataatattgtgttatgttttcccaggaaaacaaatcttgacttgtcacttggtataatggggtttgtgtagctacatgaatcctctatgtgtgtgtgtgcgtgtgtgtatatgtgtacactcacgtgcccattttccttcctcctagatttatttatagtgaaaacaaatttctgatcatcttattctgccagttgtcttaaagatgtcagatactttttttaaaaaattgaatcatcgctgtctaaatgtttttcattgttgcagagtttgggatactttacacttcccaaactagctacttctcagagggaaaaaaaataactccatgtttaggctggcaaagtagaatttgaggtgggaatcatgttcgtagaaatttattcaagtgtattccaagaatagttagactgttatatggaaagaaaaaaaaaagtgccaatattgtactaggcactttggaaggggaaaaaatccattcacatatggtttctctccttaaggagttattttctgatataaatgcaacaatgagggcatataggacattcatcctgagagagttacgcactttagattagtctaaaatcatagactgtttgagagtgtttctgtttgagtggaggatgtattaatactatttggggaggattggagaaggaaatggcaacccactccagtgttcttgcctggagaatcccagggacgggggagcctggtgggctgccatctgtggggtcgcacagagttggacacgactgaagcgacttagcagcagcagcagcagcagcagaagtaaagagtcggacatgactgagcgactgaactgactgactgactgactgactgagcagaagtaaggaatgaggcagagaatatacaaatgagtaacaatttcctaataatgtaaagaaatcattaatttggcattattaaagattgtagaatatccatatttaggtattttagggtaattttccttctaaggctgcaggaaggtatactgacttagaatttgatgagtgatcttaaggagttgcttacagaaaaatgttcaagttgggcatatttaactttagggtgctctatacctctacgagttttagtttctaaaat

SEQ ID NO: 36178 - DNA, 897 bp, Bovine  19866880501203
  misc_feature (1)..(1): n is a, c, g, or t
ntaacgttcacgtgcagaggatactacagactttgccaaaggaatggaaacgcttggtgagcttgtgataaatgtagattccccaggcgaatcaggagacgctgctttaccagtttaaaatgttggtttcctgcagaaggtctgtactgggacaagttccccaggtgattgtcaggagggccatgggccaaacttgcagaaatgccggtgtcacgaattcctgaatgcccagggcccatcagctgtgttttgattggtctaactttcagcagctcaccacctaaggctgtgtcctctgctttccactctgtggagtactgaaacactgagtattttctcacctgttgcattactcattaaaagttcagtatttcgtggtgttttcatagagtacagaaatgctgaggcccatcactccctgacatgcacttgctgacgacttaagggaccatccatcgcaatgcaggagcctcttctgctgactcaggaacaccccagtttcttagaacactgcctctatggttaactggcccagacgtttgaatgaccttgtaagtagctcatcagctaatactctgaagacaagtagcaatttatatcggatatgagtggtcaacaaatatgatttcattagttttattgtctgtttacttcctctggggaaggtagactgataaaattatataggctggtaaatttttggtacattaattgcaagctgcacgacagaatttgtttttttggcaagaggttgacactattactggaattgtactccagcaggggttctgggcttccatttcatcttactgtaacttcagttttatggtggacagaggtactaactttaagtactccattttagtaatgccaaaggcatgaaggcttcttaattct

SEQ ID NO: 36179 - DNA, 1117 bp, Bovine  19866880516458
  misc_feature (1)..(1): n is a, c, g, or t
ntgataaatggtttagcctccacgattaaggcccctctataactcacagcaccaaagagggcccaggagcatcggtctcgtgtttgctgtttttctcaaggtggaggagggccatgcttaaaagagtgagggaaaaaatggccaagccatcctgctgcgccctcgggagggaggccctgggatgctggattccacattggggcgtctcacagattctacctccattcttgcagtttaaggccctgcttccctctgattcacaagcttcctgctgctcctagggagctcccagaggttcagctctactggggtgcctccctaactcagagacctgtgattgctcccctttgcctgcaggaggaaagccacaggcctcaggtaggtctccagagctttccgggcaccaagccttctgttaccattcaggaatactttcctgtgaactttttcttccagctctgaaacctgtactgtaccctccagttcttgttgaccctggctgttttcccctcctggaatgcccttcctcctccagggagtcctccaagaagttccacttactggaattactttttcctttcatggactgtgtttggatctctgctgcaaccctgggttcagtcttcttgtagtaacctgtgtgtgcctctgtctcctcctagtgtgagaacctctcaaggctggggacctgatttattcgttctgatctctccttgaggtttaacataatgctttgcacacacaggaaatgctcagtgtttgtgaagtgaattgactttccaatggggagctgctttggtctattctaatttgagacctttgcttagaggcagacccagttcccccatttctaattagacaaagtcttgaccttgactcatggcctgggagaaacttgggacatcaggtttggcaaatacattggcccaagaatccataaatattgatccgttgtttgcagagtaatttaaatgtcagttataagcccaaggcagataaagatctgtattaacaataaaactggatacaagccaccaaaccctagggaagcagctttgggttaagacggaaatggaatgcacaggcctggggagggagggcattagaggggaggcag

SEQ ID NO: 36180 - DNA, 2487 bp, Bovine  19866880554092
  misc_feature (1)..(1): n is a, c, g, or t
nagagttggcccaggaatgaatgagagatcaggaatagattcggtcattcatgtgttcttttctgtcctgctctttctttcccctgcctgagttggctcctggctagcaggcaggcgcagctctttgccaagagggctctagttggtcccttccagactcagtttccccaccagtaatagaaggagcacagacccttccagggctgacctcgttctgacccaagctcccactcccccaaagtgacagccgcccactttgtcagcagcctcagtgtcaacagctgaagtgcagcaagaaactgagattaactccactccagaaaaaccgcaggagccagagaaccttgttgaaaatgcctgcttactggaatgcctgctagaaatgacaatcacagtttaattacttctcagagaagagctttctcttcagggctgtggatttgtacccttccagctgctgctttcttgtcatcaccatcctctgggctagctgatttgccccagacagctcctctcgagtaagagcaggagcctgagcccctgtggcaggagctgagtagggactatctgaggcaccagcctggaaatcaggtgatctggggaccaggatgggcctcattgccatgtgaccttgcacgagcctccttatcagtctgggcttcagcttatccatctgtacaatgaggtgataatgcttagactacctcatagagttaatagaaaatcgacggaaatgtaagaacaagacaaaggatgcagctaatatgcctgagaccctatcatatacccggagcccagtggctcagatggtaaagcatctgcctacaacgtgggagacctgggttcgatccctgggttgggaagatcccctggagaaggaaatggcaacccactccagtactcttgcttggaaaatcccatggacggaggagcctggtaggctacagcccacagggttgcaaagagtcggacacgctgagcgacttcacttcacttttacatatcaatacatcactgtgctgtcttttgtgcggattcctctgttctacagaggaggagactgaggcttagagacgttgatgaatgctcatggtcccatggtggtggaattgggatgtgaccccaagtctgcctaacgctgaggaccttgttctcccttccaggctgcactgtctccatcgcatggactgcctgtaaaacctgagagtcctgtccacatgcaagcctttcccagaatcgccatctcagcacacattcatccttcagtaagggttgaagtgtatgggactgaggcaaccctggaggagaagaggaaagaacgccgtgtgagctggaggaggtgggattcgacctgggccttggatggtgggacagagaggaccaacaagggccttgcagtcagagagaaggacaagacctaagacacagcatggggatgggcctgcgaagtgcaggtggtagtgagaagagcatctgactcgagtagaggccacacaggaaatgatggtgaaagggtagcggagatgggtgcatcggggggatgggccatcttctctgtcctcaatctatgaaatgccactctcagattcctcacactctggggtcaatggcagactagttaaaagaaaaattcagaagtagaacccttggagataattatcattttaattgggatcagtgcttcaggctggaaggagaaggttttaatgtggctcagctggtaaagaatctgcctgcaatgcgggagatctgggttcgacccctgggtttgagaagatcccctggagaagggaaaggctactcactccagtattctggcctggagaattccatggactgtatggtccatgggggtcgtaaagagtcagacacgaatgagcgactttcacttcactttcattttccagttagcagctggcaagtccagttggagctgggatgtggtcacaccacagcgatgcagccagaccatcctcttccttctcccccacctttctgttcaatgaacctcaactggtgcctcccctctagcagaccttccagtaggtgatctccacgctgtatctcatttaattctctaagaagccccagagctgacagcaagttatttctctccatcccactctcaggctgcccagggtttcttcaaccccatttgcagatgtagcagctgaaggctagatggttgaagttacttgtgtgcagtcccctgccagttctcactggcagaaatgacactagttttcaggtcctctcagctccctgcctggtgctctcttgctgatagcccttggtctgatggaaagaagaaaaggaaggtccatgcctgccttcaccagacctcagtttggagtctcagttggtcagagtcaccatgaatctcccttggcctggagagcaaggaaattgaccaaaaagccaacttccagtcaattgcactttctcactttaaggactacattatttaaaaaagtatagccatttcat

SEQ ID NO: 36181 - DNA, 1340 bp, Bovine  19866880620256
  misc_feature (1)..(1): n is a, c, g, or t
ngggctttcctggggcttgaaacacacaacagaagatcaattagattgctctgacccatgtgtcatcaatatgatggcagacaccagcagtgctcagctttcctgatttacttcctcgcaatttccctagcacagaagccaggtcccatcatgaaagaaagccagtgttcaagagagaggcatttctatgcctggtagcctttgtgattacagttgtcacctacaatcagtttaagttatgaaaaattagagttggaattaatggaaatacatggcatatgaagctatagcttgtaggcacccaatgtacacttcctcttagcgcttaacgtaagaattcaaatggtctctttatgggtcttcttctgctattagatagtaagctttccacaggtttttattttctttttctagcagtgattatgagtatgtatcttagaatcagatttctgagattcaaaccctatcacttaatagctctcccacttaataattgtgtggcctcagtttctttattggtaaactggtaaaaattggaatcataacagtattaatatatagggtcattaggagaattaaatgagtaaatgcttaatacaagccactgttcttattatttttatcatctttgtgtcctagtatctagcctttcaggtcttctcttgtggctcagtaggtaaaaaatctgcctgtaatgcaggagaaggaaatggcaacacgctccagtgttcttgcctggagaatcccagggactgcggaagcctgctgggctgccgtctatggggtagcatagagtcggacacgactgaagcgacttagcagcggcagcaacagtaatgcaggagaccacctcctccaatgcaggagttgttgctgttcagtcaccaagtcgtgtttgactctgtgattccatagactgcagcacttcaggagtgccgtgttcaatcactgggttcgatcccagggttaggaagatcccctgaagaaggaaatggcaacctgctccagtattcttgcttgggaaatcccatggacagaggagcctggtgggctacagtccatggggttggaagagttggacatgacttaaggactaagccactacaaccatcaccatcgggcctttcacccagcagctcttccaaagatgtttgctgagctggaaacacaagcaaaaatattccttggagttgcaaatgataacagtgctatatttttgcaaattcaacaatagaacacaaagacaataaaaacaaagtttgttgtcaaggaattgggaatacacattattattctgactacaacacaaacaaacaagactcatattccaggatctaaaa

SEQ ID NO: 36182 - DNA, 1299 bp, Bovine  19866880647163
  misc_feature (1)..(1): n is a, c, g, or t
nggttctacattgtgacttggagaaaataagaggcttaattactttgggctaaagtacacaggcatttgacattttgaaaaatagttttatgacatttctttgaaaggtctggaccaaaggcagctgcttctactttgaggagatggcagaaacggagaaggatagcaagcaagtgagaaaaactttgcattttaacaatactccctaacatttaccaagtgctttatacttttcaaagcagctttacattcattactaaattatttgatttttacaattactgaccatgagagagacagcagggggtgaagaaattctgttacttactaactggatgggccttgtcaaattaacttctctgaccttagctttctctttcttaaagtggagatattacctgcttgcaggcttgtggtaacaaatgaatgaaatgcaaattgtaatcagagtccctagcatagctgctagcaccgagcagatgcttactagctgtgagtttcctttgcctcccattgtatatatgtgccagctgaggagagagatataatgtgagtccataaagggctggaaccagtgcctggcccagagatttttctcgctacaacatatagacactcaggaaaggctagttctcaaaataaaacaaatacctatttgcagggtagtgatggagacgcagacagagagaagagatttgtggacacagtaggggaaggtgggacgaatggagagagcagcattgaaacatgtacatgactgtatgtaacatagaccgccagtgggaactggctgtatgacacagggagctcaaacccagtgctctgcgactgcctagaggggtaggacaggagacagagagaggttcaagaaggaggggacataggtatgcctatggctgattcgtgttgatgtatggcagaaaccaacacaatattgtaaagcaattatccttcaattaaaaataagtaaatttaaaaactcaatattcaaaaagactaaaaaaggaacaaataccgattatcacatttccccctaaatttcatactgggagtagaatctgaaatgggtctgtagggcttctaatagtagaataagaggcaagtgagagaaaagagactcagtgtggaagacaacagccaaacagatgggtgaggggagaaggaagcgcatggtgaggctggcttcagacaatgtgtcttctctgccaagcttccagtagaaacggctgacagaaggcacagaaccaagagcatccagagctacaggaagttccaacaccaggcgagaaagacctgctg

SEQ ID NO: 36183 - DNA, 1521 bp, Bovine  19866880649821
  misc_feature (1)..(1): n is a, c, g, or t
ncgcccaaagccccagagcagccaaggagctggacagggagggctgggcccaagggcactggctcccacaccgcattgccccctgccctctgccccagctctcagccctgcccagcctggcacagagcagaaaccatgaccacctgtagggtcaaagtatgagggcaccagggatggcacctggagcagaccacagattctgagggggcggtgatggtagcacggggttgtgggtccatctgggggggcccctaactctccccagactccacagggcccagggggacctctctgctcactccctcctggctgtggcccatatgctcacagcgcactgatctatgcaggcttcccatgcccaggccacctgccctcctcagcaggccacctctcctccccaacctgtacctgactcttccacgaccaggccctggggcgggggagggctcctccttcagcccggccgacccaacacaaaccccagcagagcccccagacgtacgtatcggctcaaactgtccttctcttctgctttccgcttcttggcttccatgctgtagtctgcagatccccggtgcttctcactagctcgcaggctttccgagggcgacactgagttattctggaagcaaggaggagactcagtgtgaacatttcattcgtgcatcgatatagctcagtggggtgacccagaaggtcagttgaggtgtcgtgtgtgccctgtaggtcttggctccatcagagcctcaccagggagggacgccctcccaactccccagatttggttcctctgggagaggccctgagagcatgacaattctcttttgtagcaatgtcgctgctgttagataattaaccttgcacgagccactggcctctggcctattagcctgtgcgcttcatgaaggcgggggtcgcacctatctccttttccacccctctgtgctcaaagaatggataaactgaatttgtacagagtcttgaagacggatctgagccgacaaactggggctatgcacaatacctcatctgctaaacctgacaggaagagggactgacaggcaggggagctgccaggtgccaacaggtctcccagtgtaagtacgcaacgggccattttgtgtgaatgcccctccatgacggcttggcctcccgcaattttagagagaaacaccagggttgcaatgatgcagaaaacacaatgtcatgaagcctctccctctgaagatgggaaaaggcatagagggcaggtggaattcccctccactctgtgatgatggccaagtccaggtcccgagacgacgggaaacgtgcccaaggtcccccagcaggaggccacttgaagaaaacccgaggcttttatgcctggaaagaactaatgagttctcccttcaactacaaagcaagtgaggatgagaagagtttggaatgtaaggcctgggaagagggaaggtgggctaacaaggtgaggcaggagaaacaatgacagtgggtctgaggatggagcagtcttggaagttg

SEQ ID NO: 36184 - DNA, 1172 bp, Bovine  19866880660915
  misc_feature (1)..(1): n is a, c, g, or t
ntgttgtgggggttgtcctgtgcattgtaggaagtaaatagtgtccctggcccctacctagtagacgccagcagcaccacccgctccagttgggacaaacaaaaacgcctccatgttttgccaaatgtgccctggaggcaaaatgggcctagtgagaaccaccccttatagctggcacgtgttgccaagcacagaaacgcatgctgatggggggagggcacggtctccctttattggtcttcacctgaagtcataacggggagtttctgacattgtggggaaggcaggcggcagctggcaacgtgccctataaactgcagctcagagacgacctcagctttgccacttgctccctctctgaacactaacctggaagcctggcctgaaccactttcaaaactctgagattcccaacctacatctaactacattctttaggttctttgggttttcaccctgaactaccaacactctgcttcttagactcttttattgttaagtctacaagggcaataaaaagcctcaaagggtttccgggacatcaaaaacaaaggagaaggggagacctccaacctttgtattttgttacacaagtgaattagacacatatggaatatgtttccttctagctgggtgctattttaagatttaggagaaggtccttaaaatatttcccagccctttatggctgcctgcgtttttagaggaactggctgtcacataggagttgcagtcaccaaggctgtagcccaggattctgagagagttggtagttgcttgacgaggagccctggtcatcatgacccaggacatccaagaagatgggtattgcacctttggactggagtggtcagggagggctttgaaagaaagaagagcatagacatttttatagttctcaacagtctctgaacatgagatacactttcaactctcaggatctttgctcaagattttctctctacctggaaagccctatctcctttgtgtacttaaagtgaaagtgaaaatcactcagttgtgtctgactctttgcaactccgtggactatacagtccatggaattctccaggccagaatacgggagtgggtaggtgttcctttctccaggggatctttccaacccagggatcaaatccaggtctccccagttgcaagctattctttaccag

SEQ ID NO: 36185 - DNA, 1924 bp, Bovine  19866880689865
  misc_feature (1)..(1): n is a, c, g, or t
ngtacagatcaaatctggtttgctctatactcctggctcctaacagtagtacatgtcccatgatacgtgcttagtaaatagttaccgaatgcctgaaggaaccatgctttcaacataaagttccctctccttaaatagagaagtagagtgaatggaaactgaaaactagctcagaactttaagccaagccaatccacccaccgactgattgaatagatacacagacagagcatagccagtgtcagaggctagggactgacatggagtacaaagagaattgttcatgcttgaagcagtgcactcatcagtggggaaaccaaacttgaacaattagagcagttataaaaccgtgttattaataagtagtatggacagcatattatgggcgtgaggaggatcaggcagctctaagagggtcagaacgggatatccataaaggagatcacatttgtcccaagtatttaaggatgaacaggagttgtgggttgagagaaagcaaggcattttagacacactggcccttgaatggcctgcccctctgtagtgatgagctagtttgctcctggatggctaaaggttttacagatcccttatgctggggctggaggctactctttggagcaatggtccccaacctttttggcaccagggacaagttttccccaccctggggttgtggtggtttccagatgatccaagcacatacatttattgtgcactttatttctattacatcagctccatctcagatgatccggcattaggtcccagaggttggcgaccgctgccgggaggaccctcagtatctcccatgagggggctataggagggcaggcacaaagtatgagggaggaaggaggaagagagggagcccacaggcctgagtcactttggagagcacagcagagaggcggccctctctgcagagcactatttggaaaccagcgccaagtgctgtgcatgcatgatgtagatcagcgtgtcaatgaaagttatttgcatttaagcttgtttggggacatactccctagtccctgggaagcctcaaggaccgatgttaccagttggctcacttttatcagggtgtaatacctgcctctgaccctgctggcctggttccaggacctacagctgtcaggcctccgagccctgccccaacatggggcagagctacactgctgatgcagcaccctctgaacccaagggtcaaggaattgcagtcatttgtaaattatcatctggtgattggtgccctggtttactaaaactcaccaggcagggagttacttcgtagttattctttaaaaaaattcacttttaaagcttaaatataagcatttaagaaagaagctttatatcattctcctaaatgggacagaggagcctggtgggctgcagtccatggggtcacgaagagtcggacacgactgagtgatttccctttcacttttcactttcatgcattggaggaggaaaagacaacccactccagtgttcttgcctggagaatcccagggacggcggagcctggtgggctgctgtttttaaagtcacacagagtcggacacgactgaagtgacttagcagcagcagcagcagcaaatgggtatcactcatctttttaaaaaggtctccatactactaagtgtaatgtcaataaatctaaccacacctctcttctagtcctcctgactccctctttgttacttgaaagggacgtggggcagtgtttgagaggtgctaaggactcatcagcatcctcgagaattagaaagagaaaaactttcttgctctgtgggcaatgattttctttttcttttgattgaagtatagctgacttacaatgttgtgctaatttctgctatacagcaaagtgactcaattatacacatatatacattccttctttatattctttttcatt

SEQ ID NO: 36186 - DNA, 1462 bp, Bovine  19866880693894
  misc_feature (1)..(1): n is a, c, g, or t
ntaacaacaaaggcagacagacactgatggtgtcccgagctgtctaaagctccgtccacacgctgagctcaacagtggcctcagtaagccctgacatgagtgctgaagcagcaggcgttcacctcggtgtcaaacctgaccaagtcccgcagagacaggccctcactccgactccctgcctggtgctctggcccatctgtgaggctccagccctggcccggggcagaccctcccctcaagcacagtcagctcagccccattgtgcctacccattatacctagcgggtccatgcctggaggtttgcctggcatcgaccggagccccggggtcgtgctggtgccaggagttggggcatcattccgcggggttggtgtgttggacttgagtccaggggtggaggatttgtcattctgcaagggggaaacgcagacaccaagggaggctatggagattcctttctccaagagctagacaccacatgaggcctagttctcaatcttctgccacacaaccccttcattcttgcccaatcttgtttggcagggactgtgttcattgttcccattttacagatgcagcaaccgaggctcagaaagagtaactaagcacagggttcagcctgtacgtggtaaagccaggatgtgaacccaggccaagccccaatccatgtgctttctgctccacccctccaccttctaatcagcagcactccaggtgcagccccttttccagaaactttttctctctgccccaaccctccctagccctctcctagtctgcggtgtcaggagcagaccccacatacatgaccaaggtctttggtcttggaggagggcgtgctgctggaggaggccaccgaggcggggctggtgggggcatccttcttcaggccacgggccttgtccagcccattttcaggaggggagtgtgccgggctgacccggggtgtcgcagggtcctaaggacacaagtgaggcagagatgtgctaagagctacgatgagcctgagtcttctctggtcccaaggggaggccaccagctcttaacaacctagtctgacccttcctcatcccagagacggggagactgaggacagagcgggtgggtggacgggatctgctcaagatcaaacatgagttcaggcctccatgctggggagctggccctcttgacttcgtgtagatcccttctagctcctcattcccagctgaggctgacccacggggctcaccaccctaaaaccctagggatggtgcggagaatagagctgacctagaggaccaagggagccggccccccactgggatcttcaggggtctctctctctggagacccatcctaggaagccagcatgctgaatgactccccagccactaagcagccaagccctgtcttcctcctcctgaccagcctgatgcccccaacccaaaggcctcaaacccagctggggctgccggtaag

SEQ ID NO: 36187 - DNA, 1413 bp, Bovine  19866880734418
  misc_feature (1)..(1): n is a, c, g, or t
nacaaaactctctgcagatcctgagagttggtaaggcccagagccccaggggtagatggtgaagtttttcttcctggcttgcctgccacaaacccttggggacctaggcccaccgcaacccatctcagggctcgtctccttttcggcaacaggcagggcctcagtgggaccctctgtggtcttggactcttccagccgctgggtcgtgacaacagcccaggagaggagccagggcaccctgccattaaaaagagaattcttttgtggctgcaaagccgaggtgagtccctggctcccacacctccccaggagctgccttcggggttacccctggtcagtgctcactttggggttctggaacccgaggttattagcttataatcaccttgttcgaggctggctgggagatgtgaaacgcgtctgaccccgggcaaggggaatgcagccaagttctctgattgcagttaagagggttcaccagcctctccctgaaggtgagctgcaaaagtctgggtggggattttagaggcaaagaggaggcattaaccattgtgagggccagcgtccctgcctccaccctgcaaatgcagcaagctggcatcattcaagtccttgggtttggacggtgtcctgtgagggccagaatagtccagtttttctccagtacagaagggcagacctatgcaagccggcatcttttggtcatggaacatgggcagcctttgtgacttccgatgctgaggccctcacctgcagaacagggaagacggcagtggtcacctcacagagctcagataaagagttgctgcataaaccattcctggggtttcttccagaaagatcgtggagtacaatattaagactcgaattctccttggtgactaaattataagaaacctcagataactttcatggctctgaactttagtcttcccaactgtatgatgggtatactgagccctgtctggtgagctggctgggagattacatggcagacatactgtgtagaagatgccagactctgcgcccaggcacagactgggtgcttactgagcagtctaccaggacctgctggaggctgggaccataggttgtaaagagaggaagacctaggggcccaggacagctggttcaaatggttcaaggctcaacttcccagagggagagagcttcgacttgtgtatctcaggagcgctgaactgggtccagggactaagcattgtaacctagaagtattttaatccaaagtgaagagcagctagagggctcgatggtcaggcagctgcggtgggcatgagtgccctgtccttggatgtatccagcatgtatcatcgctgggtcgaggggctctggtaccagggagggcggaggctcactggctgatttctaaggtcccttctgtgatcacgagtt

SEQ ID NO: 36188 - DNA, 1127 bp, Bovine  19866880735890
  misc_feature (1)..(1): n is a, c, g, or t
natttctagctcagaccttttatctggatttcagtcttatgtagcctaaaacccactcaacatcttagaattctaacaggcatttcaaactcaacatatcccaaattcctaatctcccctccttaaaactgtctccaccaacaactctcctcaactgagctgttgcacctccatctttcccctcgcttagcccaaagcctgggaagtgccttcaacatctttctcttatgccccacatccaagagagaagcagacccggaagtcccctaccttcaagcagatccagattctggccacttctcaccacttccctgaccccacgctgcccaaagccaccactgcctctcctctgtgtgtgtgagtgccaagtcgtttcagtcgtgttcaactctttgtgaccctatggacccatcaggctcccctgtccatgggattctccggtcaagaacactagaatgggttgccatgacttcctccaggggatattcccaacccagtgaccaaacccacattccttctgttttccgcattggcaggtgggttccttaccactggcaccacctgggaagccccccctcttctctacatcgtagcaaagctttcctaagggtctccccactcccctcctttcctccctaccatctcttcttaaccagaagattcctttgaaaagtgaaatctcatctctcctctgctcaaaaccctgaaatatccttccacatcattcagagtcaaacctcaaatccttacaatggccaccgaagccctgtggggtctgcactttcccacctccatctcagtgactttttctgtcccctccaccccattattctggtcccagtcacaccagcctcctccttgttcttgaacactacacaacagctttgaaattctgtataatcatcccttttgcctaggaagcccctctctcatctctgcttggccaactccctcacctgcatctcatctttgctaaaatgtcaccccttctgtgggggtttctagcccacacctcccactacattctccatccccctttcccagctctacatttcatttccccttagcacttgctgcttttaacaactgtataatttacttagggactatagttactatatctctcc

SEQ ID NO: 36189 - DNA, 3773 bp, Bovine  19866880752849
  misc_feature (1)..(1): n is a, c, g, or t
naatgaaatgcaactctttcattgttcagatagaggaaccatgtctctgagagctttttatcaaagtgacaaaggtaccagatcatggtgactggaaagatgtatccacagaaataatggcaattattcatacacatttgagtacatttttctatggctgtggtacagtgaaatactgcccctatgcaactgagattttaccatacttgaccattttgagaaagaaaccaaaggaacgaagaaattatggactcagaactgctgccatggaaatctatccgagctccaggtccacttggcactgtcttccacagtcaccccttggtctcgccctgggaaggtgggccccgggcagaatccacaccagcaaggccatctccagtcacaaccctagaaaggctctctttctggagtagaagggtttgtagccacaagagttgtaaccaaaagagcttctaatcatttagaagacttggttccccatggggcttccctggaagtccagtggttaggactttgctctccaatgcagggagcatgactttgattcctggtcaaggactaggagatatggccagaaattaaaaaagaagaagaagatttggttccctagaatattccacggaattaatttctcctctggagtcctcttactacgtagcattgaggtcactcttgctgttaccttttattcagttatcacctctataaaaagaccaaatcctttaagaaactgtggctcgtgtccttttgtcttcctctccgttcctggtggagaacggtgacaggaaagtggagatcatccccattttacagatagagaaggctgtagagaggtgcagagaagggtgcagctagcttctgaccgtgccagactggagtgcagagaggagaggtctgcaggcattggtcctgggaagttctgtcactgggggtggacagagtaccacttggcctggccttgcaaagaagagccagctcagctgctccaaagagagccaggccagtgagaggagagcatgtggacaggccttaaaatcttttttccccctttttattacagttcaaaaagatccaggtgactcattttgtggtgatgctgtgaccctctgtcccctttcccagggaagtgaggggaggttatgccctaagtctattcttactgattctggcataaaagatgctcttcctggggaataaggattgtggccatcaagctgggggtatgggagagacaccatttgattaggtggaaggggtacttggtctgactacctgaattttaatctcaattattatttttattactagctgtgtgatcttagacaagtcacttaacctctctgaacctcggtttatgcttttgtgaaataattacccttttggagttatcagtagtcttaaataaaataatacgtgtggccatgtttcatagactgaagagcattgtaccaatattagttactgttattgtaaaaatgattttatttatttatgtattttggctgtgctgggtcttctctgctgcgtgggcttttctctggttgcaccgagtgggggctactctttgctgtcgtgttcaggcttctcactgcagtggcttctgttgcagaacataggctctagggcttcggcagttacgttcccaggctctagagcacaggctcaatagctgtgtatggtcttagttgagccatggcatgtgggattttcccagaccagtgactgaacccatgtctcctgcactggcaagtggattctttaccaatgagccaccagggaagccctattgttattttttgatacgccctacaaaagatatttgctaaaacccgtgttggggctctgagcgcaaggacacacagacagtgcacgtcatcccttgtatgtgacttctgcttcgaaaacagggtgaaataaacatacacagcagatcttcagactatcacagaccagggaaggaatgagtttcccgaagaaaacccccagcaatcacgttccctgaggttgggaaatgtgggctgtaatagctttgccatcatcaacactatgccggaatcacttctgggtagaatttagaagacaggggacagagagtgcagtgggcaccacgcccacacacatggttcaaacgcaagtttaccaccgaaaatgacccgaggattctggtaaaaagagttgtcattcaagatcagccttgactcatttctcccacaaaggaggaaatggaaagtcagcaagggagagcagacttcatatctaggtgatcttgagtgccccatctctcccccctcccttctactgaactatttcccttttcacctctctcacagctaatttcactattagagatgaattctggacttccccagaggtcacagactctgcctttcaaagcacagggtgcaggttcgatccctggttggggaactaagatccacgtgccccggggtgtgaccaaaaagtaaagagagagagaagtgcctttctctggttattcagtctctcagagttctctattacaaatgcaaaacttcctgagagaagtgacaggtaaatccagacagtgttccagttcaggcaatcccagagaccgcaattgtttccactgggtacctgagggagcaaaagggctgagtggggaaacagagattgttgtcccattttccagatggggaaactgagacttgggagaaataaagaaaacaattagcagtctgaggtgggagaaggccaaaccccgctttctcaccctcattgtgtgttttcttcagagtcattcaaaggcaactccaagcaatttgtctcagagaaaataagcatccattgtcttccctgttcttatctctggggcaacccaggctatgtgggcagcatgtggtcccttctcaagcacatccatgcataagctggagggtaatcatgactcctgtgcctggttctaaataacataactaggtcaatcaggccctctctctctggaattcaaactgaggtctaagggacgttgcaactgtgtcacactggagctcagaggtccagtagacacaagggtggtgtggccattacagggctataaacaccccaagtttctgagtaagaagaaacccagggagccagtcagccaggggagaaggggcacaaagaaccacaggaagagatacccaaggaacagtcccagtccctgagcaaggaagatgccccagtcctagggcagcgacccttaaatgtctgcccgtgggatgttaggataactgtggagcagcgtctgccaagatgtgtctcccaattatgctctttctaactgggcgtatcgctgacattaccttgtccttgctgtttcactgaatgctgaatttaagggaggcagataactttgatttccaggtaacaacctgaaatcaagagatgccccgtctgtgagtgatacaggagttatggcacctcattgctgatgaggataccccaacatgccaccctgatactgtactgacggtacctgtgctgctagtatgccagaggggaactgggggctgtacagagggagaaggagccaaatgtttggtgaccctaagagtaaactgacctctagtcatcatgttgttctctgaatatttccaatgcctggacttctgcaggttactgcaacctgctagggttgcacgtccaggccccttgtgtagggcagggccgtgtgaccttatctggacaatgagttatgagcgaaagttttaaagatctacggaggcccctcagtctcctgccttctctca

SEQ ID NO: 36190 - DNA, 867 bp, Bovine  19866880783953
  misc_feature (1)..(1): n is a, c, g, or t
nacagatgcccacctccaccagtatatgtatgtatattgtttattcattatgcacattcaaatgtaataatatattatgtatacaatgaacatggatgatttgaaatgcaattttgaaatgtaaataacattcctatacttttcttcccagcctattatttcttcccatttgccaatgtccagcctggggattatgcaccccatttggtaaccactgactaaaaacatgggctttggagcccaacagacctctgtttgaattcaggctttttttgtgaatttctatatggcattagaccagcctctcagccacaatttcttcttctgtaaattgagttgataatttctaatttgctgtgtggctcagatgaggtggtgggtccagggtcttgcagggtggaagagcccacatatgctaactatggtgctgatgaccatgattgggtttccctttctagtttaaattatttaaactcaaccccagataccacaggctatgggcttgttttctgagctgccgcatagtcaccagagatggtgagtcatgcccagtgtaggatgggcctaagtcttctgtccccctaatctgatggccccagattccatgcagatggatggacctgggacctggatgaagcaaggtggacttggtgaccccgcaggttggatggaactgagagataggtcaagtttccgctttctctgtgttccttataaaataatggaagtgtcagcttgggttcatgggccggtcacagtttcaatccctccctaacttcataaggcaagtccatgaattatacagtgccggagcagacggcgcgaagtacggatgcatcacaagccgggcttaataaggacattcca

SEQ ID NO: 36191 - DNA, 741 bp, Bovine  19866880789420
  misc_feature (1)..(1): n is a, c, g, or t
nggactccccatggtgagtcaggagatttcacgaggcagggcctcggcccgtggggctgcccacgtgttataccaaggcgtgtctgctgttactgagagggccccggcctgtgttgtcgctggaacaggggctttgctctgctcagccatcttgggctctgaagaggcagcgtggtgctggtgggacaggacgtggtggaggaggaagctggggtggcggcgttgtatagtagggggacggagggcggcacccctcactaagggctgggcttgtcttgccttacaggttggctttgaccctcaccctcccatgcgggccacaggcctgccctcaagcctcgcctccattcctggtggaaaaccgtaagccttgactacttattttctgcttgttggggagggcagagagcacaccacccactcacccatcccctgccctgatgggcctctcctggggaaaggtgtctgcctctctaggggtgcccctggggcaggttgcaatcccacggatggctgcctggctgcactcctgatcgcccccaggctccctctgaaaggggaagaaggtttggggttgaggttgtgatccctggacttgagaggggaggaacatttcacatgttgggcttcccaaccagatgccacggatcttccctgccctgggggttcctgtgggttctagccgcagctggcactcctatgacctgaaccagcgggcagactacacggctcaccccggct

SEQ ID NO: 36192 - DNA, 1443 bp, Bovine  19866880803812
  misc_feature (1)..(1): n is a, c, g, or t
nctggactgtgcccaagggctgctttatggctagtgtggctgataagtcaagattcaccaatgttaaacagttcattgctccaggtaagtcctgctttatgtgtgtttgctaattttatgttgatttatggcacctgatactcccttaaaatggtttttatggttgtaaaaatcacattagtagatgccttgatattacatagataaagacacaaatagtgtcacccaaatgaaatctaaaaaaggatcagctaaaaagttcaaggttatataaggaatatttactgtgtgaagagccaggccacaagaaccaggttactgcatgagggctttctccttccagagctctatatcccataggaatgaagttcctcagtttaatatttaagcatagtgttcatcctttaattttcaaactattttgcattaaagtagaaatttttctttctagagagagccatcctttcctttgcctattttttaccagtagctttttattttttcaagttaatatagcatcaccaaccaggcctgcttcctatgtggaattttgttaatgtgctagattgtttcaaacttcatataaagccatttcattaataaaatcttttataaaatcaaattaactttatgcaacatttccccttttaataagacagtctcattaattgggatgtaatgtatttctctccactaatcaatatccatgagaattaatgagttcattagttaaaaagacaatggaataattttagttagcacctcaggcttagttttctgtggagaaatgttgtcaagagcagaactcatccttcctcgcaccagccttgccagttggtaaataaaaagagagaaaaggttagaagaccttttctgtattctctccttgtcctttattgatggctgtgtaattcacagaccttgaaagccacaatacaaatctactccttctagatggccttaagtaacggatttatgagtgtttaatgcagtgcaaataatgagtgacctttagttttgtattctgtgactaaaacttcttttatcctgtggcattctgtgatattctagtacacagagcatctttgcctattgtaaaacaacaagcttggctgggtgagaaagtacatggagatgtttaagaatatttagcttatggcttgtagcaggaaatgcttagactaaaaaggacttttgattttgggttcttctagagggcttatttttacactgatgaatagtgtagtctggattagggtggaaaacagcagccctcatcttgatctcctcaagggctgagaagctttttagaaccatcccttgaattctgttctatttagagcagtaaaagaaactgagcatattataagcaaacaggtagcagcaacagggaagaagaaacatttttgttgttcgatttcttcttccttcttcttcctgctg

SEQ ID NO: 36193 - DNA, 694 bp, Bovine  19866880822882
  misc_feature (1)..(1): n is a, c, g, or t
nacctctctagttctttggccccagctgatgatgaaggacccccaacttctgaaaatgttccactctcgtctggtatcaagttctcaggcaatgcctcattcttgctcagaaagaagtccaacattcccagccatattgctatgccattgccttgtccaaagacatcagctagggagccttgtccaattcatgggtaccactgctttctcacccataggcccaatatcccaggtatcacagcctcaatggggctccatctctgctccatagggcgtcaccatccttgtgccactgctctcaggggcccagagcctaggtgacggtgggcatgcgcatctccactctctgctgacttctgtttcctggcgatcttgctgctctattagtgtagggccaggcttcttacactgggatggggttccctgatgctatgtcagggagtgagaacaccacaaaataaatacgtgcatcttagtggagcatcagtgtccttcactggtagctaattgaaaatatatatatttaaatattaaaagaataattatatggaagggtaggatacaaaactaccctacaattttaagtcaaacccaaggtgcatccatagttgtcatttgtgactctgtcacagatctcccaggagtctctcatcatctttcagtggatggttaattataaatatgaaaagtcctg

SEQ ID NO: 36194 - DNA, 1041 bp, Bovine  19866880832099
  misc_feature (1)..(1): n is a, c, g, or t
nagcataggctgaggttgagagagcaatagagactcccactgaccccctctgcactggtgacaagaagcagaccacgagagtttgggggcatttcacctcagctgggaccactctgtcatcagagcagtttcacacaaggccctggcagtcttttcatcgggtgcaattggctggaaatgaggcaggcagatgcctccagaccttccctggcaaaggcagacaggaattctatgactggcttggaccaatcgtgcaccttccaagctctgccctgagaaaggtgttcgcttactttgctctgattttgtcccttggggtggcatggtttcagatgcagagggcctggcgtggagtccctgctctattacatcagctacacgagcctggaccacggggttgcctgtgcaacccagagcaagttcagttatcctctttgtgagaattccaacttcacagcattctgaggactagttgaatgtgctttataatctgttgagtgctagtcccatgtacattctgatcactgccatttgccctgggttttgggtgaggggccagataccaccatgggttgttttgtcccctctttcttctcatctctaatttccaacacagagcactcagccaaaaagaggagaattgggcacagaggccaaatccccagcatagaaacagtagtgccattgtaaatgcctccagcaacggcaccccacccagctgagggagcctcgttcccaaccccgcttaacaacgcacagcctgatttaatacgagcagctgatctcattgcttccatagcaagtttaatttgctgggaaagcgagttggtgaagttctaataatgcagagctgcaaataataccgaagagagtttgcattatgataactttccaattaaaatggattaatggaggagaaacggcagcagtagtgtctagacaacatattactaaatccttggagagggagatggaaaggagttggggaaacgggagaaataaacaggggaacttcacgagttggaggcacccttgtgtgat

SEQ ID NO: 36195 - DNA, 1400 bp, Bovine  19866880842293
  misc_feature (1)..(1): n is a, c, g, or t
nccctctgtgtgtgtgtttatgagaccctccactctcccccagtaggccttcatctgtgggcatcaaaagccacagtgaggagttgggggaatgggatcatgtgttacagaacagggtgattgtctgtctgtggccctggctaagtttgtgagatcctggaattgccctgcacatctctgggcctggagctgagccggcctgcaggacaagttggctggaaggatgggtcccttcctaagttgtggctgatctgtgctgtagcccatctggggagtaactagttgtggcgaccactactcgttcactaaagaggcatgctatactaaagtgtgacatactctgggctgcaacaggtggcagttcctgcggggcaagtctggggatcctgacaagatgccccccacccttgtcctgtccctgggtgcagggtcctcctgcaactcagttaacagagaacgaggacttgctccctgcactcagagaccagctgcagctgtcccctccccgcaaggaggaaacacagcagctcacacctggaccaacaggaatggagaagcaaatgaagcaaactaccgcctggccatagaaacctgtagaaccctagtgtctggctggctctgtccctggccacgggctgcttgggtcctggccagagctcagaagtccccagagtgaccccaggggctgttcgcaggtccgcacttcccactcgaggctcccctggcagctgctcctgctcctcccactagaggaggaggccatgcttagcgtgccaatgacggtggctgaggggacctggcctcctgcctccctcctttcagtccagcacttgatccctagtcaccttccctccccaggctcctccacatcctgctcccttctcattagctcaagctcctcttaacttagtgctaatgcctttggctccaacttacccatttccctggagagtcctgatgttgtgtttcttaagcccatcctgaatctctagtcgatgaggctgtgtttcttggtttcagtcccttaatgggctttcagaattttctgcctcagcttttctttcccttcacaacaaaaagacatgactattaataaggagagtttttttgaaatttcttggttgttaaatcagtttttctttttactcattcaaaggagtgtttttgtagccaggagggtgtttgtctcttcagagtagcggctgcttctgtccagtagaatggaagccccacgagggcaggggcctcgtcagtcttgtttcctgtttatctcctgcttgtcatagtgctcggtacacacacagggcaggggatcgctgttggttggaccctgcccagtgtatctaaccacttcaagggaagagttattcagagtttcatctgtgaaagttagaatctat

SEQ ID NO: 36196 - DNA, 1523 bp, Bovine  19866880886131
  misc_feature (1)..(1): n is a, c, g, or t
natttgataatacatagtatccagcatttatactattatgacaacctgaaacttgaatattatttatggctgagccgggtagtgtactatggttagttttcttttttaactttaatttttttctgtggttaataattgcttttttttttgtttgtttgcttggttttctatatttctgtcagtaacttatctctggtttacccagactaatttacccaggtctcttgcactgcaggtggattctttaccagctgagctaccagggaagcccaagaatactggagtggatagcctatcccttctccagtggatcttcctgacccaggaatcaaactgggaactcctacattgcaggtggattctttaccagctgagctaccagggaatcctaatttatctctagattttccaaaaaatttgtagaactcctctaaatatggtcatacatatcagatagtagttcagttccatttttttttcccacatggagacaccctctctggaactcttgaccctctgctgcagtctggaagggggtctccaagtctgccgtgtggctcccgtccttggccgccctccactgtcctggtggcttattcaggggcctctcttctacgctggctcccctgttgtatcttctcttttcttcttcactggtggttgagcatcgtttctaatgacatctgtaattttcagtcccttccagcacctttgcgtttaggaacgctggtgtttgatttccgagacttcctagggttctagtatataaatcagcttgctgcttctcacttagccctgataggtacttcaagagagaaaaaagctgaaatctaagtcatttcatcagatgttcagctatttcttatcttccaaaattttcttgaaacctcttgtttactgtcttctctttcatctttcctgtttggggggttcttatccttttaaaacctctctactataattttaataaggtttttgagaggaagcagagatgagctgggaatccaattgatttaagaaaatttaatgaatgtaaaattgattctttaggtcatattgtgtctctgaatgaagagaaagtgtctttgccttaatttaacattcagaagtcagaagacagcttttcttccaactcctctttggctaagttttctttgaaatccacacttgagatgagggtgcattagggaccacaactgttcatgacaaactatcagatgaaaaccaatgaactatctgttttggttgtctattacccaacaaggctgcatcacaaacaaccacaaaacctcacagttacaagataactgcttactgctctcaggtatacagggaggcgggaggctctggtattcttggtgggttctctcctatgtctggggttggttggctgtcagctgatttaggatgacctcatccgtggaaatttggaaactaggggtacttgggtttggcttcttgtgtctctcattctgcagcaggctagcctggaggtccactcacgccagggcagagacacaagg

SEQ ID NO: 36197 - DNA, 1185 bp, Bovine  19866880949994
  misc_feature (1)..(1): n is a, c, g, or t
ncaggagattgaatggctgtgtctcactttcacaggtcacccacttgccaagttgtgatactataaaagagtgactgggaggtgaccaaactgtggagactcagagggtgtgtgcagcaggagcgtcatacatgcagatcgcagagctcatcgcttttccaggaatgagttgcaaggcagaaagaccagggatgctcagagcttgagtgccccgggcagttgctgtgtccctggcatgactgggctgccactggaatctcatcacctgcaaggactcaggaggaagtagggaggacatcttgggtgggatggcaggggcagcggggccttccaagcctctgtggacaaagcctggaggggccagcactagggaggacctctgtgtggtcttaggcctgtgcaaggccctgcccttgcataggaagagatgatcctcattcctggctttctccaaagactgtctccttgagttcttccacagcggtcatcaactggagacctgggggccttgtgtgggctgcagacaggttttatttgattgaattgttttcaataactgcaatagcagtcagcattgaaacactgatttcaaatcaaaactctgggccttttctgagaacgtgggccatctggccacccaggagcccagccctgtgtggccactattgctggggccagttgagtccctgctgccctttagcacatgtccctgggttcccacccagccagcctccctcattttcatcacctgcctggcatgggtcctgggacccatccccaagtctgtattttattgatggtgaagccggagacctgccttaaaagatgtagaaacagaaactctgagagtcctccccatcccagcccttttgagcagcttcaggtttctgtgggccagagacagctgggccaacagaagaggaggtgatggtggccctcactccacctccaccgtggatgtgccccctccccacccccaacaaccattgcattttccagattaaagattccaggcaggctgggacttatttcccactcagtgtctgggacatattttctccatcaagtcattacaggttcgagatctccagcaaccccgggtcttgaaggcggggctgtcttttctgacagccccggggtgctcagacaccaagcttcctctgttccctttccattcgcccggct

SEQ ID NO: 36198 - DNA, 646 bp, Bovine  19866881004983
  misc_feature (1)..(1): n is a, c, g, or t
ntctatggacctcagtcttcaggggtttgtgcagggtggggtccacagaagtctcttccagtgggagaagcagatctgattgcctctctcagccctgcctctcactagctgtttccctgtgtaagtcacatggcatctgcatgggtgtttgtgtcagcatcatgcgaggatggctcccctccctctcgggctgtgagcaccgccccaaagcaggtggatgatgttcctaacacaaagctgggggaggaagtggtttgaatcccacatcttgatttactgagtggggtagtcagtctttcgaagtttcttcctcagctcggggccagcccagaccgaatgtggtttcctctcggtgtgtatgcacgtgtgcaggcaagtgtgcgggcaagtgtgcgtgtgtcagagcgactcgcctttcatggacctggggttcatggccacctgaggagcccaggactccctctcagacctgcccaacatgccaagacgttttgggacccagatagacactcatagacctgggcaagtacctggtgagtgttaatatggtgtgcctcttgtaagggtggggatgggggtgggcgggggggcttaaccctgggaaaaatcatatagtgatgtgggtcatagaacataaaacaaaatt

SEQ ID NO: 36199 - DNA, 885 bp, Bovine  19866881054700
  misc_feature (1)..(1): n is a, c, g, or t
ntgatttcctaggttaggtctaagagacattgcaacttcttccttagtctgtctctttgatcactcactctagaggaaacctctggaggaagtcagctaccacgccataaggtttcaatcagggatcgaacctgtgtctcctgcattggcaagtggattctttaccactgagttgccatggaagcccttgcactggtatcttaatggcaggaatgtactggaaagaaaactctattcttgactccactctctccttttgtggcatcttctttccagtgccttgtttcacaaagtgtactattctataactcccttatttatcagtgtatcagaaacctagatgtctctaaatgtgagaaaagagaaaagctgtgaagcactcttagcctagattggagcttggaatactcacatttgacttctaaattaaaatgctttggaaatagaagctcctgaagaggcccagtgtgaagggtacacaggcaggatgagtaccaaaaaggcagtaagccaccacagacaggggcacccctctcaccatctgtctttgtggcatgatgctttgctctgtggcctcagagtcatgccctatcctcgcaacctctccatctggtaccaagtgctgtaccagcacattgtgtgttaagaactgccagggagccagaaccaccatggtttctgttttcaagatccaaggcttgaattctgcccacggatcctgtatatctcttggctgtgctgcggatgatttcagcagaaggctctggcacttcttaatcccaggaccagtgtctactcataacctcactcttgctcccgcatctgtggctggtcttcgccaaccagcagcaggacagaaccagctaatttcttactcaggtctta

SEQ ID NO: 36200 - DNA, 836 bp, Bovine  19866881119930
  misc_feature (1)..(1): n is a, c, g, or t
nccagtggttaagactcaatccttccctgcagagggcatggattccattcctgatcagggaactaggatcctgcatgccttgcagtgtggcaaaaaaaaaaaaaaaacaaactcagatgagattatattgacagttattttctagttttaaaaaagtaatacatcaaaactcttcattttttactgttatgctattttagaatgacacctttattaaaaaaaaaaagaaagcagtgaagtagtatatgaagtaatgcttgaggattttcacaaatctgtgactgaattgttataataccttttgatcttctttgtcacttaattaaaacaaaatcagccttagtgtatgaagcataagtagacttaagacttttctccttatatacttttatacatatatgtatataaaacacttcagtagttgtgaccatactatacttcagtactataaccataaatatttaccagtttataattggtataatttaagtatgtcatgactttttaaaggttccaagtttaaagtctattgatatcttttcttttcatgtctagatttaattcttttcatgtctagatttaattttcatgttcataaggaaacatctgaatgtgtttaagcagatgtatttctatcctagatatagtgcgattccatttatgtcctttttattttttccttctccgcagactcagtattcatttaaacaagtatttggcattcataccacccaaaaggagctctttgatgttgtggctaatcccttggtagatgacctcattcatggcaaaaatggtatgattctggagttttgctgaattttactttttctctt

SEQ ID NO: 36201 - DNA, 2118 bp, Bovine  19866881152497
  misc_feature (1)..(1): n is a, c, g, or t
nacccagggggaggtgagcaggaacgggattgcaggggttaatgagcctgactcaccactcaatagctgtgtggctttgggaatagtccttgttttcctggggctttgtcttccccctgtgctaacacaagactggatcaagtgccccatggcctctccctaccacattcaaaaccctcacatctgtgactctcccttttcccaccgttttgttcagcccaggctctggaccccattggtactgaagcaacatttggcaaggagaatactggcacccctttttgtgcaatcagttcctattttgcattttagtgggctccttaaaccaaaatacccttcagaaacctaaagaaaaaatggcaaattacccaaactccagaacataaggacatattcataatcattgggtttccagggatctcaaaacccctatgcaaagcagataaataaatgccccctggggagtcctgaggaccagaggcaatggtaggttacaaacccactggaaagttccagtccggaagcccaccaaaccttttagagtcaccaatctcttcgtggatgatcaacacccttatttcatgagaggatgaccaagaaaacggttaagccccaaaagcttccattccttgattctgcctgctctaaaatctgggatgattcctgctattaatattttaagcaactaatttgacatttttccatttaattaacttgcatatatatgagaacagggtgctgagagtaccatgacatttaaacaaagtcatttaagtttgcctgtttctggtcggggggcggacggtgttgctcttttctttgccttttttttcttttctctccatttctgtttcgcattcctgatcctgaggctggcttgttagctcagagaaatgaccaaatttctcaaagcaaatgtgccataatctcaacctaggtgacgtgggtgggcccggcgctctaggctgcggagcttttaaattcgatcctgctcttttccaagcttttgtgcaaatggcgtttgaatcagagcaggcccgagtcacaggctaatgttttccggttgccacaccaaccctgggttgggggtggggaaggggcggcgggcatgcccaacatttatcaaacgtcaccatctcggcagaagagctggggtttcaagaggcaaacaataattccgtggcgattttctcttccaaatgacaaataattgctgtcatattatcaaatgattaagaaataaaggaaaatggacaaatagagtttagccattgagggatggtgtgggggggaccagggagatgctcactcagtgttccgtaattgaaaaattgtaccctaattagctcccaccccagaaaattcatgagttctaggcgccatccaatccccagcccgccaagtcacagaacttgcggcccttcaagtttagtgctggtttcagaaggggttcgccgtctccaaatggtttcagagagcgagacgcttcagctcgcacagccctcagaaaggatccattacttcatactttcatctgccataattaatcacagatttttctctgcctatcagcttctccggctgctctctccacgtgaacctgggcattcctggctccagcttctccgtggtggtcagcccagccaggctcggacgtgccgcagaaactgcattccccggatgcaaaacggcaccccccaatccgaggcatctcagcgggagaaatggtcctgcatttgaaatgaaaccacatttgcaaactaaactcacaggactctagagatattcctcgtctctgtttctacccacttttgggatactccctggggatttctaatgaggctgtcagacttcaggaagaatataagaaagggagcgtccccattctcccccatcccctccccctgggcaagggtttcaacaagcccagctccatgacctcattagatgcgtgaccctggggaagagacttggtctgtctgagcatgagtttttccttttataaaatgcagctaatggtgcctacctttccagaatgtgatggtgtatggttgctagcaccgcctcttgatccttctatatgaagttggggataataatcttacctacccactgggg

SEQ ID NO: 36202 - DNA, 1046 bp, Bovine  19866881173526
  misc_feature (1)..(1): n is a, c, g, or t
nccagggcagagcagagtgggtacacttagggcagagcagagtgggtacactcagggcctggggatgggtctgggggtgggcctggtctccaggcacacaaggagcttcactgatggacagctccaaggcttgctaactcctggtcctcgggtggcagcgtccgcggtgtccactcacagcagggcccctagagcctctgcccacaccccacccccgcccttgcccctgccccggccccgggtcgcacctctgtggtccagctcatggtggttcttctcgtccttcactgacaggtgggcctggctgcccagtgcaccaagcgccagcagccctgagctgctccccgtcactggggggatccctggaggctggaggcctgacgggtggggtggcagctggaccggggggccgtgtgtggcatgggagaggtgctgcgcctggagctgctgttgctgcaatgaagtgggtggtgagcacggccgagccagcagggcggcagaggcctgggccgccctctcgctcctccaggaggcagcaggggaacgcgcaccccccaaagcttcatccccagctcaggccacatgctgtcatgctggaggaagtctgttaatggactgcaatttagacacaagatttatgatggcaaacaccacctcctccccaaccaggacagaatttctcaatgtatgattcccagcccaagataaataaagcatgcatttaaaaaccacagtcatcagggctccctctctgtggagggcgatccacttttaagctcccagcggtcacagttttgctcatgcttacatgcctgccaacgtcagcagccagcgtctcccacccttaaccccaaccctgggggaagactccctaattctgaagaactccacgcctgtcttacagagcaagagcagcacacagcagaagagtcctgggatcaagaagagtttggggccagaggaatgagaaccaatgtcactgaacaggagagtggagaacagggtgaaaaggggggcttggaattaagacagatctggatccaaat

SEQ ID NO: 36203 - DNA, 1398 bp, Bovine  19866881175789
  misc_feature (1)..(1): n is a, c, g, or t
ngatgagttctgcaacctagtaagctgaacgaaagaagaaaaaagtcccaacaagccccatttcagtgcccttgaccttgcagtagagctctaagtgcaaaatctgtcatctattaatctgttagaagttgacaaaagggactttgatcagaggttgttttttccccccttcttaagtttcctgatgacacataatagcccatttcagcccggggccggaagcacggccatcattcttttgctcacttcaaccccagcagcctccccgccctgtggctttttccccgcctctatattaattggcctgtaagtggttacatgtgtttctttttatgtgtcagttggagtctgttatttgaacttcacagctatttgggaacgcaggagtgatgctccgggccccagtctgtgccaagtcacactcgctcccacctccaatctttgtcttctatccctgaggcctgggggcctgggagccttccatcctcacccccactcccaccccatctcactcctccgagttaggtcccctactttgcagtccagctcttggaaccgtggaagttcacaggcaggagaaaccttcagagccgcgcactgtagcttctggttttaaaggagttgaagactgggtgggatggggagaggggcagaggatgttttttaatgaaaataacatttgatgagactctattatgtacaagtttcttatgtattctctcatttcattttcagaataactcagggggatcacatggccatttttttcatatggggaaactgagtctctgggaatccaaggagagaggactctagagacgacttgccctggactgtatcctgcctctgacaccagctgtgtggtctttggccagtgggttctcttctcggtgtctcaggtcaacatcaacaatgagtctagtaatagtacttacttccaagggttgttgtgaggattaaatagatttcatgtttttaagggtttacaaccacacctagtagacaaaaagcacctaataaatgccagcagctgttgctgcagttctgtgaggcagggtagcacagtggtttagaacactgattccggagtgagacgtccttggtttgaatctcagctaccccagctcactgtgaacttgagtgagctgcttattttcttagtggctgctcccccatctacaagtgagggtattcctaatggttggggttccctcaatgaagtggttagttcccatgtgattaccttgtagtgaatttcaccaactgataagccctattcaaccccacaagaggttttcatctgatctttagtgacctaaatacattttttggacttcaaaaaaatatttaatatcagagagattagaagatactccatatccaaagccaaaatcagaa

SEQ ID NO: 36204 - DNA, 1045 bp, Bovine  19866881181649
  misc_feature (1)..(1): n is a, c, g, or t
nttgagcagagtcccctgtgctatacagtaggtccctgtaggctatccacgttaaggcttggcgtttctttcaatacctgcaggtattcctgctccccggggagagtgcggagaacgaagccaccgtgtaccaccagaagcacgtggccatgaccctcctggcctctttcttctactctgcgcatctgccggagcgcctggcccctggacgcttcgactacatcggtgagcgcgtggtgaccctgctgcccagggggcgctcccatccctgacagcagtgctgtagttgccaaggggaggcaggggcagggcgggaagcaaatccccaggaagttgtccaggcccaggccaaggtgagtgaaactgtcaggtgacagatgtcaggatgtgcacagaccgtggatgcccagggagggtggtggaggatgcagagaaggtgggtctaggattctaaagcatttctggagggtgtggggacaggagagtcccattattacctcgaacgtgaaatcccattattaagtgaccatggaaggcagctgtaaagaggaagaggaaagacagggtacagaaggctctgagggtaccagccggtgaggggcgggcagtgccaaggagaggaaagagggtctcattcaggtgggtgtgatggtgccaggaatcatggtagagcagtggttcccagactcagcagttcccagtctggacgagtagtctcagcctcagctgggagcatgtggatctcagcccccacccccaagacatcctgctggggtgggcccagcactctctcagaagctgagtgcttctccaggtgagcctgaacgccactctctcagaagctgagtgcttctccaggtgagcctgaacgtgctcaagccagagaggccatgtggtgaagaggaggcgtcagagctacaggggtttatacctgctggcagagttccttcccctctgtcgagggacgtgggtagcgctgtgcaacgtgtctcctccaccctggctctgggactggcttggaaggagggagccttggccacttctg

SEQ ID NO: 36205 - DNA, 1458 bp, Bovine  19866881286902
  misc_feature (1)..(1): n is a, c, g, or t
ntggtctaagtctaagccttctagcccctctccccctgctctgctctcccagagtctcaccatccccaggagcctctcattcctccacatccttctccaaagggctcccgtttaatcattcagctagaccttaatctccctaagagcagaggtgggaatttgtggcacttgctgaccagctgttctgccaagacattctgattgattaatcagtaatccactgaccatgtctctttaccttagtaaactcttattattaatcatatctaacctctttagtttcccaagctgcaaaccagaggcctgccgtgactgggagtctggggggtcacccttcctgctgtctgtgtatgactgtggggtggggtggggtgggtgcctgtgcctgctgcagtgtttacagggtggggatgaggccagctctaggcttcaaatgcctcataacccattcggtctgtgaagcccattactgccatggccatccaaaaaaaatagcacacaccctttgccttcccccttcaaagaacttcatatctcatctggtccctttgtaaggcaaagccaggattgtttacaagggacctgttcgaggccactctgaattcaacaaaagctaggactggctctttgtcaagctctggtttgtacaggatgactgcctgtctggttgtacagtcacatcacttgcccttcaagaacttaagtctgagaggccaagttagtacacacccgctcacccaccctcttacaaggtatgtagccacaggaaaacctaataagccagatgatcaatagtgtggttgaggatccataaaacgggccttgggcttcccgggtagctcagttggtaaagtatccacctcaggagacctcagttccattcctgggttgggaagttcccctggagaaggaataggctacccactccagtattcttgggcttccctggtggctcagatggtgaagaatctgcctgcagtaccagagacttaggttcgatccctgtgttgggaagatctcctggaggagggcatggcaaccactccagtattcttgcctagagaatccccatggacagaggagtctggtgggctacagtccatggggtcgcaaagagtccaacacaactgagacgaagcacaaaaaaggccttagagcatcatcagctgcaacccactcaccgtaaactgagactcagaaaggacagcaatttgccccaggttacagaactaaaaggaggctagagcccaggtctctggactccaggtccagtgctcttgccgttgtttgcacacctagcaaacatggcaaggaagggagcagaaggagctcagagagcctgggccacaggtgggatgctcctctacgctagtctgggagttgagagttcctctgggaggaggagggctgaggccggaagtggctgcaacctgggagtagccagggagtctgggtggt

SEQ ID NO: 36206 - DNA, 1230 bp, Bovine  19866881288422
  misc_feature (1)..(1): n is a, c, g, or t
ngatttctagagcaaggaggaatgaaaacatgctcttggctctggcctgcacactgagccctcacaggaggcgcaccgggcgtatgagcaaactgggcagctttttttttctgagcagtgttgtctggtattaaagtaagttcattttccatctcaacacttcaatataaggagagaggtatggggccagagaaggatccagaaagaggtatgagagagggaagaggctttttttgtgtgtgggttttcaaagcctggggcctgacgctgcactctccctcgctcactcatatacactcacacagagagagagacacacacacagtcttgcacacttacacagtcacacacactctctttcagagccagtaagacattctcttgatgcagtttggaagtctggcatctggtgcatcacacatgtaactttcaagagtctctagttacactggatacacctgctctcagctcagaaacgcttcttcctatttgtaaactcaggatgcaaagctcacactcaagtgttgtgttttgctgctcggagctgactgtaaagatcacatctggcccagttaatgagcttttccttatggggaagcaggcagaaggggccccactgatgggaagggctgtgtttgaaggcctcacagcatgctctccagggtgggcagagggcgggtgaatcccacgagtaccaagaaagcgctgagtacccccagagagtgaatttctgtcctttctctcctcctccagtctaaggaatcctcgtcagtcttgagctgtgacatttcggcggatgacaaatatatcgtaacaggctctggggacaagaaggccacggtttatgaggtcatctactgagcaaggactgtgacggggctgtcaagctcggggagaccccgactcggctgtgccagggagaccccgcagacacggaggacgggcagcgagcggcccagccccgcgctccggcgggctgagaggacacgcccgtcacgtcgggactcctgtgtctcacggactcccatggatttctcccctcctcctcccataacgatgctggcagaggctgcacgtagatttggaggctcatggctccggctctccacatacaccctcatgaatctctttccttcccctttcttttgatgtgtcctccttccccagcccggggacactggagtgtggaccacacgtttgtaccagggagtgggggagggtttcacgtcc

SEQ ID NO: 36207 - DNA, 1285 bp, Bovine  19866881290303
  misc_feature (1)..(1): n is a, c, g, or t
ntaagtctgtgagtctgcttctaaaacatgagtagttttagatggagtaacattaaaccattatgaattgacattttggccgggactgagccaagagtgggcagagcacaagctaggcctaggggtgaagggccggatagggtgccaagggataggagatgggttcaaaggggtagaggaaacagcaaacacctgtatttctcatttagcaactcagagtgtttctggggagggagatttcacattgtatcattcacgctgcagccaaactctcttttggaagaagttgagacttttacccccaggtaagacgttccagatgaggaaaaatccccacgacgtccagataatggcatgacttgccccagatcacacggagagtagccagcagggaggacaggcccccaggatcccaggtcagtgttctctgggaagggccaagctaaccagtgtccgtggctgccctccccatatacacaatgcctgactccctggccccatgtcgattctgttcccaagaaggctttctcttgacagaaaatggagctgaaagggcaagggaatagttccaaatggttgatctgacagctgcaaatttcattttgtgttacgtgctgacctctaattgtttcccaagtagcctgggactgagagatcaataaatcccagagatagttaatatcccctctggcatcctcagctttagttagaaaacagtcaaattcatggctttctgcaaatttcagctttctgcaggacccgatgaactataattcagccaaggatcagattggggtctgagaaattcgtggtgacccagagggccaggaccgagagggaactcagagttgctgacccaatctctccttgtccaggtggaaggatccaggacaagagaggttcacggtggccaccaagagggcgagaactccaatccagcctcctgggctctttctactcctccaagcttcctccattagtttattaatagaacaagggagttggggtcttttggttaacctgtccccagagatcttcttaaaagaaggcttggatgtagtagaggaaataacagatttgcaatgatagaagctatttcccttcttccccttcctctgcctcttaacagccagtcgacccttggtcatggcactttccctgctgagcctcagctttctcagctgcacaatggggatggtaattgtccctgcctacaaagattattgtgaggattaaatgaatgggtgggggggaagtcctcaccctgagcctgcacaaaatcagt

SEQ ID NO: 36208 - DNA, 746 bp, Bovine  19866881303825
  misc_feature (1)..(1): n is a, c, g, or t
nctggcactgcgagtttttgaaagttgtagcaataagtaaatactatgctttgctcaccagcttcacgtaatctgttcccttctgcttttgtccggttagttctttcacttccagcaagatctaccaaggacaactggctaatagtgatttgttctttttcctgaagggaagataatgccaatcacatgagtttacagtgttctttaaatatgttcaagtgaaattaagtcttacgaatataaggtttacataatacaaaatgcataataagggggaaggatacatgtttggggggaacagtttactaaaagcatatgataaatatcctcatgacattacttgcagactaagttacactgtaagctccataaaaacaggaactctgtcttttagccacttcatctccagtaccgcagtttcaagtactcagtaggagctcaataaatgtctgctaaatagtctagaggaagactaaacatttgtataatgagatatttaataatcttacagcgtaataatttcatgatactctaataacttttataagaaagtcaagagacacataactgatattactaatacattagatgtgattcagaggaaagcaagtgtatagagacttagaagcattttctagctaacgtttatcaagtgctgactgtaagccaagcaatggctttacatgcatcacctcatttaatcctcacagcattacaactggaatttgtgtaaaaaggttacaaat

SEQ ID NO: 36209 - DNA, 751 bp, Bovine  19866881311806
  misc_feature (1)..(1): n is a, c, g, or t
ntttaaatggctgtaatgcagtcctccaagcaggttgacaccccgtattttatctggccagtccaagtttctcatccagggtgaggtggttgccaagagccttgccaggtgggctgcctgaggcagggggtgtttgtgtgggccttctcctccacctgcagcccaggctgatgccatcatagtcttcatcaaaaggcctttgtgaagcgctctggtgaatgtaccctgggccccggggggatctcctgcagagatcatcccaccagcccctgacatgcagggcttgtcggctcggacaggcagcatatatgtcaaccatccgaagaccaggctgtaggccccagccagagggtgcaaaaccagattcttaagcaacattcatgacagaagtaagtgcctctgggaatggacagacaggctggattcccagaggaagtcggggccttgaatctgctcctccagctgactgcaggctcctgggaggacacgagattttggaaaccatgggaaggaagcgggaagccgcgtgacagatcaaggacccggggtcaggtgttccaggctccagtggacaagtgcccagcctgggagaaaggtggatgctaccagggacgttcccctgagaccttccggccaccctcttgtgtaacctcagcatccctttctcctccccttgcaggtgttccatgaacagggcatcctcttcggctaccgacacccacagagttccgccactgcctgcctcctcagc

SEQ ID NO: 36210 - DNA, 514 bp, Bovine  19866881333233
  misc_feature (1)..(1): n is a, c, g, or t
ncctcgcgcacaccaggcagcgccgcgctgcccgcggacccgcccccgtcaggagcccgcctgccccggttgctccgtgtccccgctccccgaccgctcctcagcggagacgcgctccgggcttcctcacctgggcagcgtcgtagggcaagcggaccggggaaccctgaggaagagaaggaggcggcagagaaggggcggcccaggcctgcgtctgccgcagctccaacccctcggcgaggaagcgcttgtgtgaggagatccctcccgctccgcgcgcagcttggagacagagccacagccgtacccgccgctcttcccgcgagatcccagccacagagtggggcggggccacggcgaggggcggatgcagtgaatcgagtgacaactctgagagcctgttggcggcagcgtgggaggcgggacttagagcctaatactaccaatcgcaaaataggaaaggtgattctcccaccgcttcttctctcccccgccccgcatcaataaactaggg

SEQ ID NO: 36211 - DNA, 786 bp, Bovine  19866881365146
  misc_feature (1)..(1): n is a, c, g, or t
ntccaagcacagggagacaagttctctccataatctggctccagcctcagcaaagcactttgcatagagtagatcctcacagaacagatatcagaaagtcacatctaactcttgtgagcccatggactgtagcccacaaggctcctctgtccctaggatttacatgctacataaatctgaacaacaaaacatttgaaaacaattttgcattcgtgcctagtttgacccccaaaggcaaaccacagtcattgccttaatgctctgtaatgggcctcatttctaagcagccccgagttagcagacactggcttatttgcacagcagaattgattcgactccaccttgcctccctggttgcaggccaaccaatttagagtgaaatgaaatcaaattgtgtgcagcctataatttaggagtgagaacccccaggcagccaggtggaagggcatgtcagtgggttttccgcttagtgcctgccacacattgggcttccaagaaaggccctgtgcacctgccagctgatgcctgaaattccactgcgactatttcaaacccttggtgtttccagctattaaactgcaaatcacctggggaaaataatcaaacctggctagcggtaaataagagttggattttgatggcaaagcggagaagctgccagagtggggttatcaggccacaggcctctgtgtggtaatctgaattttttcgtctagatctcactgaatcctcatggccctagtaggggacaggtttttttcctgtccccatttcacagaaaaggaa

SEQ ID NO: 36212 - DNA, 2281 bp, Bovine  19866881368221
  misc_feature (1)..(1): n is a, c, g, or t
ntggctctgctgttatcacgtcaggaacttactcccacccctgggcatcagctgcttcctaatatagtccagtaagagagaactggttgatcttaaagtttttaaaataaactaccaaaaagtaatcactaaacttaagcagtggtgctagaaaaatatatggacaccatcatcagctgctagtttttatccttcctgccatgtgctatttctattagcccattctgaatatagaactccaaagtattgcaaaaagtatattcagatgcagaatatatcaaaattgtaggttatggtgagtttttttttcatgacaatttaaaaaatatcaagtctgcattactgtagctattataaatagtgaacaatatagggacaaaatactgtctttcattataccagctcattaaggatgtcaaatcaaaactggatgtgaatttaaatgctgtactagtgatgagtttcagtgtttgctgctcactttctggtggaaaagatacagttaccatctggtaagaatgattggtaacttgtgtgtggatgctgcatttcctgaatgttaagtagcagcaacactgtgtaattttgctaatcctttttcaggagtaggattttgtgaaatgacaggactgcaaagtaaaccatcaaagaggagctgtagccaagaaaacagcaaaagaagaaaaaagtcctgtgaagggtcagaaatagagcaacccacaaactggtggtgaacacacagttcaggtagagtattatcaggcaaccccacactgcctctaagctgagcacctggaagagccagtgccttcctgggattttgctctgttctcatcggcacccggaggtaagaatgactgctccatttcagcttagaaaatctagtagtgttaactagtgtgcgtagttgcttagttgtatccgaccgactctttgcaactccacgggctatagcccaccaagctcctctgtccatggaattctccaggcaagaataccagagtgggttgccatttcctccttctagaggatcttcccgacccaaggatcgaacctaggtctgctgtgtctcttgcattgcaggtggattctttacccgaagtccctgagatccggtgggggtagaagggtctttggcaaaagtgcatgatcttaatttaatacctgttattctgcctttgcttttttaatacgggtgaaatgaaatctctgcaattcaatggaatatagggtgggaggccccaaactaattcccaaattccatcgatggtgtggcaaggtaatcaggagaagagtgcatcatctccactcctatgggcaacaaaaagagatgctgcctccatctggaaacacccaccagaaggagtcacccaggtagcttatcagctagagctctgagcttatcggctagagctctgagcgtcagggtacagcaaactatggttctggattggtgtttctagatcatttttgcttgggaagaagtaccactgttgtcccccaaactcgacctcatgtacagctcagcctaactcgggtggtagatgagaaaacaaaacactgtttaagtaactctctcaaggtcatgcaactcttttcatgtgttccctgtctcaggacagcagaggtaagatgctgtgcctgccctgagccacagccagaagtgctcttcctcggatgggctttgcgtagcctccccttccccaaatcagagccaagcagtagtgggctcaggcaaaaggactccatgtactcgccttttaattcttttgtcagtctcaggaggaagtactatgtgaacttcacagataaaaaaggaacttgcagaagtcaaacaatttgccagaagtcactcagtaatttgacagtgtggtatgtctgcccccagattccatgtttcaaatcatcatccccaagcaatagccacgatccactatctcctgactccaccccagggggctcgactagggatgcaggtcacagccccagtcttggcccaagaaggggaaatgagcccatttcatctggggatgctatcagaactgctgaaatggatacttgctccactgaatgattagaagagcccagaaaaaggaggtttcttcagcgatcaggtctccttgatatgtgccctgcttattctgcatccccggactatttacattagattttggatgacttagcatcgcagcccttccaagcccctctaacaccctcctgctgtttactgtcttccataatggactttcaaaactctatatgccacagagtaagatctaag

SEQ ID NO: 36213 - DNA, 1678 bp, Bovine  19866881395718
  misc_feature (1)..(1): n is a, c, g, or t
nctatccctggcagaactcgtgacttgctgcgaaccaataggccaggataaaggtgatgtggtgttacccccttgatttggttacattatccagcatgagtaaagggctgccaatttcacgatgatgttgctttatagaaaactctgtgctgacatcctagaatgagagatcctccttgcctgcttgatgaaggcagcagccatgttttggaagacacatagcgaggaacagaaggtgggcagctctaggacagcctccagctcccagccagcaaaaagcaaggtccttggtcatacagcctcaaggaatgaattcagccacaacctgagtgagcttagaattggatccatcccagctgagcctcccaatgagaatgcaatccagccaagaccttgactgtgaacctgtgggatctgacacagaagacccagctaagctattcctggtctcctgatccatgaaaactgtgagataataaatgtttgtgttgttttaagttactacctttgatctactctgctactcagtggttaacaaactgatagatggctcttaaagacacatgctttgggatctggaagtcccaagtaatctgggggaaattcagtttcactctaatcagtcaatgcattggcaggaaatttttgccagccaactcatagcaagacttcagaacaagagcttggagagtgaaaatggggctaggcctggggagagtgagagagaggcttagaaaaatgagagtcacacagtcagacagggaacaggtagagccctgggcctgaagtcaggttctgggttccagactttgcagatggtttgctagtaggctttgggcaaagcagcctctgtctgggtctctgtgatctcatctgcaggccaagtggtataaacagtctgagctccacagctccctctggctctggctttctcagtgaatggcaattcaagtttgccaaggaactctacagcttagagtatgctcagtcttttacttgttcattcattcattcccctttcaataactcttaggactactaaccacgtagaacatacatttactaacaccattaaaagagtgacatacaatgagttaggggagagggaaagaaagctatgtgggaatcccaggctgaagtagacatctgcttgcatagctgttccccacatctccttagggtggggctccttttcccacctatgggagtgtcatttggtccagatttgaccaatcagagtacctcaagcctctggccactgtaaatggttcaaaaatgggcatacacaccaagcaggaccaatcagaatctccaataggactttgctgccagaggtggtgggaaagattctctttcttctggggttgctaagctcatagaatataagtttgggatagtttggggctgccttgtggaagaagcctatctgaaagggatccttgaatccagctcctgaatccagccctctctgaagtcatctcaacttacttgacctgataaattatctttttatttaaagtagttgaggttggatttctgccactcataaccaaaagtatcttcaatgaatgtagatgttatttctaataatgaatgcggttatttcaactgagcatgtaattgagctctgggtctcttggaagccaaagtgaaaggggaaccacattgcctcacaaag

SEQ ID NO: 36214 - DNA, 1934 bp, Bovine  19866881445811
  misc_feature (1)..(1): n is a, c, g, or t
ncggggagaaatgggatcgaggcccccatccaaggaggcactgggctcaattctgcagcagcctgtctccagcttccactgtcccctctaagaccaggatctctctgtccatgaagtgaaaggaagtcaacaaaacccccctcaaacccccaaccagggggcaaggcccctcgcgagcgccccctcctcttgcctttcacatttcatgccagaacagcagcctgtcagagaagacatcctgggggcaggcgtgtgtccctgccttcctcatggggccaagtgccaggtcctgggctcagaacacagggccactcattcacaggggacactgacgggaagcccttgctggccaagtctgtgtgactggatgatgcacatcatgcttcacgcctctacctgatttaatgcttcgcttctccggttcatgatatgggttaaacctagtgaagtggtctaagcctttccagggctgagacccactgaggacgtcccagttgtatgagatggagacttctcacctcccgggggaggggagagcagccccgacctctgcctggtccttctacttcttgcccacagaagaggccccccagctccaggtgaattgtgcatctgtgctctactgcagcttggagggctcacaacaatgctattactccatttcagagacagggacaggctcaggggcagtgagatgactctgctaagccaaagagaccagagccagaacgcaagcccagcgtgatttttctctaccatggcccccggctgagagaaaaggatgcgttcattctaaggctccctttctgcaccatccatccccctgtcaaccgaacccagctcatcagcactgtggagggaatgcgagaacctcaggactggcttcagcacaccctgtgcaatttgtgacaagctacaacctccctctccctcttcctcaccccacccctacctaacctgaaaaaaaagtaaccaccaccaaggacccattgtgtagcacagggatcgctgctcaatattctataataacctaaacgggaaaagaatttgaacaagaagaaatacacgtgtatgtataaccgaatcactgctatacactcgaaactaacataacactgtaaatcaactatactccagtacaactacactccagaaaaaaagctaccaacactttaaatctcttccactaacaattttcaaggggacacagcccaaattgtcagtggacaagtggggtgagttggccacttgacacgaagagccgactcattggaaaagaccctgatgctgagaaagattgagggcaagataagggggtggcagaggatgagatatataggtaacatcactgactcaatggacatgagtctgagcaaactccaggagatagtgaagcacagggaagcctggtgtgctgcaatccatgggttctcaaagagtcggacgtgactgagcaactgaacagcagcagcaagtggggtgagaacccctccacctgccaggttcagtgacctggagccagcgtggagcaaactgaaacgtgagctctggaagtggtgggtaccatcagctcactgtgtctactctgcctagagaaaccttttgcaagttgctgaccaagggacaatactctgcccccgcccccatgctcaggaaccttttgactgtctaaggttcccttaataacctggatccaagaagagagggtgtggatcaggtctgcagtaaccgggttttgtaggccctccacgagcacacacacgccttcaggcctgctttccccagatggacataagttccccgcagaccagcaagcctgggcctccgtcagtccctccatcccctatcacctggagggaagaccctagaaatcctctaactcgtgtgataaacatgcccctcactgcaggcacgccagtgaccaggcttgccag

SEQ ID NO: 36215 - DNA, 1213 bp, Bovine  19866881578305
  misc_feature (1)..(1): n is a, c, g, or t
ncccatggacggaggagcctggtaggctacagtccatggggttccaaagagtcggacacaactgagcgacttcattttgctagcatgttaaatgagtgcaattatgatgtagtttgaacactcttatcaacgaggtgtattaatctcagtgtctgttttagttaggcttctttcatctctaagtatcagaaagcccagttcaaacagcctcacccagtaaggagatgtataacataactggaagtccagaagcacagtaggtttcagaattagtcggtctttaatgaagacaccaaggatttagattctttccattgttgcactctgctctccataatgctggctttgtaccaaacaggattctctttgtagttgtctgatgggttgccaggaaggaaccatatgttctacaaataagaaacaatctggcttcctcttatcagaaaggacaaacttaaccagaagctgccataaaacttcttttcatatttcattggcacaatttctcttcacttctgaatcagtttctggcagtgggacaggcctacttttgagctgaagtcagttccccaggtcactgccactgagagttgaatggcattgaagtagatagtgaagcagtcacagtatctactttagttgtgtcctagtgctctgaggttttttaattagtcctttttcctttatatttctataatgagtcaaaatatgcttagtcatatatactggtatagttgcccatgttcagagctttctatcatataaagcagtacagcaattattaagcgtttctgtctataaaaagagaaaaacaagaatagtgaaaagactgaagatagttggcgaatttgaatctctgtctcattgatacccataatgtttaacctttttcaccttcaggtaatcatttaccatttacatggagactttagtgattcgatttgtatctcctttctctcttaaaaacttgcctggagcattgtgctaaaatagaaagtgaactggattatgattaaggttctgtttaatcctaacttcactactttctagttttgtgtttatggacagatcacttcatctctcagaccttcaactgtcttctctataagctgagataatagtacctgtcttctcaccaaattgttcttataggagttaaatgatgtgatttttcagttcaagagattgagtacagagtagcatacagttttaa

SEQ ID NO: 36216 - DNA, 1502 bp, Bovine  19866881681800
  misc_feature (1)..(1): n is a, c, g, or t
nataaagaagccagggggagacgagggacaggtgaccacagcttgggtgctgttgggttgcctgagtaaagctgtctggtaggcagatggacatggggtgctggggcccgagaagcagcctagaaatctttcctaccaaggtgacctctggagcaaacgagacagacggccaaaactcctggcagaccacagattccccatttgctggtcctggacccatgtccttccagcaacccaacaccctcctcacccaagccctctatcccctcctccccggggaaacaagtcccccactaatgccagttaaagaggttccccatgctatctctgctaactccaaagctggcatacctaggttgctttccaactctctcctcctccttttccttttcatctctttctgcctgtcttttctcaccctttctccgtctgtctctgccttcctctcttatgctgtctctctctatgtttgctcaaactcccaaatacatacgaatttttaagagaccaagatctcagggacacttatggaaagggctccagccgactggcatcagcgttcctccttagccaccttcagtgggtgatatattacagaaatacattaaggagccgtcccgctgacagcaagctaaggtactatgtcaaggtaccagccctgggatgatgaacgccccccatagatcaggacaccatcactctgattacactccagtactgtgtgtcagagtgctgtaggggcatgatggacggtggggatccatcaccagctgatggcccattcccaacacaacactcatatccaggagatgatttaagggcagagctgggacccctccaaagatgcacacacagcaaaagtagactttttcctttctactaaagggagaagtttgaggagagaaacacttttagagtatggcttcaaggtcaaggttttgtaattcagtcaatcctgggtttaaattctatgcacagtcactcagtcatgtctgacccttcgcggcaccatggactgtagcctgccagtctcctctgtccatgaaattttccaggcatgaatactggagtggattgccatttcttccttcagtgtatcttcccaacccagagatcaaaattgtgtgtcttggacctcattggtaggtggattctttaccactagtaccacctgggaagccccaggtttaaattctagttcctctatttaaaagctgtgtgacatatgggcaaaatttcatctttctgagatcattgccttgtatgaaaaatgcggataatcatactaatcttccaggattaaagtgaggcccaaatgaaataacgcaggtcaaaacatacagcacagagccagactgagggtcctgggaccaccaccacaacctgttcagtgtgcacacagtagaagctgcaaggcccagcctcagctgttagtggagacccaggaggctgcagccccctggacgttctcttctctgcactacctaactttaccttcttcc

SEQ ID NO: 36217 - DNA, 1150 bp, Bovine  19866881807034
  misc_feature (1)..(1): n is a, c, g, or t
ncgagtgctcataaagctttcagaggcctaagggagatcacctctaagaaggggaggctggggtcggggtgacagctcctcacataattcattctttcctaacctgcctcttgttatagcaagaagtgttcattaaaataaaacggaatggtgaaatctggtagggaaaggaatcacatattaaagacatagccaagagtctggcccattcttttactattttaagcccccttttttcaagtatctaactatacaggtccatgtgtctacttctgacacatgtatgtactccttaggcaatttggaaaatcagataaagatgggaagtctaattaaatactggataagcatattttatttgcttttttagaataacttttcccatgataaaacaggaattctctcaaagccctcctagagattcattgcaaaactcaacactaaatgctggctttcattttaggcgcaagaagccatgaattgacagtttcaataacaaaagaacattttcatcatttgtgttggtgatttctccaaagcagtgccttctgaaaaccatcttataaaactccagctttgttgaaaatcacagacctcatgtcatcacacactggcctccatcagggattcccctgtggctccaaagatatctaggattctacaaactttttatattatacaccttgccatatttaatattagtagcagagaaagacccctctttctcattgctgtatgaacttttttatattgctattttttgtatatttcttgtataaactaattcatgcatgtgtttgtcttggataattaaggaaaaatatatctagatcacgctttgctttttattgtgattttccacctgctgtctgaatatttcttaaggatttataaacagaacaaatgctgctattgattagctgcgagaatgcactttagacatattggacaattcaacctgagatatcagactcgccaatactaaaaccattttaggaaggtgtttggaattttgtatgtatgtactttctgacatttagatatgccaaaagaaatgaaataaaagcactaagaaatataaggttacgagatggtaatttaacacactcccagaacctggcatcgtgcttgtcatttagctggcaatcat

SEQ ID NO: 36218 - DNA, 1545 bp, Bovine  19866882026098
  misc_feature (1)..(1): n is a, c, g, or t
ngcagtagcgaggcaaagacaagcatgcgcagtgagaggctcggggtggagaggcttgtgagcttctttctgtcaggacagccgcagcgcggacaggcagggtggaggcaccagcactcagagccgaaggatgtgttcccaactgcactttcacaggtcaggtgtctctccctggcctccactgggagcttccgggcccgaagtgagtcttggtcgtctccccatgctcaattgtgcccagaacctcttggtagaagagcctttctgagatggtctccccttctcagcaatgggcctcacattggccttcactcccaggagccaagagtggaggggagcattctgagacattcttcctttctacccactgggacctgcaaccctcaggcacagagagaatgttctggccaaagactcccccatttggccccgctagccctctgctgtgatgatcagactttgacaagcaaggaaagcatggttcaaaggagtgttcctttactcaagtttgtgccaccagtacaagacagagatgtcagccaaacatagccgcagacgggccttcttcctacatgctggaagcttctcttctgcaagcctgacaggaagcccagctccagctaagtgaccctggtacgtgcagtccagctgtcctttcgaagcttagaataaaggctgctctatctggatggtcactccttttttcaaatgttcaatcctctttcttgaatgaaataacagcaggcaatcatttttatgtgctcatttgcagtgactttggcaggacttggaaaccacattagccccacattctggaaatttagctcatggctgcgtgatgcccaggaacctgggaaccaccaccccaggccagtcctgcaccctcaagggcactgcccccatttcctctctgtaaacccctcctaagtggggttgccccacagcatctgaagttaagcttaaaaaaaagagggtagaggttttcagggtcctgatggtcatagacactttgcaatttctctgcaagttcatcccatttcatctttttccgcaaagagttgggcagtggcagctacacaggacatgggtgttaactgtggacttcccctctgggaactgccctgaggagacccccccaccccaccctgccttaaactggggagacagcacagggctggggtcatgaaaacactccctttttaactgttccacgtgatcactttctaggggtgtgggggcagtatgggaacgctttaaaaaaagaagcgctcacatttatggatgacaaaggagatcacccaggacgtggggtagacagcaccccacccctcttcttgggagcgtgaggggagggagaatggagataaactactgggggtggggcaggggggagggaggaagaattaaaacgcaacaatcaaacctttaaatagtaacttttaaaaatataaaaacaggtcattacaatgacttttcattttctttttttcttcaggaatcaattttgtcttctaccctcgccttcccttgtggcaagagccttaa

SEQ ID NO: 36219 - DNA, 1096 bp, Bovine  19866882067868
  misc_feature (1)..(1): n is a, c, g, or t
naggttgaaaggctgtagctgcaggtcaaggatcgcctgcatcgccagagcctaaagcagattagggacagaatctgagacagattctgcctagctcttcaaagaagtggggtcctgccgacaccttgaccgtgagagaatccgtttgttgttgcaagccctcttgtttgtgaagctttgttacggcagccctagaaagccaatacgctgcaacaggaagcccctttctaggtgatattcagagaacttctctctccaactattaccagcacagatgacaaaacagaacacaaaacagatggcagacagaactagggcagtgggtttgaggaagtagcaaggggctggacaagccctttaggccctcagctcagagcatgagatgggaggaatcagcagaagggtttggctgcaacaggagagtgaaccctgaaaatggcccactgtgctccgggaggcacccagtccttcctccagaccaggctccgagggggtgctgggccaagtccaaggtcaagttgctcccgttggcagctggagccacctttgtgagcccaagatttgagtgatctctgcttcctaggtggcacagtggtaaagaacccatctgccactgcaggagatgcaagagacccaggttcaatccccaggtttggaagatatcctggaaaagggaaatggcaacccactcaagtattctttcctggagaattccatggacaggggagcctcgtgggctacagttcatggggtcgcaaacagtcagacatgactgagcatgcacacacatgtcactaagtgccaggaagcacagtgacccaggcagctggagcccagggagaagcccacacgctgctcattcagagcccacagtcagggaccagtggatggagcggccgggccattgagtcagaactaaccaggggcaccacatggctgacctttctgctcacagctctcccagcagcccagctgtacataattgaggtctgtgaacaaagaaagatgccagctacatgagctggaaagggactttaatacgtgataccagagtattcagggtagaggaaggggtcacactcacgaccggcgggac

SEQ ID NO: 36220 - DNA, 1008 bp, Bovine  19866880035798
  misc_feature (1)..(1): n is a, c, g, or t
nggagggcctggcgtgctgcgattcatggggtcgtgaagagtcagacacgactgagcgactgaactgaactgaactgaacaggtacgaaacccaccattcagggatttatatactttgactgtaaaagtatggcattagcaagataggtgctattattgtcactttacacttgaagacactgggtttatgcaatttacatggtttagccacagcgaacacagctagttaaggttagtgcctatgtaaattatttacatctgtctttcctagactatgagcttttaagaaagcaaaatccatgtagtcttcatatgtggctttgaagtgcttggtcctatggtctgtcgtagcagctcaatcattgtttggtttgaacaagtactttaaagcacaagagatgagaggaaaacctagtttcttggctgcgaaattaaaaattcacacacacacatatatatttcatgatagagatgagagaggtaagggagaaaaatcttgaaaagaactctattcaggtaagttcccttatctcagagcagtttaactctcccacctcaaagggattcaaataaagaatgaggtatggctgcttccgtgagccactttcctaccaagattactaacatcctggcttgctcattttgagttcacagaccttaattatgtagcacacagcatgaatcatcctgtctgttcctacagagaataccaattcatcttacagacagtgcagcaaagccaccacaggaaaacatgagggagaaagttccatagaccctcccctgcccaccaggcagggagcgtctcctctctgaggtgataataacctgtcctgtgaccaccactgggagtgcagagctctgacacattatgggttttgtttttcttaatattttttttttttttttgtcctgtgtggcatgtgggatcttagttccttgatcagggatcaaacctacaccccctgcattggaagcacaggatcccaactgcaggactctcaggga

SEQ ID NO: 36221 - DNA, 1647 bp, Bovine  19866880440068
  misc_feature (1)..(1): n is a, c, g, or t
ntacttaatttaaaatctgtgagataattattactatctatacttaacagatgagaaaataggctcagaaaggttacaatgatttatcaaaatcactgtagtctatttttggaggaacaaaggcttacagtaggtctttatttaacagcattttaaaatactttagctgaagaattgatgcttttgaactgtggtgttggagaagactcttgagagtcccttggactgcaaagagatccaaccagtctatcctaaaggagatcagtcctgaatattcactggaggactgatgctgaagctgaaactccaatactttagggccacctgatgcaaagagctgactcatttgaaaagaccctgatgctgggaaagattgagggcaggaggagaaggggatgacagatgatgagatggttgaatggcatcaccgactcgatggacatgggtttgggttaactccggaagttggtgatggatggggaggcctggcgtgatgcggttcatggggtcacaatgagtcagacacgactgagcaactgaactgaacttaacagtattttcaaagcaacacagacatatctaaagctagaatgtgtggagacagaaacaaaaacacacctgtgaaagaacgccaccagccttgtttggatgggcccagaattcttgtctattgggtcctacccatgatagttcacccaggcatctgatggaaatcttgtcacatcaagtaattgttatatttgtatccaaaattgtgggacttggtagtgattttaaatattccaatatgtgtttctctgcctacagcacctcggaccctgtactggttagtattcatatcctcaaatttaatttttaaggcatagtattttaagccaagttccaaaacatgtcttttacattagtattgaactactgtaaaaactcgatatttttatatggggttttactgtaaaccatctcaaatcatttttggaagtattcagggaataaattatgaataaataagtacataaattaaaaaaaaaactcagtttctgccagcaaagaacaacataagtctagattttgtaccttctctggagtgattattattcgtagaatgttcaagtaaaacttttacataccaaaaactctctctcctttctactgagtacaacagattatttgaaaacttctacctattaatctctctatactttttaaacttttgtgacaataaggtaaacaatcagtccacttgaccaggtctcttcagattcctgcactgaaacacacattggtctaagcaaatcaaaacattagtcatcctcatagacaacagacttgtggttgacaagggggaggaggttgggggagggataagggggaggttggggttgacagatgtaagctattacaacagttcagttcagttgctcagttatgtccagctccttgcaaccccatggactgcagcatgccagggttccctgtccatcatcaattcctggagcttgcccaaaatcatgtccattgagtcagtgatgccatccaaccatctcatcctctgtcgtccccttctcctcctgccttcagtctttcccagcatcagggtctttttcaaagagtcagtttttacattagatggccaaattattggagttt

SEQ ID NO: 36222 - DNA, 1816 bp, Bovine  19866880488038
  misc_feature (1)..(1): n is a, c, g, or t
ncggggatggtccccaggctgggctgctgggttagccgctgcggagcgctttagggaggggtgacccgaggccggcacactgctcctggggccaccaaaaccgcagggtttttaagccgcgggaagaggcgccccggatcctggctcagacccaggtggggtcgggagagagtgggaggaagtgtcccctgttccccggacttcaccctgccaccgccctgggacccctgtctctcgccactccttcgcagtggcccaggatgaagtcgagaggaggagacctgggcaccggcgaggcttccaactcgactcggtccccggccacccaccaacagcccccacgtcgcggctcggtgactgaggccgagccgctcccaacaaacatgtgacatgccttgagcagcccgggcgcttgggggcagatctacactcagcgttgtttggggtgtcgggaaaacagggtacgtaatcgcgcaggctgcacggaggctaactctcctccaccgcctagcccacaagcccgcaggcgaaggcaagcagccgggctattccgggttgtggggtgtggggcaaacagctctccccatctgcgccttacaggtgccacctggcggttctcttggagaggtttccacttagcggctcaaaggtaatgggggtgtcgggaaggtgagcgccggtccagacaggctccctcaagcctttcccctcccaaccagcactttacattttaaaaaagaagtgagaatgctcgtacggcttacagtttgttccgcagagagaccggactccccaagttgggacggagaagtcgatttgggtaagtcaggactcaacagttacacaaagcccgaagctggagctgcccccagctgtcacctctgctgtcactccctgcgtctaggcgtcccttcactccgcaagcactgaactgcctctagagtggaagctctaccgatgagagcagagacttgggtgtttggttttgtgttttctatttttttccccccatcactcttctcagaacttggaacaacgcttaacatcctgtcccttccatatatgtttacagaatgaataaataaacattatggaccagaaactgtgcttggctcatcctccccctgcagcccttccccttctttctcttcaagctctttctgctacattcagctaccatcacaggtgaggtggatggagagaagctgaaacaaaacaggcaagcaatccatgcaggccctggaggatagggatcataactgaggagcccattacacagtgaaattccccctccatggggtactacagaacacactcctctcaagaaaagcaaaaaaaaaaaaaaaaaaacaacccacctctgtcatacttgggacttgatgcaatggataaatcctgtttgtagagatctaatggcaagatgaggcaattttctcactgggcaggagtttcagcctttttttattaaaaaaaaatacagaaatagtgaaagaatatcagaatatcagggtgccagagctttgccactaaattgaaaagatgtttggcatagctgtcttctaactttgaatggagatttgggtggatggtgtgggtgtgtggggctgggaggaatgtccataaagacagtgccagatgtattaaacctttccttctaaaagagctgtaaaacagatgcagcaactgtctttgtggaaatgaacacttaaagtgagatacccagaaaaccctcttataattaaaaccaagacattcatcatgctgaccaagaccttttacagaccattcacagggctgctggggaaaaggcaacata

SEQ ID NO: 36223 - DNA, 4764 bp, Bovine  19866880533347
  misc_feature (1)..(1): n is a, c, g, or t
ntttttgaagtctggtgggcatgtcgaggcacttattgatctggcctagtatatgtttcaagggctcaattgccacaccaacctatgtattgaacagggcagttctagacattagagacttgggaactttaaaaatccagtcattgaaactaggttggcaaagctttttatatttaaaaagccagatggttgctcaggactccactgtgaagtaatctataattccattttcaaaacataatgaggttaaaagcacagtgacaaggagaatgaatataacgaactgaaagttatattctttctctaatgcttgatgcaagaaaggttgatctcttatttttatgtttaactgaagaatctatggatcacatagccttatgaatagggatattattttaacatggaccaaagcaatactcactgtatgtgctcagcagtccttcatattgtactatcaatcccaccgtgtgaagctgctcaaggaagccagggtcatacagacttgtgtgcaatttgatgataaaaccacaaaccaatccagcaagctaaaaaaagaaaaaagaaaagaaaaacactgaagaaattcctggggtcagtgagctttaatttaaaaatatttaagacttttgagacatcacagacttcattagaaacttccaaggtatgtgtaacaaaattgtaactatttatatatccattttgaaaccacggatgtctaaacccatgctgcaggacagtttgggaaaggcagcactgtgaaaagggaaagaccaggcagtaaaatcataaaaagtcacttaacacttccaagactttctcacatatttttgcacatgaagaatagagataatagttctcattcctcagagtcattgaaagaacacagtggagagatttgtgtaaggcagagcaaagtgcttgacacttcgctccatttactactgggtcatccatgaaatcataggggacaagggatattttggttaaattattccctttatctggatggtttacaaagacagacttctgtctctttccctccaggtgtgtgtctgcaaaactcagtcatgggtgcaggcaggagaggagtgggaacacggctattctgacggaggccaaccttgttgccacgggctagggtggggtgtagcaacggaggtgatactgcccagccttgttccaagactacggcctggcaaacttctatataaacgacaaaaacaaaaagcaacaacaaaacagactattataaggccctgtccaggaattcatgagggagctgtagaaataagggttgcaaacagatcccttttgccagtcctggctactctctgcacagtgcatggtgcagaaaccccaggaataatatgaggccaggacaagggactctttccttcaaagactctgtgccctgtgaaacaatggacatttcagggacttggccacctttttgcagaaataaatatttaaggtctcacacactgtttctattcagctaggtatctattatgaataagaaaagctgggtatcaataccttaagaaaaggatcctcttaaaaagcaaactactagactttcctggtggtctaatgattaagaccccaagcttccaatgcagggggcatgggttcaatccctggtcatggaaccaggatcccacaggccaggtggtatatatggccaaaaaaaataaaataagcagactatcataagaagatctctttcctcactgaggatactatctgacagcccatcagtgcgctgggctcaaaaaacaagaggcacctactgcttggctgaagacgatgtctcttctcaacgtcagcatcaaacactggggcaggctgtaggcgagctcctggaggagcacgaaggtcagggactgcttagctcgattcaccacttctcccatgcagtccttcagggtaaggatgaggggatacaactgctcataccagtcttctgtggggtggacagagcataagaagagtgggatagatagattaaagaaggtcttggaggacagaaccaatttatttattttcagtgatgttctacaccatacttagaagttacaaagataaaagatttccaatcccaatctttcctctgaactcctgatgtctataaccagccacccattggactctccacttggatcctatctcactcatttatagaagaactcctcttcctctctgctcatctctaatctgggcattgcctggatcttggtggatgatgccaccaaactcttccccggctggaaacatgttttcctggactccttctatagtcttcacacttactgggtaatgaaattagttctaccatcataatagggcttccctgtggctcagatggtaaagaatctgctgcaatgcgggagacccaggttctatctctgggtcaagatgttcccccagagaagggaatggctaccgcctccagtattcttgcctggagaattccgtggacagaggagcctggtgaactacagtctaggggtttcaaagacccatcaaacactcatcttccttttgccctctcccatcatcagttatccgtttcccatggactgcgtttctatcctgctctgtgagtgactcctcttcctccaggcatatccttctccaatcttttctcaacagagttgctacagagatctttctaatcaatttgaattccattactcactctttcatttccttacaattttaaagacaccaaagcattcagaacaaagtcccaaagcatgacagaccctgcattatctgatctctgcctatgtgtccagtctcatctctcagagctttttcatctgtagccttgagtcccaggagagctgaacagacaaatttccccacacctgttctgctgtctcatctcagtgtctctgcaaatcctatctgcagtcctggagcattcttcccttgcttatcttcctgacaaatactttatcttctctgcagactcaattcagagtttctctcttccaggaagtctccttgatttcccccctaaatcccctcctcatttactaaaatttgggtcaggttcactttcctttgtgttcacagctccttgcccatactcttctgcaagaaagtgaactcactgagggcaagaaatttctgttttaatcactggatctccggatcacagcatataaaatattcagtttttaattaaatgagtaaagttggaataaataaaacaaaagtcttttaacatatagggtatgaatgagaaaatcaagtttttgacagtatttggaatctgaatagcctttcttcaaatcaggatacaaaactgaaacccatcctgtgctttctgtatgcctagaaatttaacatgtttcagttatataattatgactttggcatgtgatatagaaacaagttatattctatttcaatctatttgaaaatcaaatcctgacaaatgtcaaatattataaattccagactgtgtgctattccattaatatataaattgacagtggtatgacaaatacaaatacagttgaaaagaaatgagcgcatgctgaaaaattaactgtgaatcaagatctgaagtgatacaatcttctcagtttacagagggagtaatgtgaatggtcaataatcagttaagaccttgaaagagttataggtagtgatgaaaagaatcataatcattattgcaccatatctaccgtcacttacttattttatgttctataatagattagatgaaataaacccaaaaatggttgaaaggataattaatggtcccaacttaataaaaagagatgctcctgttaatactctatgtaaatgcttatgtgaagttgtaatacaaaatacattaggaacattaggagttattattttaaaatattgtagaattaagtgttatgacaggaataaaaaacactagagaaaagagaattcaatgaaagcctattaaatctgtaatcatttaataaaggactcatttgtgggcagcttaggataaaatatgaacagtggttcaactgaaataggcactgggtaactattgatttttatgtcattagtagacataaaagggcaaatggaggtacattagacttattttcagagtaaaagacacatcaagagacatcaagaagaaatacttgatattcatattgttttcatatttatattgttttacctttcactctcttattcgattactgttctcaatgtgaatatgcagacacatacacgtggaaaacaagtatctcaataaatcgacccagatgtatatcttaaaagataacagactgagaacccattttcctttgtgttgaggtctgcaaaaatgaatttctcctgaagaattctccaacacagaataaagcctgtgtgcagtagatggcgctgctttatcagcctgaagtaaaactacttggtcacttactccattccggtaactggtttacactcttctacgcatttgcaaagttcccaaatagcaggtacatgttgtctgggcacctagcatcctattctgtgtcaagtgatcaataacctcgccaaaagtgtgataagctctttctatcagaaagtggaaaattaacttattcccaccccaccttgcaagatactaagtgacagctcaaattaaacagagctggtggtttttcttaaggatctttaaaagaagaatcttcacagatttcttcatcggcataatttttttagtcacttctaaacctatcttcactctaatttaaccattgattcctaatcaga

SEQ ID NO: 36224 - DNA, 1017 bp, Bovine  19866880597906
  misc_feature (1)..(1): n is a, c, g, or t
nttttgaggttcaagcatgacttggaaccatgctgctatattttaaagtctccttcctaggttttgactgggtagcaaagaaagttaaaaccttcgtatacgatcttaaagatcctcaaaattggtcttttactcaagcgcaataattctcctgtgcccagacattctgtttctcaaacaattcttgccatgcctactcagagttgctattaggatccaatatggaagatgatgactcacattttttgataatctagtacctgccaggcatgatgctatacaaagtaatgttgaaaagtatgttctatctccctcatcttgtagataaaggaactaatattcccatagtttaaattaatgttaaagtttgttttgatgtcagctgtgtctagttccaaatccctgtcttgtctaaggcagcctgttgccatcgatgtatacatgcggtataaagagtaaacattctgcgaatgtaaaaggagcaggatatttaacaggaggtttcagttgtcttagagtcttggctgaggtcctgaaattgaggacagcaggtgataaatgttcacacattctaaatggaggtgccagacactcccacccggacgtgcggagataaatctaaacatgtctttacctcttttgtctatcaccagtctaaataaagtggatgaaataatggagcttttaaggagcttgttagctgaggaacttgttgagctttttgcctccccactttcagattacactcatgaagcatcccattacagaaagagctggtgactgggcatctgaaacaaagggcagtgtgccagatttctagagcctcaggcaggagacaacttgttcctttccttctgtttcttcctcccatcccaaccctggaggactcatagacttcagcgctggggaaaaagagagtttaagaacgaaatggaggaagaacaacaacaaaaatagataattcatccatccttcctttcccacagttgttctagggtattcttgtgtcaggattaa

SEQ ID NO: 36225 - DNA, 720 bp, Bovine  19866880598426
  misc_feature (1)..(1): n is a, c, g, or t
nttgattgtgattcacacagtcaaaggctttggcgctgctactattcgactgctgtcaaaggaccctgatcttctgaattgaaattttattttcagctcattgcagaacagactctgatgtactgacctgttaaaatttttagattaagttcattttttaatttgatatgtctcttaaagcagtcctgtatctttttgaaaagtgataacaaaagaatattcagttttaattttctatatcatgtaaaaccagacatagacttctagtgtctcttaacttgtagggtgaatcacagcagtgaatacaaacaacgctacaagtaacaaagatagacacacatctttgcatacacacatgcaaatggccacctccctgttcaagtcaccattgatctctgcatcttctttgtcacttcatgcccctcacaaatcagatgcatcaaccctgttctccagtttgtgtggatcaagactcacatttctagccttttagtcatccttccatttttctacattcctttttttcccagtggggtcttctttctttagacttcaccactcactgaagattggctggactcccagtaaacctgtctatctagtatgcaccaaatggcatgaaatccaaagatatgaattcaattaaaagttcatttaggtgaatcatttgatgctttggagtgtctccatttcattatgagctaaatgagaataattaat

SEQ ID NO: 36226 - DNA, 1495 bp, Bovine  19866880672753
  misc_feature (1)..(1): n is a, c, g, or t
ngccattacagaatactgagtagagttcccccgtgctatacagttggtccttgttgataatttgtgttatatacgcagtgtgtacctgttcatctgaaactgttctggttggcttggtgactcccacggatatgcattttaattctctaggtcattctgtgaggatgatctgaagaccacactttaagaacttctaattcttagagttgtcagattcatagcaacaaaaattacagtggtggttgccagggttgggtgaatggatgaatggacaattcatgttacagggtacaaattttcagcttaggaagatgaaaaattgctggagccagatggtgatgatagctgcacaccagtgtgaatgtatcaatactgaatgccactgaatgatatgcttaaaaatggttaaaatgcaccagccccaatcatccagtatcatgaattgaacttggaccggtgatttgtttcatatatgatattatacatgtttcaatgccattctcccaaattcatgttgatgtatggcaaaaccaatacaatattgtaaagtaaatgaataaataaataaaatatatttgactattttatagctaaaaaaaatggtcagctttgcattatgtctatattatcacaataaaaagaaaaataagaaatttgaatgcaagcggcagtcattattttaaaatattggtgagtctttgctttcatactaattattgataaataaaatagatatctccagtgtaaaaggtaatttgtgctcagttagggatccacgttgtacgatagttcctcattgctttatgacagggcgaaaacaatgacctaaatagaaagatcatagcacttgatttatgctttattaagagaaaatagatttcttgtctatgcataatttggccaaatgaatggggggattagagtcactcagtctgcatgattgttcctcttcctgctgttctcaagtggattcatctgattttgcctcgtcttggttttgcaatacagatccatagtgatactcatgctcttttcaggacagggtgtgggccagtgtggggaagagcctgaactgcattattgcaatggtggataaactgatcgaaagagagagcggtggcgagggaagcagcaccagcagcaaagatgtagaaaaggactcttctccagtggactccatcataactcatccaaagggtaaggaatcattttttttttttccaatcattgactgagtaaacaaagtgagaaagccaagataaaatgagatagaaaaaagaggagtcaatagtgcttttgatgaaagtgctgatagtgtgcttttccactgctctggctggggtgatggaaggctatttatcaaattgcatctcggttgtgttttcagaactgcttgcaatgctcatttttttttttttaaactacataaaaaccctcttgaaaggagagcactgttttcttttacagagtctgatatagtttaatctacttttat

SEQ ID NO: 36227 - DNA, 1809 bp, Bovine  19866880696712
  misc_feature (1)..(1): n is a, c, g, or t
ntgtcgtcttggagaagtcatttaaattctctaagtatgtttttacctgtttgcaactacactcttacttgcaccctgcacaaatactgtgactactggttgaaaattcatcattaaatatactcaaggtcttttcccaagtatactaacttgtcagcacaaatggaagactttcataattttgttaaactcatcaacacattttacttataaaataaaacagacagtatttaaaagaaatactatttcttttattatattatattaatttcttccttgtttggatttaaccctcagtaataacgtgtaagaccaaatgaataaacaataaaacacaccgtagagaacccatatgctactcttgcagatgcagagtttaagttttgccagagaaactgatacatgattaagaaggaaaactgaccttgagaattacaatataatatcctatcttaaggaagaactctcagaccataaacatatccaacttggacttgccgttctactaaaggagaaataaagaatatttattctttaagtcagaaactctttatgacaaatcaacatactaactacgtcaccagaattaaaattatgccagaactaattttaactaagtttcaattgttatgcttacatctctcctcagctaggacatcttccaagtaaaataatacaagttttgcttaggaaaagggaattttaaatgaaaaaatcaacaaacacatttaacaaataaattgtcaagagagatgaaattattccaactttacagaaaagaaacaaaaagaaagttccataggaaattaatggttaaacatattcactgacagctttctgaaagttctatcctgctgtttaaaattctttgagcttattcagttttaagatgctttatttcaaattcaaaaagttataacaaaaggctaattttattacttaatttatgagagcataaattgttcttcgctagaaaaagctttattacattctcaagatatttcctatctcccttttccatgtgtcaggcaaaattacacatgtgcatatgtgtacgcaatcaaaaataaagaattcacatccaaaacataaactgaattaactgtactttgtaagtaaaaaagttcaaataaacccaagacaacagtaagggctctttttctgactaaaattgttgtgctcatttcttgacccttttaaaatggtggttgaaaaagtatatgaatgaacagatacatcaaacagatactgaaaccctcaaaggtcatttcttactttatacagtcatgaaaaattcaaggcaactgtcaaaaaatagctagcacagcaccatactgtgctgacatcaaagaagctgttgatattatagttactttcaaacaaaaataataacttagttcaggctctgattatactggtatcccaccctgggattttgacaagagcaaagaggaaccagctgttctccccagagcatattagaattcagagagccactatcctcgggagatgttcatgatcaccaagggtttctctattatgcatgtctctattcccaccctttcacctcccactatcaatgatgatcagagcctatcctgagatccttcaggaaacttaagaaactggagaccctcaaatacagacacaagagcatggatgttgggactagatcatgaacggccttgaatatgcagtaaagaagttggataactgagaagggcagtgaagaactgctaactccttaaacagggaacatacaatcccactcctgggcatgtatcggagaaaaccaaattccaaaagatg

SEQ ID NO: 36228 - DNA, 1668 bp, Bovine  19866880719485
  misc_feature (1)..(1): n is a, c, g, or t
naattagagccttgccatttaaccttgtatacccataattaaatgagctacattgttcaaaaatgcttgctcttctgaaattaaggaaaagctctaatcgcatagagaactactggttcacttcctaaagaaataaacctaatgaaagatatatagtactctgtatagaaatatataagagtactaagatattcttcaaagacagagagccagagagagagagagattccattcactgaaatgctcaatttttaaatttatcaattccttccagattaatctataaatttaaagacataccaataaaaattctaccagagattttggtagacactgacaagttgattctatcatttatatgggaattcaaaaagaaacaaagactagctaagacaaagagagagcaactttggaggatttatacttactcagctatcaagacgcattataaaccaaagtaataaaaaatacgattttgccacagtagtgataaataggtcaatgaacagaaacaagagtctagaaaaataagcaaacatattcatttgatgtatgacaaataaattatactgggtcagttttttgtctgcataaaataaaaacaaatcttaatccttacctcacataaaaatcaattccaagtagattgtgactctaaatgtgaaatgtaaaatagtaaaacttccagaagataacatcaagaaactcttccagactgtcagacagactctagggtagcctccatgccatcacccttgagtgcagatgggacctgtgagttgcttccaacagaatacagcaaaagtgtaaggctgcatgactggttgcgtgctcagtcgagtctgactctgcaaactcatggagaccccatggactataaactggcaggctcctctgtttctgggatttcccaggcaagaatgctggagcaggttgccatttccttctccaggggctcttcccaacccaggaatcaaacccgggtctcctggttggcaggtggattctttaccactgagccacctggggagctccaaagtgcaaggtattccaatgtaattaaagcctcaaaccatctgatttgaaattattatcaaaagagggattatcctatacggatctgagttaaccacgtgaaatcctttaatagcaggactctccttgggcgcctgatgaagtcagcagccgtgagaagaagcccataagacaatgacctgaaggatgcctgcaggaactacaggtggcctctgtgccccgaggtggcggatagtcattggaaggtgaaaacggatgccaacaaggacaactgacagctgccgaacagatatttcacccctctggttctgggcactggagaaaggccctcagaatatatacaacgtatattctcttaggcagaattgaaaggagaaaatcctgaatggactgagaaattgctgaattaactaaaatgaccatggttaaattcgtgccactaggcaggggacagaaattaatttcagttgtagaaaaatacaattatatttttgaactcccaaatttgtggaaaattaaattaaaacctatataattactttaagctttggatcttactggtttgatcattttaattattcatataccacaattcaaaaataactaactctgatgagtaattttttctgtcta

SEQ ID NO: 36229 - DNA, 1242 bp, Bovine  19866880752932
  misc_feature (1)..(1): n is a, c, g, or t
nctgttagttcactgcctcactctaaacaaataataactgagcaactcttatcctgattcttaaacaaataataaatgagcaacacagaggcaaagtactgtgagtaattcagaagcaatatgtcactgtgcccttaagtgggatttacaatctggacagcagaatccaaaatactcacaataaaacacacacacacacacacacacacacaaaaacaagcaacaaatagctcaggtaaaaggagtaatgaatctgccttctagtctttgccttcaaggtacagaatcaataagcagtttctgaatatatggtattggcaatattctgtgctagatattaaatgtaccttctcaactccagttttgttccttttcactttttctctttttccccttctttctagaactgaatatatctagtcagtgtataagtcaagagacaaatgcaaaagaaaccacactgtagaatggatattttaaaaggacatcttaaaatatctattttattaatgggtaaactgagattgagaacactttgaaaatttgtccagggtcagacagagaatgagttagggagaagggatttaactccagtttgaacactttaaaaatccattgtttttatgctgagcaaaatacagtccctgaaaacaatttaaagaaattaaaagaattgtcatttagttgctaaaattccttctgaaaaaggaaacagtaaagttcaatttcatgccagaaagcatgttccccaggcaccaactcattctaaaacaggtgattattcaatctggctgtaatattaccctgttttcctccctgttttatgttttcatgttaatcattttactttcttttctttttttaagccatattcaattaagatttgtaattaggtttcaaatttgaaacacatctctagtagaaagcaaacgacaagagtagtaattaagggacagctgtctcatctttctggggatgaaacaaggcttttttgtttctaagttataaataccagagaagttttcaagattttttttaagaaatagttaactgagtagtcaactgattgatactgatattgaaagatactgaattgatctaaaaaagtcagtgttctttctgacacatgctgagaatctttcttctgggataagcttaggttaactccaacactatgaacttttattgctgcaaatacagaatctccacattttatacaaaaccaaatcatttctttagatt

SEQ ID NO: 36230 - DNA, 1270 bp, Bovine  19866880915849
  misc_feature (1)..(1): n is a, c, g, or t
ngggatatgtgtgtacacagtagctgactcaccttgctgtacaatggaaactaacacaacattgtaaagcagctatgctccaataaaaatgcaaaaataagatagaacacccttctctactgtgtattctgccccagctatgctcatttctcttccatgagagagccaagcatcttagaggagatacttaatgtttcctatgctttcctatttcattgtagtccgggcttttatccccacagctccagagaaactgttttggccaagatcacttagagactctgggttacatttcacaaatggttctcttgtctttcaccacttggcagtatcagatctattaactattcctttaaaaaaatgtctttctgattttcttgatactgaatatatatgtaaataaatatatgtatatgtgtatgtatttgattatacgtgggcttcctaggtggcgcagtggtaaagaatctgcctgtcagtgcaggagacatgggtttgacccctgggtctagaagatctcctggaggagggcatggcaacccactccagtatccttgcctggagaatcccatggacagaggagcctggcgggctacagtccagggggttgaaaagagttggacacgactgagtgactgagcacacattagattatgtaaatgtatataaaatgtattttgggggggatttcttcattgcggcgaaggctttctctagttgcagtgagcaggggcttgtctagctgcggcacatgggattctcttgttagagctcacggggtcgggagttgcagcgtgtgagaatagttgcccccattgcatgcggggtcttagttcccgattagggatccaacctgcatcccatgcgtgggaaggcagattcttaaccactggaccaccagggaagctccccctcccccaaatgtctgtatattataagaaagaaataatcagcatgcttgtacacctctctcccaattctgttactctctttgactggaaccgcaatcagatccaagttgattcatttagatcagcttgggtagatttgacctcttataatattgattatgatctttgtatgcatgaacacaatgtatctctctctccttaagagaattttaatacaatttaaacatttgctccgtaaatgctgcctaaatcctgtgttagttgtatttttaggtatctcatttttattgtagctgttcaaaatggcatctcttttgaaataacattttcaaactatttgttaatggtgtatagaaata

SEQ ID NO: 36231 - DNA, 1581 bp, Bovine  19866880986228
  misc_feature (1)..(1): n is a, c, g, or t
ntggtgtctgataggtattgccttaagagttcaaaattttccaattttatttcctgtgatattagtttctgctatttgagctttagaagacccataggggaagcagctacaaattgcaaaatatgtttacagagaatgctattcaaagttctgtggtgacctaaatgggaaggaaatataaaaaagagtggatataggtatacataggagtgattcattttgctatacagcagaaaataacacaacattgtaaagcaactatgatccaataaaaattttaattaaaaaaaatgtctacttgatttttttagggcttcctggacattctgtgaattttacattgttcttaaatataacttctattcagtcaggcaaagtgtcaaatggttcctatgttcttctgtcccatttcctttctctatgtctattccttctgctggtggttcaattctttcttttcagcaccttccaaagttaccaccctaccaaagatttaatgccaacttctctagaaagtgatccccaggtactttgaactctgctgatttcttcattatttgaccctgtatagcaattataacaaatgcctataatttatattgctttcttgggttgtcttgtgttatcatgtctttccaactatatttttaagttcctaaaagattgtcaggaacttgcacctcttggtctgttcccttcagtacttaattcaatattcagcatatgtgaaggagagtcctagtaagtacacagccacttgtatgtattaaatatctatttacaactataaaaagaagtagcttctgtagcataaatatctcaacatgttctttgatagaaattgcataacatccctttattgtagcataaaatttaaagaacatttgaacaaatatttcagataggaaagaggcagagggaggtaataaatgagagagataataggccatcatataacaaggatgctattactttgaaatagatctacatttaagattttgcatttttctatgttggactccacctttctgccatgggtagcattttctctacctaaggattaggaatgtcataagataaataaaagggttacccaggtggtgttagtggtaaagaacctgcctgccaatgcaggagacaaaagagatgcaggttcaatccctgggtctggaagatctcctggaaacaggaatcacttccactccagtattcttgcctggagaattccatggacagaggagcctggcaggctacaggccatagggtcgcaaagagttggacatgaccgaagcatcttagcatgaatgcatacaagataaaaaaataaaaaataaaaaaaaaaaacaaagatgtttagattttaacatccaaaaagaattctgggtccaaagcaagaaaacagtattgtataccaagttttccttagagaaaacaggatctttaaaaacacgttagttaccattaatgcattagaaggcacacctagagaaacagatcagagttctgcaatattaagagtagagaaaatgtagggtgtgatgtaaatgataaggaaaactatccaggctcaagagctgtatg

SEQ ID NO: 36232 - DNA, 1437 bp, Bovine  19866881027647
  misc_feature (1)..(1): n is a, c, g, or t
ncattttaagctttgggggttggttgggcagtattcagttttttaacaagtaaattaaatgaacttgaccaaggcttctacttctgtttatcatgaactgattaatacaaattaatactgttactgacagcaactagaaaagctgaatacagtgttataaaaaaagaacgtattttaaaactttgtagagctaacaaggaggcttctctggtggctcagtggtaaagggtctgcctgcaatgcaggagctgggtcggaaagatcccctggagaagggcatggcaatccattccaggattcttgcctgaagaaccccatggacagacgagcctggcaggctacagttcatggggtcgcaaagaatcggacatgactgaagcaacttagcatgcatgcatgcagagctaacaaaagagtaaaaattgacaaggccaagatacagaggaggacagaggttcaggaagataagtctgactttagggccactttttcatggaatctgaagggtcatttaagaatcaatctacatagttcatcagcatatgggagaatgagagtggagtccaggtcctactaaggtggggagataaataaatgtgcctcttcaggttcagacatgaaaaggcttaatgttagaggtaacagtgaaccacaagcgaaacccctcacgggaactgcagcttggctccacaaatgactggaatggattcaaggcactcctgtctcatcaaagccattaggcgcctggaagtagataacataaatcctctcaggagggaaataatatcatgccaggactctaactatttttccaattttaaaatactgtttcaccgtataaaccaaaatgaggatacagggcaacaagtcagtagggataaaactctccagatacaattgaaatggattaatgtgacctcaaaatatcagagtagactttcaagtgactaggcttatatcatcagagagataagaaagagagctcatacattctggcagacaagtagaagccataaagaataataacataaaaattctagaaacagtaagtatgaaaactaaaattaaaaactcaatggatgattttaaaagcaaaatagcaacagctgcaaaaatactcagtaaacttgaaaatgagttggaagaagctgtgtttaatgaagtataaagagaaaaaaagtagaaaaatatcaaaaaagagactaagtaactagaaatacagaggcttgaagatctacaatttggaaaataggagcaaaataaaaagagaagaaaagggtaactgtattatgtgcaagaataccaagtaagctacaaatccaaaagactgcagcaacttaaactacacaaaaatgtcacccatagctaaacacatcacagtaaactaacaaagaattaaagataaagaaaaaccccttaagaggtagaaaacaaagg

SEQ ID NO: 36233 - DNA, 1603 bp, Bovine  19866881117151
  misc_feature (1)..(1): n is a, c, g, or t
natagatggtgaaaatctagattttagtctaatcagcgtacccatctggagttcatgatctatgaagttaaactcaattagaagctttcttcttttaaagagtacttaaccagatctgaatataaaattactacatctgtgtaaaaatttaccactgtatcctttctcctctctcagagaatgatgtttgagacattgctgtaaattgtttttacttttcaatagactttatatttcagagcagttttcggttcacagcaatgttgagggcaggtatagagatttctcagatacctcctggccccacacatgcacaccctctccggttacagacatccttcttcacagtgatccacccgatgaccctgcactgacacatcgttatcaaagatcatgctttacgttagagttcccccttggtgctgcgcagtgttttgggttgtgacaagtgcacagtggcgtgtgcccaccattactgtgttattcacaacagttccatttcccccaaccttctgtgctctcatcttcctgcctgactcctggcagccacttacctccttacaactataattttgccttttccagaattagcatatagctggaatcatacagtatatacctttttcagataggcttctttcacttcgtaagacacattattccaagtattttcttgatagttcatttctctttagtgttataaattattaaaaaattatgttttcttctttttatatagattatggattttgacaaatgcatagagtactctatatattaccacaaccaagttatagtatagttcaatcacctccaaaaatttcctcatgttatctttttgcagtcagaccctcttctcacacacagttcttggcaatcactaacctcttctcgccaaaatgccttgaagcatacagtatgtggtcttttggatctgaatattttttaattagcacaatgaatttaagatttatcagtattactgtacagggaagtagtatgttcttctatgctgttgaggagcactataatgtgtgaatgtatcagtttttttctatccattggtgattgaagggtatttgatttgttttcaggttttggccgtaataaatttcccataaacgtgtataagtttctgtgaacatgcacttttatttctcttgagtaaatgcctaagaatgagatggttgaattatgtaggaaacttatgttaaccttctctggtggttcaaatagtaaagaatctgcctgcaaggcaggagacctgagtttgatccctgggctgggaagatcccttggaggagggaatggccacccactccagtgttcttgcctggagagttccatggaaagaggagcctggtgggctacagtccatggggttgcaaagagtcagacaccagctgagcaactttcactttcataatatgttaacccgtataggaaactgtcaaactgttatccaaagaggctaaatcattgtgcgttctcagcagcagtcacgtgagagaattccagttgttccacatatttgggcatcttatggtggtttcaatttgcatttccctagtgattactaatgttaagcatctttctgtgtcat

SEQ ID NO: 36234 - DNA, 1749 bp, Bovine  19866881121364
  misc_feature (1)..(1): n is a, c, g, or t
ntccgctttctatattttaatctgttgcttctgtgagtagataggaaacgtttatagcatgtgaataaaataaaccttagtagggcaggaggcatgatggatgaaagaaacaggtatttttcagcatgtactcaaaagtgtattatattacagtcatgggtttagatatcaatctcttcggtagaattgagacagactgggtcttaatcttcttgtgcccctaatatttcaaaatgtccagtgcatagtgatgcttaaatattacttgaattttgagaagcctgagggataggtccaatttagcaaggtttatggatctcaatggagttattagtgaaagttgctcaatcatgttcaactctttgcaactccatggactgtacagtccagagaattctctagaccagaatactggagtggttagcctttcccttctccaggggactttcccaacacagggatcgaacctaggtctcccgcattgcaggtggattctttaccagctaagctacaagggaatagttaataaaacttaaatatcattaatagaatagtatgtaaaagtagggaggcagtcctgtgatacactgtgaaagtgaagtcactcagtcgtgtccaactctttgtgaccccgtggactgtagcctaccaggctcctctgtccatgggattttctaggcaagagtactggagtgggttgccatttccttctccaggggatcttcccaacccagggatcaaacccgggtctcctgcattgcagacagacgctttaccaaatgtatctgttagctatttctacataacaaatagccccaaagctcaatggcttaaaacaagaatttattatttgagttcacaaatacatggttgtgtgtagaaggaactcatgccaggctcttggttcaacaccttacacacctttctcacttaacccttgcaccagccctatgaggtaggcactattaccatgaccatttgacacatgagactgcagacaagaggttggagaagcaactcaatcccatggcttgtaagagctagaaccaggatctgacctcggagcctgtgccatccagcctgcccagcccagccagttcccccaggagcatcttccccaacttaggacgtcaagcctctggactctccaacgaaggtcaccccttcctctgcttgccttcttctctccctcagcgccaccaagtccccagcatgaagatcatgctaagcagaaatcctatcctacagaagatggttcctgtggctaaacaagaggctggtttacaggaaacaatcagcagaaaggatgctttgcaacagcttctaaacaggatgaagtgtgttggaacagagtttgtcattctgatggggaatcttggaatatttgggttagaggactaatccagtccaagtctcagacattttttaagccacggagtcttcttcaagtgaaacttgatatagaaactgagtatgtaaggaataccaaagccaagcttttcaggctgtgaggtcagggaggtctaccttgggctcatagagggtacccttggggctccatggagcactatttgagaaccactgtggtggccccgttgggtcatttaggtgatgggaaatagtctcagggtcacagagcactagagtagaagaaccaagacttgaactcagatctcctgcctcccatccctaggtgttctcttctgtgccaagtattcaagaattaaaacacccattcccaaaggaagg

SEQ ID NO: 36235 - DNA, 827 bp, Bovine  19866881153256
  misc_feature (1)..(1): n is a, c, g, or t
ncctgtcaggctcctctgtccaagggattttgcaggcaagagtactggagtgggttgccatgtccttctcccagaggatcttccctacccagggattgaacctgggtccccagcattgcatttggattctttaccatctgagccaccagggaagcccatgctacacagtagcttctcattagtcaatgttgaggtgatgaaccttccagatgcctttacttcttcagatgcactttgatgacctacacacaagacatctgagcaagcaacagccctgtctgttagtagccaagctagcatttagtgagtgcttactgcctgccaggctgtgtcctccccacaattctatgaggtcatttttatgattacctctcttttatattgaagaaactgagaaacagtaaaagtgcatcatttttcctattcacaaggctgttgactacataagaaacaatttgtatttacagttataactggcaactcacagaagaaactgtaaaaataaaaaaaatatgttaaataagactccctagttgatggcaatttgtgaaagaaaatatgaagataatgatttattaatttaatcaggtaagccaataatataagaaataccaggcaggctggtaacttcttggattattctaagcagcaaagcaagaacattctccaccaaaaagaatatagccacctgtgatgtcactttaattaaggcagtgtgtatttctaacataatgtgtgaaaatataaaactgactgaaatataaacctaactttccatgagcaagtggtgtataaatcaaataaataaattcactaagagaatttaa

SEQ ID NO: 36236 - DNA, 1380 bp, Bovine  19866881234369
  misc_feature (1)..(1): n is a, c, g, or t
ntataagaaaatatggctgcttatcaaattaaattgttttctcaatttgttttgctgatttttttattactcacattttcatcaggagtttaattacaggaaacatcaatctttcatcacctgattaacagtagaaccatttctaaatcacattcatcaacagtgactttctaaagttttcttactgtagatggttctcatcctccatattgcattcacttaggtggaaagtttacgctgattttttttttatgttctacttgatttaactgtatatggggattttcttttttaataatatcaattttattaatgaagctggtccagattcataacttcacatgaatcaaaatgaaagcctgtcataatttatgtcaaaaagaaatagtatacttcagttttctttaactgaatatttattgaccatcagcaatgagccaggcactgtgctgtgctctggaaaatgaggtaaagaagcagaatccatattagtgatttgttctgtccattaagtgttcaaggcacttggaacagagtaagattaagaggttaagggatactgaatttagccacatttttttgatgttgcagaaaactgcttattgacgagaacagagttccaaagtattggaaattatgcatttatttgtatcttgtattttatcagaagatcgtatctgtgcaatcagtttccatttaaaaagtaaaaatatttggtaggtaagtcatctgtaaaattagatgaatcacttttatttgaatgtaagatattctttggatatagcctaaaaaccatgtagaatttgctcctaaagtgaattcattactagatcagttttatggatggctggagtcaaattataacacagtgtcctataatttatttcattatttttattactttttattaatatcttattttccatgttgatttcattcattcttttttgagttataaatgttttttaggagataagacactgtttaaatttataaaattaaatacatactttggtctgaaaattatttagtattggataatttattatatagtattagataatgtagtattatcaaataattctaaagtgaaagctgttaacattttatgtgctggatgattgtgtatagaatgcacaacagaatgttttggtaaagatattggttcataaaagggatgattaacaaatataaatgtgatgtattgcaaatgaatgtgtgctcaagtatacttaaaatatattaaatatgtgatggatgttattgcatatttaagtgggattattatcagttgtttaagtaaagtgtattcttattaaataataaaaataatacttattattaatttattttaatcttcctcttaatttaggaaaaata

SEQ ID NO: 36237 - DNA, 1172 bp, Bovine  19866881294954
  misc_feature (1)..(1): n is a, c, g, or t
naaatcaaagaatgtgtgtgtgactatgaacattttctaaattttaatatattttaaactgctgccccccaaaagtggatatttattttctctgacattattccctgattcagacttaagtatgtcttccataattctgaaaggagtaacgctgagtgatatatcaaaggtacgctatggctttagatatgctgcttcccttttacaagccatggcaatattacttaataagcagaagctgacttctgccaacacagtcctctacttgccttagacagggaaatatatagtactttacaagaacatttgaatatttaccattttatagatcctccttgactgcacagaagaggaaaaaaagccaattgcactttagaacaatccttcattggggagacgtttttagtgagtaatatttcaaagactgttcaagggtgaaaaaatgttttataaacaataaatattttagtgactccatggtgaaaatttcatagtatgggttttttatacagggttcttccattccactatctgtagtcacttctaaaaatacaaacagtcaagagtttcctaccaagctaaactcatctgtaaatttccacatcaattgcactttctctagaatcagataggtttctatgtatttgtaaatgtatccacagtatttaaaaaatacttatcaagacaattgacttaaataggtaagtctatgaaaattatctactgttgtatagtaacaagagattaacgttatagaataaatgtaccatagattcaaaagtagattattgaagttagtaaaaccaactacaaggcacatgtctgtatcctcgaaagcttattttcaacactggatgcaacagaacccctaagatgctgatctgattttccaaaccctagaactggaattgagacagggaatatcaagactttaaagactttatcttctgttgcctagatagcccataagggtttattaaattctctagaatgtttaaatgcttaagcaaatattctagttctcaattaatgggaaagtggaagtcaagacaagcttagggaggaaatgaaaaagtcaccaactgtaggttaagaacactgagcagggggaaactctgattctgataaccttggctgccaacttgaaaaccaatatatagttgtatcatgtg

SEQ ID NO: 36238 - DNA, 620 bp, Bovine  19866881345946
  misc_feature (1)..(1): n is a, c, g, or t
ntttagttcttcttgaaaatttgtctcgtctctctctctctttttattagaatagtactcatttccagaacaaatttactgtggagttagaggctttttttttttttttcaaactacattctgttaaagggagtaagctcctagcttggtgataatttagttactgttgcctgttacagttctaggtgttccaaaaaaaggcctggtagacttaaagatcgacagtagcctttaagatagatggtagatattttaccccagtgaatacaaattgtactgagttgccactgactggtaaatgacacttaccatgatatgcattgagtctccccaaagggaagatgctttcagataaaggggtttaccgtggcacaagtctgcttttgaaacctgctgatagtcaccttccagaattgaatcctgtgtcaagaggggattatttagtttttaggataaaggggagttctgagtggctcaaggagtcagtcaagtaaaaaattacctaggtctttgttatataaaaggcttcccaggtggtgctagtgatagagaacccacctgccaatgcaggagatataagagacttgggtttgatccctgggtcaggaagatcccaagaa

SEQ ID NO: 36239 - DNA, 2297 bp, Bovine  19866881355852
  misc_feature (1)..(1): n is a, c, g, or t
ntgtttaaaatggaacagaataacagtctttatttttgtgcataatcttactaggtacagagaagggtatttctatctgactaggcaaagttgcctctctttgggaattaagaacattgtaatcaacagacatcggagactttacataataaaacactacatgaaaagttatttttaaaccctttcttaaaaagtcaaatgtagaactttcaggtatctgcacacgcaaaagtgcctactaacacaatagattgctctccaagccccattgccagagttaatggtactcaaaatgagtgtgttagtcatcatgcgcaactgagaaaagctgaatggtcccatttgtccaaaaataacagctttactaatatgccttgaacttctactacttaaacattgaaattgaaatgcatatatcccatttaagataataaagacagacatcacaacatcaccactctttgccttattaacaggaattttttataaagttgcagacacccctatttcaatgggtccaaaggaccaacccagtgaggcgatgacgtgaacaccatttctcccaccccagtttctccttcacaccccactcccaacctccacacaaacagtatcctgtagcatcatctctttgggagcattatcagagcaaagcacttggactgccaacatacagaactggtccaattttatttgcacgttgggaagaggcaaattttgctaccccaggtacacaatgctggacgttctgccacattaatggggatttccctcctttgcctcacctctttcttgattacatttagtttgaagtaagtttatccctatcttaaataactgaaaaaaaagtctaataagatcgaatggattagtatatacatacctctggaaaaaagaaacacttcacatgaactcatcctgggtagttggtgcatcctcccttcatccctgtttcattgtaaagggcatggacccctggccctcttcattatctccatctcagcgtgtttccttctctgtctttactgtgtcatctcccattaacgccctctcaatcagcagttttctaccattcatatccctatgcttatatcacagtgctcagcttcaacgacttctatatactgtctagatattggtttttattataatgctcttcttgaggagtcacagttaatatttttgataaaaccaaccttcaactgatttcattagccattaaaaaattccttacagtttgatttaacattttcatatagagtgcctacaatcgcaaatccccattagagtagttacttccttaaagagtttatgtctcccctgaagcattaactggagccagaaataaatagaaacaccccagtttgtaattcaaactagcaatttatttttgctccactgcaaattaaagttcagagcctagttttctgctgatgtccattcaattcaaaggcttcctttgtttcagcactcattttttttttttaggaattcatcaatttctcaaaaacagaacccaattggttccaactagtatgcagcctattatacatttcaacaaatctagtatgtgtgttcatatatgtaaagcaacatcatatctttcacagttatataagtagataatattgatagatggctttagttcccatcataagtctaaccttctagaaactttctagtaaaaactcttttgagacagcagcttttttcatgaaacatacattttatatctgcatctgtgctcagctttgtttacgcatatatgtcattagaatatttgcatgagcgttcacattctagggcccacgtatgtaaataaatcacactcagttggaaaatttagtaactaaacatgcaatctgttgagtataatcaggcatgctattcaacaactgcatgatataattcagtctttccaaagaaaatatatgctttgcgtaagagtgtctccatcaaactcgatgaaatttttccaggaatttgtactaaaattgttttgcctattcaatatatatatatataaaaccatctgactaatgcttaaatataaagaaaatcttataaaaatttaccaattctctcattgtctattatttgtaaatatgacacactaattggagttatttccaaatgagtgcaacagcagtccccaacttctttggcaccagggaccaaagattttgtggaagacaatgtttccatggatggggggagtggtttggggactgcactgtatttattgtgctcctatgagaatctaatgctgccgctcatcgacaggaagggcgctcagg

SEQ ID NO: 36240 - DNA, 1168 bp, Bovine  19866881358359
  misc_feature (1)..(1): n is a, c, g, or t
natcctattttgtttttacggtaaggggtggaaattgaagaccaaagtaagattttaaaagtctgcttttagttatatagccagtgggaatttgctgtatgatgcacagagctcaaatccaatgctctgtgacaacccagaggggtgggaggtgggaggaaggtttaagagggaggcacagtattgtaaagtgattatcctttaattaaaatttaatttttaaaaagtctacttttgagatagggttaaattttcacatctatttcagagacagatagattctagtaattttcctatgtgtgtatataatgtataatatccgtgaaacaggttttaactgctggatcttttaggggacaaatacttgagttttttcagaagcagagaggatctccacactatacaacatcctgacatacatgtcatctcttcctagtcctttctaaaccccaccccgcttagcctttgcctttggcatattatccccaaacttctcactgatgggactcttgacctggagtcaccaggttgtctgagatcaacaacaaagcatctcaagcccagcatgctttcatggggcaatgtggaaaaggcagctatccagctctgactttggctatatccccgtcacaccagaactcctgagtagagggcaaatgtgagttatgagagtctgccccatttagggccacaggggatggatataggaacccaggaagcataaagtagagcccaatgggaggctactccattttaaaaatattgcctgatttattgctaatcaataatattcaatttagttgaatattattgaagttgaagttgtctaagatagaattttctattttctaaagaaaattttatttcctaattaaggccagtattgtacttgatcatttattgtgaaggcaatgataagtgttaaatagggcttctgtttgcattcactgtgtgagatatttatttaagacaacccaacaccttggtgggttcgggtaaattagttcttgtttcatgatgggggctgagaagtaataaataacaagataaaggggaaaaaacaagtatgaaagactcaggctcacataacaccattgatacttctgcatcataaacatttattctttctactttcacagttatccagtttacattccgtgtatttcat

SEQ ID NO: 36241 - DNA, 1765 bp, Bovine  19866881444551
  misc_feature (1)..(1): n is a, c, g, or t
ncttaaatgctctctgtagctgctttaactactcgtttctcttggtggagttacggccccagtcctcccttctaagaatgttgaagcaacctctacgcaatccaatgtgtggtctagaaatgcctagatctttaaaataggaggaaaaaatgagtaatgacttttgatttcattatgtttaatgacattccattgtgagttcatatggtaaataacacatttttcaaattaagtaaatgggtgcttaaatttaaatgaaatgattgatgtcactttaatttcaactttccaaagatattcaacaagtatctgttgaatatttacctcgtgtcagccaccaggacaaatattctttacctagcagcttaatagggataacacagggagtcttagagattcaggactagtgtgtattagtttttcagaagtgctaaatacactccaattacctgactatttttgaccagtggtcatgaggggaaagtagagtccttatcattatgaagcactagcagtattgcatcaaggctgaaacacaaaaggcaggttggagcatgccaagtcaatactggtttgagcaccagcctcagggctcaaaaaaattcacagtgaaattaatttattcactcccagctaaattagcaatgatgccaatatttttgtttaattttccaagtggaaaaatcaaaatgaaaaaattaaaattcaataaaaaacattattaaaagtcagtcattaattaaaatatctgaacaaatcatttccatgtgacatttctcctgagacctctctgatatcagaatataaaagactaaaaatgaagtaggaaggcatttatgagatggggagactgaactaggagaatatattttttttctagatctaggtacatgtctaagagcagaagtggttcagaaaaaggagacaatctcctctcaagggtagcaagggtcatcacacttgcacgcagaagttaaatatccccatcctaaatcacagcaatttcctaaactgtgaagagaaagagaggaagaatcaggaaactacaattgtccaaaccatgacagcacatctcaagcagatcatccataaactctgctgtgtgattatcaaacagaatcgcagcttcatgacgtggctgcgtacatacccatgtgactcagtggtaaagaacccgcctgctgatggaggagatgtgggttcaattcctgggtagggaagatcccctgaaggagaaaatttgcctgaaaaatcccatggagagaggagcctggtgggctacagtccataaggtcacagggagtcagacacagcgctgagcacatacacacatgtccatacatttggacaaagtgtacatcaataaggtgaactgtgaggtccatctcatgaataataccctttcatcttgaagaccttcttatgaataggggtgggacggggcaagggtcttagatgtgaggagggggcactgcaaagactcccatcccaacactgcacctgcaaaaagaaaagtggaaaaataattccagaaagaatgaagagatggagccaaagtgaaaacaatgtccagttgcggatgtgactggtgtggaaataaagtccgattctgtaaagaacaatattgcataggaacctggaatgttagctccatgaatcaagttaaattggaagttgtcaaacaggaggtggcaagagtgaacattgacattttaggaatcagtgaactaaaatagactggaatgggcgaatttcattcaggtga

SEQ ID NO: 36242 - DNA, 1089 bp, Bovine  19866881469793
  misc_feature (1)..(1): n is a, c, g, or t
nacattatactaaattctaccagtcatataggagttatgtggttctttacattaatggcgactgaaaacgtggctctggagtcatataactctgggtaaccctgccattatccacattttataccgtttccctttccaaatcttacagagatctattataggctggtaaaaaaaaattaaaaaaagtactgaatagccaaaatatctttagacattctcttcctttgttagagagttactgaaaaatataagctctgctgaaaataagagacgctaaaactgaggtctagttttcatgaaatcagaagaaggtctctctattgctgttctgtgagtaaatccttctgcctttcagactctactcctggctcctccgaaaagggtcaccaggctaggaaaggcaacactggtcagagcccatggggtgtcctgcactgcatctcagagtcaagacttgccctgggcactcaccaaaaacaaacaggacaaaattccaaagagctgtacaatttaaggccaaagttctttttgtgtgtgtgtgtggggggggtgtattggcatatatacattactctgtataaagtagttaactagtaagaacctactgtatagcacagggaaccctactcaatgctctgtgatgtcctaaatgggaaggaattccaaggaagaggggatatatgtatatgtctggctgattccctttggtatacagcagaaactaacataaaattgtaaagcaactgtattccaataaaaaattaaactaaaaaatagatatttagctatttttaaaacagaaataaagaataaaggactctttataccaaaaaaaaacagaatataaaaatgtgtttgtaggcaccgaagatattaactaataatctgctaaataaccgctcattatagttgagaattcaactcctgctgacttccaaagccccgtatgagaatattaacatttcaggacacagatcactcaattcaagtatcatatatccatattaatagctttttggtaaggtcaaacgtccatcactgttttcatttcccttcctctatttctccacttctccaacatacaaaaat

SEQ ID NO: 36243 - DNA, 1399 bp, Bovine  19866881515213
  misc_feature (1)..(1): n is a, c, g, or t
ntatgttgatcatcaaaaattattccttctacttttcagataatgatttactcttctgattgattatccaatagctaaaactaggaatcaagaaaaaaccaactagttgaatgcactggaattaaacagactgaaaaaatatatgtcaattcaaaataagcattaccttggtctgatttttcatgaagtatagcaaatctcttgccaggcaacaccatttctttgggttctgtgggcaaaaagaaaagagattaataaaaacaacctttcttttcactctataaatgcttaaagaagatttattagtaataaaggtcagagaagaaaatcatttaacaaaatattcagctccattcagcagctgccttgggaaccacttgctttaaatgccaaataatttccccaaaggtcccctctcccctgcagctgagagcatgggtgactgctgcagatcctcagccccgttttctttgcctctctctcttttcttacatgggaacaagaccagcactccagcaaggaaaagcaatagcttcaatcatttcaaaagataagatgtaatccacgttgagacagaacatttacttggaatataacagactgaaatggaatttgcaattatctaaacttagtttccttcctcccctagtgaggagggcttttcaaatgttcacagaaagtttgggtcttttcctattatgcctttccacaaaaatgataaaatgagatattgttgggatgactcagtaaataattgcagattgctctccttatgagctgcaatttcaggctttttctatgctgctctgagaaggaaagtacttgataggagtcaaaagttatgaaaatatatcttattccctcccttagcatataaccatcttgaggagtgtcccataaaagattttattgcatcattatctgaatgttcagattgcaggataagaaattcaagtctgagcaatagttttccaaaaagaactgtcatatagataggtaagaattttaaaatctcctcttaagaaagttatttgaagaaatattagcagttaaaagcaatgttgattaattgactgtaacagtcattataagaacaatcatataattgcaatcacaacatcttactagctctgcgaacttagggaagggaatgaaactctataaacctacttttctcatctgtaatattggaatggtaattcttcctacttcatagaattgataagataaataaacaagacaagtacatagaaaagacacagacctaatgaatgttagtataattatgaacatcattattactattattatcattgttctccttttaaaaaatcttgcaacccttagaaaatcagtgccctaggagccacaggtagaatattaaaatcataccatacgg

SEQ ID NO: 36244 - DNA, 1113 bp, Bovine  19866881820114
  misc_feature (1)..(1): n is a, c, g, or t
ntccacgttcctgtgggaaggactggggtgagatttaggatagcggcctctggctgggttccatgttcctttaaagatcccagccatccctgcagtcaagggcctctgggtttgtgaactggcctcattctggatggatcaggtatacattttcactatggggatttaagtttctgatgactaaatctagaatatttctgccaaggtacatatagaaatgccttaatgggtaagttgtctgctttatttctagggatccctgatgattccatggtctattcaccagttttgatctttgtgggtcgaaacaggctgacttccttttccccagaggcttactgcttaattgccagcaccttatcgctgacagttaattgccaacacctggtctctccccctctgggatcacattatttccactgagatcaggaaactaaattttaatgcagcatcctcagtgttatctccatcttgcagaggacatctaacgcagagcttttcaaccttctggtgcctatttcatcaatgccttggtagccgaagtattttctgcgccatcctatgaggtacggttagggtggtgagcaagttgccatataatggattcattcctgccttctatttcccagtaggactccttcctcccttacaacttctgagcattcccacattttgacctcagtgatatagatcaggggtcagcaaagtttttcagtaaagggttggatagcaaatattttacacccttggtggctcagtggtaaagaatccacctgtaatggaggagacacaggagacacaacatgggttcgatccctgggttgggaagatcccttggaggaggaaatggcaacctactccaatattcttgcctggagaattccagggacagaggagcctggcgggctacagtccatggggttgcaaagagttgggctcaactgaacatgcatgccctcactcatgaggaccatatagtctccatcgaaactactcagctctgccatgatagctcaaaagcaactacagacaatagaaaatacacgagttttactgtgctcctataaagttttatttatataaacagattgagaactggatttggctgacagg

SEQ ID NO: 36245 - DNA, 1541 bp, Bovine  19866880443006
  misc_feature (1)..(1): n is a, c, g, or t
nttatagtatcagaatacatcactgcctggtaaggaggaatgttcctgaaggcatgtagctcccccaatagtcattgtgtgtgtgtgctacaaaggtcaccacaataaatcttctggttctcagatagaattacagttccccacctgttaaaaaccactacacacagtaccaaaccccagacagggatgactcccaataggtacagagattgtctttcccaacacctatggggggtaatcaattaattttagaatagtaagtaacaagataatagttttctattgagtgagccagttaacatctttgtgcttctttatcttcagttgtacacatggtctcataatttacctattccagtgggtttttgtcaggattaaattaaataatgtttataaaatgcctggcaagtaaaaaatcatttaatgaatggcagccatcactattgttccaccaatattttgagcttggagaatgacttcatcttttgagtaagggttaccattggtttgtagtgagttagaaaagcagagagtatatttcagaagcaaatctgagaattattattaaattaggctacattcaaagctatcatgaagaacagcaacaatagtgacttgttaccaaaaaaaaaatcttaagggcctttcaatgaactgtgtcaaaaatacctccaaaggagttatgagacttgctctaggctaggttgtaactagcttcgtttaagcaactgtcttcttgcgcagttgggaacaaagcacatacatgaggtgcaaaatacttaaaaacaggggttttgaaacacacatcacacctttgctatctgacttcatactggcaactaaaggtacaggtaacacaggtgtgcttatggtgtttctgctacttagccagtgatcctttatgttaagcatcctggattatgtaagagaaatctttgtctttcttcctttgtccttagataataatgggaggccatttactatgagctgataagctgatggatcaatacaaatataaagagtgtctctgatcgaggaaaaggttttctgagctgtgtttctctccacttaatctctaagatggcacaatgatagttatctctacctggatccttccctgacatcactttaataactcaaaagcctctcagaatcacctggattccttgtcatattcttgtcattgagaaaggtactatcacccacaacccattcagttttgtaagccagaaatttaggagtcattcttgacagttccccactttccttccaaatccaacccatcatcaaggactgttgattttatttcctaaattactccctctgtccatctctcttcatctcccctaccatcagtgtaatctaacctaccatcatctctctcctggactattgtaatagtttcttaactggtctgactccataagctcccccgacatggctacccctacccctaaaccattctcaaatcagagcatgaaccagatcacattattctgccaaccgaccccatgcctaaaactcctatatgactttccgat

SEQ ID NO: 36246 - DNA, 1644 bp, Bovine  19866880545949
  misc_feature (1)..(1): n is a, c, g, or t
ntaagggacatgtttttcctacaaatttcataatttcagaatagtgtagaagtgagaatattacatacttcatcaactagcatagccgtaacaagatatccatagcaagagaagtattaatagcaataaaaaaaaggggagtaaaagggatctaagtagataaaattcagtgaagtaattagcagcagtaaaaacagaattttgggagggaatatgtagaacatcctaaggatttgaaatgaaagagaaaaatggtggacagttagttaagcctggaggagcagataggaactatgagtgcctgtgtggcacttcctgcaaatacagtcaagccatttcttctccatgaagtttatttacccttattggtaaaaatactggttagattggcaaaaggaaaaaatacctggccaaaaatcccttggccatatcctgcctgtaggtatgctttgtggaatctatccaatattgtaaataatttgaaatagatgataacatttaacaagagggaagtttctcaaaaaagaaatctagattttaagcttctttggaaaaattgttaaattcaatagtctcctggcccttaggagcagtccctctttagaaagcacgtgggctgtggagttttttagtcccaacctgacttgctttactcatttctctcacctgcatcatgcatgtaggaatttgggcttgtttcttggagaattcattcttaagtgtatgccatccatggtgtaagttccatgaaaagaaattgctcggaatactttgtctatggccctaccatgctgaatgtactcagtctcatcagaatactttgcaaaagcaatttacataaagaaaaataaatgttacaagcaaaaacagcaaggacacagagaagctaacaaacaggtgattggttctcaaatagaggcgtgagcccattaaatgtgtcctattaataagctctgcatgaatatttggggtttggttcagaagtgcaatgtcacttaataacaggagctgggatttagtgaattattccagttcaagctcttggaaaaagaaaaggacaaaatgttctgtacgaccgaagtaagaatagagtatcttctgaatattaggagattaaaattcccaaaagtgagcttcttggcagaaaatggccaaggttatttaaggagtgacttcccatctttgaaatcaccattgaataaaacaatattaaactactgtttaaaaatttaaagaccatcatttctttctctttcctccagctcagagcttaatcacatgcagggctccctatatgcagtctgcaaaatcatgaaaacctaattcaactattacagaaataactccaaacttttaaaaggtttctctgaactaaaacaacccctgagaatttcctaatacagctaccacctagcatatgtttatatgcactgtatttgtgtttaataggtagatttaatttgtaagcatgcttataagttactttgcagttactctctattcatttatcttgagcagaaatttctttaaagttctctctataaagtccttttttacttcaaagcctggacaaaagaggtggagtattataagaatcactcaataaataggaggcatattaaaacttctgttagcagtgagtag

SEQ ID NO: 36247 - DNA, 3921 bp, Bovine  19866880546417
  misc_feature (1)..(1): n is a, c, g, or t
naaaatcttgccacatagaaatattggatttttaaaaatatatgcaaaatgttcctgtgatgttatttctagatgcataaattatacaaattatccagcaactgtgttaaagataaatacagaatgactaccacactatcagccacagaaatggattgtcctttccaggcaggcaggctaggcagctaagttctgtctctaatttaccagaatccagagttcaggctttagagatttagactaagtaggtacttcagaattcagccagaatcctgtagggacaagctagcagggattcctgtggaaaaaaaagaactggtgcaataaaactggaaagatcaatgagatgtcttgtggaatagaaggagaaagtccacatgtgtctccagggcttagtgagcagagaatgatgaggagaagctgacttcacagttaagcactggaaggagatacagactgagaatgccttgcctagctgtagagcaaaggacaagttcacaggtattaattaagttttccatagaattaacaaaattttaaaagcaaaaattaaagactttccaggtattgagtaaaagaattccaaatagaggatgagatacattttataagctcctttctcagaaaaaatattaatatatccaatattgcttacactagtggaaatgttaaacattgggctaccacctaaaattaaaacaccaccagtacactgaatttaacaataaagacagggaataatttgccaaggcaagccactgaagcaaataatataaacaagttcaacagcctattcaatgcattttagagcaaaaagagagagagaactggttgcctgccaacaccttgcctcagtgagacaatgcagtctgctctccaggaatagtaacaggttagaggtttgggttggagagtattgtaatttcatgttgttttattggggatggactacaggtcaattacttctggcatttcatcctttgggtttattggcaaattaccagcaactctggagatctctccagtttaaggattaggcatcacctagggatttattctgattccaagtacttctagctttaagtcaagaaattgccttacaatttactgcagaatagtcattaacagacacccttaaccaagaatccgtctcacgtgaaaacaaacaaaaaatcccaagcatgtattaaattaatttttaaaatttatgccatttctatatcaataatcattactgttatttctgatttctttcttattgttaaccatatctccaacaggtaatcacttggattgaaaatataaatccacattcattcaagaaaaaaagttatacaaagaaagctatggaaaaagaaattataaaattatcattaaaatgcagtaattaaatatcttgttatacatttgctgtacaagtcacactataagttagactaagaaacaaaacttttgtcttcttggagtcttcagatacctaaaaggatctatgtaaaaatattaaaaaatacacataaatttggggaaaataaccaaatattggacaaattggtgaggcttttatatcatgtaaggtgaaatgtcacataggagtgaggggaaaattagaaatgtacatgataaggaagaaaaccaaattgattaaccataaaaattcagtgtcctagttgggcggggtgaaggaaaaaacaaattattgtctattcctgtttctctgtcagggagacatgagagacctaacatgaagccacagaataaaacagtgcatactgatgtgtcgattttactgaagaaacctagaggaaacgcagcaagtagtcaaaacaccctattgcattataataaacataaatacaccatggagttgtatgcacagagtgtgtgaattttaaagataaagggcaagattcaaagtttaagcctgtcttggttgcttaaacatcacttcaccttcccaacctgatgtcccgtgatagttcatactttccaaaaatctgtcattaaaaatatttcttcaccaaatgtgggaaaatttgaaatatagtttgggttattttgaagtaagaagtgatagaaatttacacataacaatttttgctatttgagaattggctagggcagatacctatcaatggcaacagatgctaaatccttcaaaaattaggtgtatgtccctaaaatagtattcacaaatgttattgtcacattccagaaaatatgtcaagatccgatgaaagataaggcatttcattattctttaatgaaaggtaggggaacaaatcaactgaagcaagatactatttctattcctggagacaatgatgaaaaaatgggagaaatgtcaaggcaaaatactaagaaggatgtcactgaaaatgtcaatgactcatttcaaaaacaattccacgaaagggccctttaagaccatatgaaaacactggaacaccagacacatttccgtcatcccgagttatggaggaagagatggaatggaagtgcaggcagtgggtaagtggtgtagaacacagagctacctactttcatgcattggagaaggaaatggcaacccactccagtgttcttgcctggagaatccctgctgcctatggggtcgcacagagtcggacacgactgaagtgacttagcagcagcaaggggaggaggaaaagaagggccatgaaggcctgggaggcagacacaggtggccagagaccaggcagcagggaagggaggccgacaagcacacgccgtggctctgggagaccaaaggaaaaaaaaaaaaaaaaaaagactctcttctttgtatatctttcaactaaatttcaattcctaaaaccacacacacatttccacatggaaatctaaagaggcatcagttcagttcagttccattgctcagtcgtgtccgactctttgtgactccatgaattgcagcacgctaggcctctctatgcatcaccaactcccggagttcactcaaactcacatctattgagttggtgatgccatccaaccatctcatcctctgttgtccccttctcctcctgccctcaatccctcccagcatcagggtcttttccaatgagtcaactcttcgcatgaggtggccaaagtattggagtttcagctttagcatcagtccttccaatgaacacccaggactggtctcctttaggatggactggttggatctccctgcagtccaagggactctcaagagtcttctcaagcaccacagttctagctctgtgtgaaagttattgaaagtgtgcagcaggctcacacaggcaggactatccagggttcattggtttaggaagcatagcaggtagcctactgaggcaagaaccccaacttcctgaggtgttgacaaagagaacatagaatgaatagtggaggttgggagtctaattatcagccacagccttgtgaacccatgtagaattgaggattatgctgtttacctgtatttcctttcttactgtgtcttttaaatacatatgcatttaaaaatttctatttttttcctcctgttcttttcatatagagtgtattaatttatggtttagttcattggattcagaacccagatatacttgacagaattagagggaaaagtgccggggaccagccccggctgatccagggtattcgaaggagagacggcataggcgaggatcaggatacaatagcttcaattagatattaattaaagatataaagagtaatagaataaggatagctcaagtaggaaaattcagtggagaaaagaggctgagtagcttggtttacgcgggagaccaataaaacttcaagacaagaagtttgcaccacttacgtaggccgcaggcgtccttccgttctcccgaaggagaggagacactgaggcctccccggtcggatcttagaagcccaggcata

SEQ ID NO: 36248 - DNA, 815 bp, Bovine  19866880588650
  misc_feature (1)..(1): n is a, c, g, or t
ntttaaaaaatcgattcctgtaaagatatttgaaatgtttctattttataagtttctgctttgagaatttatcattaaagcagaaatatctatggttatatttttttttaagacaaattacaatcctacttgtctttcagagaattaattttgaggtacttagaaggtgttaaaaaagttaatctgttactctgagatagtaatgtttagataacacttacttttccccaaatgttattcctagactcttacctctttcatgaatgtttaagctttaaataagcaactatcctttctgaaccacaggagaattaaaaaaaatgtgcataattacagataaagtcaaagtcacctccaattgcttctgaaatctggcagaagcaaacatctacccaggaggcttccgggcattctcaatattcccaagtctttttgagtctgtgtgatggcccaagaaggccacgtgaagaactacatgatatattcaacaaaaaatcgagcatttaatgtgaaaaaaacaggcctaaggagttgtttaaaaatatggacaacacttgagtaacttgactgacatttgtttcttttacctattattttaactcttgcttagtatgtatgtcatccaaataggaatactgagatcttaaattacacacccataactcagattttccctgcttataacctcattactgatttgcatgcccttttcttccttcatatttttattggaaaaaatctgtgtcaggagactctagagctttcaaaatttttttgctgactctttgtagaaatattcacaaactactgtagcc

SEQ ID NO: 36249 - DNA, 1665 bp, Bovine  19866880657702
  misc_feature (1)..(1): n is a, c, g, or t
nataaaatatataagctacccagaagtcctttagagtttcctaccttttgctaagacccctcccctgggttcaaaacattgaagttggcacagaaaatatttttgttagttgaactgataacgcttgagtatttacttttacacatatctaggtactcataatttttctttaaaattttgcctatatcaaataccttttcaatttagaagtgcttttaaaaaatattttcttattcctttttaaataagataaagggaaataaaatacagttgattaaaaacttgactttttctactaaaacattgttattgttaggatataattaggagatattattaggagtaagcagcacccttaaaactagaaaaaaatattcctaaagtataaaaattattattatctttgtggtcttgactggagaagagatataaattacatggtacattggcgctgtttctcacacctcacttatagatcactttagtgtataaaactgggatacatttcaaatgtcccactaccattttttgctttcagcatttcatttaggatctctgtcccatgaaagaggtttgtggcacaaaggaagaataaaatagcacaaggccagcactgcagtggcccttgattctctttgaagccagaagtgagcggccaggcgtacttgttgcccgaatgaatggtgactgtagttaaactgcatattacattttgacccagaatttcttttttttaaagacctaatgtaaatacaaataatagcatttgaagtacttcatcagtgctgttttaattatgcattccccttcacttctcatcttcctccagaaatcatttggtgatctttcaaaaagatttgaaataaagcaccgccttcagtgtaaaaattttacgtggtatctgaacaatatttatccagaagtgtatgtgccagaccttaatcctgttatatctggatatgtgagtattttcctgttcctttttatttggtatactctttgccaccaatatttatgtggttcaaggaaaaatgctgtaatactttctggtttattgcttttgagagttttacattaacaccactttcagaaattagttgagaaaatatataaaccacgtagattttttaaaaatttataacttgaaaatttccctttagattaaaagtgttggtcggcctctatgtctggatgttggagagaataaccaaggaggcaaaccattgattctgtacacgtgtcatggacttgggggaaatcaggtgagcattgcacgaaaaatcctgccttctgtttagtacctgcaaccacaagtaagttcttgcatgtctttcagaacccatatatcaatttcatgttcaggtaaactggtatgtgaaatacttttagagtaagttgggcaattaatattgaagttgcagagtactttattttgattttcactctacctctgaaaacagtttgaggttgcttacccattcagtagaaaggcaaatgagaatataatagaataatgccatctgaaataaaaacaaaaacaaaaacaggatcttctgtgtgaacctttaaggttgcatgactattagcatggtgattttgctaaattatacataaaggctatattttactggattagacagcaaataacatcatgttcatactgta

SEQ ID NO: 36250 - DNA, 1922 bp, Bovine  19866880753031
  misc_feature (1)..(1): n is a, c, g, or t
nttctcacacccccagcgcccccatatacatgtgctgccagggtcctgttacttagtagactcttttgcccctgaccattggtcaccacccatcacccttgttttcactttctttcatgttacattgactgaatcttctagactcttgactacctgtccatcttttgtcttctaggccatctgatgccttgtacaggcatagatcattctaaatcaatattcttatcaggtaaatcttcataactcccaaataaaccctttagtgttgtccccgttagatagcacacaaaatctaagttctctaactgaatctttcaggtccttttcagattggctctagctgtcttttctggtggtaattcccaattttctgcttcatacaatttccaaatttccctgccaccagactttatttatttcattgcttctccattcctttgcagctctatgtattagagctgattctaacacatccttcaaagtttaacccccaatccacttctgtacagctcagtattaggagttaacctgctggtaaactctaacaagagttttctttctataactatgatatctatggacaaatcttccctacttgaaatgcatactgtgtttagagacacactgcgttttgcatattctagtattataattgtccagtataattccttgaataaacaagtatgcaataaatatttgttgagaagcctttgatctagtaaaccacaaaagtgtttgttaccttattgctgataatggctggagttgcagaaacatacatattcaataatagtaggatctttatatcaattcttgtttatctctggttatcttatttagagaagtattatgaaactttccaaaattctatttagtgaagtcgctcagtcgtgtctgaccctttgcgatcccatggactgtagcctaccaggctcctccatccatgggaattttccaggcaagagtactagagtgggctgccatttccttctccaggggaaaattttatttacttgtgactaaaagggaaatgtttacattgtatcattaagtgaactaattagaaatcacatataaagttcaaatatgagtggaattataggatagggataggatggaaatactaacctttggtgatttctttctttctcttgttctgtactgaggttttataatgtaatacattatactatattattagaccattataatagccccataagcactaaaaaatagtttttggatgaatgattttaaaatgtgtagatgatttctatgtctacaagtgaaagccatcttaaaaaataaagttatttataatgtatcaggtaataatgtaggtgaatctcccacccacacaaatatgcataatcaaagagtgatattttttcttcatttgctttgacatattttagactgtgtgcggaagtttaagtgttgtcagataagcatagaagaaggcaaagggaaactctggtggaacttgagaaaaacttgctataagatagtggagcataactggtttgaaaccttcattgtcttcatgattctggtcagcagtggggcactggtaggtaacatgatctgctcctttacttttacctgaaaccctttacctttcccctcaatcaacctcctattgcacaaaaaggtgttttcacaagaaggtgtttgtgaagatgagagacattgtatgatatttttagcacagtgtgagaggctcgctaagtagcaacttttattgttctgccataggcctgagattgaatcaaatttagatcagtatgattttttgtgaatatttaaagtacgacccttctaacttttagtcatcagaaccagttcctattaagaatcaatatgtagacagggtatgggattatcagctaagtatcaatctgcttagcataagccccattgct

SEQ ID NO: 36251 - DNA, 1260 bp, Bovine  19866880884354
  misc_feature (1)..(1): n is a, c, g, or t
ncggagcctggtgggctgcagtccatggggccacaaagagtcagactgagggactgagcacattctgacaggcgtgtagtgatatctcattgtgattctgatttgtgtttttctgatgattaatgatgttgaagcatcttttcatgtgcctgttggccttctgtatgtcttctttggaaaaatatcattcaggtcttctgaacactttttatttgggttgttggtttttttttttttctttttgctgtcaaactgtatgagctatttaaatattttgtatattaaccccttattagttacatcatttgcaaatattttctcccatttagtaggtcatcctttcattttgcagatggtttcctttgttgtgcaaaagcttttaagtttaattgtgcatgtgtgctaagttgcttcagtcatatctttcggccctatgcactgtagctcaccaggctcctttgtccatgggattctccagctaatactggagtaggttgccatgccctcctccaggggatctttccagctcagggatcgaacctgtgtctcatatgtcccctgcattggcaagtgggttctttcccactagggctgcctggaaagtcccaagtttaattagatcccatttatttattgttgcttttgtttgctttaggagacaaatccaaaaaatattgctacaatttatgtcaaagagtgttctgcatatgttttcttttaggagttttattgtttctggtcttacatttaggtctctaatctattctgagtttattttttatatggtagataactagtgctaagatatcttttaaagtctttcacagggcaactgcatccatatttttcttgcaataaggtacttctagcaacacaagttgtcattgtgtatatctctatctggaaaagaatattacctttacttcccttggcaaaatattcttccaactagagatattaatttgccccaaactggcaatgtgtagtcttctagaaaaatctttccctctgctacccagcaggcaggtggccctggctttggtccctgttgctatggatcactgcacacctggatccatttgttcagcttcaagtggagcaggtgtgatgaaggtgggctgtcctattggacataaacggacttcacacagtgctttgctcctgcgccaggcagcctcactgagtgagtgggctagtgctatggtaggctcgggaggcagtcaaatagaagggctataatgtaaacacagactttagaat

SEQ ID NO: 36252 - DNA, 2692 bp, Bovine  19866880915592
  misc_feature (1)..(1): n is a, c, g, or t
ntttctagttggctgatacagattatatagatgtatgtagtctttactttttgtgctttcttaaattgttagaaattttagaatcaatatattttcttttaaaatgtagcttattatatttattcgtatttattcattgctgccagtgtaacaagaggaatcagttaaatgattgtgtccaggcactaacaccaattaatgcacttgtagctactgaattccagccaagataaatataattaaatctagtgcttcaggaaattggttgactatcaagggagtcagaatggaaaaacatttacatataattttaaagaacattgaatttaactctttggattaaatgagctttttttctatacatattaaaagttaatatgagaaataaaacaaaggttttagatctctacatgtatgtatttgatttcataagttcatatttttcaatagctttgtcattcatttctcatcacttaggctggactgtagtagaaaaagaactgaactaacagttgaaagttttgagttttggctctggtttcatcatataatggcaatgattatcttagccaagtttgagtggcctaagggcaggggtcttattttattcatttgagtattcccagctcccagcacatgttgaatctcaagcacagttgaactgaacacatcactaagctttctcacttgcttaaaagagagaatgtgatcacagccctaatgttagcacctactattaaacatgatgtttagatttctcatttatggcagaacagattgtcaagacatctaagtgagcaggtactgacttagcgatttgccattttatttagagttaaagcaaataaagttttttgaccctcttaaatggcatgatattttttaatatatataatgacaaagtttaataggttgtgttttggaaaaatgactgtctggaatcgttttcttgatcacaaaattgaatgttcaagaggtagagtttgggcccacttactccaaatctgctgtggaagtcaaatgcagaagagccattggtcttctgtgaatactagagaacttgcatattttttgaccaaaaaaaaaagaaatttcagaatttatttttatgagtgatctgaaatcactattctgttaacgtaatttctgaaaatatgtttacttttttggtctctagtgtctgtactgcctaatgctagttctttaagaacttaagttgaattggcagggaacagagaaagctgtaaagagagataaaagagaaagctgtttgtaaagctgtaataaatctcttgtttttattagtatcttaaaggtgaacttaaaagcaacactttgattttcctaaaatactgtaaatttaaacaaatatcattaattatcaggtatggcaatgtggtgggcagttggagattatgccttgctctgttgttggacatgtttttcgcagcaaaagccctcataccttcccaaaaggcactcaggtgattgctcgcaaccaagttcgccttgcagaagtctggatggatgaatacaaggaaatattctataggagaaacacggatgcagcaaaaattgttaaacaagtaagttagaactaacaattaacaataaaaatccacagaagttcacatgtccttggatttgtttgagtcaactcaagtataaaacattttttaaggaattatttttgaagctggtctttttaactcaaaaatgtataactaactgatgccagttttctctctctacactctctctctcttttttttttaagtcaaataaactgcatttaaaacctgaggcaatatatagcagaaaccaatgcaatattgtaaagcaatttcttccaattaaaaataaataattttttaaattgaggcgttctacttgatgttacttttttttaacgtgaaagatatttagtttttgtgactgctttggttcaatattttacttaatgaaaataagattaagtggaactgctttcaactggttttaggtgatgtgattaactcctgaatcaaggtgctaagtggcattttgaattagagagacagtgtcagatgtggcagaatgaaccaagatatcgagcttttttgtttccagttctggctccactttctggaagggtgactttggcaaagccccttgacactataaaatgatcatggtactttatagggtgattggcaggttgaccagacatggagtgtatgctccaccacatttcttctctctccttccctgtcttgatataaaatacttacctgtctcccaaaacagctgtgaaataaggaaataagtactaacaaaggcatggcactatggttattattgacctgtcctagataaaagctctgtagaatcatcatgcctaatacatttagaattgagtcccaacagtttcaatattggatgtggtaactaaactagacagtttaaggacatgctttggtaaatggcatccaattctttgtaagaaaccgtgccagttcgtaaggaagtatatattgggattaaagggcatcagcacctcagatgtcataaagatctggtcccctcatttgtctttttctctggtctctggtatctccctataacatgtcagtaccaagcaatatcagagcagtactggactggattgctagcccttcacccgcggccaccgacacaagggggtagtttgtat

SEQ ID NO: 36253 - DNA, 728 bp, Bovine  19866880988388
  misc_feature (1)..(1): n is a, c, g, or t
ntggaactgtacattagaaactcttatcctatgtaagacatccaccatcagatttcacatgccatttagaatacctatcattttgccttttgatatttccacttcctaaatactatatgtttatttgtagaaagactgtgtttcaggaaaaatatgtgttccttgggggaggatgctttgtcgaacagcttctcattacttgtgggaagtgccaagaaccctgaaagggtaggaaaaaatcataccggcttctctgtggctctccctgtgacagagctcaagtgcaggctgattggctatagagccacagggatttgatgaaacaaagcgttccacagcaatacagaatccagcggcttctatctcaagggaagtacaagatatgaccttggttgatcgcgggcgagtatgctagttgcctagcaaaactccaaagtccaaggaaaaaggcataatgtctttactgatttacatttcgaagcttttaatatcataatgtgatgtgctacaaactgaataggcttacagaaagcatggaatagcatggaattttctactaccatagatgctgcctcgttccacatgatttgtatcaattcctatatttgtaatgataaaatgttatgttacacaatatgttagtgcttataaagcactgggtgtacctgacattttaaatttgaaagatgacctcacaatgagtgagatttaaataaccatatcttaaa

SEQ ID NO: 36254 - DNA, 2274 bp, Bovine  19866880992543
  misc_feature (1)..(1): n is a, c, g, or t
ngatgtgccttatttcttctacattttaaatttcttgaagataaagattttattgcttatctaccacagtcagcaggatattattagatatcttctgaatattattacctaaaacaaattctgctagtgccctatccagtgtgttagctctggtcacatgtaggaattgaacacttaaattatagctagtgccaaatctgaaatgctaatatttttggatattggcttaaattaaaaaaaaaaaacagcattagtaaccattagtaaccttaatttcacttgtttcttttgtctttttttaatgttatcatctagaaattttcaaagtacatatgttcatctcatatctgtagtgatgagtgctggttcagtgtatacctttctcctattccttttccatccaccaaatgatcaaacctactaacaaatgaattaagaaagcaggcaatcccctgttctgagatgctctaaaagggagaggcacactctgtctatcattttctgttttacttggttagatggttgttttcgtctttaattcctaggattttggaccaagaaacaaaagtgaacattgtgtgtttgtgcgtgtgtgtgtgtgtatgtgtgtgtgtaagagacagagaaacatggaaggtaacatttaaacacatttaaacatctaaatcagaatatatccagaattatagaaagctttctattttgaagtaaactggcatcaaggaaaatagaaagcaaataaagttctcagcccagtaaacagcccttgatccatttctatcgtaatgtcagttttgcttcagccataatagagagccctgcaagttgcccccagccacgtctctcctcctgcttgctggtgccttgtgctttaggcagtttctttccaggcaaccacagactgtttactgactgtaatcaaaatgacagcacactgttttcacaacccagcgttgagtcgattgcctttttcacttggcaacctaagggagcttgaggtataacttgcatcacttcaagatggtggtgcttacttcatatgtaacctgcatcctctgaggcttaaactacagaggaattgagagttatctagcatgcagcagggaggctgtgaaatcagccttcagattagtgctagtggtaaactccactggagcacactatttagggtgtggctgcagttctgctgtggttcttccccagccagaacccagccacctgagcagcttctcttttaagcatccccaccccacccctggtgggctgccgtctatggggttgcacagagtcggacacgactgaagcgacttagcagcagcagcagcaccccacccccaccccaccccagctagatggttataatgttgtggagtctgaccaccttgaagatggagaggagaggcagaggagagtgtaatccaatagaaacatgtcctgcccctaagagagacagaagaaaacagataggggaatgcctgtgactcaagtaatctgtaagttctaggcttgtctttgacgtcacttgctgtgacatgttgaatgctcagtgtttttggtattgagtgtccacatctgttatggagaaggaagcggggatgtgactagttgatatgcagcgcctcttttatctctacagcactgaaactctgtgcttggtgtattccaacatttatcccttctgagagacagtgatctgaaggtgcagcagttgccttatactctgaactcaaagggtcattgaatattggactaatgatgtaactggggttggctgtgttataccttttagagtctgtcttcatattcagaatactttatgggctatgtgcttgttcaaatttgagctatgtttttttgatgaatcaatattatgaataccttgagaagagtatagctggagggttggttgctgaagagaattgtccctcacatcttttctatttagatactcaattctgtacacataatttcttcctaaattggtgatatcaaaaatcttctgtacaaataacaattaaaaaaaaaaactaacaaaacctcgagtctaggtttcaatgaaatatgatcagtcattgaagaaaatgtgaaaacagagagtctatgtttttccttcagccacttagcacatcatttgtaccaaaatagagcaaagacctccgtgtgctgcctgagttaggtgtagatgttaccacttatttgggattccctgttggtcagtggtaaagaatcactctgtaaagcaggagacattcaatacctacattggaaagatcc

SEQ ID NO: 36255 - DNA, 2482 bp, Bovine  19866881008262
  misc_feature (1)..(1): n is a, c, g, or t
naaaagaactagtagtgacttcatttattaggtcaaaaataatactgttatgtactggtgtggtagagaaaaataggttgggcactgagctggaagtcttgatttctgattcaaattctgctactaatgagttttgttgcctcagaagggacacttgtaaaatatggaaatgggaatcaaggatatataaggacacttttcattcattgttcctaatttatctggattttcaccaattgatttctcagcttaactgtaatctgatatatctctgattttcactgagttttatattaccattaatctgtgctaaacatgaggatagagaaatagagatgtttaaaggtccttagccagttccttctgtggtgggaacaaccagaaagcaacatggagaagcggttaagagcaatggctagtggaatgaatcttatatgtgtgtgtgtgtgtgtatgtgcttgattcatatatgtgattgtgtgtgcttagttgcttccatcgtgtccaactctctgcaatcccatggactgcagcccaccaggctcctctgtccttggaatttttcaggcaagaatactggagtgggttgccatttccaacttcagggatcttcctgacccagggatcgaatttgtgtctcttgcgtctcttgtattggcaggtggattccttccactgagcaacctgggaagtcccaaatgaatcctaggtccactattaactaacaaagattttaatcttatgagcctgtatcatatcacctgtataaacaggaatgatgatgctgacattgcagcattgtgtaaataaatactgtctgtccagtgtttattacatatcctggggcacaattaagtgccaacccatccctcctcccctgttcaccaacgcttgccaaaaggaacaggtattattttttaatgctggtgatggtagtgcatcttctacaacaacaggaagaatacagtgaaactgccaagaaattccgtagttgaaaagggaatagttcttatcctggaagcatgcccttgctgaaacacaacaaaatgtgttctctataataatatcaattagtgttaacatcctagccatttcctgaattgctcatagaactctcataccttctagaagaccactcttttgccaatgatacattatcatggaccccacttctaaggcctttttctttttaacaaaataggggcaaaaggctttatttcgcttgtgctttaatcaatacaactattagacagaaggcctctgtgaagtcagaaaaaaaattaggtttcaccaagaattaatttcactatgaccatcaagttaaagaacctaaatcccagaaatgactgcatgtgtaggctgtgtgatcaactcaaactatctactgtttaaatagaattgatggtgcaataaagggtggaaagtcaaactgtgccggatgaaactgttgacatacagcaaaatctctgcttctctacaaaggattttttctacaaacccagcttcatgctcttgacagctgtgtgctactagggatcttagggagctagagctgggaggtcttttcagcaccccaggcctcccaatccttcccttcaaccaccctaggcctctttaaactgactcaaataactgtgatgtcagtttcattttcatggcagccaagacgacttaatgggcttatgattagacagatctgagatggccttgagtttgagagtcttcaagacacgaggggaaagtttctcaattagacagtgccctgctttagtccatcttcctgactccagctcattcccagctcttctgattccttatttttaggggttaaatgaaagcacccataagtggaagcatattaaaaaaacactttttttccactgaagaatgaaatgtgactagatggtgaaatgtctttgcatgagcggctgttcagattgctttctttctcatcatcattcatgtataggaacactgtgaactcactgaaggttgggaataatgtttaccttgtcatctaaaatatattattcattctaccttaatattgatgattgttttaccagttttctaaaacttgaggattaatttatccacctgctcctgaaataaggacttccctatagctcaaatggtaaagaatctgcctgcaatgcaggagactagggttcgatccctgggtgaggaagatcctctggagaagggaatgcaatacactccagtattcttgcctggagaatcccacggacagagaagcctggtgagttacaatccgtggggtcacagagtcagatatgataacacacacacgtaactcctgaaatataatttaggatattaacagtataccttccgtcctagggatctatttgaaatttttattaactttaatcctaaattatctgtacttccacttgaattttacaccataaacacctttaatggcaatcctatgtagaacctggtatccaaactacaagtt

SEQ ID NO: 36256 - DNA, 937 bp, Bovine  19866881065984
  misc_feature (1)..(1): n is a, c, g, or t
nctgatagttttggcaagtttatactacataaagaatgaaaagtgggttggtttggcatatagagccccttgaattttacggaaatgctagacttcagggtgccatgtgctaaaagctgcctttaaggaataaaattttgttgctttatttcaatacagttttcactaatatgaacgtttgtttgcaaaactaattaaagtacagttggtggtattaaatttatagtcaatgaataacttcattttgatgaagtagaagactatgacatgaaagtgattccatttattgctcatttatcagatacatttaccttgcaatatatattctaatatgtattctcaaaatatatgcggcatatagttaatttggctaacaagcaaactctacatttaaaatatgtcacaacaacctgttttatgctacaactgtttcatgcctttgagcttaacatgtttttaaaaatactcacgccatgactatgacactgaaatccagccagttccatggatcacgaaggaatgtaaaatcttctaagcaaaaccctcttgccaagatttttataagtgactcaaaggtatagattccagtgaatgtgtacctaggaaaagcatccaaacaaaaattaacaatttcattcgaactgttaaaatacagcaaatctgattcttttgtggtttttcagttcactaagatggaattccttattcccacctacaaaaaaatctactagtttagtcttacgagtaaagggttaaactgaagagctaataccttctactaagagtttgatcttgtttaaatatttaggtttgatagtaatagtttcatgtgttttatggataatcatcaggcttgatcctctagagtaacactgtccaactgaaatttaatacaaactacatatatagttttcaaatttctagtaatcaaataaaa

SEQ ID NO: 36257 - DNA, 2026 bp, Bovine  19866881087862
  misc_feature (1)..(1): n is a, c, g, or t
nttgatatggaaaaaaggcctcctgcaaaagtgggtgttctgaaaaataatccattgtcaaactttgttacacacccaaataagaaaaaaagaactattttaagagcaactgaatcaaatttacaaataaagagagatcacaatttcaaggctttatacagattaataaaaactaaaaatgcaatcttcaaagtcaagttctgggggatggggaggaactggtaagtatccttccctagcagagcaaaattattttgtcttttaactaaacttaaagattcttaagtaatgattataaggaagacatagagctcacttaattctacttcctactaggtaaattgtgtataagcaagtccataaataaagtacttttttattccttccatacagaatattctttatttttgttagtgtgaatcaccttggtggaaattactgtaaaaaacaaagaatgcatagactttcaaacaactgactatatataagactttgagagcaatcgtcttacttgattggatatgtctcatccttccttctttgcttctcatgatcgggaagtgtttcccagccaaatgaaaggctccagtcaaaattcccacggttatggttacttccataaggagaaggtttgttgaattcaaacgtgttcaaatctatggatgcaatatctgggctcacgacagcagtgtagttctcagctattctggccaacaaaggttctaaccaaccgtagaaacactcacctggaaagaatacagctttaatcaattcaacaaaacactccaggtttttttttttttctttttgtattttggaagagagtttgcagagaaatgagaatatctaagtcattattattattttgaacatttacataagggagatttcttaaaggtttcttgtaatgagataagggtaggataaaaaaaaaaagcaggcaagattaagtatagctaaggagtgactttgatggggagggagtgacattttttgaaccttagaatggaagtaaaatgatactgatatatttaagtttcacactgtgtatttctctttaaaatggactatgaatccagggtgactttttgctatcccagggatgggggagcctggtgggctgccgtctatggggtcacacagagtcggacacgactgaagtgacttagcagcagcagcagctccaaaaatattctgatttccttaaacttgtctccttgagtaaggtatagaaatggaaatcttcatttctctgacagggttgcaggagaaaataagtaaaggaatcagaatattctgattttagcaattggaaaagaaccattcaaaccaactcagcacttcacaggggatgaaggtgtggcacaaaaggtcggattctggccccaggccaggctctcacatcgcacacagacttcaggggatatggcatgtgcagtcctactcaggacttttcatcatcaagccatccgcagtcatggcccaggaggaccctcagacaaatctgcctgaaggggaagaatgcccagtctgatattactgtaattttggaacaggagaaggaatactggagaaggggccatttccttttgaaaacacctctcttggattacctttagacttttcttaaatgcctggtattgagagaataccggatgtgaaagctctaaagagactcaagcaaatccaaaagcccttctgtaacaattagtgtgtgctcaaaaccatttgcttggtcaaacagcacctgagggctggccaatccaaagctaaacactcatacacagagtaaaactcaggaagcttggagctccagggactatgtgacatttaagtaatatctatggtgaacattaaacattgactctaaaaatagtcttcaactactgtatttacaatcattgatgctggagaaaaaattaaaatacaaagaaaaaaaaccccagcagcaacaaaaacaaacaaaaactaacaacattcatgggaaacacacaggaagctatgaagggacacctctcagttggca

SEQ ID NO: 36258 - DNA, 1759 bp, Bovine  19866881128735
  misc_feature (1)..(1): n is a, c, g, or t
ntttcccaaaaaaagtaatctaataaatctgttctagaaaagtatatctaaagcatcactttagaatagttgttccactttctgctgcagtattgctttgccatcttctgctctcagcaaagctgacattttatgtcaattaaacacaccctctgttatgtaaatagttattttatcctgtgggggcatatttgcatatatatatatatatatatatatatatacacaccccacacacatatatatatatatatatatcctgataaacaacctctattaaatcaaatatgtaccacaagtatatgtgtcttttgcaagcttccaacagggatgtatcctgcaccattcattaaacataaatagtttgaagattatcactaatgcatgttaattgcctatgctgctctattttacacaatccattcttcacaagtcttggttagaagtcacatgctggtagtacagtgatttcaacctgctctatgtctagtatgtcaagcagaatagcttacagttatttaaaagcacttttccttttccatttttaattcaatttgagtgtcatatggtgtctctctagattcaaggaaacacactgcatactgcctactgtcaaaacatatactttgtattttgctaaaaatatgtccaaaacttgtttaaatataaataatgtaaaaatatgatcaattttatttgctgcattttatacataagataattattttcaagttgatgacatggcaatttattttactttatgcttttgctttttatttttaatcacaactccaaacttttgaatccattagacttttcaatggataatttcctaaaataaaagttagacaagggttttgtgaatttctttgttataatattttttctatcattccagtaggatatacattggtcaaaaattcaaacctagggtcattttctaccaactatggttgcctcaatataaccctttattcatggaaggttttttttttaactcaacttttgtagtatttgcttatgcagactagtcttatttttttaattcctgctgcactaaagctatcagagatataacttgggctctgtcccttttagccatgaacatagtggcaaagttgtgcaattacttaacatgatataaatttttgtttttgcacaaaccaaaagagtaatgttaattccttttacacaactatttacttgtagtgtattgatgaactgcatgcagggaattgctattattaaaaagaatggtgagctatgtcattattgagccaaatgaataaatatttcattttttattgtatttaatttcttggcttctgtttttattgttggaagtttaaaatatatataattaatgaaacctgtacttgatctgacatttgtatacataaaagttcacatgaattttgttacaacctactgaatgatttattaagaaatactataaagtcaattaaaagcagtttttatgaacttttctgtgtgcaaaagatcaagcccacgtattccaacttgcaagtttaacaacagtaatagtagccatttacaacagttatcaatttcaattaattctcttggttgtaaacattttaatctcaactcctcactatgtaatctccaaatttcttggtagtaaataaatgttgtagtacatagtttgttacttaaattcattttatgaatttctatttacacataaaatattaatgatgtagtgactgagaaattaatctttttttttccagggtcc

SEQ ID NO: 36259 - DNA, 1182 bp, Bovine  19866881157436
  misc_feature (1)..(1): n is a, c, g, or t
ntaattgttttactgagggttatatatatatatatatatttatatatatatatttttttactgaggagatacccccccccccacccactgaatatacatagactagtaaagagttttatgacttacttaagggaaactacttttgaattcttgaattctctgaatctggctatttaatctgctcttagttatattgagattgcctgaaggaataattttgagctggtgtttcatattgtgaagatgattctatttatagtctaagctaatagaaactgcatttttatgaagtcttcatctcagagtcctattaaatctggaaagtaccagaaatacttctcaatttttcaatgtaaaaatacatagcttttccaaggttcacaactataaactacagatttgtttggaaaagttgaaagttaggttaataaatgtacatttaaacttaagggaccagtttgaaagtttacacttatagtcaattaatccaagttaatagcaactgtctgcttatgaaactaagctgatacagagcttggcctctggcatagaaagctctggggtttcctatgctagagagtcagtttttttgctttgcttaagaaatacccgctagttactcaactgtaatttaagtttaaatatgattgatagctctcaattacatgtaatattattgttctcagtgaactgttatattttccttccatgttattctatttaaatcttcacaaaattgctgaaagatacatctcctcaccagcactcaaactaggaagaattgaagggatgggaaatgtgacagaatctagcatgacaagatagagaccatattttttctacctattaaaatcccctacaaggccacacagctctagagtgcaataaagattcattgttatggctgcctaaagaagctttcagtttttctgaagtccatatgctgtaggtgatgtgtccttccacatttatattgacatctagagataatcatcaaaatgaccttggaaatgtacagaggaaaataaatcattagtccagcccaaaggttttcctacagtctgttgctcatcactaaagaatcataacattttagagtgggaagtataccatgtttttaagcaatttaattggcattggatgcgtaggaccttgaatattctaagagctggctaaataacc

SEQ ID NO: 36260 - DNA, 1893 bp, Bovine  19866881259310
  misc_feature (1)..(1): n is a, c, g, or t
ntctctctccactagattgtgcattccatttggggtgatcatgtgtgtgtaatttttgtaaccatttaaaaggtatttatcatgttcattgctctaagtctattcagtctattgtagaaaagcaaatggcatttgtttttcattgatgaatctgtcaccagtttcccaaatggttaatataatttagttaaaatattcattttatttcacaaattttcaatttcaagatcctgatgactattcactcaactgtgatgccaaaacctttctttgacactaaacactatttagctacaaaaagaataataaatgtcagctactttggacccactaattaataattgccaaagtttttaacatctataagaggtagcattaagacaatgcttataatactcaaataactaatattcactttgttaccatctattggcacatatttctaatccacaggtgagaaaagaaagaatttcttatttattaacagatttctaagaaaaatactctctctaatccagcttctgaaagtcagtattttcaaacaaatatcctcagcacatggatatttacttatgccataaataaatttatttatatattccttaaattacaaaggatgcaatagaagtttttaaaaattgaactgagaaatccacaaatattttaataactacttttaatactaaagaataacaaaacgactttttctttgaagataaacaatatatagtatgactatggggacaaaaccaatatttcatatgcttttttatttataaaaaatatttcagcctaatgccttataatgtaggaatttgcagatatgagttttaagttcagtttgcttagatatttgggtttagtgacccatcttagctgaccaaaaaaaaaaaaaagatggagatacaaatggaaaaaatatcttttttttttttactttgcatatgaaatcatcctactcatttctctatattgtccattaaagatttttgttgaaattcaagcaagctttaatcttcccctaaagtctgtcagtttttcttataaactaatcaaatgttaattatatctttaaataatggttcaaaacccactgagtcacttttgaagattttcagggtagaaaattcattttccgtgtttttaagtatgcagatttttagcaacaaaattatgtaatgatagaaacatccattttcaaaatgctctttccacagcctgcatttatttcagaaaaagagttctttttattgatcaacttcttggatcttagtagattattcctcttaattaggttgggaaataaattgcattaagagtaggaaatgtgtcagcaatgtcattttcagatggcgtacttgtggttgcattactcacaatgtcttcaatcaatctcaattccttttaagccactagtccattttctgaagacctaggtcagtgaaaatcagggggaaaaaaatccatatgttcacctaaatgagtctcagtgaactgctttgtgttataataatgttaactgatgagaatattgctatcaacctctccatgctaaagatccacctttccttccacagtaggtgactcatgactggccaggctgatgggttcattttgagggccagagtatgagaaaaacctaatgcctttcttagttttcacattaaaataaaatatttttagtttcttctttccccatctcaaatagatgtcttgaacagctcactttgaagaatgatgttgttcatccccttcaccaagtcctggtgtttcttgataaaatttcaattcctgagtcccatccagacctactggggcaatgatgggagatttaaaaacaagctttacagctatacactacaaaatgacaacttgtcttgaatcagtgattcc

SEQ ID NO: 36261 - DNA, 1749 bp, Bovine  19866881365386
  misc_feature (1)..(1): n is a, c, g, or t
nctatgaaatgtcgaagagtgtggcacccctctgtatctaaatcattacctacatttaattttgatatgaatcgtgagagcttttattcttcttaccctcatgccttcaaaccgggataaagctctcagtggtcttaaagctcttaatgtccgtagggatttgatggcaccaagttctgagtagccaagagcattggctaccaagctaaccaaagaaacctgaagaagaaacaaaaatcagtcagttcaccaggaaataaactattgactaaaggcatgagacgtaatatctcttttttagtgccaatcaaacaaagctttagacagcccttggcagccttcattttctacatagtagtgtgctcattttaccttcccagcctcattaattaattgcttttcttaccaaacatccataaggctctccagttagatattttacccatggagcccttttcagcccagacatagaccactgatgattcgagatttaattcaaaagtcatatccttcatagatctgtgtttaacatcattgattaataatcatacttcatttccaagttttgcagtatcctggttatgtgtattgcaggcactgaccataatccaggccacattaactctttatggactgaaatgaaacattcttatttcaatgtctctaataatacctggttgaatatctttagtcagtatatgttggataaataaacaaagaagaaaatattacctgcaaaaacattttatcagaccacatagtttcataacaatgaagttttttttttacctaaactattggatttatgatttagaatacaatacctctcattcagagtgatgatatatctttctgatatttacataaatgttgttttacttaaatatatgaaaggttaaagaagacatgtctttttcaggaggaagaagcactatttgctttgattttctttaatagcctggcttagtcgcttagtcatgtctgactctttgtgaccccatggactatagcctgccagactcctctgtccacggggattctgcaggcaagaatactagagtgggttgccatgccctcctccggggaagccagcattttattaaatgttgaacatttactatatgctaggttctgttctgattgtcttacacctataaatctcaagaagtgtgtagtattacgtttgccttttcactgataaagaagttgagtttctcccacacctctgctttttttttttttttaaaagatgtacagatagaaagagatgaagttagaacccaagtgattggacttcaaaactgtatcttaaccttttccctccattaccagaaattcattcttaatctgaaccacaaaactcaagaaatgacttgaatgattatcttcacttcttgtaaggattatatatagcttgatggataggagagaggataatttatgcatccactggatggcctcagggccatggtgtaaaggtgacaccaaaaccagaactgagactttaaggcagacggagccactatccccttattgttagtgttgaacagaaaaataaatgacttgaatgttagacttgactagtggctgcataatttattgagctattaatttctctctagtgttcactgctacagaagactgggaagatgggggaaggttattattagagaacacacaggccttctacattctggactcatttgcctcggaagcattcacaacttctttaagtttctgcagctgctt

SEQ ID NO: 36262 - DNA, 1580 bp, Bovine  19866881414012
  misc_feature (1)..(1): n is a, c, g, or t
naatttgtgtttgcaaccactgattatcatcagagttactttatggctatgaggaaattattactctcagaggtctaatgactcatctaaattgatattaacaatttaaaaaaaatgtatcaggctacctcacactggctttcagtgaccatgttgatacaaagaatgaagaggctcaaattaatattttatccagcaaaagatttagggactgtgatttagcctgtataaaatttattcagccagcctccatggtacaggattccagaattccctgtagctctgctgaactgactggaaacacgataaggcatttaaattctgtaggtacagccgttcctagcaaccaatttgatttttgacggacaaagggccccaggaaagtagacacctttgtacctgagaaaaaaagaaatcccaagcaagatagacatgccctaatcagtatgctctgggtatgacagcatgcaagtgagtgatctatttcgttctgaaccttggctctgtcaatgacagaacacgatttactagaacaaatcaaataaatgtatttgactcctgttttgacgtttcaaaacgctgaaccatatttccttatgcagccctctgatttcacatttttaattttgactttttcttataaaatactcttgtcagaatgagaatgcaaatagcaatgaatcagggtagaaatactttcgaacattatggaaagaattatttctgcatggatatgatagtctggcagatgtggttcaaaaaattacagccctccccgccacctccaaagaacgacttggagacctagattgtgcaatcagtggtcagatgtttcagtactctgttgttcccatgctcgttacagttacatgcgacagtgctgcagcgatgagtggaattttcaaggggaagttggaggaaattgatggctccttcccctgctcctctgtgcaggaatccaacgatgaagtttttagctgtgccagtgctgccagtgttgatagcgtcaatccatccacttctaaccattttactggtgagtgtctgaggctgtatttcagattgtactctaaactgtgttgtatagtcgattcttggaatttttatctgtatccattggcttatatttgcccctcagctgtttatcaaaacagacttaatttgtaaaacatgataccatttgggttcattaactctcagtagtctactcctgtttatctctgcagagtgagtatgagaggcagaaatgagtccaaaccaaggtaagcaaatagcaagtgaaaataatttcctgtgtgtcttcagctttctgaagcagagccatccttttgaaatctaaatcacttgagctcttttgaacgtctaatactggttaatgagttgtggaatatttgcagtactgagtacaaaacattcacttccagggtgagaaaatgatgtttgtttttaaaagaatgctactccgaaatgaaagccttggaaaccctaagattctgtaattggttgaacactggttaacctcaaaccaaaggccagattcatgcactacagtaaatggtagctttctacacatatatggg

SEQ ID NO: 36263 - DNA, 1744 bp, Bovine  19866881495155
  misc_feature (1)..(1): n is a, c, g, or t
natcctgatgctgggaaagactgaaggcaggaggagaaggggatgacaaaggatgagatggttggatggcatcaccgactcaatggacatgagtttgagtaagctctgggagttgatgatggacagggaagcctggcgtgctgtagtccatggaggtgcaaacagttggacacgactgagccactgaagtgaactgactgggggactggaggttacttttaatatgaaagaaaatgaagtctataaattgcagactttaaaatattggttatgatagtccttgttctattccattgagttggggcctgatcaagcaacttagtataataaatttaacatgtgagagtctgatccctctcaaataaatctattgtcctttcttccccaaccactgggtccactatttcctggcttgggatggtctactttcttctcagatctcaattaaagatattttcaggtctgaactctttgacaaagccttctgtgatgatccttgccatcgcaaagcaacatttccatcttgtgaactttacatacaacactttgcttgcacatttttttcacttactctttttattcctgtttgagtaaatgtcctatcactatgccatatttatcatcctaccatcgttcccaggcctccaggactcagtagaggtgtgttgggcatagttcattttacacagaaatgataacaaatgattcttgagtcagtgttacttgttcatactgtcatttctatgcaacaaatactgatgtgcttttaatggactgagatgatcactatttttttttaactccaacttgcagagatcccaaatgtgaaacattttcaagtgacaatattgttagtatttataaataaaatgaatgactgtctaatagcactgccatgctttagcataagaacggaaagataaaagccaaaaatggccctctccatggaacagtaagaggtacagagatgaagaacaactttggttcaaaagatattttaagagcttgtgttacatgtcaattacagttcaatataaagggaaaaattttaaataatgtaagcagatattaaaaagagttcatgtagatttctatagtctgatctataactgactcctgccatcatgaagaattgacacttgatttaaaaaaatatacaaaacattcctgatggttacattatcttttactgaaaatgagaaaaatgttttaccacataccaccaggtttccaatgaccatgaccatcatgaagacagtaaggcacatggtttgaccggcgacctccatgcagtcccacatggtctctatccactctccacacagcacccggaacacaatcaggaaggagtggaagaagtcatgcatgtgccagcgagggagttcacaatcattggaaatcttgcagacacattctttgtagctcttaccaaagagctgcatgccgaccacggcaaaaatgaagacgatgatggccaacaccagggtgaggttacccagagcccctacagaattgccgatgattttaattagcatattcagggtgggccaggattttgccaacttgaaaactctaagctgaaaacagaaacaaggtcattactgctctgcatttggaagaatctgtatatttgtttatagggaaaatctacagtgtctcagttttaggtgatgggttatttgtgtgccaaactattggctatattcttcattttgaaatagtatatattggaaataaaataaga

SEQ ID NO: 36264 - DNA, 966 bp, Bovine  19866881759970
  misc_feature (1)..(1): n is a, c, g, or t
natatgaaatatgggttggccaaaatttggttaatccacataatattacctagatatgtagattttggtcccatgtcttcaagtacttactatacaatactgtgatcaaccaaatggtggacactgaaatatactaacagaaaatggatctagcttttaaggtattaaacctgaaattaaataaataaactgtaaacacagatccaagctgaactaaaatgttatgaaatttatcaaccttttacctggtatcttttatgtatttgcagtataaagtattttactttacttaatctttccaactaccctgccaggagattactgacctcattttaaggattaggaactgaaacactgagactttcaggaacttgttcaaggtcccctgtgtcttaagcagtggatctgaagtttggaatttatcttttcttcccctcaaagccatgcttgtacatagtacacactccaccacatgttgcttaattcattgaataaatgaacactttcctgattttacaatgttgctttgttttaccttttcgtttctagctttctcactggtgacttaggtaaataaatgataggtagaatcaagatcagattattgagagatgatccaataatgacaggtcagagtattaagagacaatattaagagtgaggggaattgaagggtgaaagaagagccaagagaaaaacttgggattatgaagggacaaaacaggaaaggggagagagaagggagtgaaccccaacttggcctttctctgggctgcagatcgatgaaacggcaggatcccactcgtggctgctttctctgatctctggccaagcgtgtggcttggcattgtacatctaacagttagcagggttctgggagaggcccgagtcagtgactgaattacactttccggagctattcttgtattctaagcctcccctgaaggtcttttatggttaatctca

SEQ ID NO: 36265 - DNA, 1395 bp, Bovine  19866882016488
  misc_feature (1)..(1): n is a, c, g, or t
nacatgcagagattcagaattcatattcacatgtaaaaacccttaatcaaaacaagaacatctactaacataagcagattgaacaggaaacagagcaagatgcaagaatttaatatttgtcctccctaaatgcaaagtaatcatttgtgtttgaaatgtacacttatcagtattctggttatccttttatatatttagtcactgattttaatatcagagttctaaggaaaggctttaatctaaaaaatatattatatactgttgagtaccttcgacttcaatttcagacttttctcacttcaaatgtgaacttgtcttaatccgttggaaagaatgtgaagatttatggagctaatttatgaaacagcacttctactgagaaaagagttctctcatatcaatactaaataaaaatatgacttagtttgatgtaaaaatttcagtcatttataggtgtttccacaatgattcttcccttaaacttgtttcaagtatattaaatatgtaacatctctatatcaacattcaaaatgcattaaagcatctaaaagtagtaaaatatcaccaaactttagctcccactcgatttccattcagtaatcaccgtcatagcatttcttttttccagacattctgtctgccaagagcaaaaccatggcaaaaatgggcataattcttaggaacagaaatcagaaataagataaagcctcataaaacaatcaaaattaaaaaaaaggtttagtaacatgagacagctatgccatcatagcaaggggctctggatagtctgtctcagggggtctgcaaaataagacaattgtgtgtgtagtggacccatctggactcaggccgaactgagtcactttgagttcagtcactttggaaagtcactttgacctttccaatagcatgagcttgtcattattcatggaggagaaagtcttttgtgtcatctacaaaatttgacctctacagctttagctttatgggaaaagtgacacgaacttactttccaggcaatgatttaagaaggaaaaatatttatgaggtacaagattgtgatgccttataattcaaggtgtaagaaaataagttttttcttcacctttagaggtttttcattggggcagataaaaatatataaatagttacatacatgtgtacattaatgaagtatttggagagttaacattttaagagctcatgtaattaatgatgtcatgcatgaactcaaagtaagaaaagtcagtgtgaatgacctttgaattgaaaaaaagcagtctcaactgtcctcagtaattattttggctgaataaagtctgaagcaatgaaagaggttttcaaagttctattacagaatccatgagactcaatatagttcgtaagcagtgaagc

SEQ ID NO: 36266 - DNA, 644 bp, Bovine  19866882084885
  misc_feature (1)..(1): n is a, c, g, or t
naaaaatagaaaactggatctgatgcctaaattaaatcttcatttttaaaaatcatctatgctttgatatagaaaaagcaacaaacaaacaagtaaatgtacagttgctggatacctatagagggttagaacgagccagggagggagggaagagacagctagatcagagaggtctaaggagcgtacgtgctctgttcctcaccttccgtaaaacaggcttcaggctccagagattcttcaggctcagcttcaggttgttccccctcagcgggagctcctatatcaactgtgctgccttcagatgaactagttgcatttagcttctgaaaatcaattccacaaaaaagcttttaaaatagtttctttaatctataatataaaaattccaaaggcgtgcccttaagtcttctgtattcatttccttgatctgtaatttaagaatctcttaaacataatgccagtctgctttggtagaggtggggggtcacaagattagattcagcaccacagtatttttttttctttaaaaatgtggtgctaaccacttaagtaatctttgattaagctcctttatagagagagattctgaaataaaatcatgcagagcttacataagctgccagagtcgtatggtagtctgcgat

SEQ ID NO: 36267 - DNA, 1630 bp, Bovine  19866880414844
  misc_feature (1)..(1): n is a, c, g, or t
nactatgggggcccactgtgtcagtcccaatgatccagacctagagagaacagtaggtctacccaggctgtggagtgggatgggggtgataaaaggacagagcagtaagatggccagtaaaaccaaagccaaccctgaaggtgatggcccagggccaccttctggccaaaggggtgactggtgttcactattagatccctgtgctgtgtgctaagtcatttcgggtgttgtccgactctttgcaactccatggactgtagcccgccaggctcctctgtccatgggattctccaggtaagaatactggagtagcccttctccagggtatcattctgacccagggatcgaacccacatctgttatgtctcctgcaatggcaggcgggtgctttaccacttctgccagctgtgaagccctgacatggatgtaaaacttggccaggtgactctgtgaaacccctgcattgccccaggatagctttccaagagcttcaactttaataccatgcatgatggcagctcaaaacagagacttacgtgatgaaaatgtgagagcctcagtagactcactatttcagggtttcaatggcatggtatttgtttatggccagataagcactggcaggacataccacgcagggggcctagatagaatccaggtgacaaggtcatccctagtacctctgagcacttcctctatttcttgcatccctactctcagcagtgcctggtccagtcctcccacctggagatatacctagaagagatttgagacctgctctccaaggagtccagcaggaacctagagctaatggagaatgctgaggcatctacatcaaggatctctcctcctttgtaactaagaatgtcaaggagattcatgatgaacctatgagagcagactcaggtcatgggcaacacacacatggatgaaatcagctcttgctcccactctacttcctcacaaccgtggggtacagtggctgtgatgtccaggaccacagctgtttggaaaaactcaaccttgttgaacctggccaggagcaagagatagaacaaagcacatctctacttaactgaagggacagccacacagtccatgggtagtgatgacactggagatggtggaagagaaaagcacaaggaagcttccaaaataaacctctctctgtcttccctgggcaatgtaatcactgtcctggtgggcaacaggagcacccacatcccctattaggacaccaagctgatttggctgctctagaactctcctgggggcaaagataagatcatcatagtggccacacaggtgccagtttcttactggctacaaaaagagcctctccaaccaccactttgccaacaaagacaaggaaatcaagaacaacccctgagtgcatgaggaccccaaggacacattgctgtatgaattccaggagatcacctacctgaagtctcatctggagaagaaggagatgctggaaaactggctatggaggaagagcagcagcataaagaacactaacataaaaagtagcagtatagaaagcactatgtcagccctcggagaaagcaatggcaccccactccagtactcttgcctggaaaatccatggacagaggagcctggtagg

SEQ ID NO: 36268 - DNA, 1564 bp, Bovine  19866880428503
  misc_feature (1)..(1): n is a, c, g, or t
ngcgcctccattcccacagggaccacaaagcccgacacaaaccgccgccctcgccgcgcggttttgtgccccccttagccgggtcgcagtgccactgacctcccttcccgtgcgaccgagggagggcggcgagggaacgaaatcctcccagccttcccgtccgctccctccgccttaccgtcttggcggcctccgcccaggtcctgcccttcttcctacggcccttttccctcatgtcgggtcttgaactgactgggaggctcccgtgtccgggctccggccgccctccctgcctgctctgctctgcgctgttcttcccgcggtgccgggaaaggtgggagaaaggggaagtcaggccggaggagcaccggagcagaggaagcgacgggggtggtgcgctgggggcggtctatggggcggccggtcctcctgctgccgttaccactgctaccgccgctgccatattgggtccttactgtacaggcagccgctacggtcatgtgaccgctcccgcgcggccgtcactactgtacgcagccggccgcgcgaacgagcgtgtgcgcgcccccgcctcccgcgcggggccacagggagagcgagccggccggccgcggcgtctggccactcccccgtccttccgttctcagcctctcctccagagcatgcgcaatggggaggtccgacgctacgttgcgtctggcgtccttcgctcacgcctatagcgaaaacctgcctgcggaagcggaacttgatccgtccgggaaggtttattgggtggtttgtgaccgcgtgcggggcgcggtggtgtccgtagagcctgggaagagttaggctcttccctttgggggtgactctctcagctgtcattttcaataagcctgtaacttgccttttctgtttgtccatgttaatttttttaaaggttatctttttgaaaatttgccacagttctcatctacttatttgccgcacttgatagatgaggcaatctgagattgagtgatgccacactagaatgaggtgaagccaaaaatcaaatcacaaactcagagtcctttccgtcacctcagaatgcctctcagtcttaggtaacctttattttcaggccaccaataactacattcatgctttttcatgtgaatgtctcatcaaggacacaaatggtgtcttttttatcttggtgagctcattgcctggctcagtgcctgtacatatcaggcgcccagtaaatatttgctgaatgattcagctgaatctgtggtcagaaaccattatttgtagtgaccataacgacctcctgaaagatccagaatgtggcatcttccgtcgcattgttcatgtctatatactttgcaaagtaaatagaatgtatagtaatgcctagtaatctcccaaacccacctgcttccagaacctgcttctgatctactaaattggaaaagactctgatgctgggagggattaggggtaggaggagaaggggacgacagaggatgagatggctggatggcatcactgactcgatggacgtgagtctgagtgaactccgggagtaggtgatgga

SEQ ID NO: 36269 - DNA, 847 bp, Bovine  19866880529802
  misc_feature (1)..(1): n is a, c, g, or t
nctgtttagagttgtttgtggtacttagcaaaataagctgtaagaattatatttcattttgggtaatttaactccactcagtctgtgactctcgcttctctccggggctcagtagaaatcaagtccctatttagaactgcaaattcacagcacggcgatggcagaagggatctagcagctgagaatgctgagcaagatttaatgaactgaaatggcacaccttcaacacgcactcaaaattttcataataaaatgtagttacggtttctaatcaaagttcagatttgccctggtttcccagaatgtcttctagagtggtgctctataagctttaggattggcttttgctcagttgcagctttgctccacaaagcctctcagcctgtgtgtttcgggcagctctggacgttaatgggaacaggagtttaagtgacggagctccccttttctcttccattccctgctcacctagcagggaagggccagggattcctgtctcatgtagacaagaaaggggagcagaatttggcactcagatctccagaatctggttcccaaatctcacagtgtgctctgggaagcagactagagctggatccaggggtgtgtgtgtttcccgagatgtgttatcctgtggctttcctatggcaaagggtttggggacaccaagtgccagagcccaaaggtggggagcatggctggtcaccttcctgtcatttctccctctcccctcccacacacagtttgtgaagttcgccaacatcgaggaggacaccccatcctaccatcggagctacgatttcttcgtgtctcgcttcagtgagatgtgccactccagccacgagga

SEQ ID NO: 36270 - DNA, 1237 bp, Bovine  19866880534572
  misc_feature (1)..(1): n is a, c, g, or t
ntttcaaagaccttctccataggggaagggaaaaggtatgggcctgccttactgagagcctcacagtccagagaaagtctccatttggggaaacctcattgctctgggaaaagtaccctgcaaaccacaaagatgattgcaggaggagttagcaaaaaaaaaaaaaaaaaagtgctgttccagttttcagctttacggtatcgttgaaactttcttttcctcttttttcatcagaagtgaccccacaaatttaagatggtgaaacctctgagaccaaatccttgtcccagctctaccctgttcccaacctgggctcacagaatggatcctgtggcccttatgttgaggcgaacacattttctctcctgcctccttgaaagaaaggaaagtatgttttgccactgatttagccataggaaactcttctcatcacccttttctgggtctgaagctgctgtctaaaagtgccatctcgttgtgctttgtactggttactgctggagaaagcgggaagagcttatgtacaaacctgtttttaaattttatattattgtggtacattgcttctttggggttggggcacatgggtgacccctctggctgtgagagtgctctacagtctgtgggctggcagtgtgctgatctttcaaagtttctttccctacccaatccccctttttggggtgaggttctagtgaggtctgctaggtgagtgtgctgcagcttaattggcttaaaacgttctctcctttggtgtggtctctgtagggatcaattgggagaaaaaaaacaaacaagagtgtagctgttctgatactgaaaattgataacattgttctgaaataaagaaggagctcctccctgatggctcagatggtaaagaacctgcctgcaatgcaggagacatgggtttgatcccttggttgggaagatctcctggagaagggaatggcaacccactccagtgttcttggctgagaaatcccatggacagaggaccgtggtgggctacagtttgtggggtcgcaaagagttggacacgactgagtgactctgcagacacatttcccctccaaaaaagaagatcctgacagtgcgtaggaggaagaagccctaaaccaagatcagtggatggaaactgtcctttggcagcagatggacctgggattttggtactttacgtgacttctctggggcctattttctagtgtgtaaaaagagactatcatgtatgtta

SEQ ID NO: 36271 - DNA, 1414 bp, Bovine  19866880649700
  misc_feature (1)..(1): n is a, c, g, or t
nggattcaacatcattcttctgggtgtggctatccaatatcccagcacccatttattgtattctttcccccccactaatacaacattgcttttgtaaacacgttttatttaggacaacattaatgtgaatttataatctctgagcacaccctacttgcttctggcagcaatgtggcctctggagattgggaaggagagtgatttttctgtgggcgataaaacactggactagaatatgctgagtatgtgtacgatgttacatgcgatgcccgatgttagggtgcatcataatcacctaggtaaattttttaataggaattcccaagccccaccccaaactactgtatcagaatttcctggtaacattctgtctcttacatatatagaatcacagaacgttaaaactgaaagggcccttagggtcataaatatacctcctcatttttaagctgatggtcagcttttgcttctcactctctctaaacatcaaggccagactgagcaattggtttgtatcccccccaatacattcaaattcaagaatatttatgactcatgaagttttactgaaggcttcatgggagcatggagaagaggattacatcacaccccacaatgcaaaacaattagatcctccatgtgactagctagacctgttcttcctcccaaagttttctcccttgctaccctactgtcaagtctcttctcttcatttctctcaccatacatcttctgaaattcctccttttttcccaaactagtcgacgatgatctcaagtttatacccactcaacaaaagtatgctagctatctgaaaaacaatcaactacttttccccaagcatgctccttgggaaattgggaagtttcccaattcattccacagtcatagagccatatcatatgatttctcatatcctaacatttcctgaaggggcttctctggtggttcagtggtaaagaatcctcccaccaaagtaggagacttgggttcgatccctggatctggaagataccctagaaaaggaattgacaacccactccagtattcttgcctgggaagtcccatggacagaggagtctggtgggctacagtccatggggtcgcaaaagaatcggacacaacttagtgactaaacaacagtgtttcctgaaggcttactgagaacaagatactgggctaagcatctcacaaaatgacttaacgtcacatagctccttaatggcaaatctggtatagaactttaattgtaagggtcaaagcgcaacttccaaggcactcatattcatagccttcaattttttttgcttcacagttctgtaggatacatgaaaaagggtctattatttcatctttcaaaggtagggcaactgaggtccagtgacaatgagtaactttgcaactcatttagtgg

SEQ ID NO: 36272 - DNA, 1954 bp, Bovine  19866880708703
  misc_feature (1)..(1): n is a, c, g, or t
nctctgtgaccccgtggaatgtagcctgccaggctcctctctgtccatggaattctccaggcaagaatactggagtgagtagccattcccttctccaggggatcttcccaacacagggatccaacctgtgtctcctgcattgcaggcagattctttaccatctgagccaccagggaagcccaaaatgggaggggagaaaattcaagaaaaaaaaaagtcctaaaacaggtaaaatgcagaaagatcaaaataaaagtagaaatgctaaggcatattccataaattagaaaaatctaacttaatgggaacattaacagaggtaacagcaaaagtacagtcagtgggaggaggctgcaggaactaagaacaaagacagggaataaggaggcagaaaaagtgaataaatggtcaaatatcaattgatgttacaatacagtcttacagctaatttctgctacactattattcagccacctcaactaagtaggacatagctgtgactagaaagcaaaagaaaaatggattctcacaacagtcaaaactgacaatcatactacgaaagtgagtgcttctctcaatatgagcaatcacttcttttgcacttcaaaagaatacaaagaaggctggttatgtttcctccatcggtagcatatgaaaagtggaccagaagcaaagagagacttgtagagactggagcactgataataccatcatgtttaccagcgataaaggacacaaacagacaccgccaccaccgatagccagaaattcaagagctgaaaaagcacagcagtctgaaaacacgagaaggaacaaaccacccaagatttcaccatcagccctacatgtatcacagaatgacaaccctaagagatgagaagtgtttaaattatgatcagtaagctctgtttaaaacaggaggcacagactatacaaagcagtttccaccctgggtgattaaaacaaaaaagtggagataggctaaaattttaccaaatgtaaattactgattgagaactaaaattattgcagtcctctgttgtaactactagtgaaaaagtgcaaattctatttctctgtgaagtatggaagggatccaggtgacagcgggtttttgtttttgtttcgttttaatgtggcttttgaacttcttgtgccgctgtgctatgctgctcagctgtgttgaactctgcgaccttttggactgtagcctgccaggctctctgtccatgggattttttaaggcaagtacctagctgctggtacctagcataaaatctgcatataaatatagcaaatttaatcacagatactaagaatccagaatcacctagaatgtgcatttaatcaatttcatattttcaaccagcttctccagtacttatttatctggtatcatcgtcgttaaaaggcagaaaaaagcccaactttctttctgtctgtgtttcaatgaaacataatttcatccatattgtattatcttcctaagaaaaaccacactagaatttagaaaatactaagaaatttcagctccaaagggtaataccttgagataccatgtgaaaaaaactcaagagtatttaaataaaactataattttttccaccaaaactttgttttattgcagctgattttgaaaagagataaccagataacactgaccaaatatattatctaagatctttctttaggcgtctaaatctagatctaatgagccacctaactttccaacttttaatgtcatggtaacatgtaagaaaaagcacagaaaacaaatgtacctatgaagagatcttgccaaaaagcttgtacttgaatcagatgaagcctccgtatctttcaattaaagcaaaaaaacactggccatagaggaacatcacacgaaatctagtccatgagaaatgctacaggacagatgacccagttgcaacaaaccaattcacaaggtatctca

SEQ ID NO: 36273 - DNA, 1422 bp, Bovine  19866880728799
  misc_feature (1)..(1): n is a, c, g, or t
nggagttttctgaagtaacaaatgttactgtgggaaagttagggaaattatagtattttagtataaagaaggaaataagtcatgcatttaaccaagctctgttaacatttgatatattaccgccccgtcttttttatttccccaaatctgggtatttttgtttattcattcttgcacatttgctttgtaaatcttgtgcatttgttttgtaaatggtatgttttagaggattcatgaatcttaaacttgtttgtctgggttagtaggaaatgtgtaaaagttagtgaataaataaaagcacattttatttgttgagtgctttcatttacagtgtaccttcataactgtaattgctggtcgtttccctccaaagaaaaaactctagaaataattttgttgggtggtggggaaattcctccttcacaaaaggagtgaaggaggaattgttctacttgatcaacactacctcaagacctcttttaaaggatagtaaattttattcataagtaaccagatcccagtcttcattgtgttaattaattttaagtctctagaatttcatgagtactttatgaattatctctttggataaaacagtctaatctttgggagactgtgacaggaaaaatttgcatctacagtctattttcctatagtaaataattatgtttgctcatttataacaaacatttcaagccttagctagttatgtgcaagtaatatttagaagatgtaaagactggagctaatcagtagatctttgagtgagttcctgaagcgattggtgtattagtggtttggtatttttatttgattctggcaaatatataagagctcagactaaataaaaatgaattttagaaagagaatggtaacactaaaacttcttttttctagtatccaaaatctagaaaacactctactcttttttatcatctataaagtatttaaacctcagtggtcaaaggtttctgtttacaggagaaataggtagaagtaaatgtgagaagaataaacaaaagtaaatctttaatattttcagatgcagagtaatgagatcagaaagttagtggtttgacagagataactttgacctaaattaggaaactgtatattttataagattaagagaaccaggagaagcaagtcttaaacttacctcataggcattaaggccaaatgttctatgaacagagtttcagaaaggatatattaaaattattcattgagtataggcaatgtctaattcatattttattatgttcttggtacctacattgtagagctatcctgttttagagaacgttattaaaatggggttgtgttcctgaccaataatagagcaatagataaaattactcacgtatatatgtatttatatcacatatgtttgtgatttggggttttgtgtgtatgtgagag

SEQ ID NO: 36274 - DNA, 834 bp, Bovine  19866880737767
  misc_feature (1)..(1): n is a, c, g, or t
ncagcccaccaggcttccccatccctgagattctccaggcaagaacactggagtgggttgccatttccttctccaaagcatgaaagtgaaaaatgaaagtgaagtcactcagtcgtgtccgactcctagtgaccccatggactgcagcctaccaggctcctccatccatggcatttgccaggcaagagtactggagcgggttgccattgccttctccccctccctccttacctatcttaaactcaaccaagaagaattttctagaaatgttgttcctcatggattgctccttgttaaagagtcgatctcagtttccaactgatgtacatccagatgtcaaacttctcagattgaaattggaaggccctccgtacctattccctccctagaacctccatgtcacccctcaacctgtctctgtgctaaccatgctagccggcacagcccccttgctcctgatcccctcgcttccatgcccccttcccagcccacacctttcatgtcaccccttattataaaggcttttcctactgacacccacatctggctacctccttggtctatgtattcctgccatttctttgctgagtttaccctcgttaatttgtacccagcatcttaccaaggtgatggttggggacacaccttaaatacatcccccttcagtgaacactgatgccaccaggctttaccagagcctcaagggcctgctgaatcatcaaaggcattgttttgcaatatggacttaacaataaatctgtttggctgctttttgacaacatcagggatgagatatctcagtgtgcccacaggctttaatccaaagaccaccat

SEQ ID NO: 36275 - DNA, 2501 bp, Bovine  19866880753661
  misc_feature (1)..(1): n is a, c, g, or t
ntgagtttattgtagatagtccaagtttcataattggacattttgtagtcattaagcagagataaaaggtgataaatatacaatacacatgtattaagtgtatttagagaaacagttctaccataaatctgtatctacagatctcagaatgtattagacacactggcaatcatcactgatgctgctgctgctgctaagttgatctgagttaatgcagaaacagagcaacaattcacactgttgtgtcctacagattcctctaattctctctacacatggaagcaggatacacattcttcagttcggctctggtagccacttgtaagaatcaagagagatctaacgctggagaaagggcggcgggtgagatgactgccagaggaaactgctcacttgaagaactgcttggtttcggttaagtcatacatttctttgcaatggaaaacctccctgtcatttctgttctaaaaataatcaggctagttgaaaaaaacccttattatttcataaactacacaccaatactttcttgaataagtatccatctttctaaacacgtgggtccatttcgtgttctgcgttcaaactcagcacttctgcagctgtaagtgggtttaaggatacacagtgcatccaaatatcagagtagattggggcaacgttcagatgctacgaagagcaatatgtaaaacatcccactcaacccactgaaattgctgatacatgctgtcaggatacctctaccctattccttttacctcttggagggcccaagaaattcataatttcagaaggaagcccatggtcaatgaagcagccagtgtagctgccatcaggagaacttcaggtcacatttccccaggtcttcacaccaccatgaaagggaataaagccagaaacccataacagtctcttctgatcctttgtatttctgcatcgtctgttgtaaccgctccttcttcagttctaattttgttgctttgattcttctcttttttacttgacaagtctggctaaaggtctgtcacttttgtttaccttctcaaagaaccagctttcagttttattcatttttactattgtttctttcatttctttttcatttatttccactctgatctttttaatttccttctttctgcgaactctggggtttttttgttcttcttttcccagttgtctgagatgtaaagttaggttgtctattcagtgtttttcctgtttcttgatgtaggattgaattgctataaacctgcctctcggaactgcttttgctgggccatgtgacccagcaattccactactaggcatataccctgaggaaaccaaaattgaaaaagacacatgcaccccagtgttcactgcagcactatctgcaatagctagaacatggaagcaatctaaatgtacatcaacagatgaatggataaagaagctgtggtacatatacacagtggaatattactcagccataaaaggaatgcatttgaatcagttctaatgaggtggatgaatcgagcctattatacagagtgaagtaagtcagaaagagaaaaccaaacatcgttattaacacatctatgtgttaatctatgtgtggaatctagaaggatggtactgattaacctattttcaggctaggaatagagacacagacatagagaattgacttgtggactcagaggagatggagagggttggatgaactgagagagtacaattgacatatatgcattaccatgtgtaaaatagtatgtggagaaatgtctgtttagttctttggcccattttttgattgagtcatttatttttctggtattgagctgcatgagctgtgtgtatatttttgagcttaattctttgtcagttccttcatttgctattattcatttgctcctactctgaaggctgtcttttcacattgcttatagtttcctccattgtgcaagccttttaagtttaattaggtcccatttgtttatttttgcttttatttctattactctgaaggtgggtcacagaggatcttgctgtgatctatgtcagaaagtgttctgcctatgttttcctcttggagttttatagtttctggtcttacatttagatctttaatccattttcagtttctttttgtgtatgatgttagaaagtattctagtttcattcttttacatgtggttgaccagttttcccagcaccacttgttaaagaggttgtcttttctccattgtatatttttgcctcctttgtcaaagataaggtgtgcctaggtgtgtggatttatctctgggctttctatttttttccattgatctatatttctgtctttgtgccaataccatactctcttgataactgtagctttgtattacagtctgaagtcaggcaggttgattcctccagttccattcttctttctcaagattgctttgccaatttgaggttttttgtatttctgtacaaattgtgaaattatttgttctgtttctggaaaaatactg

SEQ ID NO: 36276 - DNA, 1453 bp, Bovine  19866880772822
  misc_feature (1)..(1): n is a, c, g, or t
nttttttaaagcagtgttgttttttttttttttcattcataccttctaggaatgaatgtactttctaggtaatgtactttctaggttataagttgagttccatgtaactcaaggcggtgttttttcttaattaaactttttcttttgatgccaatttggattcacatgcaattacaagaactactacagagaaatcccctaaccctctatcagtttttcccaatgataacatctctcaaaacttaagtgtaatatcacaagcaggttattgacactgacgtggtcaaggtacagaacatttccatcagcccatgattccccacgttgcttctcccccccgcccccgcacgttgctctcttacaatcatgctcacttctttccctgcctccccctctgccccaattactcacctgggcagctactcatctgttctccatttccatagttttcacctgtaaatagtgttaaataaattggagttgtacagtatataacctttgggggttggctttttttcattcaacataattctgtggagatccatcccagttgttaaatgtatcaataatgctttcatttttattgctgagtagtagtccatggcatggagatgtatcacctgttgaaaaacatctgggggtatttctagtttttagctacaggttaaaaaactggggccaggggagtaaccgagtcgcaccagggaatacaggcagtcacatgtaaagaaagtgagtctcaactgaagagagacagacggaaagagaggagattcgtgctcagctgtggcgggggatccagggaagagcgctgagccaccttctgaagggaacatgtattgctgactgaaaacagacatgacgaggagggacatattaactgatttgagttgttatagtaacatctagataaaacatatattcaggggccagaagagaaatggaactgaacgcagatgagcgggaggaatgggggaaatgactggaagaatatctccatagacacagagcttactcattactgaagccatgagcaaggggctctccgggagtacacagacagagatgctgggggagaccacaattagggggtaagagaagtgacgacaaaagggaggagcctcggagaggcaggggcagcggggtgagggtggagtaaatggggtagggtggagtgaaccagaggagtgaatgaaggccaaggacaaagagacttagcactgacgaagcaacagggttgaagggaaaggagtgtatttgttatctatgctgcataacaaattaacccaaatcttagtggcttaaacaacattatattatttcacagttctgtgtgtcaggaatctgtaggtagcttggtggggtccttgggctcagggtcactcacaggctgcagtcacggtgtctgactgcaatcattccaagttttaatagggaagagtccatttccaag

SEQ ID NO: 36277 - DNA, 1538 bp, Bovine  19866880871157
  misc_feature (1)..(1): n is a, c, g, or t
nccccaggtaggagttattgtccctagtttacagggtgagatatatggaaattaactaacttggctaaagatgtgggcttagtgatgaggctgtgaagcctgtaatttttgattctgtgcctcatctcattagcccatctgcacctcggaactgataggcaccctacatgttctacaagtagtgcaagcctgggacaaaagggaagagtggtgggaataaaccaaatctccagacccttatccttgagatcctgttttaaagccactcattcctcctattagctgtgggctcacttgagtggctgagctaggtggttccagaattccagtgaaacagccagagggcagaagcttacccttggctggagtctcttggagacagctttgttgttgataaggcaactgccaggtttctcttcttccttctggctgggcacctgatctccacagagtcacttctttgtgttttcagttgcctaaggctgagtgtgtgttaattagaactcttccccacaactaaagattcacttaagctggcctgagcaaaataaggacactcagaagcatgctgtggacccccaagggtaaggacagactgcgttctcaggaataacctagtaccaggggctcagaccccacaaggaccctctctatctcactgcacttctgtctgtgtgaggtgcatgatctcctcagctgctccaggccgggacttaggaaatacatctgccaacagctgtgtttacatgacttaatcattcagagagacttaaagtcccagtgccaacttcctgggaatgtgattccaattcagtggtttaggtccgatagatgggaacatgatatatgaatgtgacctccaagagtcctagttctgtaaccacacgtacatggggtgatgatggtagaaacatattcctcacaaatgttggcgggggtagcagtcagggtggagtatgctccgggcagtcaacaaaacagatgttcacaaccagtgtatccatcacacagaatggcttaagaaaaatttgctctgggatcatctttttcttttttttcctgtctatttttcttataacctgcactaaaattaccaccctcagagattctgccttattacctctaggatagatctatatggtggacactgcagtttgcctttccaatatccattcttcccttcttctttacttacacaataattttgttcaaggagggcagtgcatctaactgaaaatactcatattctcagactctgtgcagcgatgacacccctagggcatggttttggccaaggagatgtaagtggaagtcagctagagatttctggaaatgtttttgtttttcctgaacacccagttttcctcttcctgcctagaattcaaacacacctcctgaagtacattcttcactgaaaaaaaaaaaaacatttattgagcacctgtgacccttgtattctaagttctgttccaagtgcttggtgtacatcagtgaacagggcagacagaagcccctgtcttcatggggcttaactctag

SEQ ID NO: 36278 - DNA, 4656 bp, Bovine  19866880933578
  misc_feature (1)..(1): n is a, c, g, or t
nctatacataaaataaataagcaacaaagatttaccatataacacaaagaattatacctattatcttgtaataaccttaatggaatataacctgcaaaaccctgaatcattatactatatacttgagactaacacaatattataaatcaacaatacttcagtttaaaaaatatataaaaagggaagaaagaaaatgcaaattaccaatattaggagtgaaagaaaggacatcactacagagcctataaacattataaggatggcaagaatattatgaatatctttgatattatgaataaacttgatgactaggtgacaaatttcttgaaagatacaaatttacataattgacataataaatagaaaatctaaatagtcatgcatctgttaaattgaattcatagttgacttcaaaaactccaagcccaaatgtctttaactgttgaatactatcatatgtttaaggaagaaataataacaatctggcacaaactttcagaaaatagaaaaagaaggaacactttccaagtcattttatcaggtcaccataacttgaatctaaaacaatacaaggccattacaagccaagttctgtcatatgcatagatgcaaaaatccttaagaaaatattagcaaattgaatccagcaataaatagaaaggataatattccatgatcaagtgagatttatcctaggaatgcaaatttatttaacacatgaaaatcagccagtgtcattcaccatattagtgatttaaagaagaaaattataatacttcaatagatgcagaaaaggcattttaacagtcagcaagactatctaaaattcttagaggggttacaggaatcacaaaccattgggtccaatattgtcctggagttctggagtgagattagactggacaggcaggccaagatcttacaggacagtactccacagtgtattgtatactaatttatgtttactgcttcctagggaaatagttatgaaagctgccaatagagagttttgcttcatttctctctcaaaatgtaatttattcctttgggtttgtttagacttcagaatcttttccttgagaatctaataagtcatacatctgactctaacattccaactctaaaggttagggaaatggaacagaatggggggtaaaagtcttggaaaaagactagttttatttgattagtcaaaccagtcagtcacaaatatttattattttagaaattaaaatttacaaataatttttttgagatggagtagtgttgtggttggagttttaaaattaaatatacttaataccattatacagtcttactgactttagtactttttaaattttgtaaataaaagctccaaagccatttgaccctgaaaaggagatcctagtactcctttactgcaaacaagataaatctgtttacacctgatagtttctgatgccaattctctaattcatgtgaaaatgatccttgttagaatggtcttgagactaaattctgatatggcccctttcatcttcagtttattttcctaagtgtagttatcttataaatattgggtctctcagggtggagtcttcttaactagatttctattaaacagacgacttctaatctgctaatctctcactgatacaagtgctttgcataaagtgggtgtagtgctcaaaagaatttatttatagcctgccagataggctttgtattgattttttttttttcaaaacacttcacaaagaaagaccattaaatcactttagcagccggcattacaccctatgaagtgctccaacatcagaccctcacatctccccaggtggcagacatggccaccgaaacctcttccaaacagagactgatcccaaaccgagaatttgtagattgcttagatgaacccagagagcaaatttgttttcctgaagcgcctaaactcctttttaaagcagaaatacaatgtctggaaaatcttaaaatttcatcacaaacatcactagcatttgatgtagtcagatggttttttgtttatttgtaaagtttctttatgagaaaattaaaaactcactatggacaacttggaagaaaagtgaaaggaaaaggaaaccattatccattgtcatgctatctaacatttacacatttttgagactttttttccacagagccaagtcccagacttcacagcctcatcatcatgtcagctgctccacccatacactattccagatatatcctatggcttcttagaattaaagataatggtattttcatgtgtgtttggcacacatgtgatggctttaaacccctacaaaatcatcattgtcaaacctagctacatattataatcttgtgtgcagcacttaaaaaatacagagattcttggcctggcctcagatcactgaatgcagaatcaatgggtttagcagggtctattgattttcatttaaaaagcaaaaagaaaactttcagtcttttgatttacagttaccttaggaaccactgccctaaaaaacattactggatttttgagagagggaaatactaataatccatagccctccatagtctaggcaaggctgaggtgatgggagggctgccctgggatgcagtgaagtctaactgatatcaggcatatctctgtaaaactcattctgccaagttcatccagacaggaaacttccagtctctttttaggaggctccagaagtgcatcccagcagatgacagtttgctgactatgttggctttccttggtttaatggtttttgttgttcagttgctcagtcgtgtttgactctttgcaaccccatgggctgcagcatgccatccttccctatccttctctatctccaggagttcgctcaaactctttgagttggtgatgccatccaaaccatctcatcctctcccaccctcttctccttttgcctccagtctttcccagcatcagggtcttttccagtttgcccagttttgctcagtgaggttttgttccttatcctgtatttttcaactgtgtctccatctcattaaagatgatggagctctgtaagattacctaaacctgagagaatactggagtgagtagccattcccttctccagaggatcttcccgacccagggatcaaacccaggtctcccgcattgcaggctgattctttatggtctgagccaccagggaagtctaagagaatactagggtaacaggaagggatcttttcccataaatattctaattttacagacaagagaataaaggtatataggaaaataaagtagctcaaagtttacatggcgagtaagtaactgaccctaggattcctaacattgcacaaagtaaatcttccaggttggtagccaaagtacggtttgtttgtttgtaataaacttcattacagaacagtttcagatttatagaaaatttctgaagctagttcaaagagtttccatataacccatgtttcttttcccatattagtaacatcttactttagtacagcacgtttgctgcaacatgttagtatatgattattaactaaagtccatgccgcctgcagtgcaggagaccctgggttctctccctgggccgggaagatttcctggagaaggaaatggcaacccacttagtattcttacctgggaaatcccatggacagaggagcttggcaggctccagacactgaggtcgcaaaagaatcaaacttgagttagcaaccaaacaacaacaatgtgctttattcagattttgttagtttttgcctaatgtcttttttcttttctggggctccatccaaggtaccacatttcatttagctgtcatctctccttaggctcctctgatctgacgctttctctgacttttcttattgttttttgtttgttttattggaacatagttgatttgccatattgtattagtttcaggtatagagcaaagtgattcaactatacttatatgtgatatataggattattttccattatagcttattactgactttccttgtttttgatgacctggacaattttggggaaatgccctttaactgcgacttgtctatttttctcatgattagactgggattgtgggttttggggacgaagacgtaagtgccagtttcctcacttcacatcttacttgtatagtatccgcgtcacttatctctgttgatgttaaccttgatcacttggctgaggaagcgtttgtcaggtttctctgacataaagttcctcttttttcccctttccacactgtcctctttggaaggaagtcactgtggacaggccacacttaaggaacagggagttagattccacctccttaagagcagagtatgtacctatgttatttggaattaattcagtgtttccctgttcaaaatcctgcagtggcttcatgccacatgtggaatgggatggaaactccaccccctgatgaaaaggccctttgtgatctggctctcccagtttatctcccacccttgcttcacggctaactcccctccatcggtactgactgaacacacccatctggagcactgtgggccttcacccttctctctgcccagcaagcccgagccaccaacccccacaccttcagctggcggcttcctcggttcactgagtcttttaaaactacctaatttaaaaagtct

SEQ ID NO: 36279 - DNA, 897 bp, Bovine  19866881133017
  misc_feature (1)..(1): n is a, c, g, or t
natcttgccttgcctttattcctttgttcataacacttagggtctgggctgttctctaagtggttgtgatcttaaagctaagaccccctggtttcaaaatttgtccaaataacatgtgtagcagctgctatgagagaactcagataacacaaccagttatctaaattttctccaagagtaatccacacattaacacagaaatggtaataaacctgatgacttttctgatacagttcaaaaatcaatagctctactagcactcaacattgagtcaattattctaataagtgtaactctaaattctagattcaaagacaactcacctacaactgaaacctaagaggatatccaagctagggaaattcttggatgtctacttttgctctggcatatcactacatcagtccttataaagtaaccagcatgagctggcttaaaatctgtcctgccatatatggctcaatttaccaatactggggtaaaaatgattttgcctcttcaaaaagactgttgaaaaagaagctacagataattagcaagactaggtaataaaatgtatctctaagtggaaaattcatcccagggaagctgcagcaacaaagatgttattctctaaaaaaacagtttggggtaaactataaagcagaaaccaagcaggagatgagggcaaagactagcagactaaatttagtctttgctagtagaaatgaaaagcattcttttcctagtaaggagtgagctgttaaagccaatttaagtcctcaaattttagaagagagtattaaagaggtaaataacataatagcatcctaagaagggttacaggtagccaagagctgaaaataaacccaggtaaaaacctaaaagttgtccaatgtgatggcgactagccacatg

SEQ ID NO: 36280 - DNA, 694 bp, Bovine  19866881231099
  misc_feature (1)..(1): n is a, c, g, or t
ncccgcatcccccggctcctcaccccagtcacccaggcaacgtaactcaaggggtcagcagttcaagcaaagtggggaggggtcgctaaagcacaaccctccttgggcaggtgactgccaggccctcacacacctggacccggggtcctgctgtggcaacttaccttcttgagtttcttggttttgacctccacctcttgctgcagggatgtgtaggtgccccggagctccatggtctcctcatcccggagcatcatctcttgctgcatttcccgctcacggcgtttctaggccagggcaggggacagggctcagaggagcagcacatactggcaagacccaagggagctctgcctgtcatggaacctggctccgtcgtggccacaggagccaggaggacacagagagtttctcacagcccaggtccatcactcccaccccatcctcagtggaggcctctctgaaccttcttctcagctcacagggccgtgcttttgcaggcactgccccatgtggaaggagaccccgcccctaaccactggggcttccaggggtgtcgaccacatccactgatgcccaggtactggcttttcagctgtctcagcctctcctgtgtagtatcacagctgatgggcaagaccaacaaactgtggttcttgatgctttcggaaacagccctacagttgttgaagaa

SEQ ID NO: 36281 - DNA, 2404 bp, Bovine  19866881234519
  misc_feature (1)..(1): n is a, c, g, or t
natcaggagggaggaagccaggccagggcttcagcagtgagaggcgatgaggcggtggagaccaaggggcgaaagcagtccccctgagcaaccactgggggactgccctcctgtgtgtctgatgagcagagagaaagcgtgttgaccaggaagggaagggacgcgccatgaattgccaccacctggggcctttcaccttcactctcactggtctttaccccaggcctacaaaggagggtgttatcccttgtacattgtgtgagagcttgctctagagaaagttccaagccaggtgggaaagagagaggctggtggctacttgattgtttccatttcctctgggatccaggaaggcagaaatttctctcctggaagagcttggaaaagggacaggacagcctctgcaaggtctctgagctttaagtgtggtctttgggatggaaatttcgttcaggacttggggctattcctctgtggtcggtgggaggggctttgctttttaactacttgttatgtgggagtctgtgcttttgctctcctttagccctggggccagaagctagatataatgccttttacacttgaagggcttccagaaatttggtgatccttaaactgtacttaaagaacatttatggaggcctgccctcagttgcaattaaaaaaaaaaaggcagtcttttcttaactcacagggaaaagtaagataatagatacattttctcaatcttaaaattgccactaaaatttatttaaaaaaattttttttggctgcaccacgtggcatgtgtgatcttagttcccgaccagggattgaaaccgtgtcccctgtggtggaagcacagagtcgtaacccctggaccaccagggaagtccccccaactaaaactcagggtgagggatccggcacctcaggcagagcatcgccaagaaacatagactaattctgcctggggtcacctttgcatcagcaagaggtggcttttggcttttaaaggatgaacttgaatttagggaaaggggaggaaaggcgaggtagaaagagacttacagtatgtgcagaagttcagaggaacaagactgtgtggtcttttcgggaatggaggtccatggtggtggatgaagaagcacaggatgcaggctcagagcagcaggagggtggctggggagctgggcttgtgtgaaggctgtggggcttcacctgaccccactctgcccctggtccacatgcctcacctgtagagccttctaccctcaaaatatccccctcggcttaatttccttttcccatgacctccctgatcactccacactgtgaggtctgctctttaccatctgagtttacctgccaccttaagctttaaaaaaaaaaacaactaagaagacttagaatatctcaaaataaatgaaatttaaaataattggatgagaaaaatggggcatttccaacccctctgccgaggcagaagtgggggttcctgcctgagctgggatgctcgtgtctgtctgtcccatctcctattctctgcacctctgtactcatccttgtaaggattaaattctgccttaatcgtgaccaggccctgcaacagagccagcaacaactctccgttgtctccctatcatgtcagaaatcctctggctgtttctcaagactttgaccctcactgtgacctccacaatggctccaccccccgaaccctgccactaccattctctaatagaacagtccctgtgagagaccgggtctcccctttctacttccttcctgcttttgtttctgctatactttcccctcttcattcttcagggttgagtccgagagctgttgcctcctccaagaagatctctggattctctctagtccacactgccctcttcccttctctgcactcctgtagtccttaccgttaatattgtggggtttagcagtcagttatatttcatagagtatttttcactaactcttacatgtcttcaccagttatgccaaacctgataattgggcagggagaacaggctctgtgaatagctgttggttggctaagcagttgggaggtgggtaaatatgagacaacttcttggggagctcgggcccaggccattggtttctgggggtgctgacaagtgtacctggagaatagtgtggggctgggggactgagggcaggctcccatgggtaaggcggtgcctgagtcttctccatcccacattcctgctgtccccactgggtcgccactgttcttgagccaaggagaacttaccttggcctggcagaactagcccagggcggggtgtggggaggagagacgagaggcaccttcccccagaggagggcagttccagactcttctttctgttttcagaacagcgtggccctgaaggagcactttaggcttaggaag

SEQ ID NO: 36282 - DNA, 692 bp, Bovine  19866881272765
  misc_feature (1)..(1): n is a, c, g, or t
ncactttacatgtgaagaatcttagcccagagaggttaaggaagttgcccaagttacacagctagtcagtggcagagctggaatccaaactaggtccacctgactgctaagcctggattttaaccaccttctcatatagaacagggactcaacaaagagtggaagtgctggatcagggtaccccccacctcatcatacaagttttacttacttacccagaagcagcatttgaatttgactcactgaactttaaaatatctttgataggttctgcctgacccatcattgaattcatgtctgcattaaggactctgctctcttggaatcctgtcgtcttttggtttctaatacacaatctcagtgtttggtattcatttataaggatttttccctccgtgaggtcccggatcgttttgctgagaactagctttgaaatcctatgatgagaactaatgggacaccattttcaaatagacctgggcaaactaggagaaacaaacagaaagagggtaattctagtcttggaatttatgagcttccctatctaaaagtttaaatttcaactcgcttttgatctttgggtttatggtgagttttaagaggttgttcgtcttagacagtctcaggaacttaatatgctttcttccttccacccagaaagatacctagacacctgcctccacccttttcag

SEQ ID NO: 36283 - DNA, 710 bp, Bovine  19866881281147
  misc_feature (1)..(1): n is a, c, g, or t
ntacctatcctcaacgaggaaaaagctgggagagattacagaacgactgtggagagtgggaatccaaggcttctagaataaagacagaactcagggacctgagaatggggtacagaggcagatattcatggtagaagcatggtgttgagagctgcaggagcaccttagaaaccatttccagcatctttattttccacatgaggaaactgagtctcaaagagacaaagttgcttcagtagtcttgctccagtccccatgcgcccccatcctcccacccccagagcatctttgccacaccccacaccacgcagtctggcctcccctccagtaattgagctctcttgactgggagtagccaaaggggctctttccagaccctcctgtgtgcctgactcactccatgggccagaaaccacagccctggcttttctgttgttcctttgggtttgggcctccaaccctgcccaggtcctttttctgccctggctgtgctctgagtcctggggccagcatgatataatgcctggcacacagtaggccatcaggtttgacataggcgcgaccaaatggttggagaagccctatccccgaggcagggaccccaggcacaaggtgaggcctctgagccactcctgtaactctgccgacagtccctttgttcttccctctccacaggcaaagaacagaaggagaccaacatcgaatccatg

SEQ ID NO: 36284 - DNA, 1274 bp, Bovine  19866881385413
  misc_feature (1)..(1): n is a, c, g, or t
nacacatatatgttcaaagtaatataattaagatgatttccatgctcctcaaatgcctggaggtcaaaacagataaaacaggatggggcaaatgtggtttaatgagtttttctacctgtagatacagctgactgtagaacattaggtaacaggctggagagaatagggggagagagaggggctactttgtttctagtgttaaaactgtcttccaaagttccttaaattcagttcaaaaatttctgcaccttaactccgcttacccaacaaaacaccctatcactgacacttctctgttaattttctactagtatttcaaacttgtttgtaagctcccatgaatgactgaatcctcagagattattgctggaatcactgccctgcacaggggatggtgacctgaggggtctagtgaggcaactctctcttcagggcaagaagtgggagtagggaatggcagggcctcacagaccgcaagcagaatgcctggcaacaggactgggctgtggaaaccaagaaccaacgcagaactttcagagtcagaaacactaactatgaaattaatgccttatcaaaaataacaactggagcaggttccaccctaggtaaagggagtgagtaaaccctcaatctaaattctgcaaaggcttaagaatctatatgtaaagcctgcagtcagactgtcaagacataatcaacatgaacagtcatttcctcagaccattcctccactccttccttttcctagcctcttaggaaagggcagaagggaaatcactgccttttaccaggtgtggcattaaacttttcagtcacatgaagtggaacagcaatctgaagtcaaagtaatacatcattacctaaacacctggaaaaatgttaaaacaagatgtgacatatttacatgattttgtaagtgcaaacttgtcacaaattcacaaagtcttgcttgacttggacttactatacaaggtgctctttttctaaaatgtaagatctgtactctgtgttcctgattaagcaacacttgtctcttaagacaactgaaactgaaacctagtttatttctatgattccaaaagaacggcaaaaaccacatctgtcaacccttccccattcctgtctcctttacagagagctctcctttctgatctcattaccgaacaacaaggcaggagacacagagtttggaggggccaatgcaattcgtcgtggcagaaggctccgcagcccttgcacatgatcatggctttcaacccggcagtaacactttg

SEQ ID NO: 36285 - DNA, 1376 bp, Bovine  19866881455696
  misc_feature (1)..(1): n is a, c, g, or t
naaaaacattgcttttcctttttctttccataatctgaccctgtgtacgcagctacccactaaaattggatataattaacaattaccaataataaccctagcataaataactgaagcttataatcttcgtaaatgccacccactggactttgaaatgctagaagctgaacagtccacagagcagctggttcttgtcaaaaggaaagccagaagcagtgccagaaaatacaccttttgttttcagtgtcaacaagctatttgtcaggaaacaaaaggaaggctccgccagccctggtggatgtttctgaacctgaaagttggttttctgcctgattttgcttagagttagagaaaaaagcggttgcaaaagtatattaaaacctcactcctgggaactgttaggaggaaaggctgtctgagagaatgaaagccgtcacccaacacccaccccgccacacacacaccaaccagcaccacttaacttcctccagggcctcagtttccaaccgcctaagtctgcataagaatcaggcagagcaggtcccagacgaatgcacccaggctgaggtggagctgaggatgctgaaagttcccaagtgtagcacacaattcagaggcaggaagccaagtacccagggtctgaaaactacagccttgtttaggttttgttttttatttcttagaatggacttgtggacatgggatggggagctgggggagggggacgaattgagagagcagcagtgacatgtctcagttcagttcagttcagtcgctcagtcgtgtccgaccttttgtgaccccatggaccacagcacaccaggcctccctgtccaacaccaacccccggagttcactcagactcaagtccattgagtcggtgatgccatccagccatctcatcctctgtcttccccttctcctctcaccttcaatctttcccagcctcggggtcttttcaaatgagtcaggtcttcgcatcaggtagccaaagtattggagtttcaacttgacatgtatacacatataaaatagatagctacagaagaatataataaagctcctttctaatgtacttgtgctggagaacacttgaataaatggactgtttttgtgcaaaaagaagaaaaaaatagctagctagtgggaagctgctataaagcacagggagctcagctctgtgttttgaggagacagcctttctcttacatctgtatcttcaacctcacacctttgttctctctggtccactctgctccatgttggactccactctcttattttcaacccatccaacaagtcataaatttaaaaattcaaagcaaatatttagggacaatctagaattagaaagcaagctcgcacataccagaaat

SEQ ID NO: 36286 - DNA, 1437 bp, Bovine  19866881732079
  misc_feature (1)..(1): n is a, c, g, or t
ntgtagaagcagtggctcatggaagagaaggtgaccagccaggatgactgcagtcttatgagtgagaacaggcagaagctgctagggatgaaggagaggacactgcaagacctatggcaggagcagaaggccatggaaccgcttgcagtcaagtacaagaccatggagagtgagcttctccattgaggcaagaacatcaagaatcacaccaaagagaagtagaagacattgaaactgaagagtgatgagactgcagagcagaaataccatgaacaggaaatacagcaggaggtgatgatctgagatgaggaggcaatgtagtttcaggctatatacacatccatgcagcaggacatagaagtcaaacccaggaaactcatgaagttccaagtcaaacagcaggttgtgaaggcagagacctggggccagcatgatgagtatatccacatgtagcagaacctgaagaaggcaaagaatgaggagacctaggaactcaggttaaagtatgtaatcactgagagcttcatcccacttgaggagaacaagattataaacctgcttttcctggactatgaagaaaagcaatagaagggccagccagttgtgccaggtggatttaataacagccaaaagaagcatcccatgtttgcagtgggctacacgaggtctatcagccagtactcttggagtgccttgccaccccagctacatggctgaaagtatgggttgacctttttggagctggatatatcccctccagctgtgtttatgttggaattctctcatggtcaagaacaagaccccccatgcactacatatggaaaggctcatgcagttaagacagatttctggaaagaacatctacctgtaaagtctgaaagtccagatcctggtcccagagtcctcagtggcctccaggtgccagcatacataccccagtggccttttctatgctgcacaccatgacaattgtggaccaaaatgacaatcttcagtcaggctacccatctgacagactcctgggatgatgcagctaagcctagggaatctgtcctgaaagcacaactggcagtgaccacgtctcctccgagctgactgatccattgaccagcaggccagacactaagttctacctgcaggggtctgccggctttgccctcagtgtgctcttgaaacaaaaggaaactccagaatcttaagttcagagtgttaggtagttagaatagggaaaaggagtccaaaatggtggtggctaacagacaaagaagggaaaagcctctgaaaatagaacaaaggaaggtccgaagactggaatgaggacctctggtaaaacaaacagcactcctggctagtccagtttacaaagggtaggcccagtgggaggagaaaaagcatatataaagaggagccaaaattgtgccggagcctctcttctct

SEQ ID NO: 36287 - DNA, 1440 bp, Bovine  19866881923912
  misc_feature (1)..(1): n is a, c, g, or t
ngagctcctgtgttctgtatgaggtgagtgcctccttggtttcccctccaggaggaacgaccctgcagcagggctgtccacgcccaccttaatgccggtctgtctgtcgtctctctgtcctagggctcccggggccggctgcggggtggcctgggctgggagtccagcctccgccagcggcccatgccgcggctcaccttccaggcgggggacccctactacatcagcaagcgcaagcgggacgagtggctggcacgctggaaaagggaggtgaggtgccttctctggcctgggccccagcctgtcccacagaaccgggaaacctggaagttagcttcagccaccgtctgtggctgttgtcaggccctggctgagcctcagtttccccttccccttcaggttaacctctcactcttacagggaactgctggctccctaggcagtgactgcgcgtcctttgttatttccacaaatgttactggactctcagcgtgtaagcaggcagtgtctaggcctcatgcacgtataattcctaccctcatggagctgacattgtgatgggggacatggacagaaaacaagttagagctcttattagagttgaaatagagagtaacaaaggcctgctttaggtggggtggtgtggagaggcttcttggagaaggcggtattgaagttgagaccggaaggaataaaagagctggctctgtgagttgtggggtgggggagaatattctaggcagaggaaacagcacaagcgaggccctgacttgtttggttgtgtaaaagaccggtcttctcagagtgaaccaagcaggggagagagtggggccagacgagaggtggcgaggggaggtaagcagaggccgatcctacagagccttgagatctgggccggaagctggtttaacgctgagtatcctgagaagcccctgaaggtttctatgcagaggagtgatttgatgtagattaaaggagcagcaaaggtgaaggagagggacagatctgggcttgctaaccaatgggaaggatgtggaaggggggaggatggacacggcccacaggggtaatgcgtgtgctgctgcctcaggtgggaagactagaggaggaatgggtttggggtgggagggaagcaagtgtttagtctgagatactaaggtgcccggatcccagagcagagggaggtccaggctgtagatgcaaaggtgggaaggcatagagccacaaacactgatgagctcacctaggagactggagagaaccgagatgcatcccgggctcggtccacagaaaccctgcagttatggccacatgaggtaggggcagtggcagcagcggtattgagaaggggcctgggaggaagagcctgggagaaaggagagaaacttttccagaggcaggggccaccctgccccatggaggctgaattaaacaggctgt

SEQ ID NO: 36288 - DNA, 2264 bp, Bovine  19866880404613
  misc_feature (1)..(1): n is a, c, g, or t
nttcagctaacaagtgaatctgccacagctccacagatgctgggagtgtggaatcttagccactagaccacgagggaagtccttgtttttaattttaatagttgtaggaggcaccaggcattttatattcaatgttgctgctgctgctgctgctgctaagtcgcttcagtcgtgtccgactctatgcgaccccatagatggtggcccaccaggctcccatgtccctgggattctccaggcaagaacactggagtgggttgccatttccttctccagtgcatgaaagtgaaaagtgaaagggaagtcgctcagtcgtgtccgactcttcgcgaccccatggtctgcagcccaccaggctcctccatccatgggattttccaggcaagagtactggggtggggtgccattgccttctccatattcaatgttagtggttgtcaaacagtggtccccaaccagaagtttgttagaaatgcaagttctcagtccttacctcagaactactacagcagaatttctgggaatgagaaaagagactgacatctgaaatttaataattccatctgtgaatctgacatgagctaaagtttgacagctactgggctaagatgtgtatgtgataaataaaggagataaatggcatttatttatctactctgataagttatgtgatgttcttgcaacttaattggtcaactggtactaaagtgtttttcaaaatgaaaaagaaggatcgaagttatcattacagtcacattcaaatcatttgttccagctcagctccaactttgcagaaatataaaagcctaagttatacattaaccctgtataaattcaaaaggtttactttgggggaaatttggaggaattttaaatttcaaaaaaaaattattaacattgatttgggttcaaagattcctatacatatactatttttttaaatacattgagtagttgtaatgaattagcatcaactggtttcctgtctaatgtatatttttacatatatatcaaatttctcagaaaactataaagaaatgtatgctttttttttcaattaaattcacagtgggtgattctaaatttgacctttttaatgactctataaattttgtatattgaattatcttgtatttattgtaatcgttttcctttcactcttgtctttagaaaattaattttttcagaagctaatctcaaacacagttgctggcaagattctttctttggttcagtagtttgctagctcaaaatattaacaaaaagcctagggagttcttcttaatctaaaacaaaacaaacaaaaaaagtgctatggaaaaaatagactgttatgctttgatagttgctatggatactaagctccttcacagttttgaactgtgtgtaggagcaaaaatacttgctatttgattaacttgtgattttattcagaattgctgcaattcatgtgccatatatgtcctatctcagattaatgtcagtcacagataagacaactttgaaaagaaaactctccctctctgtttcacaatttatttggaagaatgattagaaacacatcaagaatatatgaaactttaaataataattcccgttcatgaaaacttgcatagccagcatcgtttttccctactattttgaagtggaaaacaaagaataaggttaaagaaatcttacaatatcctttagtaaaacagtttggatacaatagtttaagtaagaattgtaaataacagcattcttagcagaattatttatagtacacaattttacctttaagaagtttcatttgtgtttcatctttcaatcatattgccattgagatatttgcaattttctcttttcaatttcagacaacatcttttttatccttcatttatttaaaaaatacaatcaaatgtgcagagttatatttaacaacaatagaacgttctgagtttcgactattttaaccacctaatgacagacataaatgagtcattacgttgatgtctgacagcactgttttctattgcttctgagattgtcctgtcttatattagaaacatttaatttccatgacagagagacacgtatcacctaatagatttcaatctttaaaaacagattgataaccaacttaactctcctcctccatctctgctccatgctaactatagattacagaatagctcacagctgcccattaaacgcttataatggtccttccttccttagtcactttagttatcacctccatcattttcaacctcttttttctc

SEQ ID NO: 36289 - DNA, 1064 bp, Bovine  19866880413191
  misc_feature (1)..(1): n is a, c, g, or t
nagagggtattctggcccctcttgttagaaaaggagttccaaactaattctgatgccaactgtgaatgtaataaatgatcaccttgagacattagcattggcacagctgtttatagtttaccaagctatagggaaaccataaacttttctttctaaattcagacttttaaaattttcccccaaagtctaatagcatcatttctgttgctttataataaaaatccttttacttaactcctttttagcttctcaatataaattccattcttattctggtattattgttgtgttaaatcggatccagagtattctcagggtaggcatgcactgattaataatcaacatttttgtttcttgtaggtttacaaaaaaccttgcaacattctcactaaattgaggtagtcaagcctagggattggaggctgatgcccaaggcactctcagatgggctcctctgaatatattgttagtaatgcgtgggttgtctctgggaataaagctggtgttatcagtttaacatgtttgagattgttccatgattttcaaatgtgcccaaagtgtaaaagccttgcctgttaaaaacctaactcacgacttcttttttccattcccccatttaactatggatgtagaatcactgacttttaaagatcaacctctgcgtggaaatgcatttgtaataactataatttcttgctctggactttgagttccctgggatctgaaagtagcatctgctgaaggttaacgcaggaagtaggattccatattttgaatgctctaagatacagtctacagtgataaaaatgggtctgctttatagaattcaaatgaatttcgatcttagtgcttcttgactgaaaatgaaaaaaattgcctctgtgagtgtctagaaatgtatttgtcatcatgaaccagtggtcaagcctatcctgggatttatatggaaattgccttgagccaattcctggggaattagggaatagccctctgactatgatgcatagtttaatatgaggctatttacttgggcctctagcaagcaaggatgctaaagaaacacg

SEQ ID NO: 36290 - DNA, 875 bp, Bovine  19866880586334
  misc_feature (1)..(1): n is a, c, g, or t
nttattagagcttcagcttcagcatcagtccttccaatgaatattcaggactgatttcctttaggatggactggcttgatcttcttgcggtccaagagactctcaagagccttctccagcaccaccgttcaaaaacgtcaattcttcagcactcagccttctttatgtcacctctcacatccaaacatgactattgtaaaaaccatagtgttaactatacagacctttgtgggtcaagtaatgtttctgctttttaaaatgctgtctaggtttgtcatagcttttcttccagggagcaagcgtcttttaatttcatggctgcagtcaccatctgcagtgattttggagtctaaaacataaagtctatcactgtttccattttttccccaccttttcattcccagtttgacttcttctgaagctaggattgctgatgctctccaaagcagagagacctgcaaaactctgtctttattgtgtttcccttttgcttgaatttttacgttcaagatgttctttgaaaagagatctttcctaaagtaagcaagaattctagtaatgctccaggcagacttttttttgttgttgttgtttgtttcagcttactactgacccatgtcccttgataacgaagttcttttttacccataactttaattgctttcatcactggttctttggcctgatttgtcccattttcttagatgattggccccccaaactagaattctgagagcaggaggctggttctattattcactctcttctaagccagagctgagggtggcccacagatgtggttatcttatgacaattcaggtggacaaggctttattagaagagggttttattagagcctaagctgagattcagat

SEQ ID NO: 36291 - DNA, 1631 bp, Bovine  19866880717893
  misc_feature (1)..(1): n is a, c, g, or t
nattgttcagcattaggaactttaccaactttaagctgtgataaaatcatgcttgtgtttcctcaaatagaaatgttcttagtctttagacaatgacagagattcggatttgcagataaacaagggaagtaaggtttctcggcgccttggtgactgcactgcatttgccttggagttgccaagttgtttaaggtgagtgtcctaggtaatcggtgcttcactaaaggcatttgtcccctcagtcaagacacttcatttctgctgacgttactcatgggtaaatgctttaatctgttatcagctcttggcgaatattgttccacttaaattgcacttattcgtataagtaatggatttggtggcttggcatattagctattaagcaagaatctgcaatttctaataaaagaaggtaaagggcagttaattacagattaaataatctagcagcaaatcactttacgtggaatttgggatttctgtgttaaaaatggaacttagtgttatacagaaagagtcattctcaaggtgattgggttttttttaatatacaatttttttcctctcaaaggtcacagatcttcatttattctttctttatccctgcaggcaaatccctgatccaggctttagtcatctctatcctagattactttagaaccttctgtactacaaaactagcactggctctcaggatttttttttttttaatcatatttaaatgctgcctgtttattttcttttttccattaaatgcattattcaactttaaaacccatgtcccttttccatgacaaatgctacttaaatctgcttgttcacactaatgttatttttctaaaaagtgaacaagaattttaatctacccataaaatgttcgatttttttttcctataccatcttttcacccaaaataaaatagcatttggaaaactggagaacacatagattcactcatctgtctgttaatttatccactcaatacatctttattaagtggtcactaagcttctgcacagtgttacaggaaggaaaagtagaatgctgaacaagacagacatgaatcctgttctcagggaaagtaccatttcctcgggaagaacagcttcacaaatcactgcaagtgtattgagtgtgtaacagaaagtgttatgggtgttttgggaggatatcacagacaagcctaaccttctttaaggtctctgccttgtcatctaatgtgcatgagtcaggatgaattatttacactttctaatgtttaattttctaatccataaatgagattaatgttttacagtgtcctaatgagaagtaagtcatatatcctgtgaaaccacccatctatgacttgatagatggtaataaaaataactaacattgattaagtgagcactatatatctggcatagttttatatgtattgagtcatttaatccacaaaacaaccctctgagtttgggttacatactgtccttttccccttctataaatctacaaatttacagatgagcgaacttggacacagagagttaaggtgtttatctgagtcctcagatagaggcaagtggcggacgtgggaatcatcagtaggcagcccaactcccacccatgctgacaatccccgctgtctg

SEQ ID NO: 36292 - DNA, 1257 bp, Bovine  19866880740798
  misc_feature (1)..(1): n is a, c, g, or t
nttttcttccctttctcattgcacatactgtgaattctcctttgctttcacagctatttcagtcaccatgtaggtgtccagacatccatcagccacactcaccaacaactaggattccctaagtatccttttattgactccatttccagatgggcttgaccagacagatgagggcattcttgcttcatgggaagttgaggctgttatgggtgccaagacagccaggcaataagaaccaaggagtgtgatgaacgggtaggcaacctggcacctggtgtccatgtcaagtatttctttcatgggacatatggaacacagccagttggtttttcctcttacttttctcagagtgtttttatttatcaggtgttttaatttcactaagcaggcaagagagtcaggttttggaatgtttatctcttttttcctgattatatgccaattacctactgactgccagagaatcaatcaacgactaagtaaacattggcagggatgaacacgggttgggtacactcacctctaccaacctagagaggacgctgatggtgttatctaactcacaaatatgtgattatattcttgctattttgatctatttgcttggcacactccatgtgatgattaacatttatggtttccttgccaaaaagtacaatgcgtgtttggatacatgatctcaactgcagagtcatttacaatttatttctgtatgctatatcatagagctaatcacttctaggaacttagtgccaggaatgaaaaaggcgtaatggagctttatccacagctgtttaggaatcaaggattatgtctccatgagggatgtttttagaaagggaaatatggctcctttttcactactttttccttatttcaagtttaatgcatgtatatcttaaaattgtgacttataggagaaaattaaatgaatgaaattaagatattatctattttaacattctgccagaaattttgccctcttaattcacaatctttcttactataccatatctgttgcctcaaaaagattcatatgaacttaggaattcatatgcatgggatgcatgggatgtatgaaaaattattttctgcaacttggtaatttaaggggccataaacagcaaaaccatcttgaagactaaagatgaaagatatcctctaattgatattaaggaatgctgtggagtgacagggcttcccaggtggctcagtggtaaagaatcctcttgccagtgcaggagatgagggttcgat

SEQ ID NO: 36293 - DNA, 1133 bp, Bovine  19866880742693
  misc_feature (1)..(1): n is a, c, g, or t
natgatgaagcccgtctgcgcccctgaggcctggctccccatcctgtgtcatttgattcagagcctgcaggttgccgtgtgtgctcctggcagcccgccgaccctgcggtactgtctaagttaggcagcgtccctgcacagcaactcatcctgcttccggtcccagctgctgttgccttggctccttttgcgagccttggcagtcacagccccgaactatttttatataccatgccatttttcatgcatttgtttttgagaaaaagtgcatacctagtgctgaagtgtgatctggccgataaatcatacagaatacatgtgggaacttggctggtgggcccttggaagggtactaagcagccaaggaactaacagaataagcgtttggttgggattcaattaactttctaggcacagagcgaatcttctgataatctggaaataatgggctaagagtgacaagaagaagaaagggggaagaggtggaaggtcagaaggggcaaatgtcagtacaggagggagagtaaggccatgtgattctccttcatggttctcaacagtcttatcttctgggtgggggtgcctggatgtgaactccatccgcccttggtcctgaggtcaaggtcacagtctgagcttcaactaaggaaggcagttttcctgaacaaaggctgttctaaaaatatgagatcacactccagtaagttactagtagtatgtatgtatgcacgtgtgtgtgtgatataagagattagaaaatatgtcactttagcattctataatgacaatattcaggaagaataaaggagaaataaacatttctcaaataaaggaggaaatgtttatttctcctttattcgagcaaataaaacctgggaagtttcatctcagcagacatcacaggcaagttggaaatcaatgggctaaggagaattctttcatgaaggccagccaaggacattcagagaaagtggaaaaaggaaatagtaaaatagaaatataaactgtgaataaatattataagagagatgaatggcaagtcaactctggcctctgaaaatttaataaaagagaaaaaaatttaatagtaatcataaagaaaaaaagaaatttaaagtcatcaaaactaaata

SEQ ID NO: 36294 - DNA, 3305 bp, Bovine  19866880754584
  misc_feature (1)..(1): n is a, c, g, or t
ngtttttcctgtggtctgtatggatgtgagagttggactatgaagaaagctgagcactgaagaactgatgcttttgaactgtggtgttagaggagactcttgagagtcccttggactgcaaggagatccaaccagtccattctgaaggagatgagccctgggatttctttggaaggaatgatgctaaagctgaaactccagtactttggctacctcatgcgaagagttgactcattggaaaagactctgatgctgggagggattgggggcaggaggagaaggggacgacagaggatgagatggctggatggcatcactgactcaatggacatgagtctgagtgaactccgggagttggtgatggacagggaggcctggcgtgctgcgattcatggggtcacaaagagtcggacacgactgagcgactgaactgaactgaactgatctgatgcaatataaacgaggtgatttccctggtggttcagactttaaagaatctgtttgcaatgcaggagacctaggttcaatccctgggtcagaaagagccccaggagaagggaacggcaatccactccagtattcttgcctggaaaatgtcatggacagaagagcctgatgggcttcagtccatggagtcccaaagagtcagacatgactaagaaactaacactttcactttcatagttacttttaagacacagagattcttatttattgaactgaaaggaaagggggccagcatatcaacagagagatgattttttcctccaatctggaatagtcaagtaattgaaacagataatataaatgatttaatgggttgagttaaatgttctctagtaataaaggcaatttttacatctgttgattcttgtcattacagaatggaaagagagtctgggaaacctggtgtctcaaagaatctgaagtggattgaattttaaatcctactcctcttcctactccattgccttaatgttgtttgggttggggtgtgattttagagcagcaacttatcaaaaatattgcattagacctcaatcatcttttcctttctagtgacttattccataaactcttaaatcacctgaaaaaatgtgaatcttgacatccttctgatacaattctcccaaatattaataataaaacaggtggtggtgggagagtgcaagaactgccattataaatccagccaggtgggaaaggatgccatgattgactgcctggcacccaagtggatcttttgggattgccatcgtgtgcaaggtgaagcgatttctcaagacttcctaacatttatccccatagatcagcatgtgagccatcaatcctgcgaaggttaaaagggacattactcaaaaactggcatggagaggcagcgtttcaagaggctgttatgtcattgggtttaaagctttaaaggggagaggagatagttattttaaagttgataccaattgcttcccctgtcattccccccaatggttttataattgtggatccaaattcatctgctggattctctttttcatttcccaatttttacaaatgattctataatgagtccacgtaagtacaagtctttttgttgttgtttagaggttcttatagaattatatccctgtttgaaatggaaataacaagtcttcaacttcttatatgcatttggttatttctgatcaaactaaaatcacaaaaatgtctgcacgtaatctacagcagatgttcttcttatccaggaataaattacagcggctactaggcagaaaattgttttgttgtgctgtttccccaagaaaggtccttaatggagaacagcagcaccttttgggtcctttggatccagagttcttttttgatctttagcctttttactgaatcagtggacgtgagtttgagcaaactccgggagatggtgaacgacagggtagcccagcacactgctgtccatggggtctcgaagagtcggacatgactttgcagctgaacaacattatgctgtacagtttaaacagacaaaggcttcattaataaatattctttgtgtcatcaggatcgagtacgtgtctataaacggtgtactcaggttttctgagagtctccctcttgaaatcaaatctctgctgttctccctgcttcttgaaatgtcactttgcttgaggctcttcctctgtttagaatgcaaataccctgactatgctaatactttactccttacctagtcttaatgtgcaagactttaaggtgaattaacctatcagatcatctaaaacacattttaataagagagaggtgaatagcacagggtgggctgtggagtgagggacaacttgattttgaaaaacaaggtgggggtgggggacagagccaaagataacctctggtatttgattatttttcttgggattagccctgcatgaaagtaaatgccctgctttactctgtagtttatcctttctttgcagacaatttacaggatgctatgaatgaatgaatgaatgagtgagtgaatgaatgaaattgccttgacaggcaccagttaagaagttaaggattaccctgatagcattctgattttttttttttcttggaatgaaaacagaagatttctcttacaatatcagctcctctttgacataacaagtctagaaagataggaactgtttcctatgggaagcatttccaaagatgaagtcaggctgaaccttctatttttctatttatgttttttacagttgtttttatttccacctattgcagtaactgcattgtatagtagcagacttgtctctcttgtctctttaggcttctcttgcttattttggtttatacacgagtctgaatttcctcttctgtacccctgggtgtgtgagcaacagtggaatgtttagctttatttccagactattatttgtaccttaaactaaattgatgcccaatttgccacaattggaatacaaaggtaagactttcaactgctattatctgaactacaaagaatcagaagcacacttgattaggattttttagccaagttttaattttcaaagtgaggattctcccacccctcacactttaagttttatctagaggattgccaattttgggtaaggactagaaattgcagaacttacaaagatgtagacaaatatttagaactataaagttctgaaaaccgttaaagctatgaagatgaactacagaacttagacattgctgcaggtggttaggaggcctttaagagacatcacagatataagttctctcctgaatcattcaagaaaaatagctcactaatatgaaaa

SEQ ID NO: 36295 - DNA, 1997 bp, Bovine  19866880859116
  misc_feature (1)..(1): n is a, c, g, or t
ntggctcattgagtctttcttgagtaacacatttagggaattaaacattggttttgaatgatttcttctccttagagaattattatattttctagtaatcacagatttaagaacatttgtctagttcttagggctattgatgctgtacttcatttcttaattctgggtgactcatatgcctctccgaagaactaggcatttaaatgtaaagttttcagtagggatttcttaattagcttttaataagagaaaaaaaaaaatagcatctgtgtgtcattctttttattcaaagaaaggtaagaagttataatagaatagttagaacaccattgttctaaattttttggaaccctcaagaacaagaattgaattgataatgcaagacataggaatttgtaagtaataagatcaatacttccagttcatatagtttgcatgctttgaaattagagttaacaggatatttatgaaacctaatcaatataaaccttctttcttggacagtgaaaagaaaatgttaacagacataacagaatatatgttttgatattactggaagtggatggtcctaaataaatttaacttaatacaaaggcatttgctaatgtttccttcagttacttaacaagacattgaacttgtaaagtgccttacactgtgtggaacagagaaggtgcaacgaagtgaaaccctttgtaacctatgtaaccctcccaaaggagtttattcacttgatgtattattcaaattccatatattcatacttcatagttttgctacttccagcaatatagttcaaagttttatttttcagaatttttattttttcagaatttcatctgtctcctgccctaaagatcacaatactctttatatttggaatgtctaacattgaaacccctttctcctctcattcctgcctctttcaaataagcaagtcatcacacatttagaatacacaggcaatagtgcagctgccattaaaatcagaaagtagatgaagggttccctcaaagtaaggaaagatggggaatcaacagagatcattttcccagaaagtacactttaaaagtctcctctattggatgaggtcacttattcctacttttcagtagctttgacaaaggcagaaagaaaggtaagtttctcatggatcacactgtctcttagttaagtttatcacttctttacagaagaaactaactttcccctttttactgcattctgaaagagcctttattagaatataaagaataaacaaaaccttgttatattttagtaatatatttagtttttatagaaaaattttatatggacatgtattttatcaagcaattaataaaatttaagaatatatctttaaattttacttcaaagacattagtattgatggcacaatgaataaatgaaatgaagatcacaaagcacatctcaggattcctgaggattaattatttagtctttttgtaaaacttgtatgtatgtactatctttcatttgcattacatgattagtgtaataaataaaaattgtaacaaaggttacaaaagtagttagtagcaaacagtagttaattttttgacacaagccattacacaaataataaggaggacatttatttttaaaatatgtttatgattcctatataggagaagaaatatgattttcagaaacataaaaacaatcaaacatggatcagacatctcatggttttctcccttaatttctttatcaataagactacctcaaaaagaaatttaccattaatttaaagtttgggcaatctgtttctcttatcattaccataaaaagatccccaagaatggctttatacaaggtatgcagttcataatcctttttcatgttattgtaacatttttaattgtgacttcatttctgcaataatttcttaaccaatcccttgtctccttttttcttctttattctttgaccaaaccagactagagtttccaaaccacagctctaattatattatt

SEQ ID NO: 36296 - DNA, 1436 bp, Bovine  19866880883739
  misc_feature (1)..(1): n is a, c, g, or t
natgtgacgttcatcatcagcttgaccgtggtgatcatttcacaatgcatcacatatgtgacgcatatgaaaccatcaagttgtacagaacaattccccatttgtcacatatacctcaataaagcttaaaaaagcaacggttctcctctcaaagacactacatctgcctttaagggtggattctcgtgcgctttggtgtgaatcatgtccatctgaccactcagagaactactgacctgggattacttgttctctttttctctactctgctaaacatcacacccctgtctttcccatgggtctctaaataaaacatctggcttcttacacctttgaatgaatgtaaacttcatgtcttccagctccctgtctgctttaaaataaaggcacaaagagactgaaaacagggtcttatgtggttacttccatccatcttgagggtgcttgtcgaagtaagaagttggaaaagaagggtcaattttcaggagctgaatgctctacttaaaggaataaaaagcaaaggaactcttaaattttccttctgtgcagttgtagcatttgaacattattattgactttttccctttgagggaacattgtgatgaattgaatgattaaagaaaaccgtttccgtttgcactgttttgctcctgataatgcgaatcaggattgcattctgcaataacaaggcttaaaggaatgcattctgtcttggcaattgggagacttctctctttttttcttccttaaggaaaaactcacctaacagctcggggataatgagacacaagaccaaggagaacaatggtgctaatgtgtgtctcatccttcacactctcgttcaaagctcctgccatcaagtgctattatcctgctctgctgatgaaaaaattacccttaaaggcacaaatgagcctcacacatcagttttcctttaagtgatttctctttcttctgaagtataacaaaagcataggaaaaaatgtttgcaattacccttaccctcaaaatgccagatttagtcaacaagcatttactgagtatgcactaaattctgagcagagataattcatatgtggacttggaaggaactagatacaagaaggtgaagtgatgcatggagtggcagccgggttggggtggtcctgggaaattctagctgcaccagtctatctggccttggccccttgtatggctgagacttacaaactgtcaggatgtccttggaatactgaacacagaacgctgtgttcagattcctccaaatattgctgagaaagggtttctttcctccccatcgaaccagtgaaatgtaattaaaaattatcacatcacatttagactgtgtgggacagatgaaagacaaggagatttggttccaattcttactcagccatctgaagcaattttttagaaatgggttggatgtcagtgct

SEQ ID NO: 36297 - DNA, 772 bp, Bovine  19866881077635
  misc_feature (1)..(1): n is a, c, g, or t
ncagcaaataactctttccccctcattgatattccaagtttatctggcaatcatatctctaaggccaagactcaaaacgggttctttttatgagacactttctctaaagaaatcttgatagcgagagtccctttcctctcttcctcatcttctatcagtttaacaagccatcacaatttttctcaaaatcttttctatgaagactcatttctcctcttcattttgaattatggagtcagaaaagctctactctgttgaaaagtcttaggatttgtatactttcatacccagtgaacattgttgagttcagtaaatgtatcctggaaatgtacagtaagttcccagggcaaatgagaagggctgatgtttctgtattttcaaagcgctcccaaggaagttcagagcagtattgtctggtttcccctgttttgtataatcacaaccatagctttgtctctgcagcctacttgcagtaaatgtctttagtaattaattaaactgattcagttctacttcagctttaagtaaccacagctgtttgtttattggttcacatcctaatagcaatagaagcatttatttaaatactcctttatgccagaacaccctgaagagcagaagagcaaggtatttagaaatgacagaggggcaaatggaactactttctgtaacagggacagagcatctgtatttaccaaagaacctgaaatcacttatcagggaaatcagtcttttttgcccctaggtggctactcttttgtagtggaaattg

SEQ ID NO: 36298 - DNA, 995 bp, Bovine  19866881182900
  misc_feature (1)..(1): n is a, c, g, or t
nttccccacacccagcataaccttgctgggtgagtatgccaccccacaggcataaccttgaatgctaattaccatgtcttggggtctgtttcattcagtgaccctcccttcttccactgactcaaggtcaggtgtccttagctgcctccctcctgtctccctgctcctgcaaggggcctgctcctacctcaggctaatctggaataactagttatggctgcacaagctgcaggctttgacgatcctccggttggaaaagagttcttgaaatacgttttgggaggaacctcggggaaagtggtcttaataaagttaccccgaagcagatcctgcaggaaacgcctctttgcgataatttctccaagaaggtggggcagggtgacagagagagaaaatgagtctgtctccgtgaactgagcccaactaaatggaggtgaaaactcaaagcttgtcagaacttctgatgtgcaatttctgctgataagtcttggagattcataatgggctgagaggctgtgcaatttagtttttttcaaagggaaatttttttgaagtttgagtgactgcaaactgattaatataaccccttccacatttttcttaccatcaattctccttagatcttccccctgaagttaggttttgaaagactgataactgtcccagatcagaagcctctcccatactgaatagagtgccagccagagaccccaagttctagaagaaggacttcatcttgcatcctgattagaagacaggcagcccagctcttggaaaagcttccagcagaagataccaacttgaacatcgagttgaatgtcagctcctgagcactatcacagatttggtcgtctcacttccatggaccagaccaaagtcagacatggaaatactgattgatcacacatttccacagtggacagaactgaggctgtgtgacaagctctcaagcatgaacttcccagatttctttaaatgttaaaaaaaaaaaaaat

SEQ ID NO: 36299 - DNA, 960 bp, Bovine  19866881267882
  misc_feature (1)..(1): n is a, c, g, or t
ntgaataatatgcaatgcaatatgtgttataatgattgggttagtctatcaaatgagagaacagttttttagattactttaaattatataacaacttgaagttggtaagctccacagcaaaaactgagttttgtatgtcttcgtgaactagctctgacattcaaacaatatattcagtttaatattgctggtggtggccagtgatgcttttccatttcaagcatatgctttcaactgttttatgagaattgctacttaaagcaatgatgtgagacacttgatccataatcttctatcatagttttatcccttgaaaacttttcaattgatggcagtgtttatatgttcctcaaattgttctaggaatagacattatgcaattctgactgtttcatcatcttcaccacactattataatatctacattattatagtttgttctcctctctagggacacataacaaaagaggaatcttatggtgaaaactacacaacttaataaaatggataatgcagttggcactttttccagcatactgattctaaaatatttaacaaataaaatttgcattttattttgactttgctattatacaacttctcttttaacttttttccaaaagtttcttgtgtttttagaatatttaaaaatgatttaattccccaaacagaacttttaagatacttggcttgttttaggggaggatctttcaagaatatttttgatttaagattaaagaggtcaagaaactaactgatacctgtgttgactcaacatttacccaacaaatatctattgaggacttgttatatttttggctaggtgtaggataaaattttgagcaaaagagagagattatgctcctgtgaagattatagtctcctcctaaaatctgtgctttcataaaacgaaaacaaagacatctttatctggcaaactcttagtttgtataacctttg

SEQ ID NO: 36300 - DNA, 1720 bp, Bovine  19866881485222
  misc_feature (1)..(1): n is a, c, g, or t
nttgtttgtgttgctgtgtttggcagccctaggaaagcagggcaccctccccagaccaggactcagtcttctgtctctccagtggattctcccagttctgaggttagccgtcagagtccattcaactctgcaccctgccacagccttcccggggctgtgttcacagggagtcaccctcggaggactgcactttcttttcatctcagcagaaaatgcccatttggattttcagcacgtacagcttcccagccagtaaacacacacgaatgtactagttctcagcattgaatacacagctcttttaaggattgatttcatttattatcaatgaagtttcccccttatacccttttgctgttgttaataatttatcccagttttagaaatggttgcatcatctataactctctcatgtttacttttaatttttattgataatatgagacagaattagctgaactaataatggtaaagtcagctaattctatctcatgtcagtcaaagtaagtccctgacagttacatcagaccctatttccccatatcccctgatatatgtgaatgtataagaacatcaaaaacatacaaccattgaaatttttcttccccagacacgtctagtcttaaaggggatgacagaggatgagatggttggatggcatcactgactcaatggatgtgagtttgagtaaactccaggcgatggtgaaggacagggaagcctggtgtgcttcagtccagggagtgtcagagttggataagacttcacaactgagcagtaacaaaaagtaaactagcaaaacctcatgacaacgagccaaaaggacccaagtgtggcaaaggagacttctcacaaaggcaaaccagacgccataaaaataatttgtgtccacgttgtattatgtatgaaaatacttatgataaggttaaataggcagagggatataagtaattctttccagtttgttttagtgataaccattatatcattgtgaattacatgaatttccttcatttggatctaaatagccaaaataaaattcattttcctttgcatatatacattagaaagccaattcttgtaaccatagttttgtttacaacacaagtgttatgatattttatgatttaaaaaaattttttttttggttcttatatgttttacataactaattctttgtctctcatcagctaaaccttttcacatattttgcagactttcatccaaatcttagcacttcctcaaggtctatattaagcaccaaatcctccatatgtgcttatcaaacaattttaatgaatattaaaaataataatggtatatctttaagtagtttacaaattattttcttatatactttatgttcaatttttattttttgaaacattcttttggtttgagtgtgggcttccctggttgctaaagaatccccctgcagtgcaggagacttgggtttgatctctgggtcaggaagatcccctgggagagggaatggctacccactccactatttttcctgggaaatcccatggacagaggaatctggtgggaacagccaatggggctgcaaagagttggacatgactaactgactttttaaattttgggatttgtggaaaattattgaatgcagagatgaggaccttcattttgtctcttttatttatttatgatgtagacaatttttaaagtctttattgaattttttacaaaataattt

SEQ ID NO: 36301 - DNA, 1444 bp, Bovine  19866880512403
  misc_feature (1)..(1): n is a, c, g, or t
nccagatgtcagcatattttagacatggtaatattggtgatctttctggcccagggatcaaaccttctcttgcattgcaggcagattctttatcatctgagccaccagggcagtccaaaattaattaatttagagaaacagcaagctggactaggagaaatttaaaacattagcaagtttgactcttacgccagatggagaaaattgtgtaaatatataaagctcaattccatttattgatacacttttttaagtggataactcacacccacacacacacacatatatatatcccctgagtacagtagtttcttaggcttaagctttaaaactaattaacatatgctgagctataaaggctttgttaagggaattatagacaggcagtttccactgacaattgagtgacaggttcttcactttatattcttacaactggctggcttttgcttattagcatctcaggaaggaaacgatgagacaggtaggggactttatgttgagtctgtctcaggaatacaccttccttcttgtgcttgcctcaattgtagtcctttcaaattgtctttatttttcaaagcctgttttgttttaatttaacatgcttaaggcattaaaaagggggagcctatgccctttaaatttctctttgtgattccctggactgtagcccaccaggcttcttctgtccctggaattctccaggccagcatactgcagtgggttttcacaccctcctccaaggatcttcccgacctagggattgaacccagatctcctgcattgcaggcagattctttactgtctgagccaccagggaagctctttaaatttctaagccctctccagtgcctcagccaggactccagggccaggccagcctgctgcttctcctctaactctggggtctctgttaccatttctctctcttcattcatttggctcatggaacccccttctcatcaattctcccacaggttccccatctgtagctgttacgtattcctgcctttgttttttccttgcagaacctgattgaaataattgttgtcataattttaatttttaatttgtaccataattcctccttatcctattaatatgtgatctcctgcaacctgaattctgtcattcattctgggataccagcaattagtagattctcttgaaagcttgtatgactcaggtgtctaatgctgcctttagatacttggtataaaaaagattcacacgaagtgccacacaatacttagtataaaaaaagacttctgtgatcacaagcacttgtgaaatttgacattctgtaggtccctcttgaaaattcaccacgcacagtatcattttaagtaagtctgccaaaattttaattttgtttaccttagtagtatatttctcaagtgagtttgactgttgagaaactaccctttatccattaacagttagg

SEQ ID NO: 36302 - DNA, 1743 bp, Bovine  19866880570530
  misc_feature (1)..(1): n is a, c, g, or t
ntatcctgactgccaggatgtatcccttttaacttgtgtgatatttaccacaggctcagctctccctttctctctctgattttatggacttgaaagttatttggtatttagagctcagataccaggaagaacatgtcacaacttagaccacaaattccctatactcatgcaccttggggctgctcaaaggcacacaaagtcacacaaagtgggataatatgccagaagcagtctttagggcagaaccagaacactgtgccctgtgctttgctgaccttgagtaacaggttaagagctgaagactgcaagtgtgttcattgaaaatcacaatggattcatggtaatttaatgaaggattcagcagtgctttcctccaaacaaccctaaaatctctgttttcaaacttcaggaagaagtggtttcaaaaccagccattctagaggctgtcctcccaagttctctaattcccaaacactcctatctggtctacagaagtatgatggcttgaccactgaacataagaatcccttcgttgatgacagcacacagtgccaatagcatatgaaagggtttacttcccataattgaggtctctggggaaagtaagacctgcttctccagcagtcaggaaatgccttaagagagaaaggagcctgggcttttataaaaaattagggggtggatttgggttcacacacaagaacaggatcttatgagggcttaacgtcttgttactgccaatagaaaggagcaccaaggcactcttatcactatgtagaggtgtgggtcaaagagaaatgaggggaagggccctgcatacattcccttctctctgaggaatctggagtttttctctggtgcatgtaaggcagaatcttcctgacaccagtatggattttaaacactggtgagtctgaaaggaccacaggtttttctgcagctttttttctagcatttgccagccccgtgcctgaaatgatttgaatactctttctccctgtgccatttcccctcccacttccacttcctgccttccactgcccttgtatgaacggagttttgtaattctagctgttgtattttgtggacctgttatttttgtttttctgtgaagcacaaatattagatgtgggaggtatatgagactccactgctcctggtcactccctttatagccagcgatcactgtcttgtttcttgtaactcaagttagattttggtctcttgctccactgcaaaaaaacaaaagacaaaaaacaaaacaaaacaaaaaaaaacacaagagaggggacaggaggaaagacctcacagctagatctgctgggtttgaggaatgattttctttcttccccatgaagaggaaaaagcttttccactggtacatttaaagctcccccaacaatagggaggtaccagttttggacaagtgccactgcaacacggaatgctcagagaacctgaacttttaaactctggaggtctaagcttgactgttggccactgctgggtctgtctggtgtttcaaaggaatactgggtgctgcaaataggaactgaaggggtaaacttattaaacccattaaacctatggaaaaaaagagagaaatgggtggagggaatgaggctttaaagttaaaagcagtcaaccatcaaaaatgggagtcagagaactctggttttgggtctggtatttaaggaactctggtggtccagtggttaggaattcgctttgcagtgcagggga

SEQ ID NO: 36303 - DNA, 1096 bp, Bovine  19866880719589
  misc_feature (1)..(1): n is a, c, g, or t
ntcctttgtgtatttgatagtttgggtggtaaagagatgattgacagtgtcaaaatctttctgcaggaccttgccaggggaatcaaagactttatctggggaatttgtaccatctcaaagttaaatgcttgaattcagcagaagagacaggagcagcatcgaagaaaggcaagtggtgtcctggctcagtggagagcctagagcatagagaggaagcaggagagtgaaccaagtattgttagtagaatttttcagtactgtgcttggaatggtttagttttctggttcagtctcctcttgttttatcgagtgtttgtttattcctaatcttcattcagtaactgcccagattatttgtgatttttacatatgaaaataaaaacagaagaagaaaagaaaatacagggaaactgtactttatcaaaattaaaacatttgatgcactgaaagacattattatgaagtgaaaagttaattcccagggagaaaatacttgcaaatcatacacatttaaacatgcatattaaaatattcatacaaagggtttaacatccagaatacataataaattccaacaattcaacaaaaagacaatctaattaaaaactgagcaaagcacttgaacagacatttctccaaagaatttacacaaatactctaaaatcacatgaaaagatactcaagggacttcactagtggtccactggcaaagactttgagcttccaacacagggcgcccgagttcgattcctgttcaggaaactagatcccatgagtggcaactaagagttcacacgctgcaagtaaagattccacagctggcaactaaaggtgccacatgctgcaagtaaagatcttgcatgaaaagggaaaaaaaaagatgcttaacatcattagacataagagaaatgcaaatgaaaaaaacaatgacatactacttcacataatttaagaaggaagtaatggtagaataatatgccaagcctccagttcagcattattcatgacagctaaaaggagaaaagaactcaagtttatcaacagatgaatggataatcaaaaggggaaattaatttattttgataactgctacaat

SEQ ID NO: 36304 - DNA, 1531 bp, Bovine  19866880721328
  misc_feature (1)..(1): n is a, c, g, or t
naaatgatgatggagtgagatatatttgaggctgactcatgatttataaaaatatcttatttgagaatgtcctttactttttttagttctttacttattttttttcaagttggttgctttcattaatagtgatatttctttactcaggtttcaagttgctgtcaacaaattcctgccagcattatgtaatgcatgcgtgaaactttattttccaaatgccattttatttaagtatatgggaaatactttaattggatttaaaagtgagatttaaaagtggttaagtatctttttttgataaacattattcataacaaaataaaatagctttaggaggtactggaacttattttttttcttacagatggcttgtaccccaatcccagcttctaggtaacgaaagagtggtccacagattttatgaagccatttaaagcaggaattttgtttgtttgttcagtcactcagtcatgtttgattttttgcacaaccccgcagactgtagcccaccgggttcctctgtccatgggatttcccaggcaagaatactagagtgggttgccattttcttctccaggggatcttcccaacccaaggatctaagtggcgtttcctgcattgtcaggcagattctttaccattgagccacctgggaagcccttaaaacaggaatagatgtgtataaatttacttcctctgacttaggtgtttctcttttaattaactgctctaaaaataccaatttaaatcagggtatgagaaataataggcatggggaaacaattttggataatgaaagtaacactgacttttaactgaacaagagttaataataagcagtgttacagatttgtccactgaattaatctctcctctccctgttgcattgcgttgtgttccttctgtcctggccctcatcagcatctacagtgcgatgcatgtatgcaattctgtttctcctttttccacgaaagtgagagtctggagagctagttctttctggtattcatctttctgttctgtttagggcctgccacataataggtataaatgttaaattcatctgatctctgcaaaataatatagtgcaataacttgacaagtcactgttgacaatccttggccactacttttatattttaattttacttcagtgactcaatttttacataaaaagatcccatagatgtgtaaattttgtttacagagaaatgttttatgtactctgagggtaattactgatagttttaccatctgtttctatttatcagtatttcccatctccctgttcatttgtttggctgagtcttttatgtgtgagattctttatccatttagcttttgatgtctttgaaattttagtttttgatatttagaatatcatattttaatatgatattaatatatatttaatatgatattaaattaaattaatatgatattaataatagaatattttatgatgttctgcaagttatgtttatggtataacttgaatttgagtcccattctttaaagggaaatgtgtgtt

SEQ ID NO: 36305 - DNA, 2037 bp, Bovine  19866880722735
  misc_feature (1)..(1): n is a, c, g, or t
ncacacacattgggattgaaggcagaaccctttaactgccaacattcataatacatatattcacagtttcaaatatgctccataagcatgtatatatgctccaaaaatgagtccaaataaggctatacatattcccagaaatgcattcaccctctctgaagagtcttatccagttactggccctggattcctgggtgatgcattcttcttggacatgtgcaggtatatttcctaatcatgtagaaacgtattcctcaattatacatttagtcaccccaacacagccaggaagcaggatagaggagaaaaagaatgactattaaaaatataccccttttggaaataagagaatggaaaatggcacacgtggtcactacatctagcatccgtggcctgtctctggtagggcagtgggttcttggttgggcagccttgtctctccatgggaaaatctcccccgacatcctcttccatggctacatctgaaagcagtgtcggggagcatttctctggtggatacctgacaatatttctaagggatcctaaatgtttgcctaaatatctgttgagtgagtgcctaaataaatatcagcacacggtagaacttgtgagagttatctgcctgaattactggcttgctaagtatctatcactcccacttctgagtcacagaagcaccccccagggaaaactacaatattgcattttaaggtttttttgatttaatagattctttaaaaacaaaaatgggctcaaagaaccatacttgttctatggattgtcaaatattctgtttttttcaatatatggagtaactccacagaatgctcactaagatactggggcttgccagttaaaacccacattgaaatgttataaaaaagaacagtttaccataattacagatactgtacgtaacacagcaatttgcttcttgaaagctaattacaaaaagttgttttaaataatcaggcccttattcagcagctcagggatgagaacagctgtataaataccatcccagcaatggcaagagaggaggatgggaaaaaataggttagttaagagttcaagcagagttaaaaaaacagaaaaaacaaaacacgagttcccttagatctgtaaagtaagtataaagaacattcaaggacataatgttccagggttttgatataatactgaaagacacttttggcatgacaatggattgtattagaattataaagctgagtgtccattttactgtcgttgttcagtcgctgatcgcgtctgactctttgtgaccccaaggacagcagcacaccaggctcccctgtccttcactatctcagattcatgtccattgagtcagtggtgccatccagccatctcatcccctgctgcccgcttctccttttgcttcctgtctttcccaacatcagatactaattgcatccagacttcctggagctcttccattctcgccttacatttgtgtagcatgttgattcatgttaattttctctagagaaaggatggaaaagacataccaacacaacgcacaaaggccaacaatctcactcagtggaataacttggcacgtgtaatatcatctgctctcttttgcatggccatttgtaagaataaggtgggctgacccacaggaagtgacgctttgttccaggggcataattgtgcatacctgagaaaagccagtttcttaactgagtaatcagctgtattcccagagtacaatttaatcactctatcctaccatgagataaggcccagtggcattgtccccaaaaggaataaccacagtttcacaagttagtggagtcctgaaaacccagaacttgtgccttcaatgattaaatgcaacaacagcatgaccatttcatcagggcaagctcttcaagccaccagattgctagtcataggtttcaaatatagagtaagaatcacttgatttatagcctctttgacgaacgataaagccagttcctacatttaacaataagtgcttctattgttcaaggaaatttagtttttccaaaa

SEQ ID NO: 36306 - DNA, 877 bp, Bovine  19866880731986
  misc_feature (1)..(1): n is a, c, g, or t
natgaaaactgaagtatgatttgtatcatattcaggaaccactagctatttggaaatagagtttgaaagtatcttacagtttgggtaaatgttatctattgaagttaattgactgcttggtagatgagtgaaaaaattcacatctgctttcctgcccaccctactgaaaaagcaccagatatttcaccctggccaaaaattctataacatacacgatgtcctactaaagctgagcattgagagagtgccaagcagtcattcttcccactcgttggaacgtggttatgaggcaccagaacgtggaacccacatcctctttctctcatccccttccattcccaccactgggcaagctgaaaacaattttcaaaacctctgctctgttcccagaagattagtatttctgtacttgtgattagttttaaaagctattatcctatcttgcatcatgatgatttgctttctatactacaaacaatatttcttgcttttgcttcagccataaaacaagtcttagctgcatattcttgtctaaaatgataaatgaaactcatggctcccatgtctggatggattaggttcggctatttgtagcacttcgggtgcattattttcccaaagtttagtggcataaaatgctcttcattttttattgaccagttaataataggtggctatcaggcttgctgcagtgcaatccttagattttgcaatctggtgcaatataaatagtttatgctaattacccccttcccaccttctgggagaatagagacattttgattgcaaattttgcacttggtcattaacactctggtttctagattatgcattggaccattttataatgccaaataaaatgttaaaactgttactg

SEQ ID NO: 36307 - DNA, 1269 bp, Bovine  19866880737453
  misc_feature (1)..(1): n is a, c, g, or t
natgcagctgctaccattatggtaaactgggtgaggggtacatgggatttccctgaataactttttttttttttttttcacaactttcttgtaaatatctcgtcaaaatttaaaactataaaaacacacacccacataagaacgttcatacttaaaaactcagaaatgaaccaaatttaattagtgatcatagtcaagaaacaaagtaaaatctctagttcaaagagattatcagactggatataaaattaaaacccagctaacctgtatgctgtttacaagacagacattaaaatattaaggaccaaaagagccttcaagcacaaaattagaaaaatctatattaagtaggaagatattaaccaaaagatgacaaatgctatcagacctcacaactagtttgttaacaatattcatttcatgatatattaatactttatcaacttggcaccattcctgggggggaaaaagtattagaaaaatatatgtcaatattgctgacatttctctaacttttccaatgcctaccagggtttgggaccatagtaagtactcaaatactgttaactgatcaactgaatggcaaataattctagaccttccaaataatgtgaacctccaggcaatggcggtgatgggtcagcttgataaaatatttattaccaggtctcaaccaggcctcaaggagtacaaggtatttaagttccataccagcatgcactttatcctcaaaaacatacaaatagcaagagaatactttcttaacatttaaacaaataaaataatatatttgacactcaaaaaaaactttatgttaaatcaaaatttttacctacaacttgctactgtctttttatataagagttaattttttctagttaggttaggtctatccaagaagcagttacatattataacattgctattctactccagtgtaactttcactcaatattcctagtaatcattaaatcagataattaatattttactcatttattattcatttccgtgaagtattaaaatgctacccttccaaactcttatttcaacattctgtcatattaaatgatgatacaatattcaagataccactttaaagcaaatttttcagattacattcactttataagtagtagtattatcttgattttcttatagaaatactgattttcttatagcaataaaattcacttacaaataaacacaaaattttagattcttgtcaagaatggaattctagtctttaaaaggcagttgtaaaaagga

SEQ ID NO: 36308 - DNA, 1660 bp, Bovine  19866880754907
  misc_feature (1)..(1): n is a, c, g, or t
ntagttcttttcaggagatgctgggatcgaaatctcacggaagtaggttttgctcaagaatgaagcagagaagtagggtggaagctgaagatatagggaagagggaccatgtaacttatcatccaaaccaggacactgcctatggaagagggcacagtttattattatgcttatgtatctaaattgtattgaatggtcactcagtctgggtgggcaagagagatttctaaggaaccatctctttgtctctatgttttctgtctctgaagcaatttcttactttttatgacttaccaattcttagatctgttggtaatttgagtattttaatagactttggtatggaatatttgttcagaactttttaatagttttgctttgtctacatgcaatttatttcctcaatgaattgacagtttggatttccctatgcacacttaaaaaaaaaacttgcttttatatctagaagtttgtgcaatataaaaaatgaaattcagtgccctagagtttccattgtttaattgaaatacttttagggatgagagattcataataatggtctttggttctctgacaaaataactattatgtataatgactggtttgtgttttggctaatatagattttatctgagctctagtatttttaaaaaacagatcctaaaccctagataacttgttaatgcatttcagtaaatcatttttctattgtaaattatattttatttcaatgtattttcatttagagtacaggtgttcaatccttttttgatctcataccatgttagctaaagaaaaaagcaaccaattcatgtttataaaataattgcaaatgattatcattgtgatatatatacacatttttttaagacaacagcaattaaaaagtgagataaagatgaaatggacagtattttaaaataatgttgctattatgatggctttcttctatcattagcttgaggcactgggcctctcaactatggccaattagcttgaggcactggccaatctcaactatgattgcctacaggggcttccctgtagttcagatggtaaagaatctgcctgtagtgcaggagacctgtgttcaatcccctgggtctggaagatcctctggagaaggaaatggaaatcctttccagtattcttgcctggatagaagagcctggtgggctacagtctggggttgcagagtaggacatgactgagtgactaacactgcagtacaatattagactcttttacaatgctttttaaaaaaatcatgacactcatgcccttctgcagttacactgagtcagaggctctaggaaaggtgattggcttgttgttgtttgatctttgattctgatatatagggaagttgagatcactgttgtatatacttatgggtaaatacttcgcttcctctctcctccttcctttactctttcctttctctctctctctctcttctctcctttctctctttacttccctcctttttccttccttccaataagttctggccaggactaaaaagattatatttgaagcttgttaagagagaatcccttggactgaggaagcttgtgggctacagtctatggggttgcaaagagtcgggcacaactgaggactaaataacaaagttacttctagaagttaccagtttgtc

SEQ ID NO: 36309 - DNA, 1536 bp, Bovine  19866880836168
  misc_feature (1)..(1): n is a, c, g, or t
nccagttagaaaaatgcctccccagcattaggactttgaaatgctcaggcttctccaaaataaacaaaagttatcgtttctctttgttaaaaagaaaatgtgttaggtcattaaatgcactaaattctacttacagcccccaggttgcagttaaagagccaaataaagctatttttaggggaaaaaaaaaaactttctgggtttatgaaataaaaaagggccctccaaatccataaaatgtgacctgtttacattcattattggtggcaaaatgaatgatctgtgtagaactggaccaaaatttttcagtgtgaagagtccatatcagatttaaatgtgcatgcaaagagggggtggagaaggcgatggcaccccactccagtactcttgcctggaaaattccatggatggaggagcctggtgggctgcaatccatggggttgcatagagtcggacacgtctgagcgacttcactttcacttttcactttcatgcgttggagaaggaaatggcaacccactccagtgttcttgcctggagaatcccagggatgggggagcctggtgggctgccgtctatggggtcgcataaagtcagacgcgactgaagcgacttagcagcagcagcagcagcaaagagggggacactagtctgtccaaaggctgctctgagctgatgtactttgctctgttttccttcgcctcctggggccctgccctgccacctgtggatgctggtgtgcccccaaaacattcacacaagggggagaacgctggctatatatggcaaaggtcatcccaatttgttgctgaccagctgtagaacactagacaagtcatcttgtgctcacggcctcaagtaccaaaaaaaccagggttgaactttccactgtaatgttcctcaggtgacctcagttcagcatctgtatgcaaaatgccagtaatacctgtcctccgttacctctaccacagctgttgtgaagatgaaggggttaatgttgataaagagctttgacttctccatgaaagtattgaaaatttgttgtgttatcatcagcatttcatctgcatggaggcagctttaaagtggcatttgcttctatccttcaaatgtcaacagagattactgtgagtccatcaaacagatggaaatggcatagaaaagtgaagaaagaaaagaatatgtgaggtaggaaaggataattacttaacatcaatctcagacctcaggtgacatccacacaatctatgctgttttaggatttaccagtcaaatcagataacccttagcagactgacaaataaaaacatataaacactatgctcagaaaaaggcattaccatattgggaggactgttacaggattctgtgagggacaagatgaggagaatgacatgcgtgggcttggaaaaagacagtggcggcccccaaaaactgctttgaaggatgtaactcatttgaataagtttcgattaaatcagtctataaaccagcctatgtatgtgctctgtactcagctgcatctgactctttgca

SEQ ID NO: 36310 - DNA, 1185 bp, Bovine  19866880875494
  misc_feature (1)..(1): n is a, c, g, or t
nctttgcagctaagtgcagtcatttatgttgaaaaattgcagctgtcagagtgtccaaacacttcatgggatttgtttctaattttgcattttcattcacacattctgatgtataagcttctattacaagaaaaacacacacacacacacacacacacacacacacacacatcaagttctagaggtattttctaaattgtcataacctggtttgggtaccattcaacaaaagtaagaatgagcataatagattatcattaatggttcctttgcccctccccaaagtcaacaaagatcttaaggaggaaagaaatgttaaagagatctttatttgaatgaatttaggtgtcttaagaaaagaagaaaaaaatgacccacaaactgaaaaaagggattgattccaaaatataggaaaatatatacatactaacaaaaagtatgaaaggcaaagggaagccaaggcagttaaaccgagaactacaagttgctaaaaaaaggcaccaaaagtgcatagtttaagttctatatgtaagtgtcataactagtgtaacaggggggaaaagaatgacagataaaaacccacattagaatgaagagcctgccaactttgattctaataatccatttttggccactgcagccataaggtactggcccaaagatgctgtgttgcatactcaaaactcagtgacttaaaactatagccacttgctctgctcgtgcagctatagctcaggtaggatttggctaatcttagatgacttgtttcatagcacctgctgtgtcactgctctgcctcttaaaatagattggtacggcatctggatggccatgctcctgacgtctctctctggacttagtatagcacattcttctcagcgcagtgccagacactcaagatagaaaacagaaacatgccaagcctcccaggacccgcgttctgacttagtgcactgtcctctctgttcatgatcattggctgaaagtcacatggccacacctgagtcaagaggcagactctgctctggatgagtcctgcaactctgaaccacattttgtacccaagaaagtctctgctataggcagtaagataatctagatcagcctataaaatcttccagtgaaatattttggaggaaaaaaaaaaaaacccctctagtttttacacaactcatacatcaaaag

SEQ ID NO: 36311 - DNA, 1293 bp, Bovine  19866880982843
  misc_feature (1)..(1): n is a, c, g, or t
nctcactgagttcatacagagcttaaatctatctaagtatcaagattcacgtgccaccatacacaggatctaaaggtgtaagtatgtacacttgtacagttctgggaagctttctgatttgctgtgttaaagatgataccactcattcatctgctaatattaaatttacgtaacacaaaaattgccattaagtttggaggctgagatgaagagacagcaccacttgacataaacattgtctcagcatctacagctgcttttgggggcatgtttttatgcatatttaaagtttatagcagagcacggggatcagagtttcttttcatattcaaactttatagtaaagccacaactacacattaatatagcagctgtaatgtatttccagttaagctgtcataaagtctagggcttttcacatcatcacttttgaaggtcggcgccacaaagaaaaaagccatttgtactggatcaccatggaggttggtaatatacatggtaataaatatcacaatatatttcatttttatatgtttttgatgaagaggtaaaagtacatcttctacagttgcttttcagaaattgctcatctgttgggaacgagagtaaaagagactgaagctaaacattatttactgagacattaccactcttcacttacaccacagctgaaatgagaaggggatgccaatgatatttcatttacagtattgatttccagagctcgccctatgaaagtactgcacgtgtactcaagataaatgtgagaaaatggagatatgctgacaggcacggtttcctttgttttttatttttatcattcgaataatttatatccttttgaaacataattgaaaatgtctttcagatgtcatttcaccactttcatgtggtgcctgaggtttgtgagtgccctggaaatgtttaaatgctcacggatactggtgtgtatatacttacacatacatatttttaacacaagtgtagtttctagtcaaagctatggtttttccaatagtcagggatggatgtgagagttggactataaagaaagctgaccgctgaggaattgatgcttttgaactgtggtgttggagaagactcttgagagtcccttggactgcaaggagatccaaccagtttccatcctaaaggaaatcagtcctgaatattcattggaaggactgatgctgaagctgaaactccaatactctggccacctgatgtgaagaactgactcattggaagagatcctgatgctgggaaagattgaaggcgggaggagaagaggat

SEQ ID NO: 36312 - DNA, 1610 bp, Bovine  19866881025731
  misc_feature (1)..(1): n is a, c, g, or t
ncccatgcctgcagcctggtcatagcatcagggggctcccaatgatactgctgctgttatttacacagtggatatttttgtctgtcccttcaagttactgaatggtttttaggcgaggctgagctgcactccatggaccctgaacttgccccagtttcaagactaaagaaagagctcagagtcagcaacagagacatcagtggtaatggttgaggggatttacaggtctgaagaaggttctggagcaactccccatcctttgcaactggcggtgggagatggcagggcaggacatgacagcgatcttcgctcctggggaggaggggagattactagttataggggaattaatatcaggcgggcccattaattatcagggaaaccagcaggtgctcactgcccctttgctaagaaaatcactattcggtcctgggtcaagtatgcaggaaggtcagtcttgtgagttgggtggaggtgaagtaggcactggtctgacaggacatagagagagcaaaagaacaaccatactgaatgatctgcataccagagattgtgtagaaaatttggatgtggatggccaattaacttagggacaaccataaattcacataagaactttaggcagttgacataactcaatttgcattttgaaaagatctttacttctctgaagagaatagatttataagagtcaagaaaggattcaagagatggttatgttagtccacataaatgattgttgtgttttgatcagaggttctggaagtgaatatggagagaaatatacaaaatcaagaaataattagaagttttcattgaaaagatttaatgattaaatgtaagacattagcttcctaacaaaggccccatgcatgctcttacctcaaagctttatcatgttaccctcccactgcccagaatgcacatttatgtatacagtagatagaataatcataacccccctacacacacacacacaaagataaccacagcctagattgcaaaagctatgaatacctgacatagcaaaaggtattttgcaaatataattaagtgtcttcagctggagagattactgtgacttactcaggtggacccaatatagtcaggcatccttataagagaggcaggaggtgttatgctggaaaaagagaagaaagcatgaactgaggaacgtggctaatgtctaaaagtggaaaagacaagtatcaaaccttccctcagcctccagagggaatgaacttcaaagctacatcttgattttagcccaagaagagccagtttggacttccaactctagaactgtaagatatttgtgttgctttgagctactagtgaaagtgaaaatgaagtcactcattcgtgtcctactcctggtgaccccatagactgtagcctaccaggctcctccatccatgggattttctaggcaagagtactggagtgggttgccatagctactaaggttttggtcatttgtcacagcagccatacaaatgtattcatcaatccagttcagtcactcagtcacgtccaactctttgcaaccccatggactgtagcacaacaggcttaccctgtccatcaccaactcccagagctgctcaaac

SEQ ID NO: 36313 - DNA, 1201 bp, Bovine  19866881063226
  misc_feature (1)..(1): n is a, c, g, or t
ncatttaacaataagtggaaaaaaaaaaaacccaccaaaaacagaatggtacggattttcaaaataacccatgtgtagaaggaacatctccttaaagggaagaacaggaccactttgaagaaaggtttaaaaattctgaacacaaggtacccctattaggttacaatgagggtggtgtttttttttgttgttgttgttgtttttaaaaaacaactataatagcgtccatatttacacatatcccctatctcccacccccaatacacacaccaatatgtgaaaagaaaacttgttattattttcaccacctaagaattagaaaaatctctgcatgtatacactgataaatcttagtaagtgaagggcagctgccattagaagctgattttccttctgtggctggcaacatttagttaaattaatccgaagactctgagtccttgagtttgcaaacagaagttctgatgggccatggaaatctctctgagactctggctcaatctggataactctgccagaccaactgctcacacctggggcccccttgctgatgaaatgtctgcttcccacaggaaagcatctcccttgctgctgggctccctgcttcctcttcggccccgccctctctagactccatgtccactgtggttccctgggaccgcctcccactacctcctgtgcccttcctaccagggccatcagtaccttcgacatcaaatctaataagagatgatctttctgatatctctcggcttgaacctcttgtgagactcttgaaaacaaaatcccaatggtcacagtggcttttcactgccttgtggaaaaatattgacaaaacagaaacagtagatacgtgtttaggatcaaagcagaattcattagattatgtggctatttttagaacagaatttcagttagtgagagtctgcccactgtcttttaggaaaaaccacacttacgtcacatgttttattaataacagaaatgatgtgttatagtaagggtaataaaacagtgtcttctttgtccataaatgtacaaatgtatacggcttgcttctaataaatttcatcatgacctatttccatttttaatttcctctcactgatacacaatgttaatatttcatattagaaatagcttgcatcttactatatgaatattctaatgagtctgaaaatattagctattcttaaaagca

SEQ ID NO: 36314 - DNA, 654 bp, Bovine  19866881132859
  misc_feature (1)..(1): n is a, c, g, or t
nataggctaacgatggcatcaagtgaaattagagatttcatcagcatttttaaagctattaatgccattaacaaagaacaggtcatattgaatctattttttcaagcaagtttctagatgactcagggtaaaattggagatttataaatttattcaccagaatatttaaagctaaatccaatttcagataacactggaaagaacattaggttacaagttgcaagttctcaattcaaaatatatctttgccttcttgggcaaagtacttttttccttggccttactaaaatattggcaatttgatgacttggcttctaagattccttctcaactaaacattttgtgttcctattaggtaatctaaaatcctgcttggactcaccgttccctcaaatactgttgtgtgtgtgtgttgtctcttcagttgtgtccaactctttgtcactccatggactgtagcccacaaggatcctcggtccatgggattctccaggcaagaatactggagtgggttgtcacgccctcctccaggggatctgcccaacccagggattgaaccaaagtctcttgcatatcctgcattggcaggcaggttctttaccaatagcaccacctgggaagcttatgataaatgctcaatcaatatttgttatg

SEQ ID NO: 36315 - DNA, 646 bp, Bovine  19866881235242
  misc_feature (1)..(1): n is a, c, g, or t
nttttcttggaaatcttagtgagagaacaggtcatgccatgagagcggacttcccgatataccagaaatatatctctgacaagatttttaagcttcaggagctgtcagaggaaaatctttctgggttattagttgtttatagcctgacagtgacaaatgttcccctgagacttaggaagcgcaacagcatgagtctgacatcacagggctggatttcgtccctaacacaccctgtctgtcctctctgagaagtcaatccttaagattcagggaaggaagtgtgaagaactgtggtcatctgcaccactgtattttccctacactaagaaaatgcattcttctttttttcatttcttttggtacttctagaattttatatatgattatgtaattgtaactccatgatatagacttagaagagtggttgtgatttctaacttatgccatatatcaggaagtttctttagtgtttttatttcattataatgcaattatacaaatttgggatgccctaggagtttaaaataaggaggaaaagccatctgtttcattttaactggtccatagaagtattataaaatgcagtcttctgtgtgcccccgtcctcgtctcctccctggcaccagtattaagtgaaacagactca

SEQ ID NO: 36316 - DNA, 2087 bp, Bovine  19866881296908
  misc_feature (1)..(1): n is a, c, g, or t
naagcttattcaagcctcctaagggaggaaggatctgtagctctttggcttgagggttcccacgatgggctccacaatccataattgactagaggactcatgggacttggtatatagtcagactcacagctgtgatttattacagagagaggctgggaagcagaatcagctaaggggaaaggcattgggggagaaattctggagaaaatgagtctctagtcaaaagagtcttttcccagtggagtcacagaggatgcacttaatcagattgtaagtgtgatgcgttgccaccagggaagctcactggtgacttaatgcccaaaattttactgggggccaaacaaacaacaaccataacaagacaggttctcggtataaaccgtgttgtttgtacaaatgagtcaggcacagtgagccactgttggggaaagttgtttgtttgtcagtgtggggaactgtttgccattcaggtcctccaggaccagtccaaagggcggccttgcaaacaggctataaaaaagcattctttgagcctgatgtgttaaatctttttaggcaccctcttccactgggaactcttgactctgcttttagccaagaagccatcatttgagaccctgtgctgtgttaaaatgacatttgacttctgttaatagaagtggtgcttttcttgtttgaaatgtttaaagtttttgttcaatgccatgttgaaaggaaaggttattttacaacacctagggcagtgaagattatagcagatgagaatgtctctctgtgtttgggattgaatggagaattgttgcaaggttaaattacatttattcttttcttttgtataccatgtagaaaaacagaaagagaacacttgattattttaggcaatctgtcacctaagagtttttaagagtttaatcatgtgacattcttgctgaagaaattgtttctcatcagttgtcacttgataatttctaccttgaaaagtacaaatgtttttagaagtctggtaaataaaactgaagtagcaatctaccatagtatgccttatacaataaagaggcaagtgggaaatagttacttttgtgataacatctctacagggtaaaaaaccaattttcatacctgtatcaaggaacatagatcatttagattccaattggctttatgtaactattccccttcttagcaaatttgagaacaagtttgggctaattttagatctctatctttgattattcagagtataagtcattttgcattatgcctgctgttctcttaatctggcaggctatttcttattacagagttctggtcaatgcagtttaataaaagattatggaacctcattattaaaaatgtaatatattcaattttttaagactcttgagtgtatctccctaaatatttttgaatggtatcctaacaagatggcatcactgactcagtggacatgagtttgagaaaactctgggagatagtgaaggacagggaagcctggcatgctgcagttcatggggtcacaaagagttggacacgacttagggactgaaaaacgacatacaaaaagaaaggctgcttcagtagtggagaggggaaaatagtgtgtgggagctataattttaagacaccacaaaactcatattacatgattgctttattttaaaaaaatttccaatattctaatttgatgggatagtaaatttcatgttttcagagccaacttgaaaggtgatcttgacatcttcttgccccctcctctttacccttggttgacacctatttcccatcccaaaagtgtccttttctgtcatattgtcctttagcaccttagtcctcagttgggcaaaccacttccagtacccaccctgcttcacactccagaattatctttattttcccttccactccaatgaaaggcttttccttaatgatttgttcataattaagaaggaagtatagcaagtaaattaattcacggtaagaaattcatgatgaattatctttcctagtattacattttaaaagaagaaactttttttatcctcatacaccagtaggaatattcgtattttcagctttcctagaaaaca

SEQ ID NO: 36317 - DNA, 850 bp, Bovine  19866881307555
  misc_feature (1)..(1): n is a, c, g, or t
ngatacaaaaggtcttggaaaagctcagaacattttcagaattcctaaaatatttttcacctactaactcattttccattaattaaaattactttgcctcaaggagctgcttcaagataaactattaatatgttcgattagataagctaagttcaattctattgttttcagttttattcagttctcaagttaggctgctttgtttttctctctctctcacacacacgcattttgatttgttttaacacattaaattcacgaaaaaataggtcttatttgggagtagttgagattttgcttcatttgaaaacattgactctgcagggataaaactttctagctctaaatgctatcttaaatggatttctgcacacaacatagaaaaaaaaaaatctgagaggttagagaaggacataagaagtcatctaactcagctccttcattttacagaaattgaggttcagaaaggttaaagtcacatcaataattagtggcagagcaggcattggaaaccatctcttctaatataatttctttatattatgccttcagttcagttcagttcagtcgctcagtcatgaccaactctttgcgaccccaggaatcgcagcacgccaggcctccctgtccctcaccatctcccggagttcattcaaactcatgtccatccagtcagtgatgccacccagccatctcatcctctgtcatccccttctcctcctgcccccaatccctcccagcatcagagtcttttctgatgaatcaactctttgcgtgaggtggccaaagtactggagtttcagctttggcatcattccttccaaagaaatcccagggcgatctccttcag

SEQ ID NO: 36318 - DNA, 1038 bp, Bovine  19866881314542
  misc_feature (1)..(1): n is a, c, g, or t
ncgcgaccctcccgctgtcgtagcaccagtataggagagagaggccgctctcattctttacagcaacactgggtttgtgtcatgtacagcagctgggtgcgttctacttgttttaaattttaacaatcaggctagtgattttttatttatcattaaaagataataccccaaactgttaaggtcagaataaaatggtgcggttctagcatcccaagctagaaggaattatttttttcagtgaaaggtccacagaagacagagagctaacattatgacatagaagcaagcgtttaaggatcaacaggaggaggtgtatgtgctggacagtacggaacctcagagctttctcagcttcaaaattacaaactgttttctgggggtacatggagtgattaataagagtgatcaggactgaatttgagacatgacccacgttagttttccaactgaatttaatacagcatatttactttaaataatgacaccccaccccaccccccgccaccgtcagagtaaaactgaaatctgtcatctacagtgctccctgaatgatcagaacatgaacagtctttaaaactagcgggcctcccaggggacaggtttagagtcctgccagccaaggtggactgttcttggtgagcatgatgttgttggcaaatgaggtatgtcagaggcacagcgacggaggtcagcactggtcagttttttatggccatggtccagagcaggggatggtccgtctctacagtcacaacaccagatccgtcgtaggtgttggacgtgctgactagtgttccaaagccaagcatctgatgtgctgtaaggacgtgagaagcaaaggtttggtgagagccaacttccctccgcgtagaatgactttgttgagagttaccaaaaagcagttaagcacacacttggaattaatagacaatctgtaagtgagattctaaagctgaaagtttctataacttgctgtgaccactcctcctagagtgggctactctgtttatccatttgcggaatatgtcagtctcaaca

SEQ ID NO: 36319 - DNA, 716 bp, Bovine  19866881421246
  misc_feature (1)..(1): n is a, c, g, or t
naaaaccacgaaacctttaattttggactaactcagctcattcagttgtcccttagaaactttacatgggaactttcaataaaaatacaataagctttaaaatgttggcatgtacaaagtatcagatcaactgcctagatttcaagcttgcataaagactgaatacacttgaaattacatgtgtaggatactaatagttacggcccacaaggatcatttgcatcattctaccacgagtttgacagtgttgccattaaaaatggagaattacttttcaaccttcagtgaaaatttagcctgctatcactacatgtgggattctgacattatgagagagaacagctctttggaaaattagttgttatcttaaaagcttaagttaagatactgaacaaagataaaagaaattaaagtaattttcaaagaaaaacctgtcaatatattccaaacttcttcaagaacactcaaatttcaatttcacattataattagctttcacaattgaaagttacaattgctcacgcacaatgacgatgtgaaaggaaaagactaaaatattataatgcagcctgtgatttattgggcaagtagagctttaatgcaaaaaaaaaaagactcgaagaagaaaactgagttggaaacacaacatgggcaatatcgactcatcaagaggattcagagcccacatatgcaccagccacaactttcactgctgt

SEQ ID NO: 36320 - DNA, 1266 bp, Bovine  19866881433697
  misc_feature (1)..(1): n is a, c, g, or t
nacacagaagaaatgtgtttagtgtggtttagccatcattttccggactttaactccttttctagcattttgtttatttttctgcaccctcattcctcaagaatacgagaaatgtgttgtagaaactcaagtgaaaataatccatgtttcacaagtgtgcctttctagaaatcgtgcttaaggaaaactgggggggttcagtaatatttaacccaaaggagtgggtccactgttggagcacctgtgaaagattagtattttaagcagggaagctcctggtgtcttatgactcatatcacataatactgcctgattttaccaacattgtcatgggttaacactggccctgtttaagttcaataactgtatcaaggttgaattcaagaccacattgcttccctttgatagcaccatttttatatgctctagaatcttgcttccttaaaggcaaaatgaatgctctacctgacagtacttgctgctagcttccctttgctttttgtttttaggagagttgtaaattatgaagttagattgaagctagattgaacagagagaatatcaagagtaagacctacaatgacataataaaaaaaaatcaaatttctaatattaccaatttggaaagataccagtaaagttgaaactcttgctgacttcacagaggctctaactaagacacaattttctctgaggtgttttatgtcctttcaaacatccagaaagtcatataactttgggctgctattcaaaaatgttgagggaaaaaaaagagtttttgcacataggaaactatcaagctggtcagaagatcattgtgttatggaaactttagaaagctattacctagaaaggagcaaagtatgctttttaacgaattcaagtatcagaaaaagtgttcatcacagctgtttgataacctcaatcatgctgtgtccaggttccctttcataattagaagtgcaggaagaaaaacacgactctcccacactgcaggggatgtttcatagaacaataaagggctgctcccatatattctcagtcgacagacaataaaagagaaaattggtctactaaaaaatgatagtagggcttaggagacaagattggtggtggtggatgtgttaaacagttattttggctctaatctttctagaggacaaagaggatggagaggactttctttgccccttttatcttgttcccaaagaccccatgttgtgaaaaatcttatctaccaaaaacaagacaaaacacaaaacaaat

SEQ ID NO: 36321 - DNA, 1071 bp, Bovine  19866881565955
  misc_feature (1)..(1): n is a, c, g, or t
nctgtatgtacttattgtgtattttctggaatacataacatagaatcttactacatactgtatgtgtcatgaatgtacaagatcacgtctcttccaagtgactgtggtgtccagacatcagtcatacatcagcacctttctagttaggcttatagaaatgaatgatatttaatgtttcttagaacttggattcttttaaaaattacttgggagagaaagaaagtctcgtctgtttaaatgcttataaattggatatttttagatttgggggaaactagatgacaggtcatgttaaagctattaggacagctctccaatgtccagtgtcttgtgtataagatccaacttgaatggattttactgttgtacttttctaaaataatttctgtaaaaaatcttgttttcaaacttctaaatggttggaacatagatatgtcacgatactagaatcctcttaaacatattttaagtaatacaaatgggtttatacattcatcagcagttaggcatgattatttgaaaatatagtaagatttatggtatatcaaatctataaatatacctaactaggtatctgtcatctcttagaggtaacatgcaaaacaaggtgtgcagaaaaacttgaaacataccctttgttcatttattttgaaatgtgacattagagtgacttattcatgagaatttcataatatattagtaagcgtgctgcaggatattttggaaaagtaatgcaggcttagtgatgcaaaatatttctcctgccttctgttctaagagataaatgaggtgaggctttcttttcagttcaagatgtcagctcttcctatctataatctcatttatcacttcatcctacacattcatatagttgttttttcttttaggaatctgttccagctcttctactagactcccaggtccccttgtagacagacccagccagggttttatcatctgtgtgcaaggccccccagcagagtgcccactgaaaagtgtgtgcccgtgacaaaaagaacaggagtttgccaattgatgagggagaaagagggagaggcaaaaggatgcagg

SEQ ID NO: 36322 - DNA, 1434 bp, Bovine  19866881746589
  misc_feature (1)..(1): n is a, c, g, or t
ncagatagtgaattatacctctcagaaatcaattacatttcaggacaacactaatactacacatatttttattaggaaataaaaccacaggatatggatagtaataaaactggaattattctactggcaaagtccataaaagtaaccaataatttcaaaatcaaacagaaaaacatatccagggtctgatactgaacaatattagcagtaatattttccccaagttcacattaatttcctctctccatttctgatatatggctcatatttgaaaacccgcgtgtcatttgcttactccccaggttgggaatgctgggaaactttctcacattatgctagagtcattgtcttaattctcctccctcttaattgattaatgagtgaggagtgaaggaaacaatgttagagaaatttcattaggtataaattgcaagacatttgtttgaatgaatataatatctcagctctgtcttgatgggccttgtgggaatgctttaagtattactgtaagtgccagaccaagcactgaacaatttaatggtgccattcgagcatggccttgtattcggtttttgtttcaaaacgttcttggggaaaacttcactgcctgataatagggaaccaaagaattctttcaagtttatgtgttgccaataatatttctgaagggagtcatttaaggtaaaacaacaaaaagtctctttttaaagcttaagccattctaatttacctcttctataaaaagaaaacctaaatgtttcaagcagtatctgaccagccacatgaccagtgatctgagtagatccaccaagtgacttgtgacttgtaataatacttgcagtgacccaagatttcctcaattatttttcactgtcacaaatttatgttactagttaaacaaatattgattttttttaacagatttaaggtatgtaaaagaacaatagaggataaagaataatatacacttactttttcccatctaacattgacacaccttaatattttacctcaaatctcttttagcatttttctcttaaataaaacattatagattaagctacactatccacaattctgaccatggaataaattctttgatgtttacacttccattctttaacaacaaacacatacatgcacatgttctgtaattgtgttctgtatatatgtacgtctgtattatacaattatactatatatatttcatatttgctttttataatttggcatcatgttaagctcaaaccatgtgtgtttatatagatatatataaaatatagatagatcattctagtttattctttttaattaatacaaatatttcatcataaggatactgcaatttgttcattcttgcttttatgtacaattagtttcccctctttatgtggctattaaaaatacactgcagcaaacttcctgaatatgtct

SEQ ID NO: 36323 - DNA, 820 bp, Bovine  19866881845178
  misc_feature (1)..(1): n is a, c, g, or t
nttctttctaggagccctgctgacacaattaggaagaactagagatattttgaaacaaatgtctggccagttcatcagaatttgaaaggacccggatgaaaacagatctcctccagtgcatgggaacctgtggcaggctttgaagctggttagctgcagctgccatgagctcccatcagaagcttttttgaaaacatttccagcctaagacaattggtttactgtctggagctcccattatttccaaggacccgttctagccagtggtgaacttcctcctggatctggtagtgacctcatcttgccagggctgataccaagacatgtcgagctctctgcacagtgagcaggcagcggacgttgtggttgttcagtcactgagtatctgactctttgtgactccacggactgcaacatgccagactgccctgtccttcaccatattgcttcctttatcttagcagttgaacaggtgagaatcataagatacacgagaaccgtcggtgtactttagaacattctcagagctgctgtggagaaggaaatggcaacccactgcagtattcttgcctagagaatcctgtggatggaggagcctggtgggctgctgtccatggggtcgtacagggtcagacacgactggagcgacttagcgttcatgcatgcattggagaaggaaatggcaacccactccagtgttcttggctggagaatcccagggacaggggagcctgatgggctgccgtctatggggtcacacagagtcggacacgactgaagcgacttagcagcagcagcaaagccgctgtattctacaaca

SEQ ID NO: 36324 - DNA, 1308 bp, Bovine  19866880382484
  misc_feature (1)..(1): n is a, c, g, or t
ncctctgttgttcccttctcctcctgccttcaatctttcccagcttcagggtcttttcaaatgagtcagcttttcacatcaggtggccaaagtattggagtttcagcttcagcatcagtccttccaatgaatattcaggactgatttcctttaggatggactggttggatcttgctgtccaagggactctcaagagccttctccaacaccacagttcaaaagcatcaattctttggtgctcagctttctttatagtccaactctcacaagtggtcttttgttctgggtttattgcctttctcctaaaagttacagctaattcatctaaacagtcttttctctcccctccaccggacctgggttcctggtgtcaataaagatggaagaacagaagagactcaaagaatggaacaagaataaactctgtagccaaaacaaagatagcagccatccaaacacaagtcaaacttgtgtttcagttgacttcgtcctacatagagagatacccctcaaaacctctcttcttcctccaactgccaatattgttatttcagagcagctggcactgggtctctggcagccctgttcaggcctcagaagccactggggatgggagaagggagacacagcaggagaggtgggggccatctttcttccttcatcagggaaaaagcttggacaaaaggcagcagaacttagacaaggctttctccttttcatgtccagggtagcaccaagtcaggtcccaaggtgagactcaagctcatagctatgaaaactagatccaggtagcagagtgaactcatggggggagagcaccatctctgatcttgccacgcatgctcactttactcaggaaaagtgaaccaagggtcctggatggtactttaccctccccattctgaaccaaaggagtttagaggctgcccttacaaacctctaggtccctggacctacctctctgctgtccaagataagctaagacatctagtaagtgatgaataaatggatgaatcaatagttgcctctgggtctttcaggctgcatggtccacccagggttagatctttctgagtaagtccctagctggtgaggataaaggctgttcctctcaaccattccgtggaggcagctgatcttatcaagccttatagctaaataagcctcatctagggacactctgtaacccctgagccgatcctagtccacccactcaggacatgtttcctctactgggccgtccaacctagccctgcccttcccagcctggttaccccttcatccctatacctgctggcacatacccag

SEQ ID NO: 36325 - DNA, 1134 bp, Bovine  19866880461854
  misc_feature (1)..(1): n is a, c, g, or t
nctccttggccgcttcgtcctgtggtcagtcaggcaggggataatcagagagaggtgagggagggaacaccgtcacacctctccttcaccacgtgcaccacctcccacccctgcagaggaagctcttgctaaagtgtacacgaacgttaaaacatgccttctgaaaaatctaaaaggacaaataagtattgcaacagaagcggcctgactgctggctctcacacacactcagcgggaggcctcgtccagggcggggagcacatgcaaaggcagggaaacttggggagtgtgctcctcacaccccttggaccccagcgcccctgagccgggccagcgctgagggctgttcttcagggcagagagaggaggttcggtgtttgtaccaggtcgtcgctcagcgtcttcatcgtgggctccataaccacatccttcactgccaccatctgctcctcgatggccttctcctgcacttcattaaacagctacaaaagaccaaggccgagaagcagaagatgaaggagcagccgagacccagccactagttactaaaccatttagcacacgctccgcgtggtttaggagtccatgcactcgtggaggagcaggaaaacagagtggagacaaggcacactccaatcaggggtgcctctgggagagaatgttacagctgaagccccctatttctgcgtgtgtgtgagagagagaagatccgaggcaatcagaaccaaatgttaacatttctgcatctttgggcagaaaatgggccaaaaccctgccctcggctgaggttaccttcacaaccttgcggatgattcggttgaaaagtcccatcaattggcccgagggcagctcgatctccttttccagctggtccacagacttgtgctgcaggccaatccccaagagaagagcctggggacaggaaatctgttggagtggctgccagaacaggcttttatccattaaaatggcactgagaaccagagttactctcccttggtcaaaacgttgactggcactactgggaaatcttcccgctcatccaccaggaagcacgccttcctcctgaaatccccagactaacttcttatcccggcaaacagccgcttcacagctgtgtgacaatacagggtg

SEQ ID NO: 36326 - DNA, 1444 bp, Bovine  19866880464263
  misc_feature (1)..(1): n is a, c, g, or t
ngtaacagggtgcccttgatgggtttcaagtaggagagtgatgtaatcagacttgtctgatggcttcagaacgatttaccccattagcgcctttcccgggggggaaagcctgtcccctggagaggaaagtatgaagagaaaggattggaattgcacccgccccttcagagcactgtctgctcaaactttccctgacctgtccaccatctgaacaaaggccccacggccagctggagaggggccttgttgattactcacaattccctttccaagaggacaggcgttgatatgttttctcttgataacactggctcctttcgagcaataggacttcctgtctgatcagagagcaattactgcacctccaaagagaaaacactttaaataaatccagttttagccctccgtccttgataatggagacgtttgctcactaatcaaccactggccctgagtttaaggaggagtgggcatttaggacaccctgtaaaccaaatcaatgtttccggatttgtttggtacaagagtccaatggccaaaggagcctttccccagggaatctggacccctctatgccagcctgggcatggagcttctggttttcctgcccccaatcctttcagtatctggggccagggacctgtgaagatcaaggccaagatttggtccgcctggggcaagtccaagcttattcaggtcaaactctgtgcggcttgaactgtttacattagggggtcacgaggaaatttgcatgaaggaaggttgtcaccccaatagtcatcattaaatactgcatttttccccaccttgggagaatttattttttttttttgaattttttacaatttgttgcttctgttttatgttttttttttaatttttattttatttttaaactttacaaaattgtattagttttgccaaatatcaaaatgaatccgccacaggtatacatgtgttccctatcctgaaccctccaccctgggagaatttaaaaatggaaaattctacccctaaatgagcattcctactagagatcattagttggcttaactgtcttctttccagtatctgctgggctatgcctcaccccttgcttgctcttttaagaccatcagaaggataagaagtggacaataatgttagttaacctttatatagcacttgcagtgtgccagatactgcaccaagcacttctcatatacttagttgtgtggttttcccaaacacctctgtgacatgggtactctgtgacagaaacttgctctctctcttttttttttttcttggctgtaccacacagcttgtgggatcttagtttccccaaccagggattgaacctgggtccttggcagtgaaagcctagatccctaaccactggaccaccagagaatttccaagaaactttctaaagttcgaatagctgatacaggcagagccagat

SEQ ID NO: 36327 - DNA, 910 bp, Bovine  19866880516985
  misc_feature (1)..(1): n is a, c, g, or t
ngcctggaaaatccatggatggaggagccggtaggccgcagtccatggggtcgctaagagtcggatacgactgagcgacttcactttcacttttcactttcatgcactggagaaggaaatggcaacccactccagtgttcttgcctggagaatcccagggacgggggagcctggtgggctgccgtctatggggtcgcacagagtcggacaccactgaagtgacttagcatgtgttaaataaagatactatcgccaccttgcggccaattgatccttgaccattaggaatgtgatgaaattgcaattagttgagcctgcctggaaatagggaaggtaaagagtctagttaattttcttctgctgcttaatgaaaggtcaagccaagtctctttctgtccacttttcatggctaccaatctttatgaacataatattttgtatcggcctggttcctgggcaatccctgaagatgttttagttttctttttctttctttctcatttttttaaaaatggactcaacttacttccttggtactcactctgcttttcctccaatctctgattctagcgtgctagaacttctaggtatggaaaggtctggttagtagaggatctgggttaacagttgtagttaataaaatatcgccacgtgagtcctatggtggggcaggacctcagaggtcatttggtcccaatccctcgcccctgtccttgaggccccacgctctggacactgaccttgtgagcggatgctctggaggataaagtacagatactccccacagacgccggccgcctccatgaactcctcctgtgtcatgccgcacagctgcaggccactgatgttgaaatggcagaaagaaatgcagtttggcgtccagcttgtactggtcacagcagaactggag

SEQ ID NO: 36328 - DNA, 1084 bp, Bovine  19866880591879
  misc_feature (1)..(1): n is a, c, g, or t
naatgagtataggaaaactctttgatttgaaataaatccaatggtttatatgtttcatagacttttgtatgaaaattaaaattgtaaacattttgcagtgtgtttgtgaactcaaatagttgagatttcactactcacaaggtaattatactagctaacacattaaactggttttagaaaagactgttttgtggttataagggtagatagtgggagaaaagcaaaaggaacaaaacagaacttaacattgaatattttcatcatcatttctaacttgctttcttgttttcttttatactaaccatgaatctggttactgccagctgttgctatgtcagtcgaagactcagccagctatcaagtcatgatccgctgtggagaagacattgcaaaaaatactggctgatatccgagtgagtatttgggaaacatgtattcttgaaattgggctcttggctttcattagtgctagtctgtcttgattctcctctctaagccttgtctctttaacacctttgatggctcttcttgtgcctgccagtaaacgcaggtgttctccaagcttctgttcttggctaactgctcttctccctctgtgaagtctcctgcatgcactgctgcaatttgtagagatgccttgtatacttctaactcccaaacctgagtgtccacgccagacattgccactgaaccccagatttgtttgcataactgtctgctagactttccactggatgacccacagggttcaccaaattcagtaaattttaattaatttgatagaataaaagtgtacatgacagaaggtgggagttggaaaaggtgaaagaaagggtaggattgctaatatctttttcttaggttgaggggagtcaggtggtaactgaagttgatgaagcaagaaacagaggtttaaaaatattatttaaagctaagctattgagtagaactaaaaataacagagcctctaaacattggaaggagaaagaatgaggaagaaggaattttaagtattgcttcatcctgaccttttattgtttggggtatcagtagatagatataaaattcataaatcaaaaactag

SEQ ID NO: 36329 - DNA, 1294 bp, Bovine  19866880596914
  misc_feature (1)..(1): n is a, c, g, or t
nttcgtatcagaagcaaatgcctctggttccccaatttgaaaaatgacttaccactcccattccggtcttaggattcctctttggtggctacacttcaagtttcactgaattattttccctttgttttatgtccctttgtgacaggacaaagatgagtcatattccacatttgccatgtaatcagtatttggcagtacccatatgtatgagaagacattttcaaagatgaaatatgtaaagtgtcatagaagaatggcatggtgaaaccaagaccaaaatgtgggttttagcaccccagagctgacttttagtcctaaggctgtagcctgggtttatcaccagggagaagaattttcagaaggccagaagaaagtggctcctcactttctgagcacagtcaggagtgatgctatgctatgctaagtcacttcagtcgtgtccgactctgtgtgaccccagagatggcagcacaccaggctcccccgtccctgggattctccaggcaagaacactggagtgggttgccatttccttctccaatgcatgaaagtgaaaagtgaaatcgaagtggctcagtcgtgtccgactcctagcgaccccatggactgcagcccaccaggctcctccatccatgggattttccaggcaagtgtactggagtggggtgccattgccttctcctagtcaggagtgaagctctctataaacatcttaaatgaccatgtctgtcttcacaggtgtgaaatcccaactagcagaggaccctctgatttgtgaaggttccaggttaaactttgaaatatcagccccccaaaccccctcctcctccattttgtttgcaaatgataagacagatgtctggagaggaggagtgaccccatcaagaacactcagagcactgcatgcagcagagatgacgccagcccctgggtccggggccgggctctgctggccccctctgcctcttctctgccaggctcagtgcttgccacgcctgcgtgagaggggagtcaccgtgagaagggacaaagatgccaattttcaacaatctttccttgctccagaagtgtgtccacctggtaagaggaaagagtttagagggagaggatactcttgcccggctatctgagagggccatttggaaaggctgcccatgggagtacagtttctcctggctacagccagagttcatttggcttcttgacaaaccttcggacagaggaaagagagctcacctttggaacttctgtgaggcagaaatattcacagctaacactgtgttcaaatatttaa

SEQ ID NO: 36330 - DNA, 1221 bp, Bovine  19866880601514
  misc_feature (1)..(1): n is a, c, g, or t
ncccttttctggcttcatttaatgcatcagcacttttcactaacatactctgcatttcatgactttgtgtttcttagcatctgtctcctcctctagcatgttacctcatgaaggcaaggatttctactggagtgtggcacacaggatgccctaatacaagtctcagtgatcattatccctagctctctatcaagctgatttctctggacgttcgtcccagccctgcaccatctgggacagcctccagctttccagtgaggggaagctgaatgcccgttacaaatgatttacaaggggtgcctgggaagtctctgagttggccatctacgtagacggcagagtgtgattcgggaggaacccgcttcttagaaacacagctgagtgggcgggtctcaggcctgggacagaacagactgaaccaccggttaccgcagtcgcacatcactgtggactcgggtcctgagcctgcctggcggagcactcggaacgcacctggtcatccatggtgttcaccccgtcggggcccagggcttcgatcgcctggctgatgaggtcggtccttccgcagttgagcatgcggaagcccaggtcctggttgaatttttcagtagccgctcgggcatccagcctccggaaggaactgaaacagcattcgggtctgcgcagaggagaccaggtgttcaagtctggttgtttctgctaggacatggcctcgctacaagaggtgactctgctgtgctaggccgatgtgaggcgtgagcatggtgtggacggggaggacagggaattaccatctaatcggctgtgactggccatgtcatgctgggtgacaggaagagcacacgcttcggcttttctataaacatgctaaagaagtgctctgagctcttgggagctgtcaacgatcagaaatgaaatcccccacaaaatgatctctcaggggactttctgaggtggaagaagctctggttggggtttgggccacacagagtactcggctgtgtattttttttggacagagtaggctgtacttgttctcaagaatggtcattgaggccaagttccagtcctcgatgctccatcctctcccctccgtgcttcctggtgaggcccggaagcaccaaagaaacggcagagagtggaccagactcccaggtgcagccaagccatcctaccaaggacagccaggtctgcagagggtgagccacgggctttcgatag

SEQ ID NO: 36331 - DNA, 1177 bp, Bovine  19866880605207
  misc_feature (1)..(1): n is a, c, g, or t
ntgagatttttccaggcaaggatactggagtgggtcaccatttccttttccaggggatcttccccaacccggggatcgaacccggggtctcctgcactgcaggcagactctttatcgaacccgggtctcctgcactgcaggcagattctttaccaactgagctacaagggaagcccctaaaaggccctagcaacacaatatttcagatgagagtttgcagctggaacagacttttccaaagaaaagacaaactttattacaagcgtgagtagagaaaaatttgttttctagaaaaattaaaatgttacaggtattaatgtagatagcagccagaaactggagttatctctctgtcaccacttagctagacaaaccaacaagctgccaccaacttcaagaaagctgcatgtctacaaggatccctgacaacacagggtacagtcaccaaactgctagaatccaatggttaatcaaacaaaacaaaacgaatctctcctacctatccttaagagggcgactttgcctcctctgcaaatacatatggtggcccaagaaagaggcatgccaccagctgtcaagggtgtaaacagcgccatttcttccaccattccaggcagtcccaagcgctgaaggaacctggcatttaaccacccctaccagcaaccggtgtttatttttggaacagacgcgggcaacttgggaaacccaaagcatacaggagggaagatggtcacctgtatcgcaacaccggaagtcagtaccaaaacaaaatccaacatgcaaccgtgaggaagaaggctgaaaacgaaacaattatacagcagagaagattgaaagtgagcctgccagatataacgttgccgcagaagtcgcacccaggggtgagggggtcgcccggctcctctcccgcgtcccactggcccactttggcgcccgactccgaaggcctccggcccaggcagagagaagagggctctgccgccgggacggagactttttcaaagcggccaaggctgcccgggatcgggcagagacgcccgggggtcccggaggtgcgggccgcgggcgtccgcgggccggcagcggggagtagtatctccccgcttccaactgggcctcgctgaggcccgggagagagggctcttgtcgctcctcaggcctgggccccggacgcgag

SEQ ID NO: 36332 - DNA, 2620 bp, Bovine  19866880622774
  misc_feature (1)..(1): n is a, c, g, or t
ncatgtacggatgtgagagttggactgtgaagaaagctgagcgccgaagaattgatgcttttgaactgttgtgtctgagaagactcttgagagtcccttggactgcaaggagatccaaaccagtccattctaaaggagatcagtcctgggtgttctttggaaggaatgatgctaaagctgaaactccaatactttggccacctcatgcgaagagttgactcattggaaaagactctgatgctgggcgggattgggggcaggaggagaaggggacgacagaggaagagatggctggatggcatcaccgactcgatggacgtgagtttgagtgaactccgggagttggtgatggacagagaggcctggcgtgctgcaattcatgcggtcgcaaagagtcggacacgactaagcgactgaactgactgactgaatagtcctgaaaactgtgacttaaaatagggatctgcaaactatagtccctgaaccaagtggccctccgtctgcttttgtaaatagtttggggaggtgggggacacagccacatccattcttgtacatatttttttacggcctctcatgccacagaaccgcagagtagaggaatagtgatagagacattatgacgtgcaaaacctaaaatactgtctcatcctttacagaagaacttttccaaactctggcttaaaacaaatgacccatacccatcatggttcagcagagggctctgctcacagcactcagattcaagctgatagagaaaccatgtctcaactattgctaattactatgccacgaggagaaggaaatggcaacccactccagtgttcttgcctggagaatcccagggacgggggagcctggtgggctgccgtctctggggtcgcacagagtcggacacgactgaagcgacttagcagcagcagcagcagcatgccacgaggagaaagagcttgagggtttctcaagcagttggatactccagagagtagacttgggtcctgtgtgctcacacctcattagctaaaaagaatcacatgaccccatccaaccaagagatgctatcctatcagatgcccaaaaggaagccaggtgaaccagaaatacttggtagacataatagctgttgtgttctcacttccaacagtgttatcccagtcccatgtccttggttttctgacattcttgtagttgtttattcaggtcagcaggtccagaaagataaagcagtgtctttaacctcactcagcccaaagccaccatcccagcaaaccaaatttgcctatatcccacctgccaaaaaggcaactgaagctacatttatgtgaatttttaatactttgtctttttgccttttcttctgctgaagagccacgtggtacttggagttatagtatcactgaagaaataggaaaattaaagggttttcccggtaagccagtgggagagcagaatatgtctataaatggaaatactttctccaaaaaccctggtattaaagttatacccaatattaatatgttttaaaaacacagatctcccaagttgaagttcatttgtttaattcattagacaatagcactctgacatctccacagtctagagaagtgaataattgaaccacttaccctgatcattttggcaaaatagttcagctgcttcaactcacatcacccagtaagctaatgtttcaagcttctttgttgcagaagagaacttttgtctgaattattttaactgattttctgtgtcaagttgacggaaacctggccaagtgtgaaccaccctgctcacacagctaggattcttatttttcagtcatcttattacaagtcagaagtagacatttctatcataatttttgcagtacattctttttttatgataatataatttgtctgtgtccctgaactctgagctcttcaatggaagaaaacattttcatctctgtatctgcagaagcaataacatgcctggcacaaatattttgtcaataagtattgcctactagtatgtcattgtatcactgcaacatctatcactggtccatactgctcttttccctcttctattgtgataatcttcttttccacttacattttctgatgtccgctttttcttaattgtaatgttatgtttcaaaatccgcttcttatttaacagaggtacaatgtgtccagaatagtttttttcagatttcacaaaatagtgttgtttcttattgaacactcctagacgcgacactgttttcaacataaaaagcaaaaatactttgaccacaggcattaaaatattctgtatggccacttaagtgaattgtacattcttttaacttgatatttctatttcaatggttctcaacttgtaatattgcccccctaaagatatttggcaatgtctggagtataagttgtcacagcttgaggtggaggtgctactgacatctagtgggtggagcccacggatgcttctgaatatcccgcagtattatcaaagtccaaatgccaataatggggaagttggcaactctgttctattttatgagacttaaaatgcagtcgtttttgcagtgctttacaagtaaaaatatgaaagacatggcagaaaaaaatccttagaaagt

SEQ ID NO: 36333 - DNA, 1251 bp, Bovine  19866880677156
  misc_feature (1)..(1): n is a, c, g, or t
ntgctgtactgctactactaatagtagctatatactatagtagctagggcttattgaacatttaaaatgtgctgcctcttttctcatagttttaaatccattatctcagtcaatactcacaactgctctgtaaggcattatgtcatttagcagatggttcatctgcggctccaagaggttgtgtcacttgttcaagctcacacagttttgaaagaactgaaactagcagagaattcaaactctgagtgtctagcaacaaaccctgggcactttctgctgagatggggtgctttgccacagaggaagatgccctcagctcatcctcagccccagccccatcctatacatcgtcacagcattctccctgtgccacctggggcctcacacctttaccagtttctcctggatttcaaagttctctgcgtccattcaatcatgtagggaccctgattgaaacatgtttctcttttgccagagcaacctgaagtcatctctcttctcaatatatttaagaattctttttagaataaaggggagaagtccgttatcatttttccatacctacagtatattcaggtaggaatatttagggccagttttatctatgatatactcttttagccattaaaatagatttatgtgtgctaagttgcttcagttgtgtccaactctttgtgatcctatggagtgtagcccgccaggctcctctgtccctaggatcctccaggcaagtatactggagtgggttgctgtaccctcctccagggtatcttccccgatcgagggatcaaacccaggcatcataaaaggagtatttatatattcaagcaaatatattaatctatacatgcaaatacatgaatatatttgcatacacatatgaatattccttgtatgattcaataaaacaatttttagtttatattttagaaataaaccaatccacagtgctttgtgcttcatctggattagaactgaattagttcaaaaagtagtgttttcttctgttgggagggtgaagatacactggaagccaccagggccacagagcagatcataagcagggcttcgcttgcattccctgctcccagccctaggggactgagagtcaaagccacaatctgccttcttcccagatccttgattcattcaaccacatcatccccaaactgcctcagaatactgtctcatgtgggtatttttactcctcaagcccaaggagcaattaggcattttaaataatcacttttg

SEQ ID NO: 36334 - DNA, 1367 bp, Bovine  19866880692567
  misc_feature (1)..(1): n is a, c, g, or t
ncctgtgctcttggccacaactgcttaagatacctctaaacagcttgcttccttcttacaatttaaatgatgaattttgtctttgtgtttacattcaactttatcataaacttgaggatcacagatcataactgccaaaacattcccagggaaccgagagtccggatccctgagggttcccagatggctctggcgggtccgagatgccgaggccatccagagtgattagggcagagtaaggggctcatccatcaaggagaggcactttgctgctgatgtggattcgtttatcccccttcctcctctttgtctctttatcctgcctcccgctcccagccctgcacacaggcctgatgtatcggcatctcaatcacttctgcttcccctagagatcaaggcccggccttgggccctgaggcctcccagagtaaatcagtaaattgggaggaggggggcagagaagggatcaaaagaaagtggggtcctctctgctgccagctacctgtcatgtgccgcttctcccgggcgcgggggaggaagagaaggagctggcctgagggaaatctggaggggaaaggtccttctccagccctagaaattaggtctctgaaacccatcagacgaagaaacccaagtcagggagaattctgttcttaaaaagcatattaaactgaatcctgtgttttccaccctttacacgaggccaaggtggaaggcaagcgtgaattttctaaacttcaactgtcagagctaaggaaggaggaaatttccacattttctcagctgtttcaaaaatgtatttttaagcattcagatgaagtgattgttccaaaggacctcttctttcaagggatataccttgctctattttgattatttttcctccccctttttctccagcctctgtctttttccactttcccctctcccaacaagagtctccaggggtttcccaactggaagctctcctctccatggcagagcagtctcctagccctcatctctccctgcagctcctctttcccctcctggagatggacctgccctgggtctgggcagctgagaagacaggtgctgcgtttgcctcgaccaaaccgctctctcttggtttagggctttgctacctggaaagttcatgtcaaggggagacgagttgcactctgccttcctgtctttgttatctggggcacaaagactgttaagttagctaatggctggcctcttgcggctgattagtgctgttaaccagcctgagcagtctgaatcaggacaagctttgtggcaattagtgatggatggcctgttgctgcttcctaggggttgtgtcagcaggacccatgacttgtggctcaccagctttggggcct

SEQ ID NO: 36335 - DNA, 1832 bp, Bovine  19866880695201
  misc_feature (1)..(1): n is a, c, g, or t
ncgaggcctaagcgtccttaatcgagggacagctgtcagcagagttcagtgtctcccaggaagaggtctgccttagcatctgcactgttttctgtcatctgggaagtgtggcctctgagtagacagtccaagaagctcgttcagagcaagcagctggggcttcccgagcttggaggtctgcgaggtgcattctttgggccataatcctctctaagcagcctgtgtgctctcctgtccgttgttctaagaaccctggagctctgccagcagacccagagccacgtcgacatgaggggtctggccgggcactgtcccgcaggctggcctcctgactggcctgcgtgtagcagctgctctcgggcactccccgatggcaaagctggcaggatgtttgtgctcatttaacacattgggatcaaatgtttcctgtcactcctatttttggctgtgctttggtcttcagagaagggaagtgggggcttcagtttccctgctgtcgtctttgtttgaagtgaagccaaacaaaagaggccctaccctgattacatctgtcctgtctttcctggttcccccctccccaggctggagaccctgcatgcacacgtccgcacatccacatatagggatttgtatgcctttgagttctggatgggtctgggcttaggaaagcctaggtttgagtttcctggatgtataaccctgggcaaacgaccatctccaccagccttgacattcttatctataaaggtgggataataaaacttacctcttagggtcattgtgaagatttcataagacaaggcacacaaagtctttaacacgcatcttggagcatagtgtgtgtatacgtgtgtgtgtgtgcgtgcgtgcaaatacacttagttgagtgtgcacacgcactcagttactcagtcacatccagctctttgcaacctcatggactgtagcctgccagactcctgtgtccatggaattttccaggaaagaatactggagtgggtttcctactccagggggatcttcccaatccagggattgaacccgcatctcttgcatctcctgcattggcacatggattctttaccactgtaccacctgggaacctccttggagcatagtacgtgctcaataaatgatactcattcatggtgtcacctactaaacacctgctatcagtatcatcattcctgccttccattgtatcttctcgtgagaacagaggtatcagaaatttctcctgttctcaagaagcatacagactagactaagaacatagagaaaaacagaaacagagaacgaaaacttgcctggggaaagaatgggaggaagagatagttagggagttcgggatggacatgtccttgctgtatatttaaaatgagtaaccaaggacctatgcatagcacagggaattctgctcaatgttacatggcagcctggataggagggaagtttgatggagaatgaatgcttgtttacgtatggctgagtccctttgctgcccacctgaaactgttataacattgttaatcggctatattccaacacaaaacaaaaagttaaaaaaagagaacacacagaaagttgctagacagtggggctggcttgggaaattttgtcacaatcaggactgtctcattcattttgtgacttctattggagctccctctgatgtctgtatattcagtctcctgagctcatggataatgtcttagacccaacacaccataatgtgtagagacggtgctcctgggcgtggtgagtgtactttccacacactgagaaaagtagaaaagagagtactggttgggagtatataaagctagaggaag

SEQ ID NO: 36336 - DNA, 2017 bp, Bovine  19866880736662
  misc_feature (1)..(1): n is a, c, g, or t
ncatttatccccattagatcatagactaggaaaggtgattaaagcaaatgtctttgttctcattactctttatttgtgcatagaacctgtttcttcacgggaggggaattattgaatggagaagtatgcttttaaagcagattctccattgttgctgtatactttctagttgagacatggttcatgggagggctactatatatttgctatttaagaaaagaacaacttgttaatcagattttgctatccattcttaaaacacataggtgctcacctgagcatgcacacaaatccttgtaaggacttgaattcaggtgtaaattattgccctaattttactagagttgaatcctaagagctttacagtcttgttgatcatgagagaggaagtaatatgaaagatgaatatgaagatttctgaatcctaaacttgcagcattacgtatactactgttgcttttctttctttccccattataaaaggttgtgaaatatttgcctacatacttcggctgtcagttgtttcatcctgtgactcaagacaacagaagtttgagtctcttaatgcaagttttatgagtatctaaacagcctttttgacagtaatgcaatcttatgttcgtgggatgctgtcaatagactccttggtataatactgatcccttggggctaaggaatgaaactcaagagatgacacactgattaaaatacatgcttatcaagacccatattttatttaattgttgtggaccaggaagagccaaaaaattaggggtttgctttttttttttaattaagtctttattgaatttgttacaatattgcttatgttgtttatgtcctggtttcttggccatagggcatatgggatcttagctccccgaccagggatcgaacctgcaccctctgcattggaaggcgaagtgttaaccactggaccagcagggaagtctctatttgccattaatattcttgtggtacatcagaatgcacaagattctgaaagaagagttcatacgtggcattaaaaaagaagagatttgtctattctctcaggaagagagagagataatgcctgagaaataaatacactcacatgttctctttaaaagcccagtgtcaccttggttagtggcaagtagttcttagtgcccaataccctacctccttacacatagttacactttagcttcatcactcccttcatcacatccttcatcacttcatcacttcattactgtggctcagacagtaaagaaactgcctgtaatatgggaaacatgggttcagtccctgggttgggaggatcctctggagaagggaatggctacccactctaggattcttgccaggagaattcaatggacagaggagcctgacgggctacagtccatagggttgcaaagagtctgacacgactgaacaactcatactttgttttactagcttcattgtcttcaaggttcccatcagctgtttcagtaagtcctccagacattcattcattccttattacttgccaggacctaggctcaggactgtagcaatcaagacagggtgctgttcctacttggatgcaatcactctttagaaggtgagagatacacttcctgtttgcttggggagaagcaaatccacatggccctgaagtctcattttctccctcgttttcagggtttagcaactagctgcatcagcagatctgagtgtgctgggaggcagaacaggcagttgccagacactgagttttagaggctcttgctaaatgctgtaaatggtggcctcgcatgtcccacgcgcccccaccaaccccaccatatgtaaagcatcatagtttagggtccctctgtattgaccactctctgggatgtgtccagtcttctgcctcccagtgggacagtgaaagctgtgaactgagatggggaggaagatgggagtgggtctggaagtagggcatttttgtgtattttcctccttttctctgcttgtagacccataccaacattctgtatttata

SEQ ID NO: 36337 - DNA, 1214 bp, Bovine  19866880755296
  misc_feature (1)..(1): n is a, c, g, or t
nactggtgctgagttttccagagttcacctttaggtttaatttcctgaaattgatctgcttggttactctggctttactctcttgcaaaggagggaaatggcaatgaacaggctgcattttgttacatctttacttcaaaacaattaagcagccagtcatgatcttaactccttcttttaggggtgtattcatactctgggtctgggatggaactgatatgaactttaattaaacaaatcaccaaaatgcctgtgaggtggcattcctagtggagatttcatgttcaccccccactgctttgttggtctgtttttttttttttttccctctggtggcccctctctccatctaaatcttcaccctgcttggagctgcctgggaattgggtgagccagtcctgagttcagaggtgctgctgccaactggagggaagagaggcagcccagggccagctccccaagctggagccccaccagcaggcccaagactgtcaaggattccaaagagagatgaattccagcccagtattcactgtgaggtttgctttttttaccatttcttttttttaatcatctttttaaagagaatttggttctggcaacaagcatgttgcacttcatcagcctttgatcttgccctgggtcctctggcccctggctccctgggcagtcataaaccgttactattttcacagtttaatgggaagctcccagccctctgggcctctcttaaccagaagaccaccttcagccctggtggcgttctgataacttagagtggggtgttaaccagagcatggctatgtttgcttttaatttcctgaccttgaggaagaaggggaaagggcagtcctaattggactggtaagcagtgaagaaatctcctgtccctgagcttgtggacagagccccatgggagaggcagtgtggactcgaaggatgggcaggctgagtctgaatcccacttctgccactaacttggtgaccttagccaagtgaccagtgccatccaaaccacagtgtccctcactggttaaaaggggcgagtaacagtactggccgacagtgatgagaccactcccagggtcttcacaggggctcaaatgctgcttcatctgactggtagtgctgcccgtgcggggtcagccatctccattactaactcgtgggtcaaacctgcttcccaaactcaacggggacccccactcttctct

SEQ ID NO: 36338 - DNA, 1750 bp, Bovine  19866880783126
  misc_feature (1)..(1): n is a, c, g, or t
ngaagaaatcctggccccgcccctccgatctacgtgtccatggacaggttacttgacctctatgttgttttttcatttgtgaaatgggagtcatgcctacctaataagttattaggaagattaaatgaactcacgtataggaagtgcttggagcagtgctggctccccgttagattcatgtaagtatttaccactagtgttgtttccttcacagtgtttatatttgcattcatgtatgttaaatgcgtttaaagtgcaactccactgaaaaggatagagtgtgcactggcgctagcaattgaaaatgaaagcatttgatctcttcctcctctcgacaggaagcttgcacaccatgccactcacatcttccttgcagtcgattcctgtcgccttggatgtagggaggctgtttccaatcctcttatcatggtgacagtacttgactggttgatagaaaaggaagatggagttaaaaaggaaacgtttgtaagcaatccttggttgacggttggctggctgcggttgggtgccactccgaggaaacactcagcacaggaagtgacctttgcaccccttcctgtggctctccctcttgaccaatgaagtgagttgacactgtcatattcataaataccacagtccagtaagattgtggggaaggcgagatgctaagtgtgtggtttgtctatttgggaaagacctgagaaagtgtcctggggcctctgcctgaaatcagaggacaagaaagttgagaatgaaacccatcaggaatatatctgccagagacaggaaattgaattggaggtgccttatcagatgcccatcttaaccctcaaagagaagcaccaacaacccaagatacagatccgcagataaggttccatttacgactggaggcttgatagctccagacccctgggtagcttagaaccccctggtgaatctgtaatgtgtctgggtaataaaccaactggcagaaatgtcccagctctcctgattggggctctgagtaccaggcttcagtaggtctggtttctgagggctggaggctccatagcattagctggtcacagggagcatcttgctttgcttgctgcccccagattttcacaagcactggcacaagttgctgacagaaatagcaggcaggccaagttgatttcaggccttagtaatctttccggctgtagtcagcccctctctggggcgtggagaatcagcaggccttctcacgccagagatgtttatgcaggaatgcctgttgtcaagtttccccggtagaacgtccactgacaggtttgaatttatctaggtttccgataggaaggtaagagtttaattttagtaaagtcagggagagattttgtatttttgttattgtagtaaaatgtacataacaaaatttagcgttttaaacataaacattttcaggtgtacagtttggtagcattagactcactcaatgatgtacagctgtgaccaccatccattaaaaattatatttttgatggacgcctcatggcataggaaaatgctccccaaatgtccagagatgggagacaagagggcagagacaggaccctgtatgctgtggtccacttctaggaaaatatacatggaatgtcttatgtatgaaactaggccaaagtgttatcaagtgattatctcaggatggtggaaacacacatagttttttgttttcttccctatactttctgcgatttgccaaattttatgccctgagcataca

SEQ ID NO: 36339 - DNA, 1627 bp, Bovine  19866880806502
  misc_feature (1)..(1): n is a, c, g, or t
ntgattccagcttgtgcttcatccagcctggcatttcgcatgatgtactctgcatataagttaaataagcagggtgacgatatacagccttgacatactcctttcccaatttggaaccagcccgttgttccatgtccagttctaactgttgcctcttgatctgcacacaggttttgcaggaggcaggtcaggtggtctggtattcccacctctaagaattttccacagtttgttgtgatccacacagtcaaaggctttagcataatcaatgaagtagaaatagatgtttttctggaattctcttgctttgtctatgatccaatggatgttggcaaccataccattaatgccttataattatggttttgtctaatatttataacccttttcctcccccactcccactgtattaattgtgttttttattttctgtatcttatgatgttttgacatcctaaaaatcttgctgactaaaggcagactgacctcccaggtctagctagtttctaaagataacaaacagcttggacacacctctcatatgcaagccaaccaccccctttatctaactctcacacacagagccactacttcccctgccctgtgtcatctcagggtcaggtaccaggcaatgagagaacaccccaatggtccgaagacccccatttattgttcagatcagccagtcccaagctgtttgtcctgggccaggaagatcccctggagaaggaaatggccactctccagtattctcgcctggaaaattccatggacaaaggagcctggcaggctatagtccatggggtcacaaagagtcagacgtgactgagcaactaacactttcacttcacttttcaagctgtttactctgccctgcccaatgcaaactcagataaaatctctggcctaaatttgcctcttgctcctgcttctgcctcctgacccaaacctgatgcttccacggggacccttcatggcatggtgtgcctctttctctagggaaatgtaattaaaaaaaagaaaaacttctttccatggcattgaccttgccatggtgtcactcagtcacctccataaactgaaatcctacagtacgaatgagagacccacccagcaaaaacccaaactgaagcaaacaaacaaaaaaacccttgtgcttacatgtcttacttccaaactatttgtgcacatatttagaccatttactgaattagattcaggtcagttattccctgtctgtctctctcattcttaatcgctcagtcgtgtctgactctttgtgaccccatgaactgtagcctgccaggctcttctgtccttggagattctccaggcaagaatactagagtcagctgctacataccagtctgtaaactctgtcttttacatccttattacccagggtctagtatgacattcaataagtagaaagtttaaattcaggttgaatggataaagacagacctctcatttctatttacaagagaaccgtacctgttgatacagggtaaagttcataaaggcatttgatcctaattcatgtttgtctctctttctccctgaaatgggctacttgttttaaatctaaaagctggtaggagtttcatgcatgcccagtcacttcaat

SEQ ID NO: 36340 - DNA, 970 bp, Bovine  19866880811524
  misc_feature (1)..(1): n is a, c, g, or t
ncccgatggcctttcagctttgtttctaagtgctcacaccccaccacttgaattataatgcactcgctgtactggccaagggtcatgtttagctccataaaattctgtgcctggccagagacagtcctggccagaagctcatgagtaagaactattctcatttcccttccacaagctgggggaactctagcaggatggtgctactcaaatatggttcagagacaacacaggcatcaccctggagcttgttggaaatgcagaatctcagtcctcaccccaaccaaagcatcagaatatgtgtcttaataagctacactggtgatacacacgcatataaaaattcaaaaacggctcttccgggttgtgcgaacaccaagctgtttgaagctcagggaatctatgcagaaagttgaatacttactgatctgggtctggaaaactttatccaacaacttttcatgaaattaaaccttaactaaatctgcaagggctaaaaaaagtttgtccaaaattttccaagtcattatgattaataccattttcaaaatctgtgtcggccttctctctctggtgaatgctccacactcccctctctcttatctacttcatgtttacacattggtttggcaagggggtgtggggttggtcaatatcaatgagctctggccatgattagaggctcactcttagaaaaatcaatcaactttcaattaacaattaactttcacagcaaaaagtatttttaaacctagacctgtctggcttacacatcacatgaggccatggaaaatcagataaaggataaggatagttaagcactgatggactctatagatgtagggtttgtgaaaatgaaagataactcatctctttgaggtggactagctcacaagagcttttcatgtgacagctggcagctggaatcagcctacttttgaagctctgattcctcactaagcaagaaatcatg

SEQ ID NO: 36341 - DNA, 1689 bp, Bovine  19866880846777
  misc_feature (1)..(1): n is a, c, g, or t
nacttgtcctcctctgtgcctcagttactttatctttaaaatgggaataacaacagtatctacctcactgggttgctgtaaagagtatgagttactatgtataaagtgcttggcccagctaagtaaggatgagctagctaattaaaataacacaccaccaccatcacggctgccatgctacactgacatatccacatccaccccaggccctgcgctggtaaatcaccgtgtgaactgctttacatgcatcatctcacttagtgaccgtaccatccctattggggaggttctgctattatcccggcttcacagatgaggagcggagacggggactgacttgcccgacagtcacacaatttgtaagaggatggactcagatggaacccaggcctgcatgagcccagaagctcttctccctgaggcgtctcacacagggtgggagaggttgacgtgaacgtctcttgctgtgagcagttctgagcttttctgaaagctgaggcccaatccctacccgaatttaggtgggtggttaacagagccaccccctggccgggaatctcctctgtggccagtaacagcaaagtccgcagtggaaagcactattccacagctggatgctggcaagcgtttgtctggagtcccgcgatgttatttattaggttatttgtgtgtagacaagatctccttacctcataaatccttgcctagcgcccagagataaagaaatggcccgagattaatcatggctgagaggtctatctaccccacagatcattctataaacaccgaggctgagggaacaaacaggactggggcattgagagaaaagccactgagtgagaacctgactttgttttattcccctcggcacaagcttgacttctttattctccacaggtctgtatgtgattcagactataagccatcgacacgtcctgtaaggaaaaactacttttttttgcatgttggtccctccccctaaagaggttaagtcaagagacactgatgaacagatttcagggataatcatcctatcgacaccaacagacatggaggcacctttatggagcatttactaggtgtgatgcagaagtctagggggcaggcaacttgttatcccacaagttggaggcgaggagacaggctcaggggtaaagcagcttgtccgagctgccacagctacgatgggaggactaaactccagccctgtgaggctggcatccatgggcttccccaccctgctgctggaggaggaagacatctcccccaggatgaaagccctggagctcgcgtcgacagaggcaccttggggagatatgacgcccagcctgtcacctcccggagccctcctgcagcaactccctcagcgttcgtggtttcctgtcccagcacatgcctgactgtcccgccccgatgctctggctcccagcatctcccttccctgggatgccttcccccactcctctctgctgcatccacctcccactccctccctccagcacgactcaggaagaatccttccctgactgctcctgcctgacttgccaaagtccactctggcttgggttcaccaggcacctcatcacagcctctgccgtgtcagcatctcatccgagggtgccacgtgacctctacctgacctctcagctgccgtttaacttcccccaatctttcttgtggacttctaaa

SEQ ID NO: 36342 - DNA, 1073 bp, Bovine  19866880893709
  misc_feature (1)..(1): n is a, c, g, or t
nagggcagggagggggcggcggcctgggggcggggaagggacaccgcgcctctctcccccggctccctcctatcttgggaaggtctattttcgctcagcttccctctgtctctggtttcatttcctttttcctgatcacgattcaaatacaatagaaggaaatcacatttaaagagacagctgcccggtccgcccccccccccccacatcttttttcttcccttttttttttaaacggggctcctggggattagcgatacaaacagcggcagccgcagcaagactgagttggcttcttaaaggggcccagcgtcggggacagggagactcgctcagagaacacctctccttggagaggcggctgggttgcctgtaaagcattctttagggctttccctcttcggcgttccccttttggttaactaagattgaaagtgaccagcgggccgctcaaggaagaaagaaaaaacgaaaatgtgaaataaacacatacagagatgtacgcgttccaagtggctttcgcgcgcgtccggggttggaggtcccaggtccgcggtcagggaacgcggagatgcccccaagacagcgcggctctgctggctgaggacttgtgactgcgtccgcgctccaaaaagacgacgggagctgtgcgagcagggaccgcacgggctgggtacgcctgagcagtaccaggggcagctaatcccgagggagggtgtttgggagggaccaagctggtctgagtctcctctccatctgctggcggcagaattccctccctcagcatctttaaaaatcggacccctgcggttaaactggcctctcctgtaaagggccaatagcactcttcacagagaaaagtgcctctccaatgatggaaagcaacgcttagagactattttgccctgggtcaggaaaagagagagaaagcagacttgtttagttcaggtttcccctctaatctcaagggcaaattccaagaagcgaagggaatgtagaaggggagaggaggaagctaatagtcttctcttcaatagagcaaagctttaggtcccttgggcctcatcagagtt

SEQ ID NO: 36343 - DNA, 1228 bp, Bovine  19866880916006
  misc_feature (1)..(1): n is a, c, g, or t
nctttctctagttgtggcgagtgggagtcgctcttctttgtggcgcacaggcttcttgcagcggtttctctggcttcagctttcgttctagagcacaggcttagtagctgtggtgcatgggcatcgttggtccatggcatgtgggatcttcctagaccggggattgaacccatgtcccctgcattgggaggtggactcttaaccactggaccaccagggaagtccaggtattgttaatactaacttttgctatttgaatgcaaggaacatagactagctcaatattttacctcaaatacatcgtattaagtcatgggaatttcttttttttttttaatattttacaggatagatttatgctttacaaaactggacttatactacatgggaatttcttattaccttgccatctaacaatttgtcttcttctgagaatagaaagtagtattggatttatgaccatagttcctgagccaagtatgccaaaggttatgttatccctttctagtaagatacttgtgagtttgcatctccctaccccctctcactcccactcaaagttgttttgttcagggatcctgctggctcacctgcagttttaggcagatgtgtttttcctttgacggtttaacctggaccctctgcctccccagctcccacttcctgcagggtcaatggctttagcccagaggagacagtacagctcaccccgatgtcctggggccagggatgaaagtcctgaacaaccaatcttatctctgctagagtgagtgacctttctttagctgaattgttggttgttccccactcccctgtttttctacccaaaatagaaatgaacaacatcagactggaccccaagaatgtctttacaatggggatttttctcctttggcagaagattgaaagcaacaacataaaatctagatgccgttgggattggggctgccacttagggttatttcagttaagcactgcatgctgctcctcatctgaaagggcaccatttacttcatagacacatttattatcctgaaaatgtttgtatgtttattattattgtttatcacaaagatatgtggtttgtatatttatcacgacttcctggcagatggcagtaaagcgtcttgttttaagaggtttagtatattttgttctgcttccatgcacaaaggaaaaatgagtcagtaatcaaaaccaataactggtctaacatcatctaaaatat

SEQ ID NO: 36344 - DNA, 836 bp, Bovine  19866881006812
  misc_feature (1)..(1): n is a, c, g, or t
ngaaatgctggggagtcagaaaagcagcatgtggcacccctaattcgaggctgtaggcacttggaacaggtctccaggtgactgaaattaatgtctggccctgagtagaaggacggaaaaggagtggttgttggatctccctgggtaattttgaaatgccagtgtgcatctgcagaatgggatcataatattaagtcccttcagttggctggtatcaggactcattcctgtgtgctgggcattctcctgtgatccagtggtttgttttgatgcacatgttgcttattcgtcctgacatgccttctgctcagcagaaaagcatgccatcggatagtaagttcttacttccatcctcagctaaattcagctgctctaaaatgtgtaagacagagctgagacccaagcggatggcagtccccatctccaggcccatggcatcgaatgccagttgaaaatcaagatctcttaattcttggaaatggggtggggggtacatggggtctagttccaggggagggactaaattaaggagtgacatcaggggcctgtctagctcaatttctagcccccaccttctttaaaagccatcagtgtctttagccctagcgtgttaccaaatgacttgtcaatgtcagaggagccatgcaaagaatattcagcacgtcattaacctcattccaacatgtaattagcctaaaaggcctcttcgctgcctccattcagcgttacatcataaagaatcagatattttcaggacaccgtgaagactttaaagagttaattatgggctcagtagagcccatccccgacagcctaagatccaagaattaaacagt

SEQ ID NO: 36345 - DNA, 792 bp, Bovine  19866881010769
  misc_feature (1)..(1): n is a, c, g, or t
naacaactacccaaacagactgtaagacaggctgtaactctgactttgcagtagtacaaggtaagtccctctgacaagtctatgggaagaactgacctttgggcggctgactgcagttgctactctcctctggccctgtccccctcccccatcacctcccaaccacttggcaaggatccaccagagacccaccgccatccgaggagcaggacggcattctaatttgagttgaccattttcccagagaagcaagttgtctactgtcatgaacactgcccactcccactcccaccctccacggcataaagagccaagagcctgggggactgagctatcatttaacagtcctctggagtttcttcttccagttacacaatcaacttcctcaccacaaaagatagttaatggacacagaagatctgacaattcatatgaaaatcatcataacctcaattgctactcattacagacctttctggttgtgtgtgtgtgactcccccctacccccatcctaaggccaagtgaactcttaaagagcatctgccttttcacagtttccaaaacgtctccatctgatgaactgactccattagccggcagggaagccaagctgctgacaggaacagctcaaaggctggaaaccacaattctagggactttctgatgatccaacctagccaaggcataagggatgacttcatcactgagggggtcccaagaaaagggtttcactttcttcattgccaaccagcccccaaagagggtccctccggatcagcactagggtaatca

SEQ ID NO: 36346 - DNA, 2463 bp, Bovine  19866881072085
  misc_feature (1)..(1): n is a, c, g, or t
nggcacacttagtgttcctaggagcctggagccttggaggctgatgatctttaaggctaaaggtactttaaaaaatcaaacccaatgttcctattttacggaaattaatggaggccctgggagatgaaagtacctgtcccaaggcaacaggttagttgcaaagccacactgcgtggatcttgcttctatttatcaagggccggtggtgacgtagtggtaaagaatccacttggccaatgtgggcgacgcaagagatgtgggttcaatccctggggtgggaagatcccctgaggcagaaaatggcaacctgctccagggttctgggctggaaaaatccatggacagaggagcctggtggtttgaagtctgtgaggaagtcaagagtcagacacatctgaacacagcacagtagctcacaagtagctcaaagtaacactacctggaggctagtagtgttgggggcttggggctttgcctctttatcacctcggacacatacagccaagcaagctgagtcacctacacagagatcactcagctcagagaagtaattacatcagcaagtagagacagacagaaagccaccatcataatgaacagcccctcccagctactcttgagctcccactgccagagacaatcatctcagaactctctaaacccacaaatttgctgcttcctcaaaaggaagggccagtcctgtgatttgttccaggaacaaatctctagttctttaaagagggccctcattagagggccgcctcacagccctgccctttaaggtagtacatttaagagccagctatgaaggtatttcacaaaaaatatggggcataagtaataacacatcctgttttggaaagcctcaagcacctctgggctaggttttgtttatggcagtctggttggcccagaatttttaaggcatttcttttcaagaacttgtacctgcagctctcaaagctgaattccactagacacctgcttgcctcactctaatatccatttttatttggattttattttacaagctactcagcatagtgggggtgttttccttacagttccctgtttgaaaacacagaagccatagtttcatacatttggtccacagtcaggcaattcctttgatcaacattctgaactgtgcgtgccttccctggagaactgggaataagctaccctcagcgaggaacatggggatatgaactattaacagccacatttgttctccacttatcaggtgctacaaattatctcatttagttcttactacaccctggtggcgctactggtaaagaatccacctgccaatgcaggagacctaagagactcgggctcgatccttgggtcagaagatcccctggagtaggaaatggcaacccactcctgtattcttgcatggagaattccatggacagaggagcctggagggctgcagtccatggggtcgcagagtcggacacgactgagcaactaaacacaacacagagttactgcagttgagagtggtaggcaggtctccgctggggccccctggtatcttttaaaagttggccaagaagaggatttttaaaagaatcagctggccacagcaagaggcactttcaaagtggacataaggcattacaagaaggaaaaaaaggaaagcactggtcaaaagcaaaaccggaggaagcctcctgccccacagtcttcacaaggtgccaacaggccactctgcaatttcaaagaagtcacccaactactgccagggtgagtaaccaatcccatctcttcttcgtgtgggtagcgggctaaaggggagaactcacatgcgtcagaggagaaatacaacgttacttggtacatttccaggatccatggagaaaatcactacttaacgtctccttaaaagtcagccgtcagactccaagaagggtgcggcccaggccggcccaagaaaaccaacatcgtacttgaaatgtctaagttacgaccccaccttgctttttaaaattcaaaattcagacctccagggtaagagaagaatttccagacactcagggatgtggttataacctcctttcaaggtgcgatctgatttgcctaaattgcaagagcttcttttcagaatcgaggttcggaaggtattcccggggcgggtggcggcggaatacagggtgggtgggtggcgagggcgcgcggaacagggaatgcgtcagctcccttctcgttgcaaacaaaagaagctgggaagcttaaaggcgcgccgggaacccccggcgccgggatgctgcgggacgcgggcggagggaaggacgcgggcagagataaaggcgccgcagctcgccgtcccccagcgcggaggccggcgtggggtaagcgcgccagctctgaccctccaaacccctcagtcccgcggcccagttgctagagcagcggctcaagttctcagcgccgggctggagcgcggctccgcga

SEQ ID NO: 36347 - DNA, 1561 bp, Bovine  19866881086788
  misc_feature (1)..(1): n is a, c, g, or t
nttttaatatgattaatctaatgtaatttaaaacattcactagtcttttccagtatatttgtagaattcaaaatgggaaagggtatagaatgagccttaacaaattattttcatattcctgagggttttccctccccccattaactctttagaagggataataagcttaagagcaatactgattttttaatataacttacagtcaataaaacttcaaagagtgcttaataagaactcaaatgggatgagattcagaaactcagatgagatgaaacgatgggttttaactttgtgcttacctgtatccaattccccctaagatatattattgaaaatataatgaacaatacaaatttcctaagacacttaggaggctgaatattcaactactttctacattttatgaactggttgttaacagaacatctgttaattaactttctgagaataaatacacattctcatgtctctaagtgacgtctcccacatcacggagtcatatatatatatacataggaggttaaagaacagcagaagctagctgattaaaaatacttaacggattttgttttaatatgaagataacgatgatcagaaaacctctttcaataatattctttagggatattaagatctgaaaataaaattgccctagccagggtaatcaatgacactgtaaagctttaaaacagaagtctcattatccacatgagatgattgatactgtgcatttaaatgaaagtactttatatatggcatcttgctataccaagccacagtgccacatgtgacaaccatctcttttcaactctgctagaatatgcatttgcccacgcaaggcctcctgcagggaggataagcatcaagcatccacaaattatacagaacacttagtaccaagactcagatcttaatgggactttttaaaaagttctctgcaccacagagaggtgctcctttaaaaaatatagtctaaattgaggcataaaagttttaggtttagactacaatggtagaatgccaaaaaaaaggtataatatctcaaaaagaacaaacgattcttttaaaaacatacatagaaataatcaaattactaatatctttacacattcacaacatctgcactaatgcatagaagtttgaaacctagaaagcaattctcccccatcccatctctgaactgattcagagagaccactgtataaagaacttatttcaattcggattttaaatgtcatgaaattattttctacacagatagcaaagttagttttatatatagaaagattgtaagcacacatcatctagggattacccagtaaaccacaaatattttatctatctgcctaaaataaaacaaacatatggttgtggtacatcccaggcagatgtcatttaaagcacacaaggggaggtgctagcagaagaaatacttatttgcaaaagtaaacagataacccttccaatatgatgtaccacaaccacacatgagaaaagtcaagaacttcttttattttaaaataaacatgaagattccccccttccccaccaccctacaaaa

SEQ ID NO: 36348 - DNA, 851 bp, Bovine  19866881105270
  misc_feature (1)..(1): n is a, c, g, or t
nctgtggaggctcagatcggctgcaagcttcctgatgattatcggtgttcctatcgtatccacaatgggcagaagttagttgttcctgggtaagatgttcactgtttgggttattttttatgatacagagtattttctagaatgtaaacaaattgtagttattcttaacagattaaaggaatatgagaatttcctctcgtttgttgtagcaatccataagacaaaatataaagcttgaatttgattttgccaaaatagattatgtctcaaaagcatcatttctatcaatacatctttatagtttaaatgaagtctggttggaggtggggctatgggacatgagataggggtgtgtgtgtgtgtgtatatatataatttaactagaactgttctgaatccttgaaatgttttccttgttacaggccaggtaaattgtttgggagaacttgttgtaaattctgtgtatcatacatctaaaaagtaatttgctcagagctacgtgtacttaaccaaagaaaatctagttttgtcctattcaagcgtagcctatcattgaatagcctaatttaaacttacttccaaaagatatgaagtagtcactgtgggtccttttggtaaaagcggaacatacagtagctgtcaaattcactcctagttttaaaaggtctgttttttgaatgattctactccttttgttcccttatgaaatgaagctaattcagagactgcatttgtgacatgctaataggaatttagggagaattttgcattgttcttgttagaatttgatatctctatgtgtgtgaaacatcatgagactcttttaccattttagatcagagttgagtgag

SEQ ID NO: 36349 - DNA, 1411 bp, Bovine  19866881129407
  misc_feature (1)..(1): n is a, c, g, or t
nctttctaatgttggactggggagaagctgaattacagtagaagatctggaaaattctctgcctgtttgggtgaaaacttgcatcttcatgtgtcaccaacatccccaggatggaaattgcccaaccagagccattccactctctcaaaaccccttcctctaatttaactactgctcttttaggtcaatgtagggcttaagaggggagaaaaggggtctggaaaagacataaaaattcattcatgtattcattcattcaacagatatttattagccttgcaatgggttgggcacagttctaggaacagggagtagagcagtgattaagagttgaattaggctaaacagaaacatttatgatgatcattaacatcatcatcctggttgttcggcaaataattaggcctgaatccagcctgagtagaaggtaggagagggcaagatggggtggcaatgatgagctctgtaacagaccaccaggaggagaggcagcagagctgagttttatgaggtgatgccatagagatgagtttcgacatcagaaagagctggagtttatcccaagttccaccacttaataccagctaagttcttagctggtttgtactaagtcaaacaagttattagcctctctgaacctgtttccttttatgtaaaatacagaccattgtacccaccgtatgtattggttggggcttaagttagtctccatacctcgagcacttggcaccaaataggacataactgcatagcaggtatgttatgatgaggaggggcactatgcctatggactacctgaaccagaagtaaccgtgggcctcagtttccccgggcagaaattgaagagctagtaaattgcttttgaagttcatttccagaaatgtcttggattctcactctcagagaaaaccaacccaagtcaaactttcttttcttttcccattgagctttctagagcaatagccctaagctaagaaatcagatgggggacttgaaggcaaaagaaatcttccaggtccccagagggttggctgggagagggagagggcatggcaccagctcctgtttgctcaaggctaggcttgttccttgccagcatttgctcaactacaagcagtagaaaggttactgtttaaccctgaaagggctgaagctcagaacccagtccgtgtgccctccaggctgggggtagggttgggtgtgcaggggaggcttccctgaaattctttcacaagggtttgcctgcagggctgtttcaaagtggctatttcagtggaagtcagatctgctggggccaactatgacctacttcctcagccggctggctcagggcttctcttcaccaattccccaaaatctagaaggaagagtagggtgaggactgagcacccagctttggagttggggagag

SEQ ID NO: 36350 - DNA, 1340 bp, Bovine  19866881155006
  misc_feature (1)..(1): n is a, c, g, or t
ntcagtctgagcacagagcaggaaagtacagtagagaaaggagtggcattttgagtcagagcccaaccaactctctggggatggagggtagaatcccccacttctgacacccagtgttctaaaggggaacaaaaacctccccatggggtctttagaggagactgatgacccaaagttacactaacttagtctgttagtctccatgaaaagagaaaaaaataagcttacttgtgtaacttctccagacaagactggatttatatggggccctcccttccctttgattggctatgggaaagaaaggggacactccggagtacctttgtgtaccctggctccaggcaagggcaggacaagcccttgcagaggcaaggacctaccaggaagtaaaatatctgtttggtaagtcttttttttttcctgtctgataagtctttaaaaggtctgaagtctgccgtgtaccctctgggcatgataaagttaactggaaatgagggcaactaagcacaacttggcaacagaatttgactttgctcccagaggttctacaccgtggagtctaggggattggaaatccattcattcaaattaatatttatgagcacacatcacaatcaccaggagtattttttccgcaaaatcacacatcttaatgagtttgctctgcatagtccttcagaggctactttttcctttttattgttgttcagtcgctgagtcttgtccgacgactctttgtgattccatggactgcagcataccaggcttccctgaccttcactatctcccagactttgctcaaactcaagtccactgagttgatgacgccatccaaccatctcatcctctgtcaccctctgtttatacactatacctgaaatttgctactgctaagtcttttcagtcgtgtccaactctgtgcgaccccatagacggcagcccaccaggcttccccgtccctgggattctccaggcaagaacactggagtgggttgccatttccttctccaatgcatgaaagtgaaaagtgaaagtgaagttgctcagttgtgtctgactctatcgaccccatggactgcagcctaccaggctcctccatccatgggattttccaggcaagagtactggagtggggtgccattgccttctctgatacctgaaatttaggtaacataaaaaagatgtgatggtacctgtataggactatatgtcaaactgggttgttttcccaagtcccaggtaacctcctctaatcgtttttttttttttttcctctttaagatttttgatgtggaccattttcaaagtcttaattaaatttgctacaatattgcttctgt

SEQ ID NO: 36351 - DNA, 1241 bp, Bovine  19866881161169
  misc_feature (1)..(1): n is a, c, g, or t
nattgatggatagatagatagagatgatagaatggatggcagtcttgatttttacaatctaagacaagcttgatttttacaatcaagctacaagagctttccttgtagctcagtcagtaaagaatctgcttgcagtgcaggagacctgggttcgatccctgggttgggaagataccctggagaaggaaatggcaacccactccagtatccttgcctggaaaatctcacggacaaaggagcctggtaggctgccgtccatggggtcacaaagagtcagacacgactgagtgactaacactcacttacttacttacttacttgatttttaactgaaaatgccagaagttggatttgatgatgagaccttcaactgcaagagcattaaacatatcaagcatgtcattcatgggtaagtttaacagtttaaccacaaaaccattaaacataccagtctgtttatgaacacattgttaatttctcgaaagtcataaccttctcgaggagaaatcaggcaagagtctcattattccatcagagttctaacccagtataggttccatttgctctatgctcccaggatctcctggagactgataaagaccaagggaggcaatgaggtgatgagaaaaagctgactgcctaggttttaaggatgcgaagacataaaacagagaggcaaagcagcctgccctcaggtcaagattgagataataccgagaactggaaccaactctgcaaagtcaattactctgaagagaaaccttcctggtttcaagtctgtaacactgtctcagacctgtgcaaagacacagaggccttgggtcaagctgcaatgctagttcccataaaagaaagagtggggcagagcaaaccaagccggattgtgtgcagtgacctggggaccctgggttcagttgaaaagtctaccaggagatccacatctcagaatcagtgaaccccagggaccttagttcctacaccaaggccaaggcaaagaatctctctgagccaagtatcaagccctaaggggtcgagtcttaataccaacacaggctgtggttacaaggttaatgagagcaccgtgcttgctgtggggaaaaaaaaaaaaaaaaaaaggatgctggcttactttacacagcaccttttaactagaggccctatatttatttttgaaagcaaatgtgtgtttatatatgtttctgtctatcatcccctcttgatgacatggaattacctccagg

SEQ ID NO: 36352 - DNA, 1287 bp, Bovine  19866881173632
  misc_feature (1)..(1): n is a, c, g, or t
nttgttacaagcagccttgggcatacaccacagcttcccctccttgggctcccccagcaagaggcaaccctggtcaagatcagctcttagcctgctcccctcttcaggagtatagctggaggtggctggagaaaccattcccccatgaccaaattcatgacctttagcctcaggcaggcccactctctagttcatacccactccttgtcaagcccccatctcctgggcacacccagggtcctggcacgctctgtggtttatggtgggatagagccatctctgaccagaaggagacagaggtctggaggtcgggaccgatgactgggctgggctccagactgtgactcccccatcctgcgtgatggagggccgggcttgatacctgtgctgaccactgccctgcccaggccgtcggggtcgactctgcagctcccctgacactaattcacagatttaatactctctgtgggagtgaaggtattttgagaagaggttccgctgatgccgagtttttctctgaacgtgggggtggctggagaaaactggcactaaggaggagaatgatgtcgttagagccagattagtcctcagttatcagtgcccggctctgcccagggtcatagagcagagaagtgggattacactccagtctctcctgaccccagggctaccgtcctctgcttacaaagatattagccaaaatcatttaagagcattcaatttctaataacagtctagctccataactattcatatctcagcagctgctggaaacaggcacttcctccctaggctccaagcccaggtgaccttccttagcggtcaaggtcattttttaaaaccacaaatttcagagttgactctggtaggttgagtgtccacacacataggcatgcatgtgacatgtctcttgcctcttcagggtaagacacaacaggaatcaaggtgaagaagtgacagatgtccataaagtcccctccatggaggagccggtccaaatggacaggggtggaattggtgtccttctggcagggagaccaggctgggtactttgctgggagtggcaccgtcggattccctggctgcctggatgcttggcagccctgggaaaacccaagtctgcagaccaagatttctctgttaggtctcggggctctggcagcttgctgttctgtctgtccctgtgcctgccgggccagttccccacccttagccctcagttattgctccaccctcctcacttccatgggtggatgccttttttgtagcttcccaagcaccctgctc

SEQ ID NO: 36353 - DNA, 1760 bp, Bovine  19866881206983
  misc_feature (1)..(1): n is a, c, g, or t
nttcttgcagctgttttaaaaagtttccaagtaagtcttcactaaattgttcccagtcctctctcagaacgctgtggctttccctgccttcattactggggagggagtggggttattggatgaacagaaggaatccggtggactttagataaggcttcatgcagattgaagtatctatttgctttaaggcctacttagatgtgcctcccaccttccccagttcattagatctagaaaatatatggactggggttgggactcagcaaattagtatttatggcctaagttttagatatataaatcagtcgagctcagattcctactgcattcatttcaatgtacctttttgttatatgtgtaagccactctaaaccttggaaaaaacccaactctagttactagtagggatggtgctgtgcggaccattttgcccaactaaaagcccatttgcattaaataatattaaaaacaattttcgaaagcagatataatcaagatcagctaatgaaacagtcgtcagtcccgtgtccccccacagagagcatggagccatctctgtctcagcctgtgatctgaccaagcggatgcaccagtcctgcagcctgtgcgttcagccaacaaaggagtctccagctctggctccctccaggctgacagtgtgcttacagacccctcacccgccagcgaaaggctggctgggaagcagaaactggtccactcgggatgaagacatcaaagcagattctgatccaattagaaaaagatactattgtcctctgaattcccaaagttagcaggctgttatgaacacttagcccgtttccttggggattgctgtggcattgacttagatccgaagctcattgatatgcacacatctcaacagaccccagtctctgcggtgtgcagggagcctgggaagcccggcaccacagcttcctttccactcgccagatcaaggttttcagagtttgtatggtggctgtaaaatgctgtttttcctcagttggtcttaggtgagtgttagtctcttgcgtcttagaaaggagaatatgaacactttattagagaaaaaaatttataactgtttccatttatagcacttcagagaaggagcatgggaaacagtttaagctggtaattttagccattagtcctgactgtggaattcccggagacacttatccatctgtgttcaagtcacaattattctgccctctctggcacacacttttcttttgttctacttttatttccccctctgaagcttttctgaaggccgcctgtccttggatgatgtttagatgatgttcatatctgccatgtgtgactgatgagctgcttaaaatatctttctttgtaataggtggccacctattatagagaactacactcataaagtttagaaagtgttttcctggggtaacttgggttcgtatcaattgctgaggtcagggaggaattggatatattcttgacaagagaaagttgagtcttctctgctcccagtccactgtgtaacccctaactccagctgccatcttgcaaatgcagattatggaccttaaatgggactgagcaaggaagggtagctattatatttccacccaaattcaatctccctctgcaaagacacatgcctcgtccagtcgtttctatactttaatcctctaatgatttcacaatcattttgtctatatctaaataccacataactacattcttctactcaatatttctctgaaatcaattttttaaat

SEQ ID NO: 36354 - DNA, 1496 bp, Bovine  19866881232854
  misc_feature (1)..(1): n is a, c, g, or t
ntttattgagcacctactatgtgccaggttctcatctgggtcctgagaatacaggatggataagataaacacagttccttctttcatggaggttctctcataaataggggagacgggacataaacaagtaattttatataactgatttattaattcatgtatttaacgagtatttactgagtacctaccacatggcacaagtgttgctaagcactgcagttcagcagtgaacaaagcatgtagacagctttgccttcaggaagattacattctaatgatgtaaatactgatttatttctagttaaaataagtagcacgaagtaaaagtacaggggacctgcctcatctgatatccctgaggaaatgacatcattttaagtgcctcagataagatgaggctttgttttgcccgccaggactgagagggcttccctggacagggcaggagtttccctgggagactaaattctggctgaggctgcccgagttccatctgctttagagagtagcctggtgggagagatgctcccggcgataggcagacagtgggtagggatttgaaactgcgtctccattagcagtcaccacccatttttgccccagtgcatgatgtcttgggatgtcctgatacagaaaaaagcaaggccgtccttcccctgtagcacagacagtaactaatggaccctcctttcccagacgggaaaaacagaacaagaaaagacaaacccagcttgagcctgaggggcctgtgctttgctgctcaggaggaagcaactgctcgatttctggtctgcccttcagactgcagagctgcaggtcgcccgcctaaaccgctttaatgcacattacgcctgggtctacatggaaatggcggaaggcacataaatggaacacccaacctttgtcctcacttcgaaaccgcaggtaagtatttaggtctgtgttgtatcgatcatgcctcccactggcaccaggaaaaacgctgtgaagcaagtcaacttcccagtgacaaggaagtcattctcctaatccgctctcactggacaatcaggttgacaaaaaccattaagttttctaagattagaaattcactgtcagagggagccatgtatagagttttccactccattacacccaggacaataaccagagaccaagtgacaggaaaaggcttcttaaagtttcctgtgtccttgggtggagggaaataaattaacaagtgcctcccttttgaaggacatgggttatatattatctcattaatcaatgcaaccacttccgaggtgggctgcgtcgttgcatttgacagaagactaagctggggctcagcaggattcagacaccatctaaaatcacctggctcattcacatgagacgggattgagaatcagaggcactgggccaagggggggggggtctaaaagctaatgacctacttgcttttgggttgaactgcactttaaccattcttaacctcatttccctctgaaagatgc

SEQ ID NO: 36355 - DNA, 946 bp, Bovine  19866881247577
  misc_feature (1)..(1): n is a, c, g, or t
nctgttcacggatggctgaaaggcagaactggctttgcatattttgacttatagctcctgaaacagaactttgttttcctctctatttcaaaagcaatccatggtacttgtaaaattaaaaggcagattggaaacatgtttgtagtgcctggcacatatttatgcatttctttattgtttttcttattcacaaacatgggatcatagtatttggcaatctttttttccaacatgtcaaatattcataatttgcataatttttaagggttacagttgtatttcattacatgcacataccgtgtttaactgtgtttacccatgcatgagtcattgtgaatttgcacagttctgtacagagccatatgaccctcccgagtcttaatcgatgagctcacgtgtacaccgtgtgtggagaccctcatctagtgtggttttgctttctgggccaggaggatgtcagtgttctgcctccttaggtgacggtgtcaggatgcccacaggacatagtaatgaaacttcccttagaaacagatgagttggttacagggttaagtgtgggcgggagtggaaacagctggcctgggcagagcaagggtagggcacaggtgaggttctgtgggtgggcgctccacctggagccggcctctctctgcaccatcctgctttccccacaggtgtgccttgagggggagatttctcgccagtccatcttgaacagcctgtctcggggcaagaaggcctcaggtgacctgattccatggacagtgtcagaacaggtggagtgctttccctggtgtgtctcggggggctaagctggtgatgttggaggctgtctttgttgctaagttacttgtgcctccctcacagttccaagacccagactttggcggtctctcaggtggaagggtggttcgcattgctgttcacccggattatcaaggggtaa

SEQ ID NO: 36356 - DNA, 1322 bp, Bovine  19866881284609
  misc_feature (1)..(1): n is a, c, g, or t
nccaaaggtctcactacgtcaaggcaaccaatgccccgagatggtgacaaacaaggaatccagtcaccagaaggcccaggtcagcctcctgtctggtcactagtttgctgttcctcagagaaaagcaacttcatctcttggggactcagcctctctgcctgatcatcaggtctgctatcacccataatgtcatgaggggaaggatccaggaaaagtgtgacgtgacttgctgtgcaccgcaggcccatccagagctccgggggtacctgatgccagcctggccgtcgccgtggtcttgttctcagcggtggtgctgacctggctctgggcactctgttggcggagctgctgaattagcttgagggacagggaccggccagtgccctcgtagctaggagaaaaagcaaaggcagttaggctcgaggtgccgaatcacctctgcaggaggggacagagaaagtagttctctgtcctcaacctgatgaaaccccagactcctgcttgctgagaacagcccttcacctctgaacttccagcagggcatgtgcatggccaaaggaagctgggctgcatggtggctcagctcggagccatctaggcctgggctcaagtcctggcatgtccgtttagtacctctgggccaggaactcaacctctctcagcctcctcctcaaaaggggactagtgtacacagctcacagggctgtactacgaactaaaagagaaagatcaaaaagatgacatgaacaaagcctgtaggataatggaactgcagcaaagatgaatggtcgattaacgagaagttgcatgcttgaaagatgaacagagagcatttccagtttggaaaaatcaagattaaacaaatccaccatcttttttttcatgactactttcccttgaaagaggacataaactagaaaatttttctaattttcaattagaaaaatgaacagaggacctgaatagatacttctccaaagaagatacactgtggccaaaaagcacatgacaggacgccccacatcagccaactaacagggacacacaaacgaaggtcacacgagccaccattcatgctcactaggacggcacagtcaaaaaggacatacaaatactagcaaagacgtggaacccttacacgctactggtgggaatgcaaaatggcactgttgctttggaaaacaagctggcagttcttcagttagaaagttcccatttgacccactagtttgacttctaggtataccctcaagagaacagaaaacgttctacacaaaaacctacacgcgaatgttcacagcagcactgtactagccaagaga

SEQ ID NO: 36357 - DNA, 934 bp, Bovine  19866881420177
  misc_feature (1)..(1): n is a, c, g, or t
nattcaagtgcctcatcaagtttatatgacctagaaacacaacttgcctgaatctgatcaatcggttccttttgtggtcgttggtcagtagcatgagaaggttggtacaagggttgagatgctgtatatccctcacttgtggatgaaaccaaaggaacctaacaaagaagtaaagaaatcaaagcttcattctgttataaaccaacttcattacatatagggctaagaaatagacattcatgttaaagacactataaaacctaacaactgggaaaatacatatattattaaagctcaaagttaataaacccaagcccaattacgaagttccctataaatgcagataatatctacactaaattttaaaattatgaaatctaaactatgtcatctcaaattctcagtttgaaatttaaaaacttcattataattaaaaaccataaggattaacaaatagtttttattagtttattaaaagaaaaataaatgtaaacatgggaaataaaagttgatagctactcatgccagacttgacagtgatcaaactcacacttggttttcataagctagctaagaaagagaccaaagaacagattaaaaacaaaaactacaaaaatatttcagtcttacctgtgtagcttctggctgtacagaaacttgattaggttgagcaagtctagattcagaatgaactataaaattgaccaaaaaaatactgtcatacaaaataaaatttcttcagagatgtataaatatcttttacttagtctctaaagtcaattttctatagccaaatcctaaataaactatttagcaattaggaaaataaatggggaagtacaggaaggattttagctttcaaatgagcattttcaattaactgatactcattattattaatcaactaccacatgcctttcactttttttttttg

SEQ ID NO: 36358 - DNA, 1557 bp, Bovine  19866881587769
  misc_feature (1)..(1): n is a, c, g, or t
nacattgttaaaaagaagttatgagctattatcttcctttttttttttttgcttatgcccccagtggtatgtgggggtctcagttccctgaccagggattgaacccatgcttcccacattggaagcgtggcgtcttaaccactggatggccagcgaagtccccgttatcttcctgtttgacttaaaacaaaaagtgaggaactcaacacgtgacagtttcatctataaattattcttaaattgcaaagccttttttcattcttacagcaatgagaaatcttgtgtcttcatttcaaaagtggggtttgggtcagttttgttcgtgataaaatagttatctgattccctgccttctgttttcaatgagcaggtgcggactttctatttgaaagtgctgaatgaggagcagaggaaacgcctgtgtgagaacattgcgggccatctgaaagacgcacagctttttatccagaagaaagcggtgagtgatactttgtaagccgaacagtgacacctgctggcaggatgggagagtgcagctgtgggagaaagaccttcaaaagaagtgtcatttctattttacttgagttaagcaaacttaaaaaaaaaatgagtatgaatcctccaatcaacctctgattcttttctttctatggcttacctccagtagatacactatatccatcagtcctttactctttgtccagtgtgtaataatttagtttaaggcaaatcgtctcctaatgctattcaatctgactgtagccaagttccatgttaagagagtaatatcccagtatgaaaatgtgggtcctgccacaattttgcttagactttagatgataagaaatacagattacgtctttgtggtttgaagtctgcctgactactcgacattatgatacccaatctgccttcagaagcaaatagaaacatgctgttttctggggtaaaaactgagctgcttccaaagctcaggctgaccttttaagcaaaggtgtcccagggcatttctgatggtcgctcgttgtgctgtttgctcactgttggtttcctggctgccccagggtcagcctctcataaatttaggaaccgctgcccctgtcttatctcttggctgctgcttctctgttcataagggcagctgtctggagtatgttctaaggtctggagataagtaccttgcaggctgcgcgctttctctgcaggcagagctctataaactgtgtttgatgagtgtgtatatgaaagataaccctttgattccctggacactagtacttcttgctgtttactcaggcagagagcctgactgttgctctgtgagagaggtggggtgggttttttctcatctttcttagaaaaatgagtgagactgtttgtaagcagagaattgggcccaaactcttggccttctcctcttacgtacgctaaagctgcctggcctccgtgggttcttgatgtcctacctcttgctgtctgctggggatcggcccctggtcaggaattccttctagaagtgtgcagagttgcccaacacaggccagtgtttgtacacct

SEQ ID NO: 36359 - DNA, 811 bp, Bovine  19866880378639
  misc_feature (1)..(1): n is a, c, g, or t
ntcacacaggccccaggctccctagagtctccaggggtcttttgggagtgcaagggagagacactgggcatctctcatcccaggtgcccttggactccctgggagccttggagcctgtggttcctctaagactcgctcctttctgtgccctggggacagacggactgagctaggaagcccctaaggagggacaatgattgtgggcggggcggggcagactggaacaatcacacggagacccccccagagggccaggtcatgacagatgactgcattttgaccaagcagctcctggcccagccagaggccccactccccaggccccgctggggctgccaaggggaagaagcccgagcctggcactagtaccttacagaaatcgttcctctttgcagcctcgatgagctcttcacctgctcggaacaccagcctgttacactctggcacgggaggccttggcttgcatcagtgcatgaacatgtatgtgatgtattattgtgcaaagcgggcctgaggggcacgtgtgcggagggctgtggcaaacgtgactatagctatgttggtgtgaggctgtgtatgggctccacctcgccccgccccaccccactgagcctgggtcctctgatcagggaggaagcaggggccctgcagggagaggcctcacctgtagggggcgcagcgtcccctggcagtgacctgcaaacagagcagatgtgacggggtgacataatgagatgtgatgggtgacatgaggtgtgacaggatgagatctgacatgagatgtggcagggtgacatgacgagatgtgatg

SEQ ID NO: 36360 - DNA, 1302 bp, Bovine  19866880423358
  misc_feature (1)..(1): n is a, c, g, or t
naccttcctgtcattatgatgtcaaaagcagacaatgcctcgtttctgcccttgccagaggcatggtggtacatgaagtcagccttcactggtcctgctagtgacaagctggaaatgacaaggatgcttttcttaagattctcttctatttccttagcttctcctaaatatcaggttccttattaggtacttggacttcacaaagatgaaccagatggggtctttattctcaaggagccgagagaggagaatgacatggagatacggaatggcagtttggtatgacgagtgttaacccagacagggtgctccctactggggagtgatcagccctgtttagaggattccacagcagggaagcagcctgcatgcagttgggtttcagggagaagagggcactccaggtaaaggcacccaggcaggagaaggccttattcgttccaggggcttggaaagtggctcagcagagtagggcttcttccctgtagaaaactgcagcgagaagaggctagagataccacatctggtcacccgctttctactgcttgtatatcatgggtcctatctttaggatttttctttaaaccaatgcttcagattccagcctgaattccacaagcatccacatgtgtggcactaaatgagcagccctgggggataagcccctatggagcttaacactgaacctaattgggtggattagacagacataccacacagctaaagaaaatacaaaacaacacatgagcaagagcataaactataagtggcccagcacacatcgctgggggaattcacaggttcttagcttgagacagagcttaaataccatctaattagagaaccgttcaaacgctcaactccccttgacaaaaccctggccaaatgagcccccgtgggatgtgggaatctcagtcagaagctagactggttgagtccaggaggccactaaccccatgccagaagcttttatggcaatacacggaggacggcttcagacaagagcaggtcctaaacaccacctttccctgctggtgaaatggacgggacagttaagggcacggcagctccgcagagtccgcatcttccactgtgattacaacctcaggagaggagcatttcatagtatactacctatctctttctgtagcccgcctcctcaaaaattaaaaacaaaacaaaacaaatatttcactgggttctttatgtatctccagactacaggcctcaagttgaggtaaggaggtattcagtttggtctctaccccaagatcccttcaggcctctggggccccagctcat

SEQ ID NO: 36361 - DNA, 968 bp, Bovine  19866880453072
  misc_feature (1)..(1): n is a, c, g, or t
ncctgcctcgttcttggcatcactccttaaagtgtcctttctacctcgggaatggtagctctccattccagaaatcttcaaaagattggtgtagttaccaagtgctcttaaatctaaggcagtattgtttttttctttgttttcccttgttctctggtttcctagtgatagtcaagtttccctgcaggcagaagcatagatatcaacagttcttttctaaaccctttttgaaaaattcagcaggtggtcttgggtttgtgtaaatgccacagaccctaacttaagaaagaaaaccaagagtatagcgttaaagccctaatttgccaagccactgatctctgacagcctggctctatctgtgttctgcctgttttcctttctgcttgggcctccatctcataacactgaaggcagattgaaaagctcagtttaaaatgaaaatgataattcactggtcttgattgaaggagagggtgggggggcggcggggaaccagagcattgctgccctacatccttatgacgcctccttccctctcctctggtgttttggggcagagaggtcagttcaggcctcctgtcattcagagccctggggggtcctccaggtgtgtcatccacttccagagccagccaggtggggagactcgaactctgtacttcagtgcagaccaggctgagggctgcgtggaccagtgcaggggtccagccgattaagtgtcacatctgcctccaggccctcgcattgggcgcggagcctcgtccgaggggagctgcagagtgcagagcaggcgtggcctggctggtctgctagggtctctggtcgttgggtgtgtccacgttgcctttcgattgggcccttggtgattcttcccaaaatgtgtgtttgagtcacttctggtggaccagcaagggacaggggctgagcccggtcagccgagctaggtcagggcccaggagaaagaacgt

SEQ ID NO: 36362 - DNA, 1348 bp, Bovine  19866880470576
  misc_feature (1)..(1): n is a, c, g, or t
nctttatgctctcctgtgaaattagggattagtgtcagcaaggagctgtccagaagactgaagtctctaaatgctccagtttttttaaaggagaaaataagacaaagatgtgtgagatgatccccttctccagggtcacatagaggtggagaggagcactgtcacccccaagcaagttttacctgtatcacctttttcttggaatcagcgggtttacatttttattcatctcagttttgatcttttggacaataacagctgttgagtggctctccaggaacaatttttaataactttctccttatctcatctctcagatgatgtctcttaagtgtgagccaggactcagcaggtgcttgtggttgtgttgactctcgtttcctactacaggggtagaagagacgcatctttcggtgtcttgtgttgcttgtctcatgaccttttagttggataaggcagcctttattatttctggagagggttcggattcaggcccttagggaggcgcccccaaatgtcttgacccagcactttccacaccgttaactccagactcccttaccctctcttatttctttgtctgctgcagcctccgtgaatgtgctggtgcagaactgcaagatctacaatgatgccagctgtgacatttctgcagatggccagctcctggcagcgttcatccctagcagtcagaggggctttcctgacgaaggcatcctggcagtgtactccctggccccccataacctgggcgaaatgctctacaccaagcgatttggtaagggatgggacgcccagcatagtgacgctagtaccttggcctgggcattccctgatgaggcaccgcttaggtgggagtgatggtcacacgctacccccctgcttcacaggcgcaggtcagaggaagatgctctgtcctagctggtagcgttgcaggagagtctcagagtaagagtcctccccaccaccgtggcatcaccagcatgttcccattgtgaggggcgagggtaggggaggagctctgttctcggtcatggctcggggaagtgggcacactcacatgctgcaagccagtctggcattgtatagatttatgtacaagggtgttcacagcggtattatttgtcacagagaaaaatgtcaaattctgaagagttgcttaaataaatgatggtgcattgacaagacagaataccacttggcctttagaacgctcttacagagggatatttaatggtgaaaaatgtttgtaatgtatgaagtgaaaaaagtggatttcaaaatagcagttacagtatgataatttttaatgtgattctgtgctaatacgggttagcattcattaagt

SEQ ID NO: 36363 - DNA, 1531 bp, Bovine  19866880492018
  misc_feature (1)..(1): n is a, c, g, or t
natcttgctggtgaccagagtctggagtttctgcagctgctggagcagagtcctgaggggggcacagcggtcacccagtggctctgacccagcaggcaggtatctctgcctcctggagctctccctgggtgcgggtgcgtgtgggggaacctgggctggctctagacttggcttccacaccaggtgcccgcttcactcaaggcagaaaaggtcacttcctgcttggctcctctgtggcgtggccggggcacctggcgcccgcttcacggtgaatagctgggtcaccctgtgggagctcagaggagccccgtgaggctgcttctggccaaagcggagactggaggcgggcctagcccacctgggctgaggtcaccttctttttctttaaccccgcagcagccgcagctaaaccgaccttccctccttctaccctgagctgctaagaaggacgcgtctggcagcggcctggtacatggtgaggagtgagcgtgcgggcggcggggaggaggcgggaagctaccatttttgttaattttgtcacagcacgtgtaacacttcgttcatttacaaatctgtatgtcataccacggggtcgcaaagagtcagacacgaatgagcgactgaacaacgacgtcagtctctttcgctaactgtgggggctccctgagggcagggactgggtcctccccagcaaggactccgcccacccttggtgaacaaatgttgaaccatctcttccctcccgcccagctggtccatggggtttgcagttcccagaatgtacagcaggtggcgaaatagctccaagggcctggccctatttgggaccagagaggaatcggggccagaggaagcgggtgaggggccgaaggctccctcccctctttcctgagtcagaggggcattctccaggtcagtcatgggagtggctggatcccgctggagaagctgggggagaaggaaggaaagaaggaaagagcccttctgttgagcacctgctcaacagaacagggtgctgttttaattactcccagcgaacaattattaaagacctactgtgggctcatgactggttactaacaagaattcagaataagagcaagaaaaaagagaaggaaagttaacatgaagggagcattctcaaacgccaaggagagtgctggcccttttcttgctaggtcttatcacatcgtcacatgaatccggggagataccacttccatagtctccatgttgacagagaaactggggcccagagatgcatgacagttttcccaggatcacaaagacagcacccggagttgtgactttctgtggccaccgcatgccaggccctgtgtgggctccagactgtttctcaaacttagtcatgcacgtgaatgacttaagtgtgttgctgaaatgcagattctgattcaagttaagtgtggggagaggcccgagattctgcacttctgcaagcccctagctgatgttgacgtgcggtccgagaaactcactctgagtagtaagcatgcacaccatgtacacc

SEQ ID NO: 36364 - DNA, 1788 bp, Bovine  19866880495060
  misc_feature (1)..(1): n is a, c, g, or t
nacagaggcacatgggcttgcctaagccccctgtattctgggtctgcttgttatggcagcttagcgtgtctgctagacaatacactgtgtcttgtactggtcggccaaaaagttcattcggtttctccatgttatggatgacctgtttagccaacccaacgcttctttggcatctcttaggaagctggcaagggaagaatgggtgctaggtaatcaaccagcagggtccagtatattacctgcctctgaggccctctgactttgggagggggatgggtttaaataggtcactataggccaacatgataaacggtaaacgagcagcaatatctaagttccagtgaaaacagccgaaagaatgaagagaaggcttctcagaagggacaaagagtatcatgagttcatttttttctgagtcttacaggctatgtgggaattcccccaaatgattttggttgggaaagagcctttcagacagagaacagcaaaatcacagagacgggaaggcccacggggtctggctagtggtctggtgtggctcgggagtgggagggacgctgagggtagtgaaggaaggccacctgagagcctggggaggcagcggcctggctgccaggcctctggaagccgcgcagggtttgtgagctagcagagacatggggagatatgcgtctttctctgaggtagaggctggaagatgactcgttaggaagctatttcacaaatttggctgagtaatgaggagagcctgcagcggggctgtggtggtgggaagggagacaaccagatagtctgcagggagattttggtggcagaactgacagcacttggtaactgggtgactgaggggggtgagcaaggataaggaagggggttgggtgtggttaaatatgatcctaagtctacatgcttatgctagaaatctagagaaggagtacaaggaaaacaagtgttgggggtgagaggagaaaacgatcacccacccttctgagcctggtccatggaagacttctttgggtccctgaaagtatgacattccttcctaactcagggcttctgaacactgtccctactccatggaacactgcctcgtcctcaaatctccaattggctaattcctcatttcctctaagacttcctttcttcttgtccttttttttttttttttaatttaaatatttatttatttggctgttctgagatctacgctctttgttgcagcatgcgggatctttagttgtggcatgtgggatctagttccctgaccagggattgaaccttggccccctgtattgggagcatggagtcttagccactgggctatcaggaaagtcccctaaaagcctttctcgatagccccctctgacctagatgagaaaccctcttcgattttcttatagtatcccaggtcttttttttacaagtctctcaatcagggtggtttagtcactcagtcatttccatgagggaccacaccagccttgctcatggcttcattctcaacaccttgtccagtgcctggtacactgtgggcacttgtgctgggtttgagatattcaatagttgtcttttgaaataggagttggacaatagttttcaccagggcccattcaggtgtgaagcaatgaggccaccatggggacagttgattgcgaccccttttataggcctggatcactctagaccagtggttttcaatcagggggtgattttctcagcccaggacatttggcatgtctgggagacgtttttgggtaaccctgacttgggtgcatttgggtggggggg

SEQ ID NO: 36365 - DNA, 1590 bp, Bovine  19866880518712
  misc_feature (1)..(1): n is a, c, g, or t
ntgtatttaaaaatttttaagttcctgacagttgctactaaagtaactatttcacatttgatctaatgtacatatttttttcaaatgatctaaagtttgatcaccggatatcatggagtctggcaagatggcttctcccaagagcatgccgaaagatgcacagatgatggcacaaatcctgaaggatatggggattacagaatatgaaccaagagttataaatcagatgttggagtttgccttccgatatgtgaccacaattctagatgatgcaaaaatttattcaagtcatgctaagaaagctactgtcgatgcagatgatgtgcgattggcaatccagtgtcgtgctgaccagtcttttacctctcctccaccaagagattttttattggatattgcaaggcaaagaaatcaaacccctttgccattgatcaagccttattcaggtcctagattgccacctgataggtattgcttgactgctccaaattatagacttaagtctttacaaaaaaaggcatctacttctgcaggaagaataacagttccgcggttaagtggtggttcagttaccagcagaccaagtactcccacgcttggcacaccaaccccaccagccatgtccgtttcaactaaagtagggactccagtgtccctcacagggcaaaggttcacagtacagatgcccacttcacagtccccagctgtaaaagcttcaattcctgcaacatcagcagttcagaatgttctaattaatctgtcgttaattgggtccaaaaatattcttattaccactaacatggtctcatcacaaaatactgccagtgaagcatcaaatgcattgaaaagaaaacatgatgatgacgacgatgatgacgacgatgactatgataatttgtaatctagccttgacgcatgtaacatgtatacttggttttgaatctattgtactgagattaaacatgcatgctagatgtttccatgttgtgttctagaaaaaatagtatttaatgagtaaatatgcttaccatacttttcgattgagctgttgtgttagattttctttaataggattagtaatggtttctcctcagcctttaagtgtaaaaaataaagttgcaattcgtgcatttaaaaaaaaaaagaaattatgggattcttacagcaagagctaagcagtattggttacaagttgactatttcacattttacaattttacatgactcataacttttatgtggggagtataactgaaacaaactatcaaacttgaagtggcctcgggccctgtctctgaaggagaatgttgaaaagagttctgctcctctgaaatcttttctgtttgtttcttaattgggcagtctgtgatgggaggggtttttttgtgtgtgtgcgcatcgatagactccgtcaaagaatattgcaaacaaaggcagacaaggttaaggtctagtctacttcccagagaaatccatgcccattcctttctcagcataggacttgtacattaaacatgaacatttcacttatgttttcccttggcttcggtattcataaatggtgcacgttaggaactaccaagaagtcac

SEQ ID NO: 36366 - DNA, 1101 bp, Bovine  19866880532734
  misc_feature (1)..(1): n is a, c, g, or t
nggatatgtttttaaaaaatgaatgaaatgcatatgtatcaacctggagaatttcacaatattgggcaaaaaaggaaatatgagctgcagaaaaatatattaaaactggtgaaaaattgttggtggatagttatgtaagtggtaaagttataaaggaaaaagaataattaaaaacataataactaactcttcggcagaaggagacggatgcagttggggaggggcccagggatgcaaagatattgataataactgtttattagagaatatacacatacatatacattcatacatacatatgcacacacacatgtataaatcattcttgtataaatcattcactgtattaaaatcattaatggccagtaaatacgaagtgatactcattttcactaatcaaataattatgttagaacaataatgaaatatttttatcaaactggtaaaagtattttgaagatgtcaagtccatgtatttgtaaggaatagacaacaggcagtttacatactactgatgagaatattcagcctctagggagagcagttttgtaataggaatccaagttttaaattggcttaccctttaacctagcaacctaacttctaagaatttattctcaggaaagactcaggtaaatgaaaaaagatgttcatttttagtaacagtggggaattgaaaacaaccttcattgtagcagattggttaaatgaagtatggtgtattcgtaagtgcaactgttaaaaagaagtaggtaatatatatattgatgtggaacacgtccatgacatgttgttaaataaagtaagggcagaacagtgtgatagacagttccaatactgttatgtaaaattaggaaaacatcagaaaggataaatcaagtaacagtgcttatctctgaggcagacaggtgattatttgatacttaattattttgaaaaattttaaatgaaattgtattatgtttatatacaggaaaatatgagggtatcccccccctttttttttcttttgagattgatgttattttgtctagcaggatccttgggacactggacattgcaatggagttaatctaagtaaaactctagtatctttccttg

SEQ ID NO: 36367 - DNA, 1581 bp, Bovine  19866880537765
  misc_feature (1)..(1): n is a, c, g, or t
ncctttcatttcccagccaaatgatgccaattagtaataccaaagggaatgaacgtgactcatggatgttcccagttctgacagctgattgccataaattcccagatccctagagtttgctccaccttctcctttctgactggtctccaaaaatcatcacccagaaagtcacgcttccttcgtgcttttctccaggagacttctgaagggacctctgcaggtctgtttacaagagcacactcagtccctttgcccatctcccagccagactcagagaaagacttgattttagtgtcctcatgtgtatttttgcatgtatgggcatatgtttttctagtatctattaaacaggtaatctttggccatcctcacctgcccccggtcctactcactggccactcctgccttccccagggctgtgtctgcccgtcataaactcagcggctccgtcatcatcacaagcccatagcgccagcaggcagtggcttgctagcctgggatacatcgctgaagtggcattctactcagaaggaaacgaccccctgatcccttcgctcccaagagctcgagcctcatccttctctctgctttcctgtccatcccttagatgagagtaggactctggactcagaggatcgcttgctttttctgagggaaggagggggaataaattcggttgaccgtgaaatattgtcataaggtactgaactcatggccccacagtgtaaggactcatgttgctctaaaaatgcgatcatgcaggacttccctggagatccagtagctaagactctgtgcgtccagtgcagagcgcacagtttccatccctggtcagggagctagtatcccacatgccacaggctgcagccaaaaacaaataaacaaacagtcaaagtgtgagcatgttttggtgaggatgggccaggggaaaggagaactctcacttacagtaatatttccccctaactttctgaaacaggcatatttttcctgaactgaggtagtttgtttaaagtgtagttaaatgtgattggaatgtatagctttgtatagactctaaaaaaaaaaaaaaaaaagtcctttgtcagactgtgtgccctgatgtgggattcagaaaacatgatccctgtaacaggagaacactgtatcctcaagtccgggagctgcgttgacgggttcaaggagctgaaggtagggtggaggacatgaaaatactttgtaaagaccttccaagatgcagatgcaagcgttgcatcatcatcttcatatcatcactattagcaataacaagtgactcggggggaccttttcaaacgcaaatctgatcacattgtgcctttcatccgaggcctccccccgtcttaggacagaagccagagcggcgccacagccctcaggccctgcgtggcctggtgtcctgcccatccacccactccctcacattccctgggcccccacgcaggccttctctccccttgaatcgaccacactcctcccagccccaggacctttgcacactccttttgcctagaactcctgtccctccctcctggttaactctctctttttgtcccagcatca

SEQ ID NO: 36368 - DNA, 1386 bp, Bovine  19866880555056
  misc_feature (1)..(1): n is a, c, g, or t
ncacagcaagcttttccacgaagacgcaatggaagctcaggagatcagaaccagatgcgtgggtccccgacactccagatgcagccaccgagacccacagggctgaagaagaggcaccaggagaaaaaggggcgtgggaggagaccgggaggcctctgcttacctcctgagagaatcctcctcagagctctcctccggcagatcctgatgtaaggcctcctgtgacacagttccagatcggctggcctgggtgtaaatgcgttcccagtggcccgtctcctggttgaaggccacccccacagtcctctcctcctgtgggctggcagagttgcccaactccagcctgctggagctggccgtctggccctcagtccgctcgagagggggcagctggctgccactcgcggccatgccctcaaaggtgccggggacctgccaggaggcgctggcctcgccagaggagtagttaggtgtgcttctttcccagcgcagagtgtcgttgttgaaggtcagcagattgtggcaagcgcggcagcggttcaagtggccacgggacaggttggagttgttctcgctgctgtgcggggtgggctggtgggacggccctggccgttcggattcaaggttattgttgagcatttcctgggcctgctgggcctggggggcctccccgctgaggctctggtccagctcctgaagccggtcatactccagaaagaagcgtctcaggtcacactgaagctcgtggcggatgctgcccgagttgttttggctggagccgttccctccatctgactcagctgccaaccccgaggctggaaaacccctcccttctgtggctgaagtgtacacagaggcttgagagccaccttcctgctgtcgcagcacagagagtagactcaccgaagaggcgctggtcctgggcgggggcatggactccgcctcggagcgagagttcagactgagcactgtccgggtccactcagatcccgtcagcccggaggctatgtcccggtggtacctggaagggtggccagacagagggcctcccagggagcgccgcgggggacccaggctgaggttgcggagcgtgttgccggcggtgctgctctggaccgtactgaaggcagacggccggctcaggaggcccgggtcgtgcggcgctgacgaggcctgctccggggggtggaagggctcggtctgcacaaaagaaaaggaaggggtagtagccctggcagaagcaggggggacactgtcctggtgtggcaagagggaaggaactcgagtgcccgagcagcggctgcaaaggcacaggatcccaaggtgctggcagcactcggctgtggggtaactgacccgctgtcggagccggatgtaagcggaagt

SEQ ID NO: 36369 - DNA, 747 bp, Bovine  19866880598354
  misc_feature (1)..(1): n is a, c, g, or t
nctaacttcataaaatacaaaactagggagggttgaaggtaggagggagacttgtaaaatacaatatcttagggactggcaataataaaaaataaggctcattatttacaaacaatttctgttcttggtctctgtacagtgagggggggcggggcggggcttagtgggtaggtctgttgatgtgtctgtgtgtgtatgtggtcggggtggggcagggaggcagtggtcctcttggtcattatgagaaaggaggtgggtaacccagtgagtggtttatctgagaaggacggatggttgtgggagggagggggtgagaacagagtggttggcccaagggaacagtccaaatgtggggggagggggggccccagtcaagatctggggcaaagaggggctggtgggggatggggagtggaaccctttctcctgggaggggaccccagggggcaggggtacaagccggatccgggttggtgagcaggacgacccctcttctgagtaccagagggtacgccctgtgtcctgggtcttggcacggcctaggagagcttgacggtggtgttgggacccagatccctggagagagaagagaagttagggatgactctgtccgggaaggaccctctcgcccgtctgcaagctgggtttggacttgggagggatggggccgtgggagggtgtggctgacagcatggagaccagggctgggcagagcctggggccccaggaagggaaggggccacccac

SEQ ID NO: 36370 - DNA, 965 bp, Bovine  19866880612517
  misc_feature (1)..(1): n is a, c, g, or t
ntatatgtatgtgtaggttaggaggtaggaatctaaataactttcattgaacagaaaatatttaattaatattgggattctcttggagaatgtaaaatgtcattcaaaatgataaaacagctagctccctataaaggcggtcaatctaatgcagaggtactgtaaatataggaaaaatatgaagaggcattatatattatggtgtcatagaggaacattatatattaaagaataaagaagtgtctttgacattttcttattttacagttttatggtaacataacacatgccataccctagatattaaggtttttgtacctataactatatatgattgtctctgatattctggaatttgacagtatttcaaagaacataatgaacctgccccacaaagggctacttgaatagctttctcatccaatctccctaactcctacctgtccttcactccaactctgtccttttttctactccaggttgaaaagtaaccccattgtgttttaaaaggtcactctaaagaagattttaacactggaaatctgaaggtcctacctcttcactgaggcaaggaagtaactattggaattgctttctaatttttattgggctgcaataagtgaaagcctggcttgtaccaacaaaatacttaaataagtagagaagatatatcaatgtgatttttaaagaattatgacagaaaatccgcagtggctagcagaagctgaatgtatgatctttctcccctctgtctcaatggtttctgatcttttaaaaatctccttgactcgcttgtgtgtgcttttatggtaagctgaaattatcattggaaatgggtcagatataactggtatataaataaatattggtgaataagcagtcaaccttctcaagagtactttcaatttcactaccttgtcatgatcaccaaataagcagtttaatcctaagcaacttcaggtata

SEQ ID NO: 36371 - DNA, 1690 bp, Bovine  19866880626876
  misc_feature (1)..(1): n is a, c, g, or t
ncacacttcctgaatgctgatgcatgttgggtactatgcttgctaccatctcgtgtgctcagaagctcagtcatgcctgactctgcaaccccgtggactgcagcccaccaggctcccctgttcatgggattttctaggcaagaacactggagtgggttgacgtttccttctccatcttacctcttgacaaaaaggaagaacagagtctccggctcctgacaggggtcattacacaaagcaaaatattacaaagacggcaatgtaggagatattaatccagaactggcctcaaccatacgggcacagtatcaatcatttcatctatctttcctatcatgaccaagtctctctgtgttctcagacagtaactgcccttaagtaaccgcttttatctagaattcaccacactcttcccttcctcaggaggctatttatttaggtgctattcccctaaaataaaaaaggtctttccctttccagatcctacccttctttcaaggcttgatttcgcaacgccttctttgatgatacttccctttctctgaaattagactacactgagtctcagtaccacacaatggagcatttggctcatttacattttttatataattacatgtaaataagtcttgcctctacaacaacactctatactgccagtgggcaaagaccaggtattgagcttcttttctattcctgacagtgcccagcacagtgctgggaaaaaaaaatgtaattcaacaagacttattaactgggcaactctctaaagcatcctcccaaaataacaagtacatgatgtgcacaatccatattcccacccttgttagaagcttatgtcagagaaatttcagttgcttcaacagaggatgcaatgcagagaaatatgctgcttgaatccaacaggcatattctgggagtcggtgattacgctagatctgacctttacagaattacagaaagaagtccctaataaatcaagatagatgcgcacgcagccatatacggaacacgaggtgggcgatcaactacacccacgctgtgtcttccatgaaagagctgcctgggatgccgagccgagtatggagaggccttccttctatgaatctcttcttccccatctgcaggtgatgtccctctggaagatctactcaaaaaatcttaagtaacttactgtccaaaacatatatatatatagctacaggaaaaaaatagtcctcaatacatatctatacactcttttattctccttttgtcaagttgcaatgttccaaaagatgaggtttaagaaattgtccaaagcaatacaaagacccaatacactaatctgtcccaagtacagctctcttctactatcagaaatttttttccctctagcctctctgggatattgtgttgtttaacgataaccagccctgcacagacaatccttttaggaggccaaaaagcagagtggaggaagttcatggttctacctcctcacgcctctctaagctcacccacaactctcctttaaggctacacgtcacgtgagccgagccagagtcacatgagagagcagtgtcgctggactcaggctgccaggccttatcctctctctgccaccacagcaagcttttccacgaagacgcaatggaagctcagggagatcagaaccagatgccgtgggtcccagacactccagatgcag

SEQ ID NO: 36372 - DNA, 1947 bp, Bovine  19866880672959
  misc_feature (1)..(1): n is a, c, g, or t
nccagccaagccatcaccagacagagagagccatcaagctcactcagatcagagaaatatatgttggatccacagaattgtaagcaacaacactttttaaaagccagtgaattttggggtggtttgtgtggccaaggctacaccccctccgaggggtctgtgcaaccctcaacctgataacagagacactcttctcctttctctgctctagttcaacaagcatgcctaagaggtcacaggcagttttctgtcctctgaatcataaaacaaaacgattaaattaggcttatgtcttctttcaatccagatctagggatgactgctgaaatttcacagaagtcagccttataatctcaacagaaccagagaggggcttcctgctccacaactagaagctatacacacaagacatatataatagatgtatatacatacacacacttgaatgtgggggaaagatttgaaggaaggaccaatctctgatagagcaaaagctgctggggatgacagggaaatttcactgctacctaactgcctcttcttcaagtacaaagacccatgagggcttgagggcacaccttctaagcaggggtctctaacccttcattagccaaatacatttcttcaaatgggctcatcctcaaatctgctgatacttaaaggtctggaaagcggtgggaggaaaacgctaagagcaagttaatgtcctcttggctcttttggctgacttccctgtgcctgggccttgcctattaattgaatgctattcggattccatctcaaaaacaaatgaggatggagaccagaggcctgccttccccagactgataagagcagcacagtgcaattatactcgaacagctttgttttggaatgtaatcaccgccccagccttcttcccaatgggatggcaacagtgtaattaccgcttcaggagtcattgtttgggaatgtatttcttctacagggttcttgcgaggggaaaggagctgcaacaagaatataagagaatttgcagcccgctccccagtagcggtttcataagctgaacaaattattttttgttttcttacagaaacaccagagtttaacttttcagcctctttttctgccaacaaggcatcaccctataccccatgacggttctgtttgagaagtcccaacctaaagctagacagcctgagttctgattcctactctgtcaagtacaagctgtggttgtgggcaaactacttcatctgcttatgcctctgtttccttatttgtaaacaggagtaataccaaggcatcactggaatactgtgaagactaagtgaaataatatgtgaacagtgcttagagctctccctggcacaaggaagtgctcttgggtctttgttttcagcccatttgaagcactgcattccaccacagtcaccacattttgcaaatatgatctaacatcgtgctcagtcgtgcctgactctttgtgaccccatggactgtagcccaccaggctcctctgtccatggcattttccaggtgaaaacactgcagtgggttgccatttcctcctccagggggatctccccaacccagagagtgaacccacgtctcctgcgtctcctgcattggcaggcagattctttaccactccactaccttagttcatggtactaagcttgagttattgcattatttctgtccacaacccttttaccagttcagcgtgaagagaaatgttttggaaaattttaaatgctgctatagaactgtcacagtctctaagctaatttactctattgagtaagagttactagatatgtccccgtcagtcctcagttgtttactagtccagggaaattacaataaagacactgttgtgagcttcctgttggaaaaatgagcaagtactaccaaagctgccactggctggcaatatggcagattcagaagaaaattcacctt

SEQ ID NO: 36373 - DNA, 1175 bp, Bovine  19866880697632
  misc_feature (1)..(1): n is a, c, g, or t
naatcacatgtggccggaagaacctattcaggcaggctagaggacttcccaaaggagttcgtaggttgaaacactatcacacccaggaactttgttaactggagctgtaagttaactcttttttcagagagaggtagtgggggacagcccccccgtaaagtcagaggtgtaggtgagagcacaaagcagaaagtaggcagactctggttttgggggtagatgctcgagaatttccagggggactcctgaggctggatcccgcctttgcgtatgccgagcctccttcctcatgacctttgccacggccagacttcctcccgctggctcccagcattacctgacccagtataccagttgcggaggttgagaaaccctgagtcttggctcattccattctgctgtgactgagaaaacctcgagccctcaccctcaccgtgctgtcagggtttggttaccaaggctaagtgcctcctctgtaaatactttgctgtaactccgtccattaattcactctggcacctttcctataccttcagcttagcggccggaggcctgttaaatggttgggggttttttgttactgtttttttaataaggtgatactttttcttcctgatgtttccaagagacaggctcagttggcctgcagttcttatggaagagaacctggtgacgatactccaatctgttgctagcatctttagctccctaatctgtgtttacacggccctgaaaatcaactctcccaggtgccaggctccattccacctcagcactctggcaccactggcagagaatacttccccagtctcttccccacagtccgaccacgcatgatggttttattgcccagctgttctccagaagatgtctcttgaggcgtggacctgtggggtacttctggagctgtgggttggagtctcagtcatttgcgttccagttgcagatagagccacagtgctcttaaagcatctggtattttctgtaactgttttcctgtttgtagctctcgtcctcttccccagattttaagctcctacaatatggagtttgtttcttcagatttttttttccctattagcaactagcatttctttcatcatataccaagaaaatcaacttggcttcttccattttgggttatgtgcttgtttgctaaaagttgaaggaaattt

SEQ ID NO: 36374 - DNA, 826 bp, Bovine  19866880713079
  misc_feature (1)..(1): n is a, c, g, or t
ncacctaaggtctgaccacccttctaggcagaagaggcagcaggcccccagggacaggtatggggtgaccgccaccgccgtgacctctagtccggggtctggaggctgaggtgaagctgctacccgtcctcctccggcccagacagcgttcagagacacacgagtgtacacagatgcatgcacacacaacaggtggccctccttcctccgcacgcgcacacacacgcacacacgttcgctccgtctctgcaggtgatcagcagctctgcaggttgcactccgctgccacggtggcggcttgggcacccaagctttgctcacggagccacggcactgcagctgcaagagagacaggggcgaaaaggagcgttcaggagactctccgttgcctgggacacggctcctctggcggcttctctggggaaccagggagcgcccagagcgaagcacacgagccgcagcgcctggggacaaggtggctgctgggatgccagcgggacctggacgctggccctcttccgaggtgctgacatggaccagctctccctggcggactctctgggcctcctccgccccaggcctgaggacggcagaggaggggtcactacctgaggccttgggtgacacttattcagatacgacaagggcagtttctgtatcaaggcacagggtctgctgccagagatggagaatcaggaaaaaaaaaaaatggcttggaagagaagccagccaggaccagtaattctgaagatgaaagcaatgactgagtttggaatcagcgggtgagcgaacttccacatagagataaaagcaagctggcactgtg

SEQ ID NO: 36375 - DNA, 950 bp, Bovine  19866880751018
  misc_feature (1)..(1): n is a, c, g, or t
nctagcagctggcatacaggtgtgggccagaactgaaggcatccttcatcattcttttccaaagtttccttggttacatatgggtgaacatcaggaatcaatctgtcaaattcctcaaaatatccactggaattctgaatgaaatactattaaattaaattctgaatgaaatactattatatttctagatttcagaagaattagcttctttaagatgttgactctatccagaaagaaggtatagatctttctttattcaaatccttttatattcctaggtaaagataaaggtacacatatcatacatttcctattaagtttacttctgtcttttataagatttcttgctttagtaactagaaaattcctttccattattatttcctcacaaaatactgctgatataaaggaaacttcttagctttgactttatcctatatttggccaccttatgggaaagactgagggcaggaggagaagggggtgacagagaatgagatggtaggatggcaccaccaaatcaggggacatgagtttgaccaaaccccaggaaatagtgaaggacatagaagcctggagtgctcaagtccagggggtcacagagagtggacacaagtgaacaacaataacagttataagcagtagcaatgctcactgattttcttggtttctttaggtagaaaagcacatcatctgcaaaaatgaaatacacatctattgtttcaacggtatttttcatttccttttcctatgttaaggaaatactacctagaacttctagaataatcaactcattttccccctttgtcagtatagctaatgatttgttaatttttcttcgtaacttccaagaatttaacttctagtttttgttttctgattctttaattctgactaatctgactgaagcacatccaacggtttttcagacaaaaatttttttcaaaggg

SEQ ID NO: 36376 - DNA, 1044 bp, Bovine  19866880752769
  misc_feature (1)..(1): n is a, c, g, or t
ntatgttaatactgcatgaaaattattgtttatttatttcttcagtagcatatgtttccttctttgtatcgtgtgtgtgcatgtggccatactgtttcgtggactttcatatcatcttacttgtgtattgaattttttgaacagttacctttggtgagaatgttgaaatagacctttcgttaggaataactcttatattgcttgtctatcaattgagtcttaaactgggaaggtggtgaactcttccccttaagagataatctgtgtttcagtcatcctttgagtttttctaaagcaactttcttacactagacacttgttaggcagtttgaatgcccctccatttctctccctccaacacactgcagactgcacacctctgccccctttttaaagaaaaaatagtgagcaggtctcagctggaggaaactattctttcctatattttggaatcatctatggaaatgtttttctgctttttaaagtagacaaaaaaagtgaaccgataatttggagataggaaagggatggggcctaacaggttgatgatctaggttatattttgactttgtttgtgggcctaggggagaaaaataacttaaacacagaagccaaaaagatgggttttgttttattgttttggctgcattgagaatacaaactgtcagtacttgaggagaaggagcagcagagaggaattgatttttttctgctgcagatccaagtattgttaaccatgtggatctctaaagcagcatacttacaaatcaaacagtagttgattctctgactcaattaacagtcagaaccctagactgttttttaaaattttaaataagtaccaaaaacttcagagtaatgacaataatttcctgatcaaagtgggtgatagtaaccatggcaactgctctctctggccttatggacagtatgttgtattgatgaagcttcagatcctctagtagcctgtcacttttatggtgaaatgtagtagcatgtgctgcaggtgatttttagctggattgtgttaaatttgtgtgccag

SEQ ID NO: 36377 - DNA, 1568 bp, Bovine  19866880753293
  misc_feature (1)..(1): n is a, c, g, or t
ngtcatgaagcagaagatgtttttctagaaataaccgtggtcatctctcccttgtctgaaagagcagtcccaaagtgctcttgattgcccctacacccgcctcttgatgccaccctcagtgacatgtgttcactgcacccccgtctgcttcagtcttcacatccatcccacctgttctcatctccacccaagtctcccttctggctcagttctcccctacacagctccagacacagccactggtgacctcattatcaaagcgaatggacaccttgtcttctgatctttcccagcctctcagacggcatctgacagctgtgagctctgctcctagaagctctctccatccacttccgagatactcacctctcccagtttttctcccctctctgtgcgttcctgcacagccttcctgtttactcctcttcttccactgtctcttaaagtccaccttccccgtagttctgcccctaagtctcttttccctttacgcagatccaagattttaacataccacctggacgctgacaatttcctaatctccgcctgggatccctctccgccaagtcctagacttgcatgctaatgtgaacactctacaggcagctcaaatgcaagatgtgctaaaaggaattctttttctctccaaacctgcccctcctccggcattccctgtctcagcaaatggtcttatctaccaccatggcctcgaagtcagacatctaaatgtcatgccaggctccagcctcactcttgcaccccacagccaatttgatgtcaaagcctgttgataattccttctaattatctctggaatctgtctcatcttcactctatgccctgtagagccccaggacaggcaaatctgattatctcactgtctggtttaaaaacattcagtaactctctatcaccttcaggataaaatattttttctctttagatcccttcaagggccatactttccatcagggccaggaggaggctgaggcaagtgtgacactttagagtgccacgtttaaggaggtactcattcccagggctgtacaagggcctccttaagtttgcaccctaaccaccctttgcctcatcccagtcctagctcagctcttcatggctacatgtctgcatgacattctctgcaccccaaacgctctaagcccttctgtacctctccgactcctacccacgctataagacgcagtcaagggactttcctggtggtccagtggttaagaacccaccctgcaatgcagggatgtgagtttgatacttggtcagggaactaagatctcacatgccgcggaacagctaagccagtgcaccacaactagagagcccgtgcacctcgacgaaatatcctgcatgtcgcaacaaagatcctgagtgctgcaattaaggcctgatgcagcccaatgcacacatacatacatatttaaaaaaaaaaagactcagtcaaaggtcgcctcctctaagttgccctccctgatccgtggaatctgaactacatgacactcttctgtatttcttagcacccctccctcacgctgggcctgatgactggttca

SEQ ID NO: 36378 - DNA, 1274 bp, Bovine  19866880755563
  misc_feature (1)..(1): n is a, c, g, or t
nctattatttcactaaataaaagtttaaaaaatataacacaaaaaatcaattattgagaactatataactaaaaaatcttcaataagcatgaactatccaattgaaagtcaccttatcgttttggttcacacattcacctactccaaaaccgagccttttaaccagagggagaatggtggggaaggaacaagaaaacaaatgctctgtcagattaccacagacgtttacttatactctgtcaattgtcacactccacctggtggcaggagctgcctgaactggtgaagtggagctcattatacaagaaattccaaagaacacttgctagatgtacttggggaagaaagcaagatgttcttttttttttttttttttggtcctacacagaatatatctaacaagcctccaccaaagttttttttcacataatagtaggtcagtatctaataaagattaacataaaggaatgacaataatcagaatgggagacctacttaaaccattctctccacggtaagttaaatgtcatctcaagcctttaatacaggtaacaaggcacatccagcaactttaagattctctgtcacacactctcactaacatgctttgcccccaccttctatgggtaaactatggagtttaattaacacagtcaacagcagcctgccacacggctgttagatatttgccactaacatatactcatgggatactctagagactgatttcaactgaaaataaaaatagataaacagagctcaaaaaaaattaaaactgagtctggctgcccacacttactttcacacatgaggaaaaatagcagttctcctagaagcctcgagcagacatatctttagaacacaatgttaaaaatatgccccccctcctttttcccctacctgtttctcactcaaagctgtgattttggcttggagttcatgaagctgtttctttaaatcagcattctgattggaaagaaaaaatatctgtgaggaagatatttcatttgttaacaggatagtagcaaggagactttatgcatactgtattacaaatgatgaagcaaccttaaagcatttagcccatcatatttgtcatgcattaaactgtagtcatgttaccaccacctagcgcatagatcctaaatgtaggctgctaacacaaggacaggggtaaattcctttgtgattatttcaaattaaaagatattttatattttagcattttgtagtgtaatagtactcctttctactaaaatagctattcttcataa

SEQ ID NO: 36379 - DNA, 1094 bp, Bovine  19866880759720
  misc_feature (1)..(1): n is a, c, g, or t
ntttgcttgcttctcgcactagaatgtgaagcctgtgaggacagcaggggtttgtcatgtgtattgctcactgttgttttatcagtgcctcaaagaatacctggcgtataataagtcctcaataaacatttgcttaatgggttattactgtactcacatagacgaggcaaaggatgggttcaaactcagggcttcatgactcaaagctcgtgttctgaacgactgtgctccactgccactgtgttgaatattgaatatctgatgcgttcttccaaatggctatttcctacactctggcagttttctatttcttggctctcgctggagttgatttttctgagttagtgaggactctctatgaactgcatcctaatatttcctcaagatcattgcattgcaaaataggctgaaataagactgcccactgcattacctgcagagctctctctccttcatctcgcttcactgcagcctgtctgccggctaaggtcagaactgcctgcttctggccaaacgcaatctcgggttaaggagttgatatgctgcaatctgcaaagtaaattagaaaaacccaaatgaccaataacagcccctcaggtttgcatgtttaacagccttccaagtgccttcaaacacattatctattttgatgcttataatgaccgaccggatagatcactgctcactccatggcttagatgaataaacagaggtctcaattagcagcagtgctaggactggaatatggatcttctgatccaaaaagcccaaattctcctcaaactgagcttccttccacggatttcaatcctgcttattactcgctttagttttagagttctgccagcttttcatatacagcaccccggagtcttggtagacaagtagactgtgtaactggggagagattgggggtgttttgaacacatgtggtttttggctgcccaacattctgctcccttattttggcaagagccccaatttctgttttggacaattgcttctaccccagtggttgcagtctcagttgggttgttaatcaaggtggcaaaggagagggcgtttactcaagccaagccagtcagattcaagga

SEQ ID NO: 36380 - DNA, 928 bp, Bovine  19866880780848
  misc_feature (1)..(1): n is a, c, g, or t
nattgagggttggtagatggtgtatgtcctttgttttaagatagtaggcttttaacatgcgattccttcttacaggcgtttcttgctgcctgaatacttgccttatgctgggatttttcatgaacgtggacagcctggcttggctactcactcttctgttaacagggtcctggcaggtaagaaggagttgtttctttggattttgacattttaaaggaagagggagtcaaggagagctttcctttctttacctgcgttgttacgatggcatcttggcatctggtggaaagtctcgtactcagatgccttacttcagggcaggaaactactgatggagggaagctgctgctttttatccatcccctcttccttcagacatttttttgttttaatttgtttaaaccatttgtttcttaatccagcaaatagacttttttaaatggaatgataaaggtgccttgttcatgttttattggcaaggaactcatgagccagatcctctgatttaattaggagctgaaggcacacctctctgacccttgtctgctgccagcacatggagttcccaggccctgtggagtcttcagaggaagcagagagacccttggaggagctggcttaaaaatttccatagaatagaaagtgggctggacaagccggctgaggcagttaccctggtggttgagtagcagtgaccagtgtttggggcctaagatgtatgacatgactgggctgagacacagggtgtcctgctgcttctgggcagtctctagagaaggaaacaaagcagatgcatttttttttccaacaaaaggtttttctctttcctccccttcttcgtctgccctacccccacttccactgccaacttgtaaatttatgtacgtgaaggcattaaaaactataaaaatcaagccacatcttggtg

SEQ ID NO: 36381 - DNA, 1904 bp, Bovine  19866880860810
  misc_feature (1)..(1): n is a, c, g, or t
natgcacctgagaaggcagagaaattcagatttaaaatttgggagctctttccccattgaaatccagtcagcagggatcataaaaatttctctgaaatttaagtttggtaaaatgaaaaaatgagaaactttcattttaaaagttagatctaaaaatgtgactagaagcagggcccacttgtatcacccactaccatattctctttgcttactttttctttttcacagttactcaggccaaatcattttcccttaaaacaacatccttctggaaatccacttaggttcccttaacatggagaacataaaatctccacgctaatgttgtcgtaccctcagttggttttgctctgtgatctttttggttttgcctagaccgctgagacaaggatgctccaggatgaaatgagctgtctttaggcgcagttagtcacgaagcttaggttcgagcgtttcacctttgaataagagtcagttcccatcaacccactgatgtttatcataggaaatgtagtcttcacccagattggaattggaatgagtttttcttttctattaggtgaacatcaacaacacaatgtacttggaagaaagaagtttgcgcttatgctaattgaggaagtaatatgaaaataaaatgtttgtggctctgagaccccaaatccctgtacctttggggaatcaaaagtccccaggtgggtgttggaaaatgcttcttgttttttaattctcactctcaataagttaggagaacgtattgctgattctggtcccgacttctctgtgttatctccccgtccaccagtgcagttctcagcccaaagtccgtaacccactactgcctctagtttcattcacccactcagatgctgggatggtagaagtagtgttattttaaattaaatgaaaatgtaacgaattcctctttctttcacttacagcactgctgctgctaagtcgcttcagtcgtgtccgactctgtgcgaccccatagatggcagcccaccaggctcccccgtccctgggatccttcaggcaagaacactggagtgggttgccatttccttcttcaatgcatgaaagtgaaaagtgaaagtgaagtctctcagtcgtgtccaactcctagcgaccccgtggactgcagcccaccaggctcctccgtccatgggattcgccaggcaagagtactggagtggggtgccattgccttctccacttacagcactagtcttcagtaaacgcagtcttttgcaatttctatctcatcagttctctgcagacaaagagagagacatgaacagtatatggcgtgtccattttacagatgggaataacagtggactgtacatcaaagctgagaacaacttctctcccattcatcaacattatactgtggaagagatttgacttattcatgccaatgaagtataaaacacgagtgatcaacctctgtttagccctggggaagaagtgatacagctttcatcaatagacatctatagacataatgctttgagttcagagagccttcaaaacatttattattcgaatagttttcttagcattaccacctgtatgaaatacttttccgtttcagagatgacgctaaaaggaaagtaggctgactggactgaaagaacagagtctagggcttctgcttctccactgccaccacactggggtgtggttctctgtgttctagcttggatgcacacagatgatgagtttaacaagaatgggtgtcaggttcatccagagatcatgacctcaggacgtaaattattcagcagcgaggttgatgtgactatttataggtcataaatcagttataaactcagaaatatgagaacaggtccctaaatagggaggcaattgttacctatccagggtttaatttcaataag

SEQ ID NO: 36382 - DNA, 1563 bp, Bovine  19866880869941
  misc_feature (1)..(1): n is a, c, g, or t
nttactgattactatggatctaatatgctagtagataaaacatatctttaacttttaactaccagtgctaaaaatgatgcacaaatgtgaaaattttaataacttatgaaaactaacatttactaacatgaatcaataagatgacattaaaaaaatatataatgtttattttcttattttcatggtggtatttctttggtgacactccataggtcaacaggaaatgctactgcacaaagaacttgatgttggaggctatactttgagtctggcaaggttactatgctcaagtactggtattataggtgctgacaaacctgagctagtaagactgatgcttcttaaccactgaatttacacacatacacacacacacaattcgattaatgatatctaaaagtatgaatgcctttgagtataaaatatgtatctttcctttggtttcttgggtgtaagggggccagatccttgttaaaaagaaaaaaaaaaaaaaaaaacagggaatacctgcacaagtcataccattccagcacaagggagtggtattttcggtcgagtcagggtttccccacagcccctcttctgcacaggtctgctgtagtgagtgtcctgccccactccctaccaccagtgttcattctaagatacagtttctacctccacttcctggctccaggcctggcagacacacatacactcttctatttgctacttttctttacagaaattgagcatgtctactaaactcttcccaactatacccaacaacaagaacactgaagcaaattcaaaaatgcacagaaattcaaaatgaaggaggctgaagagaagagttgtataaaagcattttagaaagtgttgccatatttaccagaatgctttttaatgataaatattttactacacaaaggagaacataagagaggacggtagtcttggtatactaatcagtacttaacagaagtagaagttacgggagagagatttcagatcaatttaaggaagagctaaggattagagctgtacaaaaaaggaatgggttaccttatgaggtagtgggctccctgtcaatagaagtattcaagaatgctgcatatcatatccccctcttggagattcacaatgcacattagcatattaaaggttctgagaagtcctgcagtaaagaaacctgtttaactttgtttaaagcagcattttccaaattatttgaccacagaacattttccccaccctcccacctcaataatatttattaatttctgtggaaattacagttcctcagaacacattacagaaatatgagctatattctttaaaatgtagaatttaatacatcagggatatatctgaataacaatatgtcagggatgtaagagaagaaactgccacacctggtaaatggttcaaagagaaggcccttaacattccttcttctttaagaaatgtatgattccattgcatctcaaactaaagggctatggggtcttgattatttatttttattggttccatgagagaaaggcaagtagataaaaaggtagtataatctaagattaactg

SEQ ID NO: 36383 - DNA, 2181 bp, Bovine  19866880930913
  misc_feature (1)..(1): n is a, c, g, or t
nctggtggggaaacggggcaagaagaaacaggaggactcttcccaggggacttctttctctgaccagtagaagttgacttggaggaggggtgggcacccctgttgatgcttcatcctcaaaggccagggcgtgggtatgagtggggtgcctggaatttctgaagtctgtatctgctatggttgggtgtggctgttcagttgggtgcggctgttagtttccacccttctggggttaaggacacagggagggagatgaggtcatggtttatgagagcttcaactacgtggctttggaaagatgtaacgtaaaatgcggataaaatgtttatgcacgacattggcaataatacgaagcccctcagttaaaataaaagtcatcagagttgtttcctggagttggaggagctaagtgagctgttaactgggaattgtaagcctgctgcatggtactggtgctcaggctgttaaatagaaatacctgccttccatatgtgtgcactgctgtcttcatgcatccgaatttctaatttctgctggggattctaaagaccattgtgctgctttctctacattcacagtgattataactttaatcttttatctgtatcctgtaataacgtcatccaagtgttctttaaacggtggtgctggaaaacgcacctgaaaatcgacaacattggaaaggaagtgagatgtgatagaaaaaaaacgttatgaagaagaccaaaccaccggcaggaaatgctgccctgttaatttagctgagagcgtgttgtgaaatattagaggtaatgccgggaaaataaaaagtggcattgaagcaagaatatgctacaatgggggttatgcagcacagcccttccactttgcattcatttctatggcgaaattactctggaattatgcatgttttgaatcatgcaaggtcttcaggaacacacgctttgcataaaatccgactgttctgcgcttatcagtgggtgggggaggatgggtcagttattctagggttttcttagaggaggcaactttctctttttgtcttggcttgggccttggtgacttcacttgtaaaatgggacaggctggtttatctcgatctattagattttgtcgaaataggcaccatcattttctgccccaaaggtgtctttttggagaccgagtccacaccatgcactaaatccatcttgattcattgtgagactgacttttcaaatactaggtgccatagaggatccctcacttatcctgatgggattcatccaggtggaacgatccctggagacaagagcccgttatctccacccctgtagtcccaccaagatgtgccctggtggtgacaggtggtggccgattgaaaaggtccacggacgggcgggagaaagccgggtgtgatggggacccggcaccactagagggcagcaccagcacacggctgaggcggcctctgctagggcctcgccgggaggggaggcttccctccagtcactgcagccctcgggaaggccaggcccagttctgagtgcaagtgataccaatgcgggagatggggacaccccaggaccctgctcttatgagacttacatcctcttggaggagacaagataaacatgtgagtgcatcataaacaaggctctttcaagtgcagtaaccagcagtgtgcgtgcgtgtgcgctgagttgtgtctctttgcgaccccatggactgcagcctgcctggcgcgtctgtcggtgcagttttacaggcaagaatactggagtgggctgctgtttcctactccagggaagtagcaataaagtgatgcaaataaaatagtgatggaggaggcacccgcaggggccttcccaggtggtgccagtggtacagaacccgcctgccaatgcaggagacataagagaaacgccgtttcgatcccttggtggggaagatgcccggagaaggaaatggcaacccactccaggattcttgcctggagaatgccacggacagaggagtctggcaggctacagtccatggggtcacagagtgggacacgactgaagccctttagaaggcacacaggaaccggctgaggaggactgcctggggaggtgacagcatgagccctaaatggggaggaagagcagtgatctgaagatctaggcgtacatgggcacaggaaggggtctgtctgggggc

SEQ ID NO: 36384 - DNA, 5321 bp, Bovine  19866880941680
  misc_feature (1)..(1): n is a, c, g, or t
ntaattttaaaactttgtacataaaaattagaagcaagctaaacactgtaggtccttcagtctgtctacacttgcagacaaccaaatcagtcatggcttcagtagttcccctacatcctgggatccacactaaaactacttccaccacactctcccttgcactatttttttgtttgtttttaaacttgacaatccttatacctgacctgcttattaccactggaaagaatccttaaaccaggccacaggctctgcctgaagttcatgccatctttaccctcaccttctggtcacccttagtgatcatctatcaatatccctcaaaagctattcaaatctttgtcttccttgacttctttgcacaagtgtactgttgaccatgctcttcctgggatcctctgctcacctgtcactattacttaccattatttagttgtttctctttcccacagccctgaaagttccttgaggcttagatccttttacagtcatatgctttttaaagttcctatcctaaaccctctttctctccctctctacactcatttccttggttatcttcattcaaaatcaatgctgcagttatctcctttgtcagacaatggaagaccataggacctggatagaattttggtccttacgactagcatactgtatggtctcaggcaagttaattaacttcaatctgtttactcacctcttaaatgtggatagcagtatctattacaccttacaaggctactgtgagtattaagtgaggtcagtataaggtacctacctaatagtcttggcctctcctgaatccctacaaccatatatctaatttatatgatagacatatctaccttaccacttcaccaacactgaaaagttgggctagctcaagaccaaaatgcacccctgtcttcctcccttgcagtttcctatcttaataacaccctactagctcaagctgggaaccctaatcactccttcaatcttatgcctaattagtccttgcactgtcttgtacttctgtgccactgccgtgagttaggcctcttaccaggacaatttataacatcttcctaactggtaatctctcccatctagagcacacaggtccttttgctgatagaatactttctcaaaaagggatctcactatgtcatttctctgcttaaaatttcccgtgttttctacctagtaactatggaataaagcctagactcctaggtgaggcattaaaggctgttaacaattgtacttcgttcattccttcagccactctgaattatctgcttgataactgaaatgcctgaaatgcttcttcctgcctctgtacctttgcttaaatcagttcttcctttccatccaacacctctcctacctgtctatacacctctcattcctgaagacctaaaacaaacactgttttttacacaaatcttttcctaattccctactcaggattaatatctccttctctctgtttgcagaacacgctgtttataactctataaaggcatgtaccataatctactgtatatttcaatttatatgttatacatctctctcttcttctatgctaccagtgacctgagaacaggaaaccaggtcctaagcattcagtagtccattgcctggaagctggtagtcctcacagatgtttattaaactgaacagaataattatatgattctatcatctagaatgcagaaccgtagcacttaaaaaaataacaaaacacaaactacctcaaccaatcatcaaactcagcatcactgataacggggcaaatggtcatgctgtgccctcctgtgatgaaggcacaaaatagtgtaagaagtattcttaaaccaagaaagtttaatgtggatttaatcatgaggagctaaatcagataaaatcgcaggacaatcagcattgcaaccaggccacaggctctgcctgaagatcatgccatcttcaccctcaccttctggacacccttagtgatcacctatcattttttcccaatttgatttttcttcaaaaatttcaacaatgtacctctcccctctcccctccatgcgccccaccaaaaggccatgaaactgctgtagattaaagatcaaagaaaaatggcaaccaaatgcaatgtgtgattcttgactggatcttagattaaaaatataaaggcttctaaagaatacagtggtcacctactagggaaatgtgattttgagattagtgctacccaaaagtatagtccatggacccatgctgatctgtaaactattaatgataagtactaagataagtataaaacttgagaatgtacatttacaaatgtttagagaaatgtgacagtaattttatgtctgtttaataataaagcaattgggcctgtgctttgtccatatgatgttttttgtaatttcattttttctagtaatccattttgttgtacatcataaaaactttactgatgaactggaagtttaaaaacagatgcttttccacagatagtctgagaagtactctattagagaaaattatcaatcttaaattccctgagtgtgatccttatggttatcttggagataaatgtctacaaaaagcagcaaaaatcaatttaagtaaacatgtatacaaagaaagtatacagctatatagaaaaaagttaactagacttttacatccaaaacatgtacatctgttaagctttaaatgaaacatttgctatcctatagctctagtacagtgacaaatgagatttttattagcgctaagaatgaagaaagaggcagaagatgtcagagtatactgaaagctagcaagactacaccccactgctcgcacacagtacttggatgtatttattcccttcctgccctgtgggtgtggactgcagatagtctctctactctgtctgcagtggtggtgttctatgaagctgtttcataagatgaaattcttgacaatgaaaagctccaggtttttaagtaacatgtcaagatttgctctattgaaaaaccccaacactaaactggaaaagaaatcattatccttactattttatttctaatttctatgcaattaacaaagattatacagatcaaaatgtaagtgtgtttgtccctgaaaactgtgaattataaacatgtactggttaggaaaaactaatcttctccttaaaagtaaccagggttcaacataaaagactatcaaataaagaagtataaggcaatcagctgcctgaatcgtatgttgctgtacttttttctctataactttgtaatctcaattagtgtaaaaaaattttttttgctattttggctaattaaattaattagctagctgtaggggttttagaaatatgtcctgtgcttattctgtgctgtgctgtcaaatccaactctttgccactccatggactgtaacccaccaggctcctctgtccatgaaatgctttttttcaggcaagaatattgaagcaagctgtcatttcctattccaggggatcttctggacccagggattgaacctgtgtcctatggttaaagcttccttataaagacatcaaaatataacacctaagaatgccctcaagacctgttagttgggtatcctgcaagtctggactcaagctcactgtcatcttcagaagaatgcacactattaccatctaactttttctaactgggcaatctataggggaaaaataaatgcatcttcctaaaattgaaagaaaattgtcagaagacttcatctcttgtcacttcagagaaaaaacaactatgctgaaatggccatcagtgtataatttaatttatgtgcctttaaaaatctcactaacctatttgactcaatttctcatggaagggatttcacagaattacaagtatatatcacatgactccaaaaaagacaatttgacaaatctgaacaaaatcctgaaacagacaccaaaccaaaaaaaaaaaaaaacaacagaaactgagacagcaattgatgcttgtagaaaaaatgatgatgctgtactgagaatgactgcaggtaggagcagatggcaataactggcttaatggcactgcttactgcataccatgacacactctcacagatgcacatcaccaatctctaaaataacatctcagagcaatgcaatccagtgcaagactttttatgacaaaatcaatgtatcatcactgtaagcagctgaacacacaaatcatgtaagaagctaaaattgtgtttaaagacaaactcatttggtcaaaactaaggcaagaaaaagaaagggagaataaaataagactttcccattctggaagcttagtctactttgggttttttgcttttaaaaaaaaaaaaaatttggagcctttgaaactcacatactcccattttcgaactttcgtggatgctaatttctcagttattggtttctgctttattttctctgaagaggcaaagaaagaactgctttttaacgtgttccaggagatgggagaaaagactgtcagcttttaaacttggcaggaaaggtactttttgatgactgtgggatctaagtttcaaacaaagtcatatcaaaattaagcataacatcaaatcaatctcaactgttttcacttgagatttagactaacctagaagctaacttttattgataaatatacatgcatgtatacagcctttaaaaaactaagtaggaatgaactaggcccacacttggatatgaccaattctagacaacttctgctgaaagcaggcatcagaggagtttaaaagacattctgccatactcctaagtaagttctggagttggtactacagagtatcatgctcgtactgacgctataaactgcactttatccaccgaaatgaactttttcaagacctaaacattttacttttgtattaacttaggcagtcagactacattccaatcttggtaatgaagttgagtctcatcgtctacttggatttgactggctcctttatttttatttttcgtatttcagcttgagacttaaatagcactctgctctataaatgctagcatgacactgaaatatgggttacatttcctaggtagcaaaggatcaaataaccagaaaaagcaggaaaaccagtgtgctcgactttcagggttcctaataaacttaaccatcatgtcatagcatttcagatctttttcctttaaggacttatcactaattcctacattttaactcctttttggggctatcattttggaagagactgcttgacctgaatgaggggaattcaagcaaactctgataagcaaagctactctagtgagagcaagtcttctccaactccattttatt

SEQ ID NO: 36385 - DNA, 3757 bp, Bovine  19866881049133
  misc_feature (1)..(1): n is a, c, g, or t
nccccgctctcctgggctttgatccagtttctagcccagacggtggcacttggtgcaccttccagcaccttctgcagagatcacgttcatcccccttatctaccgtcagcatcccgcctgcatggcctcgcctcccctctctcctcggcctctgctcccctacgcccgaaattcttcacttcgtccatgcctgaagtcccgctattagccctttcttaaacaaaacaaaacaaacgcccctgaaagaagcgatcagtcaaacacttgatgagaattcggctgtccaatctctgtccctcccagaggcctacttgcaggaacgagaggtttaatagggaagagaataaagaattctcttcagtcggagtcagatgagcccacagagatcagcccgtccagcccccctcatttcacgctcagggaagttgagacccggagcatctggcgacctgcgatcagatgtgggttggaggacgcgcactcgggtctgtgactccgactgcagccgcactccccaccctgctcctcactccttcctagaacctgggaagagggatctacactaccctacactcagacccgccctctcgagaggccctggggctcaaaggtctcagcaaagaatgtgctccttcagcttggaccccctcaagggcagaagagataaactcaggaaggtgctgactctacctaccttcccctccaggtctgaagggctctcctaaccagccttatcccctctcctgagttgtggcagaggatctaggtatgatgcccacagaaaagcagaagtcttcacttgccaacaatgccacgaggtaggggtgatgaccatccccattttacagatgaggcaactgaggtgcagaaagataaccaaccaaccagctgggctgtccctaaccccaaaacctggactcctcccactgccccagaagaaggactaaggactcccagcacagtgctcccagtgcgggcttctgtaagactaagaaccccacgcagctctgataaggctgacttcctaccaccctgacgccagctgccgcctcggcccctgctgagcccactgtgtgtaatttggtgccaattaggaatgagtgggaaccattagtgcatttaattcccaacctagaaacaggctctgggaagctaagctgcaattagctgagttgcctccccccaggctgccccagccacccttttctcaccgctgagcccctgcctttgatgggaaccatccaccaaccacttcgagaacccctcctagggatccaggagatccggatgggaatttgacgtggaccctgcccttgagcaggaaatgaaaatggagcattgaggtagctgccaaaacccttgttgccaaagactcagtttccccatctgtagaatgggaataaaaccactcagcacctcattgggttgttataaagagtcatttcttaatttatcacacaaactcttttgatctcctcagcaccagctgtggctccagctacagaggacacaggaaaatcaagccctggctcatggagccttcactctgatgggaaagacagacaacagacagtaaagccataataaaaaatatccatgaaagtgaagcagtgtgatgagacatggagggactggagggggtgaccaaaaaatggtggtccctattgttttcatgactactattttatgtgttcagttgggtcttgaaagcccaatgggacagatcagcgcagggagaattccaggtggaggaaagagcgtgcaaaggcaggaaggggcttaacgagttcctgccactggcggctctaggatctggaatgggcatgtgatccacaggggacccagcaaggctggagaggtggggattctggccgcaaagggctgtgaatgcaatgctcagagacagaaccttatcccatgggcagcagagggccatcaaaaagacctcagaagagagtcgaacggcaagactgatgcttccaaaggccagatgtggctgcagcctggttggaggggcgtggggagggaggctgcccacggaggctgtcagcactcagagaccgagcgcaatcccaaggagaggctggggccaggcctgagggtggctgtgggcagggagagaggagaggtgttcgagaggcagatgagaaaagggctcgctgactgatgggatgtgggaggcgagcgatgacttgagcactatgaataacggcgtcttctcgctaccgcgggggagcagcccaccatgccggcagccccagccctgatgcaaagtggctgcaggagcactgggcagacactgctcctccatggcacacgcgtgtgcctcggctccttggatgccaggccttcgcgtgcactccctctgcctttgggacacgtcccttttggacggggccccactcagcaacgactcctctgggaagccttccctgacagcccctcagttattcactcccctctccaggtttcatcaggaccccactcacagagatgttagcccttcccccaggggaggtctttgtccctttcttggttcgtctcctcgagtagcctacgaactgctccaggacaggagtgtctgtcccttattgttgtctggtgaccagtacgctctggacatgtttgctgaatgaatgggtgaaacagagtgggaccacccactaagatgtggaatccaggcgaaggtggtgagtcgatctaggctccgctgggtacgaaggcgatgtgtccacatggatgcatgaggcagctggatataaggatccaaagctcagggaggtgagctgccaggtcatctgacccccacccccagccctgcctggcctccctgcctctcccaccccgagagccacttctgctgcagtgatccatgagccgccagaacagagggatcaagagagtgcgggaatgtggcactgtccaccgagctcctcagggagcctttagggatttgctttccataaataaatgaggtttggggttaattgctcctcccttcgtatatggagggatgtggggtgaatctgctcttcctccctgctcatcctcactaggaaaatgagagcagacccaggaccactactcttgggggaagaaggaatgacattttccctttacattggaaatacttaaaagtcccgagaatagatttataggaatattttaaccttttctttgatccttgaaatgtcattgttctgtgggctgaatcgccaaatgtgaccttttcctgtagccatagggcgggggaaccccactgggtctttgaaaggagcttcagatgttctcctggcagcttcctcagcagcccacccaccctggagctctgagctagcaggatgggtgagtgggagaggcaagcaggggccagccagggagcgccgggcagcactctgcttgcctcatccacggaagatgagctaagtgtgggtccatcgctagttaattcactctgtggccttgggttaagcttcttttttttctctctctctttaggcctctgtttcctataaaatggggaaaattgtggtacctactttaaagagttgttgcaaagactaaataagactattcgtgttgtattagttcttgcagaacaaaagctgaaaataaacaaccccccaaattcagtggctgacaaccgtgaacacttattcgactcacaggtctgcagggtaacccaggttgggtggactgggctgggtttggctgggttgagtcttctctgtgtgtgctctgctcatgctggggccca

SEQ ID NO: 36386 - DNA, 1571 bp, Bovine  19866881055661
  misc_feature (1)..(1): n is a, c, g, or t
nctccatgcggctgatgatggcctgaaagcgcttgtaggtaaggggcggcttctgcccattcagctcaatgatcctgggaatcccaaagacgcctgccgtcactctcgaggcccttcgtctcaggtctctgcccgcccagaaaacagcccagactgcgcaggcttggagggtggccttcctcatccgctctgggtcccacccctagggggaaaggaggggacaaggaggctacgtctccatgttaccgagagggaaatgaagcccagattgctggagcaggtgccttgggtaacagagcaagtcagggccaaatctggggttcaattccaggttccctggtgccggtgtggagccgcctaaagacagacactgaccagatctctcttatcacagaaaagtccccactggccttcacggtccttggcctgcctgtccaagccacagggtgccctgtggactgtctctaccccactgtaagcctccaggaagttctttgataagagctgcaaacgtgttccttgggtggaaattcattctctccttgggccctagttactagaacagagaggtggggaacagcctgtccctccctaaatcggaggctcggggttcatagtcacaactcaaccttaaagatttttttgcagtttacaaaaacacagctgcactcaggtaagaaaaaaagctagaggagagtttagaggcgaattgaggctgtttatgtaaggatgaattcggatgggctggagccagactcccggggcccctgttggccaagcagcagctgacgacaagccagaacttgccgggctagttcatctcagttcctctctcctcccctccattagcggaggcagaaggttggctgctgctccggcagtgcctccgcctcctcctccggcacgtggcgggaggaggcgctccacacccagcgcctcctgtgagcccagctcacatgcagagctgtgtgacctggcctcccagcagccaccaccagtctggggaaggcgggcgggaagccttggtgacggcagcagcccaagagggacagccctggcagggaaggaaggggaggagggggtttcctcctggcctctctgaaagcacagggcccccacagtgatctctcaagcctccagggcaacacctaaatgtgaggcctggaaacccaagagccaggagagcccagggaacgcagctgggtaacagaagctgtgcctgtgagagcagatatctactgtgaggggccacagacagggccccactgaggtcagagggcagtttctgagcagcaggatggaagcaggagcatgtggggtaggtgggcctggagcgtgttaggagcagatctatgaagatcctgcttgcgtctcttgggcctaatgagcctctctgcacccaaatttggagaaggcaatggcaccccactccagtacttttgcctagaaaaccccatggatggaggagcctggtaggctgcagtccatggggttgctagagtcggacacaactgagcgacttcactttcacttttcattttcatgcatggagaaggaaaggcaacccactc

SEQ ID NO: 36387 - DNA, 1444 bp, Bovine  19866881068313
  misc_feature (1)..(1): n is a, c, g, or t
ntctgaattgtaagggtcttgctacttattacagctctacttagcttcagctaagcaacaggattaacatcttaaagttccagaaagatcttgagtaagtccattgaaaaattccattcgctattagaagctgaaatttgtgattgctttttacctgcttacaatattacacaaagtagattgcttatggtggacagcttaaggatgctgcccttaggtacagagtactgttagaaatattttgcttggaaaataattagtctcatattggagttactttcatattggtgagtggagtgttgaacacgtttttaaaaattatgtgctgtggatggctataaacaaaagtagttaatacgacttgggacttttgactttgaggtcatctttataatattgagtgagatatagagtacttgaactattattggaaagggagatattgtatggaaaaattcttagactttctgtgtttttttccttcccatctgtggacagtaatccgaatagataaattcttaggccctcaactttataaatacatgcagttaatgtgtttgagttggcctccaaagaccgagattcttgaactagaagtaaagttctgtctgtgggtataggtcattgctgatatggctgttagtaacacaacaataattgcataaagatggaagtattttcgtagcatttatagcacatggtcctttgaaactcttgttagtcttaggtgaattgatttatcactggaaatattatggtactgtggtggcttgtaaagttttatatcaaagttttaaaaacttaagaatgtgtagcaaatttgatgaacttgtttgaattttgtttgttttttggaaataatgctgtacttttttctcagtaagatcaaatgatataatacatgtgaaagttctttgtaaattgtcagcagccatgcagatgttaagttgttgagataggtggctaattaatacatgggcagaagctcctggctttaaaatattaactttattcatatgatttgggaaacgagtgcattaaaagtgcacccagaacactttatgaacttttttttaatactgctctggttaccaaaaagctctttgttagaatattgaagctttgtttaaaaatgctgtctaggcagtttcccctaataaaaaataaataataaatttttccttttgtagaccctgtgaaatgtgtatctcctgttaaagtttttcttcattctccattgatgtgatagtacttgattttagtgattattttaaagttcctgtatttttctatagacttttagtaacacacagagtaaccagatgtcatggttaatattttgattgttttgactgatcctgctaactttctgaaaaattcttgctgactaaaccattcaaacttgttcagagtgaaaaagacatgtatctgtatgcgttagtat

SEQ ID NO: 36388 - DNA, 2573 bp, Bovine  19866881103923
  misc_feature (1)..(1): n is a, c, g, or t
nggccgagagggaaatgcccaggtccataactagtaggtggctgaggtaagatcaggaagatccgtctgactctaaagccctggctcttttcactatgcttcactgcttcctacaagagaagagaagacagaaccttcatgtggcttagtttccaatgcatgaaaggaacaataagccaaagggcactggctagacacagtagttaattaactgctcaatcaactctacaaaataaatgaacctcttgagagcttgatttggggtattttctgaattcttcctttggattatcttcaacttaatgagataatcttcaaactggccctggaatcaaagttaagacaacactttggctttcaagggcactactgagagccttacaaaccagaaatgaaagcccaggaaaatttttatatcttggtagaattggatgctgagcatttagagacaaatcaatatcagggatcttggaagttgatccattaaaagtcagtacttggtttttatcttcccagaagagacagcatactgctgttttctttaacagagcaaatttctttgacttgaaactctacagatgaagggagatgcaagaaaagagagataagatcatatggaaagtgaaaaggggattataaagaacgagatcagaagttcctgaccagtagaccgcaactctggggaacgcacaaattattataaggagcagcttattatcaaacaaaaaaggcagctcccaaactaagtatattattatttttcaatatgtagattcaagttgtgatcaaagtaccaattcagttaaaagtacaagggaattcatgacagctcttcacatattttacttatcaatgggcactgaaagtgcaactaattatcatgagaggagttagaaaatattttgaagttttaagggttctaagggggaaaaaggggtcctaagcctcaaaacggtcaaaaattaagttacagaaagaagcatcatgggacaaatccaattactttattctacagctatgagagagagctggccttcccagaaccacaacgcggagctgacaatttacttctgaacaagggccaaagagccctctccctctggacaataaacagcactctatctggcataagcagacttgaagagcaggaaaggggggtgggcagtgcaggaggcagcggttgttgtttagttgccaagtcatgtctgactctttttcgacccaatagaccatagcctgccaggctcctctgtctgtgggaattcccaggcaagaatactggagcgggcagccattcccttctccaagggaacttcctgacccaggggtggaacctgcctctcctgcattggcaggcaaattcttcaccactgagccaccagggaagcccgtaggagacagtacgaaacagcaactgccagaacccaaacaagacacacagccgggtgaaaggacatatgaagataacgcagaaagatggacgaacactgtggctgggagaaaatgtgggctcctgtgacatatttcctatggctcttttcattgttattaaaacctaaaaacaattaacttccttctgattcaatttctccttccatttaaaaaaagaagggaggaaggaggaccaaaacgtggtcagagataatggctttatgttacttagagattactggaagagtagtatacagagtgtaactagtagtagtagctatatcttccagtaatctctgagtaacatatcataacaatctccttatatatatatacacacatagagagagaggaaaataagatgcatacacggggaaatcagctggctcagatacaagcagtctcagactgacggttacattaggaaccacaaaaaaggcaatatattaagtgattggagatgtagctaacattttgattaatgacagagaagtcggagttaaacagcatttcaataaaatgtagagaagacttcaaattcaaattgttgggcacaccagcaaagaagcagaaatgacagaactgtacacagactgattggaaaagtggaccgtggtgaacacacaaatgagatgctgcctatgggaaaaaaaaaaatcacaaaggcacctgggagaaaacagcctctaacagtaacaactcaaacatttcctgactggaagaaacttgaaaacataaatgagcaaggtggcaaaggccagaatgcccaaccagtggacaagttaagcaggaagagggcacaagacccaggttttcctgctggcacacaaaaaaccttgactaaaggcatggttccaataagcgagaggtgaaaagagcaactaatgactctagctgctagttcttctatagttcagaaaggagagaaaattcaaaataaggagctgagatggggaaacatatttcaatgtaaaggacattggcaaaggctcggcggagggggtgggttagaagtgaggggagaaaggaagagtggtaagagtgttaggaaaggacaaagaaattaaaaaaaaaatacttaacatgttcaattcagaaaactacagactctgccactcacttcagtgctgatacaagatcaa

SEQ ID NO: 36389 - DNA, 1796 bp, Bovine  19866881133870
  misc_feature (1)..(1): n is a, c, g, or t
ngcaccagtagtgaagctggccctttctgcatggcacacagctgcactgagccaggcttcagacaaacacaggggttcctcatggtggccctgtaatatgagaaactatttttacaggctggagtatgtcactacaggatagctttctggccctgatgtgacaccccatggactgtggcctatcaggctcctccgtccatgggattttccaggcaagagtgctggagtggattgccatttccttctccaggggatcttcccaacccaggaatcgaacccgggtctcccatgttgcaggcagatgctttaccatctaagctaccagggaagcctaaacacctgaccaaaacaaacaccccccaaaagtctcaacgcttcaaaaggtccctggtcagcctcgtgcaggtgcctctccacctcatcacttacaccaagatatctatctgtgcttgctctgggcttccagctgagtgccacaaggaccctgggggaagagccagccttgtggatcagcaggtgtttaagaaaggaaattaacacccacaggttggctctactttggtagagagggtgagaggtgctgtctgccagctcccatggcatttccagccagtttggaataaatgagactgcctgaggacatgaactgagaaagggaaagaaaagccaatatgagatcagagttttaaaaagaaggaggtggaggggtagcattcctatcaaggactcagacaaaaaataatggagtagatgggataacaaggaagactatttcaagtctttccagagtatgtataagatctctaatctcaaacaaagtgaagactggctactgcctccactggaaaaaaaggggagggctttgatctcgtattgcgcttattctttcctcacgtctcctccatagctttctgtattgttgtatcgtgtgttctgaggggttgcaaaacatatcaaagcatgtactaatcataacctaagaagacagaagtaaaagggttctggcattatagtgggtccttgggagatgagagggcatcttcagttgcatctgcaagatgagaaatattcctaagaagtacacaagccacaagactcagatgctcagctctctgggtctagggaggccccaggcacagagaactcacagcacaagttacacagcaggtcccagcccggataccttgatgcccaccttctctttcaggaggaagaagggggactggcaggagactagttaggaagtgagaagaaaggctacaggtcaacttcgcctaggaagaaaactcctagcagagtcgacaagaacctgcggtcccagcaaaaaagcttaatagactcctattttccactatagagacgctggcaggttctgcactcccatggacagttttttgtgtattcttcttttttgtgtatacatttagcacaagacatactgtcctctagccatttctgagtatgatgggcttacatagtaggtggaaagtgtatggacagcagagatcatgtctttttcatctgggtactatcatatacctaacactgtgccacagaaaaaacagaagctcaatacatgtttatcaagtaaaaattgattatacgccagctgagcactctgcaggcaataacaaattcattcattccccgccccgccattactcattactcacagctccagataaagaagacttatataccaggggctcaccaggaccaatgcatcttagattccgggcacgcacactccttaaatatgttagcaaagtcgtctcttcccatttcttcctctctgc

SEQ ID NO: 36390 - DNA, 1868 bp, Bovine  19866881134231
  misc_feature (1)..(1): n is a, c, g, or t
nctaaggcctctgagctacctgagctgaagattccccaagtagcctgggacaagatcctcccgattttggtcctcagagtcacaaagcttcttgtccacacaaggaaaatgagttctccttaacaattcttaatcatatcagcatatactctcattctgtggtactttacttagaggaggaaactatagttaatatgcctctactcaggggggaaaggaaattgtccagcttctgctcccacggcgggaatgactagagaaaggagtcaacttaagccaacagaaagaagggtgatagcgggtgggaagacaggcaggaaagacagggtgaactgggaagaaagttattctgtccagaagtcagaagcgtcttgcaatgttgaagaatttaaacaatccaacaacagcttttatgttaagcctcctttcctccatatgtatttcaaactattagtaaaattctaaaactagtagccttcaaagctcgttcctctgataactgtcaaaatgagatcagtctatttagtagtgtttagtcactacactgttatgagatgacaatattcaacttgcaaggaagaaggaaaatgttttaatattaagcaatctacaaatctcagatttcaagattttatgtcctttagacaattttatttattttgtgattgtacttctttcaccatttttagtagcagaaaactgaaaataacatcagttttagaatcagaattccagaactcagtaacttattggggaccttatttttttgccttctcagtatctttggagaactactcttcccctattctcagtatatgcagttcttcctgggatgatgtcaatcttgtttctagggtggcatgcgacccagggctggtcagtgagaaggctccagttccttggccatggtgaaggatgactggtttaagaatggacctgaaaatcaagtccatgttttgtgctgatatttctagaaggaaaaaaaaaaaaatttctcttttcactggggttgataaaatggcaggttgtaaactaagagctaccagaacaactactgagtacaggacagtctctgtgcaaataacgccgaaaaggagagagtaccctacaacacagtttaagccccgagacacagccaggactgaaaccagccacatctttcaactcactagtcctttaagccaatacattctctctttttttttttgctttagcaacttgagttgtttctgtcacttgaaaccaagaatgttcattaatgcaccagccaaataaccttggacaaatcaatctcattgcctatcagttttctgaattataaggaggagtgaaaaaacatgtttgtttacctgacagaatcagaaactgctaagcactacataggaggcattgatattttaactaacacagaaggtaaggacagaagaaatgagatattcatgggctaaactgctcttaggtgctactgctaagataacgttttattagttttctcatttgccctggtggagcctatgaaatctttatcaaaccagttaatcacctagtaagtctctaagtattttccctttactactaaatctttaagtattttcccatttactttcagttgacaatatttttccgccttcctagacatctttgatcaagctacctaagtagtttaccatgatggataagcaaagggatcacagaaagggaaaactaacagtttcatcttcaagggtgtgtgtgtgtgtgtgttaagtgtccatgcatacatgtgctgggagatgaggtaaagcagtacttctcacacgaaggcaaatcaagggtgaaaagaagctactcctatacaagatgaaaacctgagggcttcaactaatgtg

SEQ ID NO: 36391 - DNA, 2035 bp, Bovine  19866881190985
  misc_feature (1)..(1): n is a, c, g, or t
ngccgagggctgcttgtgcttgcccctctgttagtctccaggggctctgagaggggacagggtgagagagttagggattgtgccttttaatttctttccccaatccttttcctcaatcagaagggaaggtacacctgtaatttatagttctttcaagtacagaggcgcaggtaagttaggtgtggcctgggatcctcctagcacttagagtaccattcagagacgctgccctgctgggcttcctcgccttcccagcacaatgcgtgcctgcctctgcccctccagcatgacctcttctctctcctcccatttgcggagtcggagatcattttgcctttctccagcatgtcccatccaggtgtatagtggcctcaaaaaacaaagggagccattccccatatcccttctgttttggttctctttaatcttccatcgaatgaaagggatcagtcagctaccatatttttcatgtacactagttagtaacagacataacattgtatatttaaaaatctagtttactcgttataataaccctctgagatagtagttcctttcagtgtggtttttttaaagtaaggatactgaagcttgaccaaaattaggcatatctaagattagagatcaggagcaaacatatttagtgtctgactttattgtcctgcagatgtaaaaccctttaaaaatgatgtacaaccatatttgagtcctagctccgtgagcttgctgggggaacaagactgtctagatttatcgctcatgggggatagctttgaaggttggtcaacatcaggttaaattttccattctttgtatttggattgatgaccatcttcccagggaggcaattttctcttaccattcgtctctgtctgcagcaaggattgagactgcaggcaccccgtgtttgttaaaatgcacaaacaggacatccagaaacctgctgtcaggaggtccgtcctgaagccctcagcgtctgtctttgcataaagatgctcacaagcaggggcaggatgtggctgcccctgaccttgctgtctgcctgcttctgagctcagaccaccccactagaatgtagatggcaaagaagccgaaggaaaacacacatttttattttcaccatccctttggaaaaagatggagagaggcttctgtgaagcccaggttgagctctgtgttcccgtagttcctaagtcctgcaaaagacgtggtgtctgtgactttatgactgtagttttaactatcctcagctccttttcctcattttatctgttattctaaacgtaattacagtctcagaatcatctcctgattcttgcctctttttgtaactactttgccttccaaggcaaagataccctgtgctaatgacagtcagaactggagaagcttcagattagatcagtcacaaatatctcccaacactgggaaattatattcaacttcttaagagttgctgccagcacagagagaaatagtcgttcattcacacttgtgacactgggctgtactttgggaaaacatctcagtgcgaaatcctagtctttcagccttaagatgaagtctctttaagtctgttgcatgtattttattaactcttccaatatatctggttgtatttggtctccttttacctagaaatccatgctgtgagtaaatacgccagaccgtttccttgtgaaatgattgacagtcgtttctgagagctcaggatgggtgctggttcctcggtttggcatgatgtgtttgtcgccataccacgtccattcgtgcagaggagcctcaacctgcgggcttttcgtgttccccttgccagacgcagggaagttctagcaaggaagtcatcgaaaggtcttcttagtatatataacatagctgaggagggttctgaaggctgtcactcagctctgccatctgattgggtgtggcgtaggagaagttacttgcctttatagttcgaaatttaatattcttcgtctgcccttttgctgtgactaaaatttaattaagtcacaccaagaacatacgttagaaa

SEQ ID NO: 36392 - DNA, 990 bp, Bovine  19866881332884
  misc_feature (1)..(1): n is a, c, g, or t
ngatgagctgtgcttgtcattagtgcattaccttcctatggcctgagaaaacaaataagagagccaggaaatctctccctgtgtaaattaactcatcaaaatttcagccttctgagaagaagctgcatgaacgaattgaagcagtgaccactcaccattgtaactgaacatttccatttccatgtgggaaattaatagacaacaagcagcaaatgtaaattgctaattggagctctgaaatattaatgaaactataaacacaccacccagagcttgctgaaactaccaagtcactctttgcctaccacgtcgccgtcattaggggagaagtaaaaccctggatccctagctacataccaaattgagcctgctgctggagaaactcaactttaattccagcattctcttttcacatgttatttgcatctctctctgagctcactgtaggaactgggagcagttgtgaaattgggtggagttgaggggaggggacaaaatttgggagctggccattgaattggattcatcctaatacagtacaaacacaaacgcaatggcttggatttgggggctcacagaatggtttttgtctatatgcccagtttttcaggcagttagagccaaacttttcagaagaagaaaaaccttacttgtaatatcctccccacccccagcccaccttagaaattaatctggaagttggatagcattgctggctcaacggacgtgagtttgagcaaactgcaggagatagtgaaggacagggaagcctggcacattgcggtcagcggggtcacaagggtcggacacgccttagtgactgaaccacagcagtcttcgtggtgcttctctcatgttggtgggtgagttctgaggggtcagtgcaggcttctggtatgtttaaactggcaggttaacacgtatgaaccagagctctacaacaacaagatagaaaagcctactttcataaaatactcacatgcatttttg

SEQ ID NO: 36393 - DNA, 955 bp, Bovine  19866881338837
  misc_feature (1)..(1): n is a, c, g, or t
nttggcctgcatgttatacggagagtcttagtcttacaaagtgagaagcagcagctttatctttctctctaggaccttccccacctgaaggagtagttgttgggttccttttcccaacattcaacttactgttgtacttggatgggagatgctgctgtgatacccattaatgcctatcttagtgtcaccttggtcataaagaaacattggttggcttggtttcataccatttcatagccatcttcacagaacagcctagggatgactgatgataatgattattaccataggttcattaaaatggaccacagaaaagacttggcatccagagtactcaaatcagtcataactaaattggagctgagaccctgggtcaggaagggtggccagtgctgtcagcacttgacaagcattatgtaactagcatctgtaggctcttttggcctgtccttgctccagtcttcaacatatactctttaccatggcttcctccttgccttgaatttagcctgtgatcacatccaatcatctgcacttacttagattctaaaagtctgatattcaaacatgacctataactctagttcaatccagagtattctccagaaatcttcagagaactgagcctcttcttaatcttgtctggccttgggagtggcagacacagaaaataaagagattttatttttgtatcctggaagggtactatttcttcaaggagagatggggataaaagagagacagctttgttgtcagaaatgatttactccttcctaagatttttgtcctcattaattttcttaaagctgcttgtcagttgattaaaagccgcttccgctgcaattatcttaaagttgacttcagagatgtggttgcaaagcatccatcctcggaaagttcctttcttcagcacgtcgtaggaaagggggaggaggtagggagaagtcaggggtgt

SEQ ID NO: 36394 - DNA, 1147 bp, Bovine  19866881481721
  misc_feature (1)..(1): n is a, c, g, or t
nctattttataatggtggttattactgttattctaacagaccgtaaagaaaacactaaacattttttctttttgctaaaatgacctagcttaggattgcattgtctgatcatcttcaccattgttaacttttcagtctctaaaagaaaggactgcctagtctttttcttgtgttgtttttctttcgcatatcaataatttttccataccacagacctaaacaggtgtatttagagataatcagttgttgaatgaaatcgatgggagaatttttcttccttcaggatcctctaaagccaaagtttctctcatcttttgatctagaaaacaaaaagtttatatatatccattctaaatccctttagaagatctaaacttgatttcagtttcacacgctgcagagttcagagaccacattaacccaagaaaaatcttccttcttactgaactgttagtaaatgctcataaattttttaatcgaggttctccagaaatgcagtatatgaatgtgccactcaagttagtaagcaaccaggatgactgatttctccggggccctcactgaagggcaggactttagtttggggcgtcttgtctctggggctggtgtctgcttctgctttcgtgactctctcacgtgcagtctttttctttttctccagggacagtggtgacagatccaggcaccgagctcctcgcaatgcccgcatgtctgcaccttcgcttggacgctttgtcccaaggtaagaaccgggtagtcagctcttaggcttttctaaaggagcctttacgagagactgggatttttaaacctacttcctggtctggattgtccatatctggaattatgtcctagggagcctacagtcaagccctgccacctaaaaacttcccagaagatgattaaccacaatgaaaaggcatagaaaagtggcattgggagcatcctgttcaagaataggaggccccccacccgccacccctccaagaaaagaagccccaggaaaccttagaagcatgatccaggaagaagatgtgacatgtgttaagggatgtgtcttagaaatttcactctgctctaggtttctatggattcctaggcttagtggatcccttatcttgattgagggtggtagatggtgtatgtc

SEQ ID NO: 36395 - DNA, 907 bp, Bovine  19866881667095
  misc_feature (1)..(1): n is a, c, g, or t
ncccgtctaaagaggacgagatgactaacctataataaggaagatgtctctgggaattgataacaaaagatgcttcaagatacattgttcagagtgggaaaaagcaagcagcagaacaatatatatagcaaggctaccttttgaaaaagaggagaaactaatgggcatttatttgagactgaagggacaaggtgaccagagacaaagatggaagctggacttctcagtgttccccttttgtcattttcattttttaaattacctattcaaactttattcttaaaatatttgatgatgtgaagaaaatgttaaatgataaagacaaaacataaaatttatatatacagtgtgatctcaattttgttttttaaaaaaactttaagaataatgatgcaaaaaattataaaaagcattaaccatggttctctttgggtggtaggattatagatgacttcatcatcagaaaaggcactgttgatttttaaatttaaaaagtaataactgcttattgtaaaaagtcaaacaataataaactctttacatttcaggaaaggttgcaatctaaaaagtacacaataagacacatccaaatacagtagggaaaatacttatttgcctgtgccgaaatgagatttctctttggaacattaaaatagaaagtcggaaggagcctacagaaagatgtaactctgagttcctagctgcatatggcacaaagttcgtcaggagtgactaaggaacacactccggcctgtatcctcggagcacagttctcacccaccagcagcacacaaatgtaaggatgcacacactgactgtgccaacacggtgccagccagcctcccgcaaaagctaaggacgaactaactcaaaggaaattgtctccttggtgactgacaactcaggg

SEQ ID NO: 36396 - DNA, 803 bp, Bovine  19866881939057
  misc_feature (1)..(1): n is a, c, g, or t
ntaaaattaagcaattttatagcaggttgtgtagtttttttttttttttttttttcaattaaaaaattatcttactttacaatagccagagtggtcaggaagtcaagtttgcacttttagaattagcatagcaggcgtatagtgtgtgtcctgtgttctcttcatttcagtctgtgttcaggatctgtaaaacttgcttctcttgggtgaatggaattgtaaaaagtttagaagtgtattttattttaacaaacaggggagttagaagtggatgctaaatggcctctttggggttgatttaaagaattacacaattttgaaaatcatgtccctgcctcatttgtaaaaggtgggctacttttgactgctgtcacacttgtgcaggagcctgtctggttcgtggtaagtcagctactttgcagagatgctgccatcaacccctccatttcttttgctctcccctcttctttattatctttgaactttcatctgtgcttatgccattccctgtctgctgttcatcactccttccaaagcaaccaccatcttattctgtttctcttaaaaacagaacattatttcaatgattactttttaaacagagagacttgttattatagacctcaaagcttgacagtttgtgaacctctgcattttggcccctcagccaggagttggataatagcttaaaatcacttctaaagtaaccgaagatttgtgaaacatttcatatctgaacaagggagagaatagaaaaagacctttttacctcaaaagttgctttattttctgataggagggga

SEQ ID NO: 36397 - DNA, 3629 bp, Bovine  19866880187816
  misc_feature (1)..(1): n is a, c, g, or t
ngctatggtttttccgtggtctgtatggatgtgagagttggactgtgaagaaagctgagtgccgaagaattgatgcttttgaactgtggtgttggagaagactcttgagagtcccttagactgcaaggagatccaaacagtccattctgaaggagatcagccctgggatttctttggaaggaatgatgctaaagctgaaactccagtactttggccacctcatgcgaagcattgactcattggaaaagaccctggtgctgggagggactgggggcaggaggagaaggggacaacagaggatgagatggctggatggcatcactgactcgatggacgtgagtctgagtgaactccaggagttggtgatggacagggaggcctagcatgctgcgattcatggggtggcaaagagtcagacatgactgagcgactgaactcaactaaactgaactgaaacctcagaagtgagaatgaaggtatggatccacgttactgtcttcaaacaaaggaagaggaattctgaggaaacagtaaacacattattacttgagaagaagggatcaaagaaacaagaacactgtcaatttatttccaggaagaagtaagatttaaaacagcccatagataaagcatggcatttaaaatctcattcctttgagactttttttactccagaggtagatgacagaagccgttatgaaacacttgtctatcaacaatagtcatgctttaattggtctactgtgtatctaacatggggtttccttggtgaatctagtaacatcttgtcaagtggtatgatgaaatgatctctcaatgaaaaaaatgggaaatatacaaaatttgtgagttaactataatagtttagggatatgctattcaatatggggtctgcagagtgagcacaacctgggagcttatcaaaaatgcagaatctcaagccctaccacaagaatcagaatctgtattttaacatttcacaagattcctaggtgattcatatgtgtattagtttttaatttttttatttttctattgaagggtaattgctttacaatgttgtgttagtttctacgatatagaatcagctctaagtatacatataagcccttcctcttgagcctccctgccaccccccatcccatccccctaagtcatcacagagcgcagagttgagctccctgtgctgtaccgcaatttcccactgtctattttacacacggtggtgtatacatgtccactctactctcccagttcatcccaccctcttcttccccatctgtgtccacaagtccatgctctacatctgagtctctattcctgccctgcaaatagattcatcagtaccatttttctagattccttatccatgtatcaatatacaatatttgcttttctctttccgacttcattgtgtatgacagaacactcattgtgttcacatgtgcatgttaattttaagagcaccagtttaaagaagtccttggtctttatatggacaagatatgaggctctaggaaagcctcaggcatgacagcttgggctacaccctgagccagtccaatgtccagtcatattttttggattccatcagctaaaagggtgacaaaattttgcctctgtaatcttgacatttgcttcattcaaaccttcgatttcatgtgataataatgattgaccatatcacaaatgaaagcttagagataacaaaccaaagttagagtaactaaacaaccaactctgtcccaggctattactgctgctccagtataatggttaataatgtcctgttcctccctcaaacctatctgtgtttgaatgataaagtatatggtactccaagaatgggtcatatacatatttatatgtgtgcttgataataaatgcatttgtgtttatcatgaaataaaaacaaacaaaaagactctttcaggatatttacatacaccatgcgtgtacatgcacacacacgttttttggtagtaacagaagacagatgagcttgacagagataagagcatccctcagaggagctgactgccgtcacatttattccctttaaaggacaattcaaacagcttcccaagaacaagtgacagcctacctcagaggagcgttcaagcctctgactcttgcaagacaggtacacacttctgattttgaaatgtcacttctttccagattcttctcatttagaccacaaagcatttaaatcgtgttgggtcaacttctattctggattcaggttgaaggtatttatgttccccaccttccacattctctaaggaaagaaagattgccaactggttggccaagaagctcagtgtttgataataggggggatattttgttcctcatcatcttttctccatgtggcagaatctctacagtgactcctatcacacacttttatctttcataggttatctaacctgattgaaaaaaaaaaaatctctgcttgcttaagaatgaacattgtcacgtcggtttcatcctaccatatcatctttttagattttacaaacgctttggtaaaatcattattgccccctacccacttccaacaaatatttcaacccccaaaaagaaaaatagttaaaatttctcaaaacaagacaacaagagaggaaactccagaactggccatctatagtaaacctcacatcaaaagagaatattttacataccacaataatcatttccaattcagtagtcttttctttgtggtattaaatacttatttcacaaaaccttcaaaatattgtctagagagataaacacatagccaaatgataggcatatttttataataaaagaattctgttttccctcgacagtgccagaaaaataataagaaagctttcgcagagcaaactgtgcaataataatcaatacaacttatgttgctactcatgtattcaccccaaaacattgttaacaatgatttccaacatcacataacacattttccctgttggtaccaccctctttctatgttagtcacccaagagaataggatgagaaagaagaatcagatcaccaccctgctgtatctgttgaattttctttgaaattaattatttaactcttgtatctgtttcatgtttgtttagaagtaacaatctgcttctctacaaggtatttgaaatggattataataaaatcactttcatgccagtgtaaatggtatgcagagattcagaggaaaacagatattgacatcttgcagtcagccatggctcagatggtaaagaatccgcctgaaatgcaggagacctgggttggatccctggattaggaagacaccctggagaagggaatggcaacctactctagtattcttgcctggagaatcccatggacagaggagcctggtgggctacagtccatgaggttgcaaagagtcagacacgcttgagcaactaactctttcactttcataataaaatcacctttatgccagtgtaaatgatatgcagagagtccaagaaaaatagactgatattgttaatattaatagaaaagtggtaattgtattgagaggcagagctgagtcatactctcagtatattgcaccccatgcttcctggcagccaatgcaaagagggaaagtatgagacagagggaag

SEQ ID NO: 36398 - DNA, 2264 bp, Bovine  19866880477358
  misc_feature (1)..(1): n is a, c, g, or t
ntatatattttttagtgcttctctaatgggctcactgactatcacacctaaagcagtctgcactgctaaggtacatgttcacaatataattcaacaaagatcacactctctttttgtgtgatatctttttgatatgttctcttattagacagatttttttaatttattttagtaatatcttggtaaggctgggagtgtggagtaatttgaatcctctcagaaatgaggtccatggaccattactacacactttgcaatgtataatttactttcctctggctcagatggtaaagaatctgcctgcaaagtggaagacctgggtttgattgctgggttgggaaaatcccctggagaaggaaatggcaaccaactccagaatttatgcctggagaatcccatggacagagaagcctggtgggctacagtccatggggtcgaaaagaatcagacacgactgagcgactaagcacagcacaaccaacagtgcatcgttttatacatataacaggctcagtaactaaacatgtcatatgctcttccacattctcttttccaagtaagatgatcattttttctgaatccaaatttataaaacatcatgaaaaaacaattaagatgttgtctgtcttgtaaaatcaggctcatttttctatgtttactgaagagctttacttcacatgatgtgtgtaccatctgaaatcatacataggatttatcaccactcctaattcaatttagatagtttctaaaataatttccatatctttaatgagttttgtaaatcacctatgagaacacacagactaacactctttgtgatgctactagaagagagatactcataaaaagaagctatgctaatgagggaattgtactggaatttttcactgtatgtgttccattattttaatcaagtgacagagtctccatacttgttggacaatacaacagcaacacctgaagaaaaatgaagactgtgacagttaacaaattacaaaatattatgtatgttaacatgagcaatattttcagggctgaaaataaatcctcaatgctgtaagagaaaaggtttgtattgttattcacagcagtgaagcatataattataacagacccagaaatccagtcaacataatcactgtctcttagttgtctagggttaaaaaaataagagaaaaaaaaaaaaactacaacgacattagaaaacatttttgttcagagagttattaatcagaaaaaatgtcctccatggaaagaaagaaaaaaaagttcctactaaaaagtggaataatttttctattaattatccccattgagacttcctcagtgacacagaaaaatgtacatcttcatatgccagataattataatgtccccaagaatgagactttaggagctttagtctatatgtgttctggtttcaaggcatcagaactattttgcaaagagttttcactttgtcttaaagaaatgataaaagatacagatgttaaagaagtaagtgtaatggtctcagaaaaataacttccaaagtgtgaatagtccttaataattctggtataagaaaggtacttgagtttagatttgtccatactacttgctatgtgacatcacatcaaactgtagcaaattactgagcatattttatgctacctttcttaagatactgaattctttttctaaccttcttcaaataggtaaatttaagtttagaatatgaaaagttcttaaatgtattcagtacataaacactatcaaaaaaccttaagattaatgagaactggaaaattcgactcctataacttataaactccaaattaaaattttgatacaaagaatcagtgaaggggttatattgaaacattaaacctgtgaatatgcaaacgtacgtttaccttctatctttttggtaaactcatctttagatgtaccacaagaagagtcaatattctatgtgtgcacaaacagaaattaggatgaagcaagtatcaaaaagttctttagggctgttttgaaacagacacctcagtagatttattatttttattaatctacattattaatatattttggtggtagtttagtcaggcttctctggtagctcagttggtaaagaatctgcctgtaatccaggagaccctggttcaatccctgggtcaggaagatcccctggagaaggaaatggcaacacactacaattttctcgcctggaaaatcctatggacagaggagcctggcaggctactgtttatagggtcgcaaga

SEQ ID NO: 36399 - DNA, 3544 bp, Bovine  19866880545150
  misc_feature (1)..(1): n is a, c, g, or t
ntgaaaagatagccttataatgggagaaaataatagcaaatgaagcaactgacaaagaatttacctcaaaaatacacaagcaactcctgcagctcaattccagaaaaataaatgaaccaatcaaaaaatgggccaaagaactaaacagacatttctccaaagaagacatacagatggctaacaaacacatgaaaagatgctcaacatcactcattatcagagaaatgcaaaccaaaaccacaatgaggtaccatttcacgccagtcagaatggctgtgatccaaaagtctacaagcaataaatgctgtagagggagtggagaaaaggcaccctcttacactgttggaatgcaaactagtacagccactatggacaacagtgtggagattccttaaaaacctgaaaatagagctccatatgacccagcaatcccactgctgggcatacacaccaaggaaaccagaatcgaaagagacacgtgcaccccaatgttcgtcgcagcactgtttataatagctaggacatggaagcaacctagatgtccatcagccaataaatggataagaaagcagtggtacatatacacaatggagtattactcagccattaaaaagaatacatttgaatcagttgtaatgaggtggatgaacctggagcctattatacagagtgaagtaagccagaaagaaaaacaccagtacagtatactaacacatatatatggaatttagaaagatggtaacgataaccctgtatgggagaatctttcacttttaaaaaatatatttactggacttgccaggtggttcagtggttaataattcatctaccagtgccggggtcataggtttgatccctggtctaggcagattccacatgctgcaaggcaactaaggccatgcaccacaactattgagtccatgcaccctagaccccatactccacaacacaagaagccacttcaatgagaagttcatgcactccagctacagagtagcccctgcccaccacaactagagaaaagccctcgcagcgtgaagatccagcacagtcaaaaataaatttgtaaaatgtatttacttacagctataggacctcattgaggacatttagccttgcaaggcagaagagtggcatttctataatcttggaaagaacacagaatttccagaaagaaattgtggttccaatcccagttttgattcccttattatgtacctcttctctacctgccctcagctcactgtaaaatgaaaggcttgaagtccatacctgtctctgaggtctctactatctatccaactctaacgtgccctatgtctggtaagaattttttttttaagtttcccaggtaatatgcaaaaaaaatttcggatgctcatccctgtggtgacatttagatgtctaggaattcctttcaggcagtgacatctatcaagaaggatgatagctctgaacaacagttaaaacgagagaaaatttatcaaccttcctattaactgcaaatttataggatgtttgaaagttgcaagcgaactcttagggccatgttaacgaggtggcctttaacttgaaagagatgtgtagctgaactgtgtctttgagagttggcattttaatgaagtttcatcccatttgaacaaaggcaaggaaggccagcaaaaatgccatatctgctcgacacttgatgatttctgtcctgagggagaaaaggttaggctatgtcagagcccacatgcttttagccatttatctgttccttccagtacttgaaggctttcatgcttcccaggtcacctcctcgggttctccaatgtgcaacagtatctaaggatgaggagctaatggacatatccaaacttatgacaccccattaccaattcatttacttccctgacatttcaaagtgatcttctacctttgtgacctttagaacaatagattatttatgtaggtatttcagaagatgtacagtgcattaaaattactgaagcatttcatagactggtgggggcacagggaagcctcaagtgtaaggaaaatagtgttcctcttctagttacttttgaaatggcttaaatcatccacagaataaaggttacactaataaatgtctcatttgttttaaatgctctgaaatgtgaacacttctgtggaacatataaaatcatatacggtaaatgggctatggtgagatacagtgaatggtaatcatttctttttgagttactctttaatcctcctgccccttgaccaagtttcaaattggtgtagagtaggagtaaaggaaattaaccctgaatattcataggaaggactgatgctgaacctgaagctccagtactttggctacatgatgcaaagaagcaagtcattggaaaagcccctgatgctgggaaagattgagggcaggaggagaagggggtggcagaggatgagatggttggatggcatcaccaactcaatggacatgagtttgagcaagctccaggagatagtgaaggacagggaagcctggaatgctgcagtccatggatttgcaaagagtcagacataacttggtgactgaacaatcaggagtaaggaatacagagtgaggcagacattgggatctttgaggttggaggcagtatgcagctgacttcagtctagttttctttactagcatggcacaaagggaggctgtgaagtgaatgtgctgggttctccaacatattcttctatcattttcctccacattctttactagtaaggaataccaacaaactagttctccaaacatgccatgctttttggatgttttatctgatatccattcccttgtctaccttctcatcttctgtttagcctttgaaacccaactattctaagaaacacactgctacatagcaatcataattttctctacattaactctgtatcaagagtgtattttcacactgtacactgtaaagtttaaccacatggatttagaagtcaaactgtcagattgcaaactgtggctttattgtatctgttgtagaattgtgggtaaatttctaaacctatctgtatcttttactcatacacataaaaattaaaataaaaattatcaatttcacatactttgtgtaaagattctaaagacatatacatcaaaatgttttaaagtaatacttggtacaaagtgttcaatgaatgttattaatagctctttttcattctatcaccatattagatatatcacacagaaaaaaatacatgaaacctcctacattaggatcagctcagttattagtatcttaactggaatactgtggctctttgccactctaattcaaggctaagttgccaattctttgacccccatttggcatcagttttgtccgactctcaggcctcatttaactcaaggaatattgactttcttttcttcttttttttttccacagaaagtattattcaatcagagaaataatatccctggtcttatattttcctccaaacattataatctggggttttatgtctttggaatgttttggttataccacagttctagaat

SEQ ID NO: 36400 - DNA, 944 bp, Bovine  19866880565276
  misc_feature (1)..(1): n is a, c, g, or t
naggatttcctcccttcttccctaggggagatgggcgggggctctctcacgcaggcctgcctccttaccatccatcatttcaaagagacatatatcgcctccaaagtgcttcaaggcagctgcaagcaaatgtcactttgagttaaatgcattattaaactgttgggaaatttcacatcatgggtcatttatctatgctaaattgggtcaaaagcctcagcacatgcctagataaatgagagagaagcgcaaaattctcccttgggaagtggtactttgacaagctttatgagtatggcttatgtatttattgagtcgccatggggaaaggaggctctcttgtttgtgtgtgtgtatgtttgtgtagttatttaagatgtactcaaacactgtataggagtcctctgataaatccagttaggtattcaccatctctctagaattagaggttgtgcaaaacacatatcattaaatattcattcatttgataaagtgtttgagtctgttctgtgtgtcatgtactatgaagaaaagagggcaaaaattatttcttttaggcacgactctactgtggagaactttctagcatggtgtatccaaattttctttttttataaggacagcagtcagattggattagggcccatctaactgcccacattaacttaaccatatatttacagccatatctccaaatttagtgtcattcaggcttcaacaaattagctggggagggacacaattgattccattgcaagggctgtgggaagagacattgtcttgtatcacctctgatgggggaatggaggctcaagctgccagtgtgagacctatgacagagaaatatagatgtcccagctggatgtcagatcagtgcacggtggaactgtgagagcaagaggatatgggtggggcaatacaatatcaactacatctgcagacaa

SEQ ID NO: 36401 - DNA, 956 bp, Bovine  19866881127286
  misc_feature (1)..(1): n is a, c, g, or t
ntactgtgaaaagcattttaatttatctgttttatccacagcaaaaatttactcctaactacacaaatgttttcattgaagctgacatacaaaaagagttctatgcgtacattataatcataaactagtccatgaagattcgaaactatatcacaccttcagctaatgctttctgtgtggtcagctatttccaaagtggtatcacaaatttctgagcttgacacagaggtgtcaagagaggtgtcacagaggtgaagttttcttcaaagcaaacaacaatactgcattctctgcttctttcacagagacatttactttaactctcaagagttctataaagacccacaaccaaaaagtcacgaatcccctattcagtctattgtgagcatcccttctgagcatcacaataacctttctctgggataaaaaatagaacacccatgttctgccctccatcccttatgaggtgaccactggtgtgttcctaggtataaggctctttaagagaagaaactatactgattgaatttgcttctgcacagcgtgtacaaggaaacagagctaaaaaagagccttaatcaatattgactaaagatgataatttgagaggtgaaggaaaatctatgaggatttctttggaaaagcctgaaccatcagaaacaagataacaacttagagcttaatctgtggtaacaaatttataacaaaataactttttaaagtactccactattatgtcagcatattttttttaataccacagcaaactgggcactaggattgtggattccattattaagacactcatctgatctggaggaatattcttacaggagaacagtctatattagtgctttctaggatgcctatattttaacatattcaagaagtataagaaaaagtgatttaagtttaaatatttgaatgaaaacataagcccaagtctgcatgtaaat

SEQ ID NO: 36402 - DNA, 1335 bp, Bovine  19866881204712
  misc_feature (1)..(1): n is a, c, g, or t
naactgagttgctttcagtagttataaacttttatgacttttttctggttattactgacaatatgcttttccttcagtgccttggtggttaaactcgcatgttactatctatctggcctcttagtagaaatgcgatcatttgcataatctgttccttgtacagtgtttatttcctggaccagctttggattaattataatgcctgtgtttaatgttcttatgggtactgttctaaaatcatttttaagtcagttattaaaaacaatagatgacataaaaatggttgttcttgtattttttttatgaaaaatctcatttaaaattcccaagttctaactcaaggacagaaattaattttgtggattgaagttggggataatttatggactctaacaaagataaataaaacattattatttttcctaaaaaacaatctgtgtttatccttattaggctgtcctgcccttttggggggcttcccaggtggtgctagtggtaaagaactcacctgccaatgcaggagacataagagatgagggttcgatccctgggtcgggaagatcccctggaggaaggcaaggcaacccgctctagtgttcttgcctgaagtatcccagggacagaggaccttggaagactacagtccttggggttacaaagggcctgatctgactaaagtgacttagcactgccttctttcaaacagccattctagagactatatccaaatgcaagatctggaggaaggtatacggcaggtggagactgcgttgtgcaagcagagtacaaaacaagcctgcattggcagtgaactgcaagtaagcggcgagttggaaaccaccagcgaagacgggaaacaaagcagagtggatgaaaaacaggaaaaacaaaagaacagaaacatgaaagtcctgcccgaacttctggggatgttccaggaggaaggtttcactgcatccagagccaaatatgagggaacaggtaagaatgttcaagacatcttccctgcaaaggacttggaacacaactttatagaagcacctaaaaaaggtcaaagatcctagacactcactgtaaacaaacaaacaaacaaaacaaaacaaaaaatcctgaaccaggaatcaaatgtaatcctccacatggtatttactggacactccacttcatggtctctgtctttgaggagctcgcagtccaccgtactaggagtggagacggcagtggaaaggacgttttcagtgtaacaactaagtgttgcacaaaagagagaaaagactgaagccactagaaagactgaggctgctatagaacgcgtggttaatcctgcccaggaaa

SEQ ID NO: 36403 - DNA, 1451 bp, Bovine  19866881350967
  misc_feature (1)..(1): n is a, c, g, or t
ntgttacatcgcctgcactggcaggcaggttcttttcccactcgtgccagctgggtagcccagcaagaactttaaacctggacgtaggagaaagctatgtacaactcagaagactcttctctgtgctccttcactgttcattctgagctttatttccttagcttatattgtagaaaatggcagctacacttgtactttgtgtgaacgttgaggataaggctaaagagtgagagaaggaagatgaaaacacatggcatagatctgagcatgctgtagctatttaaaacatcacgtgaattgtttattgactaaaaattaatcatactgtttgagaaagaaagctagtaaagaaaacaaatgtgggcataacagatatgggcattaaaactattttaagaattgggcatgtgcaattctcaaagggagacagaaatgtacttattaaattttgtcatactgtttttcctattaattttaattagatcctattaaatattcaaggattctttttagtggttaccaggcttactatttagatgtattattaattgtagatggaacttccctcttgttagatgtgctgtctttgagggaattttgtttcatttaagtgttgttcaaatgtagcaccccgtggcaggtctcctaggaacacatcacaatgctgtatatattgtgcagagactataggtatttgtctcgatggggactttgctctggctacagtaactctggtcagaactcttgttaagtcagatatctaataccaatgctcagtgatggtcacaggtgcaggaagttaacaccggtcattaaaacaaaaatgatcttgctagagaactaaataatgttcttctccaatgatgatttgtgtattgcatatttatgacctcttcaaaaataatctatccaaataggaaatttgtccctacaagagaagcatttaagtatgaaaaaaaatttatggaggctgagatctaaactctcatcctatagatagagatgatgacaaaaactgaaacttaagactgtgggagataggtgaattaagtattctgcttactgaattttttattcacttgtttctctttcatttgtgcattttccacagtggattacagtaacagaaaagttttcctgaaggaaataacaaggctttagtgggaaacaaaaaagtaaggtattcctaattcctatactcggaagcagtttgaaatggcctattaactggaaattccagagatgaagagtaatttagagctagtaggaaaaaagcacctttgatgagtggctacaaataaggtcagagaactgtgcagtgctgcgtcatggaaggacttctgtgctgaattatgaagtttgaaatgtgttcagaaaattacaaagaggaattgaaagataatgcattagtgttctaatactgctataaaaaattaccacaaattcggtca

SEQ ID NO: 36404 - DNA, 1552 bp, Bovine  19866881364534
  misc_feature (1)..(1): n is a, c, g, or t
nttctggatcctgctggaaccgctgcacgtttacatctttgaaagctgtaatccaatgaagacataaaagtaatactggaatagcctatttgtcaaaaagaatcaacaggacttgaaagccagttttcagtcttaatcattttcctgtgagacacagtccttcagcaagcatttgttaaatgactgttgatataagtattgtgctggaggcaggaaaacaaacttgaacgcaaaagaattctttttttcaagaagcatattgtccagagttaaaaaaaggaaaacagacagatacacaatagttaccatcattagatgtttccatgctatatcaaacatcaatgataggcacagtttatcttcattcagagaagactttctggaagaagtgaggtccaaatggtatttaaagcaatagcaggatttaagatgcaaaaggcaaaaaagtaatgtaacaggtatataggggacagaggatagaacttttcaggcagagttaacagttgagaagattcggaagctctgaattttctatatttttagagtaacattgaagtggtagggggtaaaactagggagacggataaataagcagacaatggggaaagtagaggcaatggggaagcattgtagacctgtgttgcagggcacactgtctcctattgggaatctcatagcactgaatgatataaaaaaaaaggaggagggcatggtcagagttgtttatcacaaattgcatgctagatgtcctataggcaatgtttataactaggtcaaagctagaggcaactagactagccagcaggcaatttttatacactatgagaagagaaaaacaaagttgatgaaggccataatgacattctatttttgagatcttattgataattccacatgcaaatgtctcgctatctgatggctcgacctcatcataactactatttttaattagagttttctttcattttatcttaagtaacctaaatctcctcagtaacaagtctgcctaaatgaagacttggtgatccttcatcttctgaaaggcagctgacagttgcaaaaaaactaagaaatgacattcagtttaaaatatgggctatctccatgcaacataaaataaaaaaatatgcctcaaaaagatggttctcagggcttccaaacacttttcttcttctctggagttgactcacctttctcaaaacactagttatgcataggctgcaagtttcaatgtcatagagagtgacttaagcaagatggaggaataaagaagtccagcccttgtttcccatggaaacacccgaggtaatataaggaataaaacgccttacaagcaggtcctgttttacttaagaaattgtagtatcctagggactttccttggtggtcaggtagttaaggtggtccaattcagggggtacacattcagtccctggtcagggaacctaagatccctcatgtctcacagctgaaaaccaaacacaaaacagaagcaatataacaagcaatgcaatacaacctttaaaaaattggtccagaccaaaaaaaaaaa

SEQ ID NO: 36405 - DNA, 1139 bp, Bovine  19866881468113
  misc_feature (1)..(1): n is a, c, g, or t
ntgaaccccgtcccctgagttgcagggcaaattcttaacccctggcccacccagggaagtcccagggtctgatatcttgaggctaatagagaaacaagattcaaattcttcagttgaaggccaagtttcacttttattttcctgaaccagcctgtctgctttatcttcagccttgtggaaagcacagctgggatttctaagaaggctttctgaaaacagccctgtcttaaaatgcagagattattttctctgggttaaatcaaatgagcatctattccccatcatgtacctccaagtagacactgcttcattggctctgcttaattctttctccctctcacctttgcacttggcttctgagtcttgaaatgacactagagctctttatgtttagagatcaaattaactatttagccaaatcactaaagtggagggtataatgctcagaaataagcatttcatttacaaaaatgcacgttatctaatgcaataaatagtgatagtgtgtctttaggctctggctattccagtgttggggaaaataataaagacttttcattttctcccttagatcataagggctgtgttattagtgtcatctcagcgttaaaccaggttgcaagctgcttattcttcaaaatgaagctttatttttcagtttaattgcttttgcaggagcattattaacttccagaaatggagaaaaaagttaaagcagctgaagctgtaatttagtatatttgaagctaaaaaatactttcaaaaaccaacacaacaatactataccattatcaagaataatattaagaaatacacatacacgcctatgtatggtttaataattatagaaagtgatatcttttaaataccaggtgtgagaacaatctatattttcctgttaggtgttcttaacatgttgaataaagaattatactagtatcccgagagaccataatgcccaaactctctgaacttctcaaaaatgaatctccattaaactttatatcccagtcaatcaccaaactctcaattcagctttattaatagctctcaaatgcatcatcttcccattttcacagatatccaacttgtgtcaaatctgagccatttgctgccatattgccctacccccaaaacag

SEQ ID NO: 36406 - DNA, 807 bp, Bovine  19866881500402
  misc_feature (1)..(1): n is a, c, g, or t
natgcctataagaaatactatccataaggttctgattgtgcatgatatgataaacagacttagtttggaagctcagggtatttaagaagtaactacaggagggaggaaggctcaagaaggaagggatataagtatacatgtagctgattcaccttttgtacatcagaaaccaacacaacattgtagagcaattttactccaataaaaaaatgagaaaaaaaagaagcaactagaataactaggttaaaactggagagcaatagaggcattctagattgtggggacagtataggcaacagttttgaaactggagggaacacagcaaagagcatgtaaagtcttagacatggtacagtcatttcacacatattatctcatttaaccctcacctttttcctgtaaggtaggcattgttctttcctctggtgtaaaataaggtgacagataattaacgagaatgagtaacttgcccaaggtcacacagtttactgaactcgtatctaaattcagatctcctgtttctgatggtgatggctcaaactcaatggaaatacaagagtttactaacaaacaagcataggaagcttcctgagttagtctggcttgcaaatttgatgaaaagataagatttaagcaaccagataaatcaagttattctatatcccaaaagttcaaaataactcccaagaagcttttgttcattattcatttgtggaataaaaattaggtattagaaatcagccagcattctacacttttgttgcaagtaaagattaactttgaaattatttaagaaggctgacagat

SEQ ID NO: 36407 - DNA, 2459 bp, Bovine  19866880551610
  misc_feature (1)..(1): n is a, c, g, or t
nccctaagtaaattttaaatatgaatcagttgatgtcatgtaattatggtctgttatgtgaaatatctgcttaaattgtgatgaaaaaatagttgggcctctaacactgtttctaggacacttataaagaaatcactaaagtgggaaaagataatactttttgttatgaatctgtaaagaaagagggtatctggaacaccttgggggctacatcaaagtttataattgtacaatctaccatatctatcaggaaaacagagatataattgttatgctattctgtccaccattgatgaatgtgtttgctactgtttgatgcttgctaacaaattggggtcttctgctgtcaacatgactataagagagcagttctaatatgttctcattaacataatgctaaaatcaacgttaagaagacattttccatgagaatttatgagattctgtgcaattaagcatgtaacaatatggacagaaattttgcaggggctgtataagagtaaaaattaaaagtaaaatatttgtagaagtaatctgtgacctgagactttagactgttgattgctggcttgttgatgtgttaatgtaaagtaattattccagtgaattgaagctgaaagtcaacatgtatattcattaatttagtgtaagcttccttattgttaaccacagttgaggtgtctgttttcagcaaactgatccaaactttcccattatgctttgccaaccataaaatttaaacattctttcttgtcaactttccaatttctaactaggaaatgctttcttgatcatttaaaattagaagcactcgtttgtctttaaaattaagaatagatttttgtcagaaatctgtttaatattgtatataatttgtgttttggtatcacaaatatattcacaatgcttttttttctgtcagcatgttcatttgttaaagcattccatatttcttactaattaggtagtgtattctggcatatacagcagtatgcgttcatcagttccccctcttaataactctgtcatctggataaaatttaccagcattctttgtagctggatagggtcatgtgtcttacttctggctactaacaatgtaggttaaagtgatacatgtctctcccacaaattaaatgaccttccatgtctgccaagccctctcccatctttcctctcatactctaatgatgaaactccagtggaaaactgcaaaatcctctaggcattttatgcatggagaagcataaaatgaaaatatcatagattctagaatgaccggatacagaggtaagtccctcgttgtctacattcaactatgaagtgggtgataataaaatgagtaggttattaaacctgtattaagcaaatgaaatttgggtttttattgcagctattggtctagtatttctgagattagtaatatactggaagttggagaaaattaagaacaatagcatctccccacagtgtatatgcatatatttttaggtggcaagttaaaattcactataggaaggcatagtttatggtgacactatcgtgttggtcaaagcaactgtactatgatacagtaagaactggcaaaactaaaggctagtaaacagaaactgttttacacttcaaaattgagtattgtatctcattataataaaattaaaaatgcgaacagtcatctagtgatcaaatcatatgatagataatgtatatacatatatatatcaatgggctttgctgatagctcagttggtaaagaatccacctgcaatgcgggagaccctggttcgattcctgggttgggaagatactctggagaagggataggctacccactccagtattcttaggcttcccttgtggctcagctggtaaagaatccacccgcaatgcgggagacctaggtttgatccctgtgttgggacgatcccctggagaagggaaaggctacccactccagtattctggcctggagaatttcatgacctgtatagttcatgggattgcaaaaagtcggacatgactgagcaactttcttataatcagtagcacagaggaggttaacatttgctaagcaattctgatgaacacaagtaatagaaaagataccaggtttttatgggatataatatatttctctctgattatctccccaaaataacaaagataataatgattacttattctttaaatgctttctaggtaccagggtactctggaaccctattatacacatgtcctatttaatgaacacaactgatttagtgatggtagacaaagtcacagaggctacttgacttgcttagattagatagctcttgtgtgataaggctgagacttactcccaggccccatctgttctacatatagcacattgttcattgtactgtgagagacaataacttggaagaaggaaccaaggaagttgagttaaataacctaaggcatatattccaaatatt

SEQ ID NO: 36408 - DNA, 1546 bp, Bovine  19866880582789
  misc_feature (1)..(1): n is a, c, g, or t
ncacacacagtgattttggagcccaagaaaagaaagtctgtcactgtttccactgtttccccatctatttgccatgaagtgatatcttcatagcatatgaagcacatatcttaaatcattagttcaagagaaaacacaagcacaaggtacttccctaaatggaatccagggctttcacaccaaaaccaagtcttttatccactgagttctgctttgtacatgcaaagagaatcctaaagaacagaagaatctccaagctggggaacagaaacattacttagtgccaatgacatctttgtaagttaggtaaggaaatcacaaaaatattaaaacataaaaacactcatgactcaatttttaattattttgttctgctcatcatgaagggaattatattaataatgaaaataaaactaggtagcatccatttgttgtttactacataagtgcaattatgttgaaatcttttaaagtattttcatatttaatactgtctataacctaataggttatatactattgctattcttatcaaatagatgaaaaactaaataatcaaatttttgtcttgctcaaggtcataaactgggaaatagcatatctgcacttgaatgcaagtcagtctgacactacgtattactaatcaatgtccctggcaaaatcaatgaatgtacctcattctgtttataacaaaatgactccatttgtaggacaaaagtcttatgggagaaaaataaaacaaaaatatctcaaaaagtggtaaaagtgacataatccacactgtatttttcaagtcattgtaattatgagaatacaataaggatgaaatcaaagtactatcacatatattattttaataaatggaaaataaagatacatagcaagagaaaaaggtatgtaatactaaagggagaaacccctgacaaataaaaatgaagaaatatccatctttacagttaaaagttgagaatataaagaaaactattttagaatatggaatatgcctcaaaaaacctgtaattttgaaggctaaattctcaacaatagaactatacattaaaaagatgtttatcattagggcacaatccattcctttaaagacaaccactcctttttaaaatggaatcttgaggggctgttatcacagatttccagatacatgaatcaaatattaaataccaaagaatcaaggaaaaagtaacatgatactagaagaggcatatcactggttcaaaatatgcttggggagatattaataaagaaaagaatgataaaagggcaacatataaaaagtcttagtggctataaaagttatatatatcactagagcttacttctcaaccgtgcattctatacaaaagagaaattttatctgcaaagtatcctgctgagggacttgtattgctgaaaaggtaaggtgctctctcttatcataagaaaagagaagagaaaagaaaggcaggggaaaagcaacctgggaaggataagccaaaataatggtgaaaactggtgatatttgtgctcatttttgagggaaaattggagt

SEQ ID NO: 36409 - DNA, 846 bp, Bovine  19866880685176
  misc_feature (1)..(1): n is a, c, g, or t
ntcttttttctctttattctcattctctttcttttcatccctccctcacctccctaactgctcttagcattacaccattcattccaatgatttcagctgctgaatataccatgatgctgagttacagatgcaaattcctaaattcgtatagaacaaatagacatggttgttctaaagtcacatggacagtgacactatttttaaagtgaactaatattccctgccacttcggttccttctccccaatacattatagtaattactctatcaccattcacacattcaagatagaaactcaagcattcttcacctcttctttcctacatttgttttatctgcctagcaataaatatctgttcattttctttgtcttcattcataattcagcaaagtcatccctggattatttaaactgcctcctgtttaggcgttcagtaatattttgttctaaatatacaaaacttcctttctgaagtaaagatatatcattccttttctcaaaaacagaacaaaaatatttaagtaactatccattaaatacaagacaaatgcattttatggtcctttaataactgactttaatttcagttctgtcatgcagtactatccaacacatggcctatttccaactacatccaagtattcttcacacacactggtgaagcaggtcagaattgaggcttatctttcaaggatcagctcaaatattaccttgttcattcactctacttttcagtaaatcttctgtcaaggaattagttctgcttttcagtgctctcagcagcatggttcacaggaccagagagcattttcccaattatataagatcagcttatatataaacat

SEQ ID NO: 36410 - DNA, 1932 bp, Bovine  19866880755905
  misc_feature (1)..(1): n is a, c, g, or t
nttccaatttatatatcacctggctatcaccagccaacacaatagtggcttttaacacatacattttggggaagataaagggaaaaaaagtaagggacaggaggttgtcttcactctatctgcccagggtatacttccccttccctttcaagcaaatgagaatgggtttaaaaaagagagatctgtcttgctggaaacagtagtctggtgtctgaaaattgagaggcttgctaaagcacccagggtcagcagagtaaaggttgaggctggaaaatttctgcactcccacgaagcaagctaaatgtatgcttatctcatgtatcaaatgcaccccaaaggagaaagaaacaatctgattttttttttttttcccccttagatcatgtccgaaatgacaagttggatggtctgggagatgattgctgaaagagattggagttacaatactaaaaccccagaggagaaagtgggaattatctgtaaacagccactgaagattcacatgacatcaaagatactttaagggaaggtccccagcaaagtagcatctctgtatccaagaaaatgccctcaggaaaattcacctttaaatatttatatcatccagggacaatctccattagctgttttcaggcaaatgagaatgtttttgtgaataacatctaacttgggaacttgtttgaggttccattcccagcacggagcacaatggtaaacttagttaggtatgaatatggacatattagatattttttccttgaaaggagtcccagtttgggtgaatattggtaacaattggttatggaaaaatactgaattcgcttttataagcatacaatattaaaatactaaccagatatagaaaaaaaactactaaaagaatagcatgcttgtaactcagataacactttaattaaaatagaataaaatcggactgtcaacaattttatattttgtagttttttttctacagaaattgggagaaattctaaaatggctttcccctatttttcccatgaaactatgcttctttagtaggcttcttagactaaaaatcaagattatggtaagaagcatcctattatagaaattttgtatattttattttctatcctgacatggtccaatgttagtgtgaggtatcccttacataatttcaatagaaattaaactgtgaataatcataagtataaaaagttaaatggtcaaatcttaaacttaatttaaaactgaagtaagatacatattaattcacctttcagtaagacatcatctggttaaaaagaaaagtgggaaaatgaaccaatttaattatatcagaattttggatttaaaaacctctttttgacccattcaccttgttgtggcttagtattacccttctacttgtcagtttagaattaactgtcaaatttttctagttacatgtcattctttctcttcatttttaagcagttttattttaagaggtatgtatagtaaaaagtgccttagataaaccctttgctctagcactggtaagatatgtgacattattttttgagttttacatttttaaatgaaaaacaatactttctataaactcattgttgattaaattaaatgaataagtgggtaaaatacctagcatgaattaggtgttcaataaatatattttctctgccccatatggaactatccctttgaattttgaaaatgtgatagttttatcaattttaatataatttgacaaaattcatataagaaaattaaaggataaatatatatcagaatgagtcaatactgcaacaaataaatgactgatacttccattatttctaaatatagattttattaataattcttaaatattttactgtattctctaagcactgagaaaaataacaacttttatttatattacaaattttacattagataccactagaggga

SEQ ID NO: 36411 - DNA, 2218 bp, Bovine  19866881094475
  misc_feature (1)..(1): n is a, c, g, or t
nttttgactgaagtagaagacgtcaggggttattcttgctttcttctcaggccacagcaccttagctttccagaaacacatctcctgtcttttgtattggtgattgctgtctcacatgctcacattttgaaccggtgtaatttcctcttctgtgaattaaatatctatttaggagtatcatttgtcttgtcagctcttgattacaattcactgtttaaaacagggaaagttaagctatgcttgttgttcttgttacggcagtttcggtttaattttcttcttcaacagctttgcttgttcacaaaaaaagaacactatatttttccactgacaacttatttttacctataaatattttccattcacttttttctcatcctctgactgccaagactcaaattactcttacattatctttcagtgtaactatctcaaaaataatgatagtttcctgactgaaataaacaactgattaccctcacaaaatattttgaaaatattcaattattcaagtgaagcatactaattaaaattatctaaatactcattttaaaatcttttgatgtttttaaaaatttgcattaaaaatactaaatttcacagttgataaaaatatacattaagaggtctcttttttaacttagaatggcaaaatgctgtcagtattgaagaaaacaatgtctatcattcaccaatcaaactctaactttcctttaatggtattcctgataatttcccaactcatgcaagtatgtgtgttgttgaagtatgccatgtttgttctagatcttagattatagcagtaaataaacaattatgattgctctcatgaaatttttctttggtgtcaaatattattaattttaaaaatatttattaaaaaataatatttggtactttaattggaaacaacataaatagcagattttgttatcatttggttatgtcaaacaatatttgtgtgtagattataaatcactaagatataatttactagcaatttaaattaattaaatttagcaatttaaattaaattcaagtgaatgaaattttaagagtatattagatttacatttcacatttaaaaagaatctgaaataagcatattaattatataaatacattaatcatctaacaaaaagttgctacttttccattgctaatgatgtttttgatgaagtaaaactgaagaaaaactcttttatcatgaaaaactttcattgatttcctttctcagtctttttagtgtagatattcctcaaacttccacagagcaatcattgatatcaaagggattccttttgatgccaaaagtcagctatcaaacatatggctttgccatgttaaatatgtagttaactttttcttccctaaaacatcaaggaaaaatgtaacagtagttactatatattttaagcgtttataaaactcagaacattgtaaggaaatacaactaacaaattatgcatcttttttagtaggtctttttgtgttccagttatttggattatgaagaaaaacacttcactataagaggttccaatgtgttcagatggaaatatattgtaatgaaaaagataagtccatatgctatgaattggcaacagctgtttcactttcatcctatgggatgagggaggaacagaaactggagcaccttgatgaatattaagatgctaagaaataaggtactggcaagataagtctgcagattttaagttctttatggtaatatcattaaacccaatggcagaatgatgtgatagtatacccacagtacaattatctgaaaatagaaaaacttcaatcagtgtaataatagtatatatgtgtgtatactaatacagtttgaatttctttgagttattttactgaattagccaggtgtctcaatacattgcagacacaatcttagcaagagcatatgtttaaatcctaacatcaaccaatacattttttaaagctaaaataaactttgtgtagggtctttatcacataatgtaataggtaaaatcatttgcctttgaaacaaagtgtttcaggaagtatagaaaattacatattatgctttttttagggagtagctttgttctgtattctcaatacaatttccatctgcctaacagtacctataaagctgcattagtggttaaagatgcaagatttcaatttagatgccagaaatcaaaatcagattttaccattgccttatttaaga

SEQ ID NO: 36412 - DNA, 792 bp, Bovine  19866881202414
  misc_feature (1)..(1): n is a, c, g, or t
ntttctgctcagaggattagggtatccttctgggacatacgggctaaacatagtggaggagcaggcagccctgttttgggtattcacagctgactggctgtccctcctgagagctggcctgtgtgtgaagctgctgctgacgctattacattacaccttcctcttgtcctaacataagattgaggcctaaattattttgccttcagctcacaattttcaaaagactcttgggtcaattccacatatttagacatttcaaaaacaaagaataaaactccagactactttaccttacaaaaaaatgttatagaattaaaaaaggatgaagcacaagatcaaagtggtattcatgtgagtcagtggctgcagcagggagctgcttcactttgccactctgctattacagctacctttttgctacctactgtctgctctgagggctcacctgctgagatcaagctggcagggagctacattgctaggccaagtcatcataccagccctatgctgcctgcggtagagaataggagcagtatggaggttgtcaggattttaatttgatctgattgtacacagggcagtacgtctgatcttactgcttgtatctggatgtagacaagcgtatgcttttctactcaaagccttgtctgagattaaaaaatctacagtctctcctggtgagtaaccttgcctgctttgaaagctggggagttctgcaatggctggaaataaacatggatctatggggaagcaaacataccatgtactggtgccccagctcagcagaaagtt

SEQ ID NO: 36413 - DNA, 1423 bp, Bovine  19866881205636
  misc_feature (1)..(1): n is a, c, g, or t
ncctgatgctgggaaagattgaaggtaggaggagaagggaaacgacagagtatgagatggttgtatggcatcactgacttgatggacatgtgtttgagcaagctgaggaagttggtgatggacagggagtcctggcatgctgcagcccaagtcaccaagagttggacacaactgaacgactgaactgaactgaactgaattaactcacacacacaatgagacggttggattgaatcactgattaaatgggcatctacttgggcaaactcctggagacaaaaagccacatggaagcctggcatgctgcagaacatggggttgcaaagggtagaacacaacttactgacttaacaaaaacaacaagaaatcacacctatcactctttccccagttaggagcaatactttattttggctctaactctttcaaagaagtatatattaaatacatggaaaatatgtgtgtattgggccacttgaaaaaaaaatactgatgtacagttgaaacattaatgtgtcttgttcaatctcctgtcttttttcctatacaatgtctcagtgggatgaaagcagcagatgggaccattatagaggatgtttatttgttacatggctttgatatgcaaatatttgttctaaaagaatgagaaatgaactgaccaccgggatattctcataagagaactcctctaagtaaaacagagagagagagaggaaagactgtgcagtctgagagggataagctttgacattttcctttcctatggaacatacttgaatataaaatagtgcctccattaaaatgcacaagaaatcaattccagagtatgaagtgtaaattttgcaatagagtcattctgctaatcttacagataattctttactcagtctgatatttgtctttatgcataattgaattttgtggctccgtagagagaaaatgggacatttatctatttaaggatttttatctgaatgaatataagcagaaaaccattttaaaagaaacactataaaatagtatttttttaaaacttaagaatttactatcaatgtttatataatataaaatttaaaaatatattttccctgacaatagcttttagtcttatttgcttatatctgaaatttggtgaatagtatagacagttgatgtttcaaggcagtgaataggtttgatcttcctcagagaatgacttttgattctggggtaaaagaaagcctggccagattctgtaatccttaaatcaaacagagtctaataaaccaaagtgaatatttaaaatataatcaatctatttttcagatttgtgaatagttggattaaagaataaaaaaacagggttttcaactagaaaataatcttatcaagttaatatatagtagtaaaatcagaacagcaaaatagacttttagaaggcaga

SEQ ID NO: 36414 - DNA, 1082 bp, Bovine  19866881410095
  misc_feature (1)..(1): n is a, c, g, or t
nggtgaaatgttttatgcagcaacagcagacactcaaagattcataacttgtgattcactgctttcaccagctctatatggctgtttgatcagcagaaactaagatgtgcaggttttacagatgcacagatgtcatgtgtctgatcagaatatggcctctttatttggcttatatctagttctacacaagtagaaccattccatatattaatgctcttggccagagcctgaatttcccagtatgtatttacacccaggcagatcatatataagctggtgtttggataatccagttttcatgacaaacaggagtggactataaaaccagttacaacatttcatgaacttgtaataagtgtttttatttgaaaactaggaaccacagaagaactttgctattacagagctataaattccattaatcagaagctgtgtacatgcaaaatttttgtgtagttcttttgtatatatcattttgtgtaaatcctctgtatacatatttataagtattttaaacacagtaaagcaattcttagcagaccttcatttatgcaattccaaactctaattaatctactttatacacttacatgggcttctctggtggttcagatggtcagatttccttaaattgggacattctagacactaagatcaaagaagctactggaccaagtgactgctctatgaacatacacaaattggtctgtctgtgctctctgttgcaagtgcatattacaatattacacatgcctacattatagcaggtttttttctttgcagtggtttgattccatgacctagtcaatagtgtgtgaacacttgcaagaataaaatatatatatgtgttaaaattctcatcctctaacagtgcttagtacatattgggtgctcaataagtatttgttaaataattgattaaattagtggtctttgatattctttgacttataaaaccaaaattttaatattacaaatttattagtttgtaatttaatagttaatattacaaaattattagtaatctgatacagctttttttaacggggcaggaacacttgcaaagcaccggaattaacata

SEQ ID NO: 36415 - DNA, 1583 bp, Bovine  19866881513832
  misc_feature (1)..(1): n is a, c, g, or t
ngtctcctgcattgcaggcagattctttacctctgagcccttgggaagcctagtggtagactgggtgagagttaatgtcaaaccccataatgcccacaaaggtagatatacatgactgtaaaataactgaatgtgtccaaataaatctcattagctacataaatattattttcacttcactttattagtaaaagatgtacaatatatctgctcaggcagaagagataatattcagggtaagttttatatagaatgagtttagttttaccagggaaaggagtggacaaaaggagattcagggaaaggaagcaaatgctttagtgtgtctggagcctatgatgccagcatgctttgaaaatatcttttggattgtattgaaatgaggatgagaagttaagagaggattattttccctatttattttaagtaagagcatgacaaatgagatttgcatttttaaatatactgagttacttttatgaaaagagcaacacacataactccacatactgcaaatgtttttcattcccctttaaaactgctttacattttagaaagaatattctggaagagtgaactggagggagaaagaaatagaagcaggaaataattacgcagaagagagtatcatcaagacaaaataacaatgttgtgaactacaaacggagaagagttttgaaagagagatagaggcagaatctgcaggatgcgggtagaatagaatatggaaaataagacaatcaaaggagagacggtatcactgtatttctacttagttgataaggtatttactagtgtgagttgcctacaataggtaatataagagacaaaaagtaaaggggtaagaagatgtgaaaatatttctcttttgaacagactgggtttaaaatgcctgagtttgaggacatattgcagagacacccaataatttggtacttactggaaatggagctaaggagagagatgagctgaggatatagtttagtagacattaccatatagatagcattggaaataataaaagtagatgatatctcccagcagcacatataatgagaaaagaaggctgtctttggaattctctgaaaccaccctcatttactgcatgagtggagactagccagcaaaagatatggagaaagaacagcaagcaaaagtacagtaaaaccaagaaaactttatcacagaaaccagattgcaggtttaatattcaaggacagagatgcaaaaagcagagacaggtcaacagtgccaaagctacaaataggtcagttcacataggtacataattttagaataaataagaggagtaattaaaggatctattaaacattaaattttaaatgttttttgtataaatttgctaattatgaaagtgaatcaacttaaaaacctttatgaagcatacatttatggaaaaaactaatactacataattctttgagactttaccattttaacactaagttctattatgtatgtttccaataaaggtagatcacaatgcttaaaaattcaacaaagcctactagaaacgtttccagttagtaaaagtgtaacaagaattttacaaccagcacatt

SEQ ID NO: 36416 - DNA, 695 bp, Bovine  19866882231657
  misc_feature (1)..(1): n is a, c, g, or t
nccattttcttgaaaatgctgttttgttatattgattattttgagctataggcacttgaaaaacagcaaatgcaggccaaggcatcctctgaactcgccttatctccctagacagattctctaaaaagaactccaatgtcataaatcgctttctcaggagtttcatcagtcagggaagattgacccttatcacagaagagactagaagtagacaccacacccagacacactttgtcacaagctatcatgcctctcatctattcttctaagggcccattcatctttcctaaaaatcatttactctccccaaaaaggcctgcatcctctctcccctttccctattaggatgatatttaatttgaattctaagccacttagaggagttactcattttcccctgggtatctcacatgtatacatgaggcatacatgttaataaacttctgtgtgttttcctcttgttaacctgtcttctattatagggtctcagctaagaactcagacaggtatggagaacaattatttttcctcctctacactattcatcacaactctgggcatgggaaagtgttatgacacagcagacaatgacattatttcctataaaattttatttattacataaaaaattctatacatttgttagactaaaatacagttttcattataattctggcaactgagttagtacacag

SEQ ID NO: 36417 - DNA, 1616 bp, Bovine  19866880424569
  misc_feature (1)..(1): n is a, c, g, or t
ntttttctttccttggggcttagcacagaggtaatagtgaaagcagcatctaatatttttagctaaaaggtgccagatgggaaataactcccttcaaggggaaaattcaagtctgaatgttcgctcacactctacacctattgtttctttccaccatcaccttgctacctcacataaagcacttcgatgacgacagtgcagaagctgccaccctgctaagagtaagtcatgctaagccaaagtggataatagcaacgcaaggccacataatgagctgcatctgatgatagcctcacaagctgttcccaataataagtggtttttattaaggaaaattcagggaaaggcaattattttctaactcctaaactaaaaataaatcagatttttgttatatatgtagtctgatctgtgactctgatttgttattttaaatctatgatatgcatctttttctgctgtaatttctaaagactgaagtttgtaaattaaaaatatgtacagttcaactatacagaggaatgaccctcttttgaagatcaaaatgcactttaaagtaaaatataaagagcttcttgatgagggtgaaagaagagagtgaaaaagctggcttgaaacccaacattaaaaaaactaagatcagacatctggtcacatcacttcatggcaaatagaagatgaaaaagcgcagcctaaactcaacacagggggaacaatagggctgatgaccctaattgtcctggggggtgggtttcagggctgatgattgcagataccttgtggggggcttacctttgaatcagcctatctgggcaccacttgtcggggtccagccctggtggatccagggaaattcgaaggagagatggcattggcgaatacactggctttaattagatattaattagagatataaaaagtaatagaatgaggatagctcagcaggaaaattcagtggagaaaagaggctgagtagcttggtttatgcaggaaaccaataaaacttcaagacaagaagtttgcaccacttacgtaggccacaggcgtccttctgttctcccgaaggagaggagacactgagacctccccggttggatcttagaagcccaggcataattagtaagcatggcgggttccgcgctccagatggagactcagccagagtttgagagagacaggtgtcatgcggagaccagtatttcgagaaactgatcccaattctttattttccagaatctgtttttatacactgagatgttatacaaaagttacacggggtcagtagtcctgacttttattaaagtcagatgcttcatacagatgtatacagaggtcttaggggtgttacatcatcttctggccagggggcctgctgacaatttatgaccctctccttgtgacagcggccagtcaacacttatttctccaggggtgattatttttgaaacagacgccaccttccgaaggtaccagataaagttacattcctatagggtgagggtgtagtggattttaattaaggaaagaatttacttagcctaaggtctaacgtgattaatatcaaaggttaatacttatttcttctatatattcattaatgtgtataagggcagggg

SEQ ID NO: 36418 - DNA, 2557 bp, Bovine  19866880466156
  misc_feature (1)..(1): n is a, c, g, or t
ncattttctcttatgctaagtgaaagctaaatgcacatgaatcaatataaagattatctgtattttgtggacatgggtggtccagacacccatgaggagataaataaatgtttgaggtgggtccttcaatgatttttacaaccgatgccaatttggcaagcttgaccgggccctaccagtacgaggaaccatgattttggtatgatgttggggaattcgtggcttccatctgctggttatctcacaaaatgtggagctgagaaaaatcacatactgattaaatcatagaatcccacacttggaagggacttcatgagatgatctgggcccgcctcctgaaggtcaatgcataaatcatcttgtgcagatggctgtttatactatttttaaagctctttaaggatggagattacacagcttcccttggtagtctgatcttcatggtcaagaacttccttttttaaaagcccagcttctctttgcagtttggcccatttcctttttctcagttctctgtgagtatggagaatacacgatcaacctttttctgttaattatctctggctgacactcttactttcacaattaattattaagatgtatgctgtaccttccccctcccccacaagctacaacggttgaaaatcacttatttttcagaagacatttttctcctctatatatgacgatttttgtaattaagaatttttctccttggagtctattctatactttgctatataaaactggtaatggcatttcttcctaagtccaaatcagctgtaaataaacagcatagttttcttcttatcttaccccagtatcatatttgctgtttaaattacagcatttcctttctgtttctggcacatattatgttccacaataaatcccaagccttttactgtcaaactgctattttctatatgtcatatctgtgtaacatgtcttgggtcttgctgtagactgatgaatggccccctcaaaatgtcacatcccaatccccaaaaccagtgactatataaccttacacggaacaggggactttgcagatgatattgaattaaagatcttgaaaagcagaagttatctggattatctaggtggacccaatgtaatcaaggagatccaaccagtccatcctaaaggagatcagtcctgggtgttcattggaaggactgatgttgaagctgaaactccaatactttggccacctgatgcgaagagctgactcatttgaaaagaccctgatgccgggaaagattgggggcaggaggagaaagggacgacagaggatgagatgattagatggcatcaccgactcaatgcacatgagtttgggtaaactccaggagttggtgatggacagggaggcctggcatgctgcgtttcatggggtcctaaagagtcagacacgatggagcgactgaactcaactgaatgtagtcacaagtgtacttacaaaaaggagatgagagattaaggctcagcagcaaaagagatatgatgacaagagtagagattagagagaggcacttggaagatggagaaagaggcaggaatgcagaggaatgcagacagtcaatttccaagaaattggaagaaggagggaaccaaaatttccccagggccactggaaggagtgtggtgctgccagtactttgggcttctgacctgtagaagtgtaagataataaattcatgttgtaataagccacgaaatttgtggtaatttgttacagcaggaataagaaactaacacagctttatttatatatctgtgcttgtcttcaaattcatgattttatacaatagaccagttttggacttatcaaggttgtttagtattatgttctcaccatccaaagccacaacaataccagtgggtatttattagactattggtaaccttaacttcttatcaactgttttgaaataatttaagtaatagaagagtccatcctaaaggaaatcagtcctgaatgttcattggaaggactgatgctgaagctgaaactccaatactttggccatctgatgctacgaatcaactcattggaaaagaccctgatactgggaaagattgaagggaggagaagaaggggacgacagaggatgagattgttgaatggcatcacccacacgatgcacatgagtttaagtaagctctaggagttggtattctccagtactcttgcttggaggatcccagggatgggggagcctagttggcttccatctatggggtcgcacagagtcggacacgactgaagcgacttagcagcagcagcagcaggagttgatgatggacagggaagcctggcgtgctgcagtccatggggttgcagagagtcggccatgaatgagtgagtgaactgaactgaactgtgtgccggggacagcaccatgagcttggaatgtgctatctcagttaagtgccaagacataaccatgaagtaggggttattataccactttattcaccaacagagctgtcatgcaagtcccagtctgcctgattttagagctcatctcctttcaacttacctgccactgct

SEQ ID NO: 36419 - DNA, 2553 bp, Bovine  19866880563113
  misc_feature (1)..(1): n is a, c, g, or t
nttctatctacctacacttcctttctctccacagggtcagaagcccaatcttctcagagtctcattcttcttgatgatctcttccaaatgatctacacaatcataataaatcctgtccttcacctctccccactactaccttcttgaatcattccacaatgactttcagaattcttattgtgtctttctctgagcattgcaaatcttttattctgtgatcctactacctacaagaactttcttatctatactagatttcttgatccagtactatcatcactttttttttcgtttgcaaacatcataactacctaatccctttctactgctatgaaaattgtctaataaaatcccagcccagattaatctaactatacacttactctacaccactgcagctaaaagttgtcagtgatattacgtaactggattgactggactcactttaattttatggacacttatctgaaatgtacgctctctacttggttttcttcttcgttttcatttgctggtatgttcttctctactacatctataattgctgaattactcctgtttttgccattagttctttcctttccaggactcattctctttgcaagaaatctctctaagggcttaaaataatacaaaattttgaggatgatcaaattttatctctactttagacttttctctagttttggactatccaattgtcttattaatatatgtaattagatatataataggcatctcaaacttaaaacattaacgaaataactactgtgtatgaaaaaatatattttctatcaaatttctgtatttcaatacataccattctgggagtcagcctgtattccttacacctttaatttattagctatacttcaaaaatatattttctatcaaatttctgtatttcagtacataccattctgggagtcagcctgtattccttacacctttaatttattagttatacttccatgtatctcaagccaacctttcttactaccaccatctctcctccaaccctaatgcaagttcttctatgaccttgtgtggatgacaaaacccttcttgcatcctccagtaccatctttacagagcaattcaggctttctttcagaagtgtaaatcaaactctcactctcatgcaaaaagctttccaatggttccatcttacactttactgaaatctccaaatccctcatcatggcctacatattttattattttccatgtggctttatctctctctacttatcttctcatcttctggacttagctagaacagctacgtttctttcctcaaactccaggataatttgtgtctcaggacctctgcaattgtttccgtttggaacactctgtgcctttgaatgagtattcagttctcatcattcagggctcaactaatatttcacttcctcagagtaactggttttaactacttgataaatcaggttccttgtcccagataactctatcacatcatcttgttttattttccggatggcacccattggtatccaaagctctcctttttatgtattttgttttgggtttatcttttcctcccaatagaatgtaataatttattatcttttaatgacctttaatttacgtaaagaagacatggattctgccttttaaggttttgaaaacaacagtgggacctatcaactcatccagttaagaaatctctttgaaggtccctccaaacttgtttgacctaaatagaaagcgatctttagaagtaaatgggtttatttcacattattattcatttatgaaataaatataaatttctgatcctctcagatataggacttaggaaaccaaccaggagaagagccaaatgttccagttcctctgttcctattgatatagttgcataagacagtaactaacaaaaaagagataaaacagaaagaacaaaattaaattttcactagaatcaagtcagttccagtttctatttctatgtctaagagatgtgcaactgccacagctgacattccctggagcttttgaagtaattttaaatgaaatccagagctaaatggtgcaaacagaagtaccttggagagttccagtagttactactatcatgggttttaaatttgaaataaaaatgaagtcttccaaagtaacttcacagaaaactcttcttgttctgtactaccacacaagcttcattttctgatagtatactcactctctaatttcatatgtcttatgtttccctgagaaacatcatccatgcttagagaatttgcaaggttatcatttatgaaaaaacaaaagcaaaaaataacaccattggttaaagatagaaaatattttttatctaaatgtaaaagaaaattctaaaacattattctatagcacaaattcattattttaatctggtaacttttttagttgtgccaaaaacttagttaactgaacataaagatatttgcatatttatatgtaatgaatgtgaagagataccccatggccaaggtaaaagaaacccaagtaaaatggtaggtgtggcgagagggcatcagagagcagaca

SEQ ID NO: 36420 - DNA, 2015 bp, Bovine  19866880611282
  misc_feature (1)..(1): n is a, c, g, or t
nttttgccattgatattaaatgtcgcttccacatttcacaaagacagaaaataagtgaaggtaataagacttccttattatttgtaattgccctggtatctcccttgatagagtgtcaggcaatgactattggctattcttcatttcctaggtgtagagagcaaatggggagtaaattatgcagaaatgtcttgggtttgctttgcagactgctccctgtggaagaaaagacaacagcaatagcttccctctgaccctcagagcatcagctgttgcgtagatgtgcagaggggctatggccagtcctgaatctgtaggggtgttgctcaggccccctgacatccacaacgtgcccttcctgacaggtgaggtgggcctctgtgacctgaatgggagcatgatttcagaaagtcataggagaaagagttctggactaagaaagatcagaaaactctagaagatgctatggtatatgacctttgagggcccttggagctgtaagtttccatgcctcttatagttacatagcctgacagaggttgagggtctcctgtctaccactgggcaggatcaagccaagggtggggagaaatcatccagggtaatccaatgctggaaaccatgccaatgaaaagtcccctcagcggtggtttcatggatactttcaacattcatataagagatatcttatggtgacctggtgtggacctttttaattctatggtcatcacagagatggcacactagctgtgtttctaattgacagggacagttcctggcagagcgttgcctttgggattgcagacgttatggtacttctggtatttttttctttttcaaataaacttatagaacaaaaaccccagaataatctcatagacgtaacattttccttctctagctattgatgtccattttgtttaattttttgttttatttagtttggtgtggcgtagcaatctgaaaacagttaccattactcattctaaaaaggaatctaaaataggaacatttccaaatttgaagcatttcttaaaaggagcctggattcaacattctgactttatctttatcaaatgcttttgacaataagaaatcttctggggagaaatttaataaacatttcttggagggacagcacagagagcaaacgtcagggtgcctctacaaaatgtattgccaacctgatttctgaacaatgctttcgcacactctgagctatttttttccagcatttggaattctatttacaaaaatcccaaactgcttctagattcttctcctccatgaccacccctattattcaagcatttgcttaacacaagcatttctttctctgatagaaactggaacctgaaaggaaggaacacagagaaaataatagcattttaacttctgattttattcttttccctgcaaatgaacaggtaacaaaacactgtttgtgtccaaagcaaaaggcagggcctccttttctcttctttcacagagtgccagaatatgtaaacaatatttaggttgaacttctgagtcctctgaatcttctgtcagccttcagaacaacattcgtgtgtttgtttataccaacatttaacagcataaagagtgaaacaagtaaacggtctgaggcatttataggaagtgttcagattgtgatacagtcttgtatctgtattgttttagtctgacaaagaaaaacactgctttaggaagtgggtcatgtgagtgtataagtgcttcgtagataggccggataggccatggttctggtccgagtaccactgaaacacaaagggaagaaacttattttattcctgcaaccccacagtgcatctggctttgacttttttgtgctctcagaacctggtaatttttctaatattaccattgaaatacctaagaatacttgcataaataaaataatttacatgtatacgtgaagaacaagaagatttaaagcccttttactaactttcaccattgtttcatattttttaaacctatatgtgagatcg

SEQ ID NO: 36421 - DNA, 2204 bp, Bovine  19866880662490
  misc_feature (1)..(1): n is a, c, g, or t
nttccatttgtgtccatccagtcattactgcctcatgagcatcttctaggtcttcttttgatcagctctgggctttctaagagtaaaggatccctactctgttccctcaatccctgtatagtatatctgctactacagtcaaagctatggtttttccagttgtcatgtatagatgtgagagttggaccataaacaaggttgagaattgaagaattgatgctttcaaactatggttctggagaaaactcttgagagtctcccttgaatgcaaggagatccaaccagtaaatcctaaaggaaatcagtcctgagtattcattggaaggactgatgctgaaattgaaactccaatactttgatgcaaagaattgactcattggaaaagaccctgatgctgggaaagattgaatgcgggaggagaaggggacgacagaggatgagaagtttgtatggcatcaccgacttgatagacatgagtttaagcacactctgggagatagtgaaagacaaggaagcctggtgtgctgcagtccgtggggtctcaaagagtgggacatgactgagggacatgtactgaaatgaactgattagcaactatataattaaatcatggctattattttctgaatgtcttctatgtgccatgtttctcataagaaaacttgatctcaaagaattttctcaaatatgtaataggaccaggctttgaactcagacatttctcagatcttcctcctacatcagtgtttcccaaacagtgagatgagaactgactttcctggaaaggactttctggaatggtcatttgggaaatgttctcctgtaaaaaagatgctcaatgcacattattgtattagaagttttgagaagttctgtaaaagcaagtacatatttactttgtttaacacagcacttcccaaattaatctgattctgaaatgctattttagaaaaatttgcaataacatccagctccttagaaagccattggaaaacactaaattgggttatctccctccctgttttaaagacatccttctgagacggaggaaagtaaatatcagtaaatatcataggtcgcctaaacacttattggagaggaaggaactataggcaacatggggctgaagcaggaggggaaagacaatggcaaagatgacatcacctactcagtatactctgcttggtgttggtccttatttgagttctcagaaatccaactaaaatagcatcaacatattttataatacatattgtagcaattagtcttcccacaaactaaaatatgatatagtgtttcacatacaaggtccagtccatactatatgagagagatcacgttttaaagcacaaaagccctcatttgataatccattacttttctgcaccagatattgcatgactgacatgtacaaggaaatattttcacactgtttcctcacagtctttcttcttcattttcaaaatgtgaacatatgtgaacgtataataatttgttgactcttgctcgttgccactgacatatcctcctttaacattaatgctcaagcattaggttctcatcatacttgtaaacttgaccattggggaaaaaagcaagttcaactgtctttctagacttgataaaccactaagaattcattttggaattgaaataaggaagaaaaacttttacaccatgtctgactcataaattacatagtctctttagatgtaccaacaggcttcccttgtggctcagctggtaaagaatctgcctgcaatgcggaagacctgggttcgatccctgggttggaaagatcacctggagaaggaaacgctacccactccagtattctggcctggagaattccatggactgtatgtagtctttggggttgcaaagagtcagacacgactgaacgactttcactttagatgtactattaagattacccactccccagccctggctctcatttaatttttgagcattttgaattgaattactgtattgggacagatgagtattagaacagctgaggctgatttgcaggctaaccaagtctacatttgtaatcaggaattttgagccatgtttgtgataactttttagtactttgtggcttttacacccaggtaaatgtttatgcggttcaattttttttttttttttaataagacgtactcatgttactgaacctctaaagcaaatccacccaccaa

SEQ ID NO: 36422 - DNA, 3514 bp, Bovine  19866880756385
  misc_feature (1)..(1): n is a, c, g, or t
ncgtatctctggtatgtactgtaagaaaaactggtgtagaatcttctgtattatctgcaaaactttaaacctaaaaaaagacttttaacctaaccccgtcaatcacttcacttggcaaatataatatagtgacacttttaataatggtaaatacatgaagtgatagccatacaattctcttctgtgtgcagtgacattttttaattggccaaataactcagtagaggaatgtttaagtttgtttaaatgtaaataaaatatatagctgtatttttttaatatcatgatttttaaatactgtatttcttaaatatctgctcctgctgtttagttgctaagtcttgtctgacactttgcaaccccatggactgtagctttccaggtcctgtgtacagtttcccaggcaagaatactgaagtggattgctgtttccttttccaggggatcttccaaacccagggatggaacctgagtctcctgcttggcaggtggattctttactactgagccacctgggaagctttctaaaatacctatagggatttttatttatttatttttttgccacatatacactggattctagcagttcaaaagactatttatgtatctgaatatctgtagattgtatttgcatttaaatccttcaggtgattctttgtataattatagggattttcctcactgtgtccttaacttgctgtaaaatgtcacttttttgtaagatttcatctcttttgttgcatccttagcttataaacaaagaaaagctctatggtaacttccacattaacttcatagaaggaatcacccaaattcctgtttagcacacagctggattctgaataatttaacttgtgtatacagtgttggtttcagtagcttccttaccatgggagaaatattgatatctgcagcactggctgtttccttgacatgagagtaagaagaaagaaggagtaagagaacaatgaatacgggtacagggtggacaaagaggcaggggattgcttggaaatactaggatttaggggtcaaaatgatctctgggaaatagtacctgaaaagaattctaacttagatttcatcacaatttacatatccaattcaaggaatatttgacagtatcttatttccaataataagaaaaaatagatttcctaaaatgttaatttggttgggctacattctcattcccttgccctcatctcagtgttcaccctcagtaagaaaccttgctcgggctgagaaggaatggaatatgagagagagagattgacaaagattgaacatgtctgaagcaactgcacgaagccagtagttccaagaggactattcactgcttattagataacatctctgtgagttaaactataatcttcttctgaaagacagtgatagggttgtgcccactccttcctccaattctcaaggccttcacagattacaagtccaatttggaatacaataaagtagacgaatgctatacaaccagagaaaactgcagcagattgagagaaaatcaggttccaaaaggtcatggaagacagaaattcctgctcagtgtgactctactaaggccatagtcctttcctcattcttcatacgtagggttagccagtcaagtgcaagacaggaaacttaacactagacagttacacaataattgaatgaacgtgcacaatatctgagtttgtccttgggtattttgaggtatattgagtcaataaacatatacattggtatgtattgaagttaatttgattcaactatctctccttagttatgagattgaatctttgagaaacaaacaaacaaaagcaggcttattttcatttaggaatgagaactctgcaaactgaaaaacatcaaataggaatatggccctattgttgtgattagttatcaggactgaagatttgcccagaaatcaggaaaaaggggggaaaatcatattatcacagatgagaagtgacaattcttatacctgcccaaccaactcaaacttaaacaaagaacagtattaaagatgatatttcagaattacataggatgccttttctggaaacaaaaaattgctaccagtgttaaattgggccacattttttctaagttttcaggttttactaggctagactaaggttgactacattactgtaggcatttagaaatgttcaatgcattggagaaggaaatggcaacccactccagtacctggagaatcccagggacgggggagcctggtgggctgccgtctgtggggttgcacagagtcggacacgactgaagcgacacagcagcagcagcagcaacatccctactccctccgccatacagaatacctgtcaattctgtctgcctatattattatctctattatactaagaagaaaagcaaagttatttggttatatcaaaacaaatttttaaatataattcccattacttatgccaagggtcagaaaatcaaggtccttgggccaaattcagtctgcagcctattgttttatatggccctagaaatatgaatgatttttacattttcaagggattatttttttaaaacattatgcagtgacagattttatgtcatccacaaaaactaaaatatttgctctgcagccttttacctggctattaataatatagtgcctttaaaatcaacttaagtggttgactattagtaaattcaatgatttgaataaaaatggaatgtttaaacctagaaaatagaaatggaatacagatactcatttaatgtacaaaatgctatataatatgcttctgatgtaattatgatttgatcattcaatatgacataatgaattcattaatgtaatgtcaaaaacacatcagtatttgaatatccagaagaaaaaagcttttctgtttgtaaatttgtctggctcaacaaaagaaaaaaatttataagacaaacttttgccagtaaagtcaagaaatagaagccacaaaataaaatacatgtatgtgtgtaaatatatgtgaatatcatcataattacagatatacaaataaagtagtattacattgtccaataaataaataaaggtcactgcagggaaagattgtaagcattagctgcagtcaatttttgcagctttcatctgtaaaaattcatctgttgagccagatcttgatactttttcttgctgttaaatatctaagcttgccccttgtccctagctaagaatccagtttttccaaaacacattagatttttgtggaaagaccagtcacagagaaaacctgataaaatgagaatgctcactgtttttccattttccccgacacttgccaggggactatatttactaggctggactctccagtacttaatgatgtcctccctgcctctgatggctttcacctctttccttgccaatgtacttacaaacgcatcagcctccttgcctcaatataactctggtgctgattgcagattgtgggtgaaacctctgtctatcaggagactaggaatagatcaggacactcag

SEQ ID NO: 36423 - DNA, 2251 bp, Bovine  19866880813110
  misc_feature (1)..(1): n is a, c, g, or t
nttagtctatcttaatttcatgggatttcactgaaatgatctcaaacctttggtagtaagcctttacatttcttatccccaaggttggccaatgatctattggcttggaaatgctggttgttctaaaatttccagaccctttcagacctttcaaccctgccttgagacgcatgactccagcctgtgaacctgtttagtgagacctctgcaatgcccttcagcaaacaggagctaccttcaaaagtgtaatgtatgcagtagatatttagcccacagttgttaaagtgttaatcactcagttgtatttcactctttgcgatcccatggactatatagcccaccaggctcctctgtccatggaattctccaggcaagaatactggagtgggttgtcattcccttctccacggtatctttccaacccagcggtcgaaatctgggtcttctacattgcaggaagattcttcatcatctgagccaccaaggaagccttagtctgtggttggtaatatcacaaatcactacacaaggtctccatatgagagcagccagggagccagaagcatgaacaatgagaatgctagagttctaaggaaactttgataccacttaatacaacctctgatttttcaataaagcaaacataagctctgtgaaatgaggttgctcagttacccaagtaattaaagactatatggggactgaaactcaggcatctgacatgatatctacctgtcatgaggatattctgcaaatgaccttaatatattaaactgttcattaacaatcaaagtgttacaatgattacaatggtttttgaatgcatcagaatttgagttcaggtagagtgcatattaagttttatgttacttgaaacaggtattttaaaactttgtggtaaaaatactatctctttattgaaaacatactggaaaacattgatgaaaaaacctagtatttgctgatacttcataaacaggctacatatgttgtggtagtatgtttagctattctatgcatttgatttctcgtataatttccaaaatattctagaaggcagaaatacttgaaatagagtcagatggagttttaaaaatatcttgagaaagtcatagccttcttttgtcctcttgtattctgaagagctctgattggttaatattcatatttgctcaggtcttaatcaaaagattcaaagatattgttagattgaatttaattaatcaaaaaaccacagaatttactgtttactgcctccaacattttgtttctccttagtcataggaagtaactttctgtgaggcagaccatctgtgagactgggtaagtgtgggttaaaatggcctgttgtggttctgcctcgatcatgtggttcttccatgacaaaagaggctacttttctactgggagaatgttctgttgtgctgagccctgtgtctctctgcaaacgatcacacttagttcaggaacactgaaaatgtcccagacacagagaggttactcttctattaggactagggagtggtgcaggtaaacagtttctattcattttctaatgacatccagcgcctgtagcctgttggacatctccactgacgcaggtaatcttgtatgtattaataactagtctggatttaacctccgttcttttaaggtaattactgagcatagtgttatgttcatgaagggaaagctgtggaactaagccttaacctaccttatgtcttcttcttaataatactgttaggtagttagaataggaaaaaggagtccagaatggaggtggctaaaagacaaggaagagaaaagtctgctaaaatagaacaaaggaaggtctgaggactggagtaaggacctcaagtggaacaaacagcattcccggctagcccactttacaaagagcagccccagggggaggaaaaaacatataaaaagaggagccaaagggctggggggtctctctatctcccgcgcgcgctccttctctctctctctctcttctctttacatcttttgggtcggcatgccctcacacctcgaggatgtattttcctttattttctaaataaaactgatctgtccaagaactataacacggactgtccgagagctgtgacgcgctgagggccttaacatctgtcgcttcaaatctttgttgtgatgagacagaactgaggagattacacttccctgacaataccttgccttttatggtacttcatatttttcaaaatactttcatacatacata

SEQ ID NO: 36424 - DNA, 1162 bp, Bovine  19866880985635
  misc_feature (1)..(1): n is a, c, g, or t
ntttcaaagacattctgttctccactgtgagcattaatagggcagggcatggttcccagatagatgaaagtgacttgtaatatcttaaagcaataaataataagctaatatttattaattatttagtgtactaagcactttatagccattattgtttttaatccctacaaaaccctttattttccttgtattttatagatgaggaaacagaaaagatccagtaatttatgcaaggtcaaacacctcagaataaagaaaggagttaaatctaaggtgtcagcacattcttacccactcttctgcttccaaactcaaaaatatcaagaaaactcttcagatgatgaaattttttaaatataatttcacattccttgtagtggtcttggaagaccaaggactgactttagatttgcagtgtcatagtatggcttagaatcacgggaagaagtctccactctaccacgtcagggtaactgaaccaccattcagcaggtgactgcttaaagggacatgttaagatccttcatacggcagcataattctgccatttctccttcccatcttattaccattcagtaaatattgtcatcctttggtatttcttatcaagatattttgtatgctactaatatatgtaaaacaaattctatcccggtggaggaatatactaaataattaaaatctatttaaattgcttatgttgtccagctcatgtaatggaggtgttcctagggctagttatttatttttttcctagtgatttgtttgtacatgttactttaatgagtgatgatcaggaaagacatatatcctatgttactctggtctgagcatcatgtaaaaaagaccaaatgcaaaaaaaaaaaaaaaaaattccagaccaaaaacaactgaaggatgctgaaaattattgctcattcctacaggcagtattctgttacgggtggcaggcgttatgccagtctaacagaaggacatattgaggcctctactttttggtatgaaatattaatagtgagggcatggttccaagctgagtacataaaaacaaattactttgtaggttcaggggatatgctatagttaatctgtcgctgagctgaattagccttcagaaataaaaattgctcccagtaacatgtttaacctaaggctcaactta

SEQ ID NO: 36425 - DNA, 1636 bp, Bovine  19866881130412
  misc_feature (1)..(1): n is a, c, g, or t
ntgtgatatgagtctatggagtcagacaggcatgagttgaagttttagttccatcccttactagctgtgacttatcaagtcaattaacttttcttgagattcattttcctttactgtaaaaataatatctacctcacagggttgtgcccacaattaaatgtgataatgagtgtaaatcatcccgtgcattgtagacattcaatagaaagtttacttctggcttttcctgttggttttttttcacacatatttattgttcctaaagaactaacaatttctcctaaagagaaattgttacattctctttgctagaaattgagagatacagtgcccaatgtatttttgatggtctcatttggtgactaagaaattcaccactaaattttgtgttccattgcctcaggagagttttgattatttttcctttcatctctctatcttttgtttcctctttatgacttgtgttaaatattttggcttgtaattttgcactcaggttttcactgtgagttgtcttaaatcctttttgaaagtagtcagttactaaatcaatttagaaagatgtttttggaattccagcgttcttggagtcacccatgaagccttaagggcacttgggaaagtttttcaatatctttctcttatcaagtgtctttctcatgtgttgtcagctcctaacactaatcctaatagcagtgacaatcactggagaaaataactctagtaggaggtaccatggggcttccctggcagctcagtggcctaaagaatccacttgccaatgcaggagatgcaggagacagaggtttgtttgatacctgaattgggaaggttgcctgaaggaggaaatggcaacccactccagtattgttgcctggaaaatcctagggccacaggagcctggtgggctacagttcatggctacagtccatcacaaaaaaattggacatgacttagtgactaaacaataacaaaggaagtactatagaattctgtggagaggcctttgtttgtatgtagtgggggtaagattcgcagatcttggcatgaaggacttgtctagattaaggaatcctcctatgatgttagcccttaactgacttccttaattttcttaagtcaattacatagaactcagtagactaagatttattcattgaatctcttcctagcccagagatttggaagtcctaagtaagttagcagcattggaatctgggttatgcctaagtaaagggattttacaatgggagttataagagagggagctgtattgaaacagaggtagaggcacagtgaaagggtgggaagaaagggtagggtttaagtggatagttatccaaggcaccccttccattgtcccagccatgttgcctttcttgcttccaactgatttccttttctggtcaggtggttcctctgctaaactacctgacttggaacttcctcatttagcattcgaatagtggcattttattgagcctgagcagataaaagccttagcattttatttagtctttagcctggctaaaagagaatctgtttcaaatacataagtacaaaccgggacacaggttggtttaatgattattgcagccatgctgctacactcgacacgagcttcttgtttgtcagg

SEQ ID NO: 36426 - DNA, 1089 bp, Bovine  19866881135406
  misc_feature (1)..(1): n is a, c, g, or t
ncagtatgccttaagcttgaaagtcctccacccatggggaaatttcaatatgcatgcttgtgcgctaagtcgctttagtcatgtccgactctttgtgaccctatggactgtagcctgccagcctccatctgtccatgggattctccatgcaagaatactggagtgagtttccatgctgtccttcaggggatattctcaacccaaggatcaaacccacatctcttatgtctcccgcattggcaggcgtgttctttcccactagcgccccctgggaagcccaatttcaaatatactattggcccaaaatctcactttgatgcttaagtcatcctgcaaatactcagttgactgacttgcaccatggagactttgtagttcttcagcaagaatatgttcagacttttataagtgttagagtcataggatgtcttgtttaaattttgactattatcttcttgaaatgaatagtttcatcaagaatgcttgtgtggagatgcaaaacaagacctgcctccaaggtataatgtgaggcatctgaaggaagactccttgtttgccccctccaaaaacatctctccaacctgacataggcttgctgtttctatttttcccataattttaaagtttggactcttgtgaacacttataacacatgttaccttgatttaacttactacatcacaaagtatgatgcggcctagcaaacataaagtatgctgtggcctagcaaacaatgagggaacacggcactggacagatcagctttgactgtagaaaaagtgatgcccacagaggaagaaatgttggtgttgcagtggggatcctgatcgtagaaggcattttataagcaccaggccactagaatgttcggaacagatcaacataggagggcagaggaaaaagaatgtctcagaagagaagacatttgccccaatttactgctctgtctcaaatcagtgtccatgttaccttaacatcgtaacattgctttaggtttccatatcccatggaatcatctatgcaatcatgcagacaagctgaaaatctcagcccacagtctcttcacagctggcaagccaccacagcagc

SEQ ID NO: 36427 - DNA, 1368 bp, Bovine  19866881136494
  misc_feature (1)..(1): n is a, c, g, or t
ntaaaggagttgaattctgaactggcataggtactgttgaggtggaaaattgacttgttaaagtttattatatctcttttgttatatattaatagacagtactggaaaacagtggaccttgctttgacctactgcaaaacagttcacctctttctagatcttatttcttgtctttctgtctttatattacatcataatgattactcttacctctagtgaacttttatatgcttttcactctctaccaaaagtaataataaacaaagaatagttttctaaaaccagtgaaaaattcaagatatacaacctaagagaaacttctttacctctactattttaaaagttcttgtcattagtttcaagatagttttatttctattttcaaaaattgaaaaaacacccactaaggtagattttcatagtgtgtctcagtattacatgaacttagatatactgtgagataactatgcattctgaaaatattctaatcagccaaaaagtaccaattataaggtagttgttggtcccatttttgacttgccgataatacaaagatagttcattgaactaaacaatggaaactaatagcctgacaaatcagaaagaagagattgatttttttttttttttggcccattttttctgagattgtgggggcagtcacttctctttattgtattatctggggaaaaacaccttaaatctttaaagagatatttaaagaaagaaaacagagttattgctagcctaaatgtcatctacaagctgtgctgtacacagctgtaactaaggaagaatgcccaggcatattagcaagcatcttgataactatagaaaaggcatttgtcacttggtacaagttatagaatcaaaagagagtggctttgactgctgaagtcagtactcactcatcctcaagacgcacctgaaggttctgtctacccccaacactttcactctcccctccctcttcctctctgtcctcctctcctcctgcagttcctttgtgccagctcctttggaactttatcatgtaccttactttttcagcttttttggtacagaaaatatgtcacttgtgtgttattctatttatttaccttctcaggaaacttactgtcatctagatttcacctcattttgacataattgtagaagaaacaccagaggtttcttttgagaggagggcaaaaaggaagcggcatatacagcagatttgattcctttccttttcatagcatcattttgctccaccatctttgtagccaaaagagttgctagtactttttatcacaatatgttattaaaacagctcatttattctgaagcatttcgcttcattaacaaaatacctatacaaatttcatt

SEQ ID NO: 36428 - DNA, 1792 bp, Bovine  19866881145042
  misc_feature (1)..(1): n is a, c, g, or t
nttaatttcctcatctgtaaagtgagtaaaataatactattctatacaaggttggaagtttaactgagataatctatttaaagtctaagagtgactcagtgaatattagttccttcttcccttccttcctcctcaccttaacaactaataaattgcaattccttaaccaatgaataaggtcttaagtgccaggtccagagaaaagaacaaaattaattggatttgaaatgacttaaactgatgctcttgataccatctgaacattcttccatttcctcaagctcattcccttcatttactctcccaaagatctctccttccctgtctgtctctctgttggttatattacctcctccaaagcatgtaacctcaaaacctagaagttacttttgattcatcagcttcctttacttcctttatccagcatcacagactactagagttgaaagaagcctgtaagatctggttttcatttattgccaagtggttctctcacctctgctgagtaacttctaatatcaagaaggtcctgcttctaacaaaagagctcaatccattctttgaacaactgacactgttagaaagacatacctgtattcatcaaaatctgtttctttgtaatccacactcattgcttagcattctttcctctgtaatatacagagtaagctaaatcctaatttttctgccttatgatagcccttcacaaagaaaagacatcaagcatcatatgactccagagggatttttcttttagtttcctgtgataaatccttccagttctcttatatgttcttaataagaccctgttaaaacacagtgtttagggttggacaaaatactgtagatacagtcagtacagaatacaggaaagatgagatgtaacgtgtgatccatgaccgggtttgccttttgtcaccaacgctggcacccacagactcatctgaagttttccataacctgagaagtctcagcttattttcatttgaagatctgttaaactagacctctcaagttatttttggaggttaattctgagcctgcatgcagacacttaggtttacatttatgtttttcatactattaatcttgattgatcttttcaagtctcatatttttgtgtgtatctcatgcaccttcctttttgtataactcctcatcctctcaatgctgtattctggctgtgaatctttcatcccgttggatcaaggtgatacttatgaattcacatttgcacccatgtttaaatgtgaaattatcctcattaattattcatatccattgctctgtagacatgtaaggccatgggtccagtttctgatctgcttccctcttgtttttccctagaaattactggacatctctccataagatcttccctaataatcgttaatttattatcccattgctttgaattctaaagtaatttaattcttttaattgaatcagataatctctgacccagtaagtcaacataacctgctttctgtatttggcccaatggcaaggcattaatattataactcttgatctagaaaggagaaatcctgtttcctaataccatttacttttgtctccctttctctatcctttccaaagttatcgccttcagatgcagggagaaatgaaaacaccaccctgtgttcccagactttctatttcctatctaggacttcaacatcatgagagagaaatcccaggttcctagatgctataatacagccccatatgattcagcagaagtgggtagcatttgggtttgattagtcttggcaggcactctgtcacatct

SEQ ID NO: 36429 - DNA, 1139 bp, Bovine  19866881218617
  misc_feature (1)..(1): n is a, c, g, or t
ncatcatgaataagaaaaagtgtttataactccattttgcattttatgcattttttagtatagagatttcaaattttaaatattttaatgactgaagttacttccttttacagaagcctttgaaaaattgcaatgttttaattggttcacattaaacactcttagaagcttgagggaaaaaagtctttccagatgagcaagaggttggataaatgtaatgacatatggtttgttttttatagctacaatatgcaaaaaatagaagcataacacatgtattcaatgatatatatgtatttatacatataaatatatattctgatataaattatgagatatgattattttgtatcagtgtgattttgtttttctctttcttgttccctttatgaataaaaataacaactgaaacttagaacaattttaaacatctcattatacccaggatctaacgaaagataaaatcaacgtatgcaaaaccatgatgttgcttggtcctctccaacttgtgagctaggctgttggaacaggaacagctaggctgtaggtcttggaaccttggggttgtagtgggatggtgggggggcggatactgaggaactgcctgctgatcttattacagaattttctcccacccagcaggattccacagaatcactcccgatgaatgggtcaccaactgtttcttaaatatctctcagtaacaatatatctcacatcctttggcaacaacaccccccaacacacactgcagtgttcttcttttattgcccctggatccctgaactcatcaagacactcaggagacttgaaaggcatctgatcattatgtgctatatacttaatttcaaaagtttcaaaggcttttgttaaatggctacatttttttcttcaaagttaaaaaaaaatctgagttaatgtaaagtttcctttcacatgctatagacaattttggggggtaagggggagtgagttttttgcaggctcacagactattttcagaagatccttcttatggagtctgcatgcatattgagaggatcacctctgagaaaccaaaatggacctcaaaccaaaattttcctcatcgggaaagtgttagcggtcactattaagccttcggacagggcagaggcata

SEQ ID NO: 36430 - DNA, 949 bp, Bovine  19866881282122
  misc_feature (1)..(1): n is a, c, g, or t
ngagcaaaatgtccatttcaagtattggggagtttcctttaaaaattaggtgttatttttgcacgccctagcattcaaggaatcaataggataggacttaatgcactgcctgaccactgctgctttgaggaaaatatgggcccaaaatgaggtgagacactggtctgaaaacaattttaacttgacaaagtacaaaaaatacagactcacacaatctctttcaatcaacagcctcagaataatcttgtgctcgcagagaggaatgagtattgaagatctacactgaagacatattgcctttatcttattggttaaccttctcattttgcaattctgtgaaaatctcatgagcattcttaatttttcaaagtattttcctatatttcatttttaaagcaataaataattcagaactcacactttcttcagctaaaggcttgccactgttcttccattattgtcagttagcttttaaccagaggtatttcccacttcagctatcataagttatcacaagctatcataagcttttaatgttggtgcaaacatttttcctttccctagactccaaagctagacatgttattattgtacatttttcctgttttagatcgtaagcttctttacatagtttcataaaaacctatgtccttgatatcacagaaaggtttataaacaaagtcttaatttaaatccaaactagtcccaacatcagtctcctgaatttcagcaaagtgagatcaatgttatctaagcctgtttaaaaagggtcaatttaaaaactaaacataatgcttgcttaataatatttagtcttctaattttattttcttggcttttgcatctagaacaacaatttcactttttctatgcagctattcctgagatctctattcttgactgcctccctaaatttttggaaagactcataataaaaatttccatagat

SEQ ID NO: 36431 - DNA, 753 bp, Bovine  19866881306456
  misc_feature (1)..(1): n is a, c, g, or t
ngagggaaaggagacattcagtatagaacaccaatgcaattggagaaaatggacttttagagtattttataggtgtagaagtacacctgaagatagtctgtcccaggaaaatcaaagcaactttgaaagttcccaaccacaacctggcaggaaagaagacatcctgtgctaggcatttattctgatgcatctgtgcgggaggagagctgcacctcctgaaattctggtaaatgcaacagctggggtgaggaaagagtgcaaatattgtaaaaaccgcaatgggaaacaaaatcagaagaagactttgagatttacgttagctctaacataggaaagagactagggttatgtggatctaaatgaatcaatgcctaattggaagtggattggaagatgacaaagaaggggacttaggtccaggaaaatagcaaagggacagaagtgcaaggctatgttctctagccttcctcatgctcatggcaaacactggagtccattcttttcctgtcatccaaattaccagcacaaaggtctctgttcaatctatcagctgcaagtctttaggttatatttccaaaatacatgctaaatccacttatcaatctccatttcaactatcatcactctagtgactacctatgtagcctagatgactgtatagcctcatttctactcttccttcatctgacctacttttctagaacctttgccggaataatttttaaaatatttaagttaaagtatgtctttaaa

SEQ ID NO: 36432 - DNA, 861 bp, Bovine  19866881474389
  misc_feature (1)..(1): n is a, c, g, or t
naaaatccatgaaagttcaccatgaagtttgttttagtcaggttgagacccatgagtgggggaaaaaacacacagtaggttaacaactgtatttatgaggaacaacagaatctatccaaaggagttccattgaagcagccaacatacactaataaactggtatgtgtgtgcatgtggacgtgtgtgtgttttaattcagactgatgtcagatgatgtcaggttgaccgattgcttgggatttatgcaaatttagccaaaatgaaattatacatatgacttacttcttttttcaaatgctttttatttattttaaaggctttataattactgttctctctcagaatatattctgagagggaagcaaaaatatcacttttgcaaagccatgttcattctttcaaaggtctgctggtaaattattcttactgatctttccatctttctggcctgtgcatacacacctaacccatactaaatttcaccagatggcattttaattctttaaagtaaagcagtcgtgggtttagacagttgaatttttaaacttctgtatttactgaaagtgcatatggtgctatatggacaaagaaattgtgctgaaagaaaaacatttctgtctgcagtacctcataatctcccagagaaagaaaaattgcagtaacatggagtctgtcttacaaaatcttatgtggctttaatcttcttcctctgctaaaagttagatatatgtatattatacacaccttaaagttatattttaaattcttcttttggttgcaaatagaaaaggttatccaaaaccccatgactttccaatatgattcataagtgatttctagaagaaaatgaacataaaccta

SEQ ID NO: 36433 - DNA, 997 bp, Bovine  19866881635326
  misc_feature (1)..(1): n is a, c, g, or t
naaaaaagtatttgattcccatggatacctctttgagatgtggtcttgaagtcaatagggagtgaaactggagtcttagaaagatactttggctgcagaatgaagaatagcctgatcttgggagagggagtggttcaaaggagtaggagggatgtaatattagcaacaaataccaagggcctgaatttatgcagtgaagaaaggggcaaaaataggtcatagttttgtgtgctcttttataatataataagcagacatctatgggaaattggagaagggaaagagaaagatgttgagaatgaccatttgggtttgtctatctattactgtgttctgtaaacatctgtttccacaaagtattagatacctttctaaactgagaaatacactaaagctaactatacaattttttctttggccagttggtcagtaagttacaaatcatacatttccctccattatccagattaagaaggggagagaagacattttcattgtaccttttcatttttctggcgcacaaaccaaattctagtagcctggattttagctacttaatagatatgtactatgcactatgtactcagccctgtgcttaggaagtgtctgttatgacagtggttctgacctggcaattttgccactcaggggacattggcaacgtctggagacactgggttgtcagaactgggggagcactactagcatctaatgagaagaggccagagatgctgtcaaatatcccacagtgcacaggacagcctccaacagaaaagaactatccagcccccaatgtcaatagtgccaaggttgaaaaaccttgatttatatgaagaaaaattaaagcaattattctgacaattgaagagcagcaggggttttgctaaattattagaataacaacctcattcatgggctttgctttgttaatatagacctagccaggtggtgttgaataagcattagttcgtgatttaatcttagttcctttctcttc

SEQ ID NO: 36434 - DNA, 932 bp, Bovine  19866881773454
  misc_feature (1)..(1): n is a, c, g, or t
ntaataagtatttattgaattgatgaattaataagaaaaatgacatggttgaaaacacccgaagaacattaccttgtattcttgaatattcccccaattgttatttaaaaatttttttctctagttattagtttatttctattttttgaaatccatttttttccctaaaataagttttgtgattttttttcctgagtaaagcagctatttgtattgtatttttgtttgtttgaatcttgttagtgagattttagttctttaagccagttaggatgatatcttataataaatctcattttaatctgttttatttttgtgtatataattgtgggacaattttaatttataaactaggacacatttatggcacatagtttaaaattttcccttcagttttgtactgatttcctaaattcctttacactatttgtatggatcttgtcaatcaaatttattctgtataagagattaatagagggatgctacattataagctttccagtttccttgaatgatttttagtattctataacacttttttgtaattaagatttaaatacccaatccctcaagacttgccatacagagagctgtcaatcaaggaattggcaagctctatgaacggcatgatgaaatctttatccctactctctgatgccttcaagaccagcttttgcaagttgatccttcatttcacatgtcttagaactcactcacacttcttatgcttggaaatgtaacacacagagtgacaatgtaatccacagctaataagttagcggctataaaaatgaacatccacattaacttgccaagcgtggaggctggaggtgttacactgcactcgtgtatatatgtctgccagggcaatagtacatatgcctttggaaatgcttctaagttatgcagagaagccgacaataattcttgaa

SEQ ID NO: 36435 - DNA, 1127 bp, Bovine  19866880290391
  misc_feature (1)..(1): n is a, c, g, or t
ntctttcccagcatcagggtcttttcaaatgagtcagctcttcccctcaagtggccaaagtattggagtttcagcttcaacatcagtccttctaatgaacacccagggactgatctcctctaggatggactggttggatctccttgcagtccaagggactctcaagagtcttctcccaacaccacagttcaaaagcatcaattcttctgcacttggctttctttatagtccaactctcacatccatacatgaccactggaaaaaccatagccttgactagacggacctttgttgacaaagtaatgtctctgctttttaatatgctgtctaggttagtcataactttccttccaaggaataagcatcttttaatttcatggctgcaatcaccatctgcagcgattttcgacccccccaaaataaagtcagccactgtttccactgttggtagagtgttaagttccttttatcatggactttttacaaagtcataattcttccatgagaagggggaagatggttttccagaaaaggcatatatttagaaaacctaccagggatgctttagagatgatcattacattttgccacaaagtcatggtagttgtaattatttttcacaaagatcttgggtaaagcctaaaagtgcaagtaagtggaccaaagtagggcatgtcaactggagaaagttgtctggtctttggtgaggaatgtaaataattaggattgcatttcagaaagatgctcttgccttttcctctctaatgctctctgacatttgggtgttgaatgccatgatatttttggtattcacatgcatccttaacaagcacaatgctctcttggctgtcctgttttaatgctgtaattgtgagtttgacctacaaaagttatatttgcttggtagacaaatggaaaatctccttaaataaatacactgactaatactgtctggctacatcactaataacagatgacagcctttgggacatgaccatgttaaaatgcaggatctgtttcacctgcttatccatccacagacctgtttatcatcaacaactatttattgattaattaccatgtgtaggacacagtgttcaggaccatgaatgcaaggatataaaaga

SEQ ID NO: 36436 - DNA, 1564 bp, Bovine  19866880513105
  misc_feature (1)..(1): n is a, c, g, or t
ntgctcagatggtacagcaacctatcacaatgaccagagagaccacaccgggcacactgcatgtgccccatgggtgccaaggcctagagaaggggactgcaccaggcatgtgaaggtctgccaaccagaccaagaccgtcctcaagctgtatgtggctacttaggatctggatggccctgcattatttttttttttttttttttttttgcactttttggccttgattttcttctcaatgaagtgaagcaagcggaccaatgacacctagagccacttattcacagtggttccagtacccctgtccagctccctccttctcccaaaggagatcagcagacacaagtactagaatgcggcttgattgctggggtggacgagcagggctcgaggcccaggctgagtcagaagacacagctccccagtgcacatgtcttcctgggagggagccccagacactgagctctttcaggaagagacaacggagtggacaagcagaatgttatgagaactggggcaacagaccaggccaggaatggactacctgggatgctgtgtgccgggcaaggacagaagcaagaagacatcaaccctggcaaataagatccccctggaggagggcatggcagctcactccagtattcttgcctggacaatcccatggacagagaagcctagcaggctacagtccatagggttgcaaagagtcagacacaattgaaacgacttcacatgcactgaagtgcagcacagggaactctactcaatattctgtaatggcctgtatgggaaaagaatctacagtgtggatatatggatatatggatatggatacagataactgattcactttgctgtacacgtgaaatcaacactacattataaatcaactgtacaccaataaaaaaaatttttaatttttcttccgaacatacaaaacatctcaagggtccactgaaggtgagggaagcgaggaaaacctcatgtaagagatttttttaaaggagtcagcacactgagcatagtttttagccctcttaaggctgaacataatggtttttttctttagaaaacaaaaacaagagtgatttttctttcagtcagtatagcccccaaatctccatcctacacccatccaaccccttctttataaaagaaaacataatattaaatttacttctctccagctgagagtttattttaagcctcatagaaatgctaatatgagttctcatttctctgtctcacttattatttctctcattatgaagcttttctacagaaataaaagaattcccttttgcacaatcaaaaaaaaaaaaaaaaaccaatggccagttttaaagagtgaaaatgaagatagaggaccacaaaaattcctggtcaggaaaaaaaggggttgttctcaagggaaaacgtgctaaatatataacatgaaattaaagcataagggaaatttgcattttgctgaatattaagatgagtctttttctgcccaagcctggatagagaacactttttgaaatcagaccattacaccatcaagaacttctaagaaatactctg

SEQ ID NO: 36437 - DNA, 1827 bp, Bovine  19866880706912
  misc_feature (1)..(1): n is a, c, g, or t
ntgatattgttattgaatgttcctaatctataggttttctcaacttggtttctgaacccaaaaaacactatcgaagagcaatgataggattgaaagtgaaagtgaagttgctcagtcatgtccaactcttagcgaccccatggactgtagcctaccaggctcctccatccatgggattttccaggcaagaatactggagtgccatttccttatccaggcaatcttcccaacccagggattgaaccagggtctcccacattgtaggcagacgctttatcgtctgagccaccagggaagttcaatgataggattaggctttttcaaatatgaatagtccacccattgattttaatggaaaaataccccagagttgggaggctgtggatggggcaaatagtaccttagttttttcacctccagggttaagtgaataaaaatttaaaacaatatgagtatgctttatattttagaaaaagtaaaatatgataaaaaatgacatctttttaagaatttcatgtaaattacaattatttcttttgccatggattagctcttggattatgttagacacctttaatataagctttcataaaaccctgtgtctaacttatcactgcatttactatttgttattagaacttttttgttgattctctatgatctctatcaaaataaaagctcttcctgaataggcaccatatttatcatactcaccagtgtaatgctaacacctaatacaatagttttcacattggaaaaaaatcatgcttattttgtggttacttaaacaatttcttaattacacagattttaaaaagtattgcattttgggcttccctggtggcacagtggtaaagattccacctgcaatgcaggagacccaggtttgatccctgagtcgggaagatcccctggagaaagaaatggcaatccactccagtattcttgtctggagaatcccatggacagaggaggctggcgggctataccccatggggttgcagagggtaagacacaactgagcacacacacacacacacacacacacacacacacccctcctcttaaacagtcactcaccttctcagctgcaatagccctttccagtgaagtctccccttccctaaagcccaggattgttttcttcctgacaagctctatggtccctaagtggttaagaaccagtgctctttgtggctgaatgcccatcctacctccctgcaatttgcctgagctccagccatcctgcaaggccatttccacacatccagtctgcctcctctctcaccagcaaaaaggagaggaggagtaatgttgaagtattaaccagtggattgaaagtgaaagtgaaagtcacttagtcatttccaactctttgcaaccccatggactacacagtccatggaattctccaggccagaatactggagtgggttgccattcctttctccaggggatctttccaacccagggattgaacccagatctcccacactgcaggaagattctttaccagctgagccaccagggcagcccaattaacaagttctctacccccaaaaccaccttgtatttcaagatccctgcccctaggcctgagctactcacccttagaggagggccactacttgggctacagaaaggaagtgttaaattgtggcatttgggtttcaaaagtcataatatgggaattccctactggcccagtggttaagaatttgcctgccaaagcaggggcacgagtttgatccctggtccaagaagatcccacatgctgaggagtaactaagcccgtgcaccccagctactgagcacgtgttgcaacta

SEQ ID NO: 36438 - DNA, 1580 bp, Bovine  19866880756460
  misc_feature (1)..(1): n is a, c, g, or t
ncgtcttttatttatggctgcaggattcacttgttaaatgtataagcaattaaacattactcaaagtacaatgaaaatgagtgtttttaatttttacacaaaagtacttggtttataactgaatttactaggttgcaagtggtatttgagggtttaaagaaaaatagttttttaacttctaagtttaattgaatatttgcgataattgaatattgtgataaatacataattataataaatttaaaatgttttaagtaaattataaataattacaaataattttaaaataatgtttcttaaatcagatttaaatgattgatttaggagtttgggaacttttgggtggccacttggaaaaagaaaattgatttatacgtttgaatacataaatacaaaaaacttgtgcatggcaaagtctccaaagacctgtatggaaatgtttaaagtagctttgttcataatgccttcaaattgggaaaaacaaaatatctatcaactggtaaatagataaatacatcaatatgataaaaaatattaatcagcaataaacagaactgctcttacatgcaaaaatatggttgaatctcaaaagcattatgctaaaaggaaggagcaagatttaaaaaagaactatatatattgtatgattctatttagagcatgttgaaaaaggtaaaacagaaatcaggtcagtggtaccaggggatgagggagggaaaggggactgactgcaaagcgacatgggtaaacttttggggttggtgaaaatattttatatctttattatggtgttggttatacatttatcaaatgtatgaaatcgaaaaaggataaattttattttactaaaagaatagcaagaagcctgattcagggtttccctggtggctcagtggtgaggaatctgcctcccaatgaaggagacatgggttcagtccctggtccaggaagatcccacatgctgagaagcaactaagcctgtgtgccacaatcattgagcctttgctctagagcccgggaaccacaactactgagcagcaactgcagagtagctgccaccagccacaactagagaaaagcctgcacagcaaggaagacctagcacagccaaaaataagtaaaattattttttaaaaacaaacctgatttaaaaaaaagggcaaacaaagacaaaagaaaagtgataaactggggaaaacattcataatgaatattacaacaaagggttaatctccctaaagaggttgtagaaatagagaaatgaccaacaatgaccaaaaataataatttttaaaatgagccaaaaaaaaaaagaaggaaaacaaagttcacaggaaaaaaattcacaaggcttataaacatgaaaagatgctcaatttcacatagaagaatagaaaaggacactaaaatcatgccaagctatgtattttctgttcctcatctatccagactgacaaaatcctaaggactgaaagcgcactctgttagcaaggctgtgtagaaacaggtaatctcataattatggtacaaaaagctaggaagggaaatttgggaccccagggactataacccaccaggtt

SEQ ID NO: 36439 - DNA, 1749 bp, Bovine  19866880809054
  misc_feature (1)..(1): n is a, c, g, or t
nttgcagacggggtggtgaaagaaaacattttgttcttttgtggccttattgatgagcattatagaaactaggtgccatggggtactgcaaagataatgtagcaataaagtgctaaatgaaatactgaaagtcttgaaatatatagtatatataaaaatttaaaaaaaacctcttcgctttagttagtagagaaaagcagtggaggagtagagatgtgatgggaactttttaaagcggaggatttgacggatgagggaccatcactcatggtgtcggaaagcttgagtcaaggttaggccagagtgagaagacgtctccttggacagtcatgccaggcaccgtaggaacttccccagtgtgagctggtgcagtgaaggctgaccatgcaagtagacctagaggctgctagggagcccgtgagaagagtccgtggagttttgaccaggatggcggcctgaagaattttgtcatttttaatttaagttgactcctttaaacatgtccctcttgcgtttcacgtttgtaggtttaagaaaatctaccaagaagcgcagcgaatccccgcctgccgagctccccagtttgaggcggagcacacgccaaaagaccacgggctcctgcgctagtgccaggtaataatttgggcctgtcagtgtgatattagttcatttcctgggtccagctttccccaaaggccttcattttatgagttttaaaaaaaatttcatgaaagttttctttttgaaaatcgagcaaagaaattcattctaaatagaactattatttctgtgaattcttccccaatatttaacttaactttttttccttttttgctaagctttaatcatgcctttttggggacaacacctttgtcttctgccttttcctctgttgttttacattatttgcacagagttcctgccagcagttggacatttggtggtttttggagttcctatctgccaaagagctctctaataagcatctttatgcagattcgggttatttttaaaggtagctaaatttcccagttgtgtgatgagtggatcaaaagggatgcctgttgtaatggctgtaatattgcctaattagtttctaaaagtgttggcatgagttattgagtttaatgggtgagggcgagagatgtacttcatttttattttgccttacaacacccatcctcaggggaaaatgtgggttttgtttgtgttctttcatgtctccatttttcccactttgagcccattttcagaaaatcatctacctttgacatacgacatagtatgttatttcccatattttcattaactgattgagaatcttaggttgaagttaaaaaaccttgttactccagtttcacgtcagattttcaggattggtcagttctggtgttgtgctgctaattatcacaaccatatgggacttctccctcctttatgtgtaatttgctccttttctaaatgtgccaaaaaccagtgatggcgtgggtgatttttagtttgcttttcccatctcaggtcagttgaaaggtttagtgcttctttggttcttctctaaggtaatcaacttcatacctttgactgctggtacagtaataacataaggaaacagaatgacttgttgcctaataataagtcataaggaaaggactctaggccctttaagctctgcttttccacttgttttctggttctattaggattggttaaaatattggttaaatatctggagttagtacacctgtttgc

SEQ ID NO: 36440 - DNA, 1145 bp, Bovine  19866880816045
  misc_feature (1)..(1): n is a, c, g, or t
natcttagaatcctgaagtacggtagaattttatgaagtccctagtaagatcattatatgaaagtatcagactaatattgttgttgtttagttgctaagtctttccaactctttttgtgaccccaagtactatagcccaccaggctcctctgtccctgggatttcccaggcaagaatactagagtgggttgccatttccttctccagtgaatcttcccaacccagggatcaaacacgtgtcgacaggtgtattctttacccctgagccactagggaagcccatcagactctaacgttaagagtaaagtattttttaaaagaagtgataacttaccatttaaggctatgtctttggcaatttaaactttcataagtttaaatatatattaaggtttatagttataaatgtgaatttcataaaacctagaaattttgattccttcttgaacagatgtttaccctcatatacttcagaatgaatcaaagttcaagtatcttctgctcagcctctttggatacacactagaaacttcttcagaaatattttgaggttttagaaaagatttgtgtaaaaaagacaatcgttagagtcacttttcactgttggctttgtgcctgcttaaaagttacccccaagggctatgagccacattttccccataagtctgccagctactgtttcagtgcctttaaaagcaccccagtggctttaaaggtaaatgtagtcattcccaggcactgagaattcaggttccaacagtgcccagactcaaaaatggctacaagaaatgtctggggcattaaatgacatataatacattcttagaaaattacttatagtagcaataaatgtttgctttgtgttcttgactttgtttatgtcaacttcattatgctgaatatattcttttctgttttgtagggtggatctacgacatcacccaaaaatatgacttttccttctatataagcggtttactctacatggtaggaatcctctttttactcattcaaccgtgtattcaaattatagaacaatccagaaaaaaatacatggatggtgcaaatgtgtagtgtcctgtgatgttccgtgtaagattcccttgtcatcctcatgcattcctcacatggttcctgtgaggagc

SEQ ID NO: 36441 - DNA, 1903 bp, Bovine  19866880867762
  misc_feature (1)..(1): n is a, c, g, or t
nagttaatggtaaatatatattgagagagaaaaaacactgtgtccgcattgaagattacctttatcaaaaacagagagcaggatcctttcatagcaaccgaagctgtcacgattacaaacaggtcgtgttggaccgaatggagtatgacatgcaatttgttatctatcacaatttacaggcaattctagaatcagtggaggtaatattgtgtgggtatattagccatgcttctgttcctcctttccattagctgccttttatcattattgttattttggtggtctttttcattacacaacccctcccactagacattagagcaggaaataatgacgatgaaacaaaaaggaaatgtgtgcatgtaatcacttgttaacagctctgaagggtttggtggagtaaaagactgaaacagctggctaaaattagactggggtaacattctgtgactccagttactagtaccattcctgtctaatcatcaaggataattgagaatggtctgtactcactttagataaatttgacctgagacaccggcaatgatattaaaatatttgtgtgtgtgtgataagcaaatcgtgagtgaaaatttaaatagttctaaaatatgtgtaaacaagtaaggcagccagaaatttcaaaatgattctcggaagaacattttgcagtctgaaaaatgtttggcttagaaaaatagaggtctccgataaaggaagagcattattcaatgtcatgaatcatagttatcttctgtatgaaatcaatcaagagagctattttaaaaactgtgctgagctcaggcaaatgaattgtccatagcacaccaagaggcactggagaggggctgtttgttaccaccactccaatgtcaagtgcacagacgtttggaccaagggccttttgcttattatcctcacaacatgatagtcttatatttgggattagtaacatgctttacaaatgatttaaacaaccagctttacatgtcaatcagcaattagttttctactttatttactgggtaagagaaacccagaaaaaaatgtctataggccccagagcatgctgataaactaagaggccaataaaacgaataaaaatgcttgaattttagcccttgactcaatggttatacgcacaaatatgactttcactaaggatattatttatattatttatttgttaagatttgtctcagattcagtttataactatataatactgcattaggagtaatggcaaatgctatttttagagaaagatttagaaattgtatgccttagctgcagaattctttaataaaaatataaactgtgtttctttaattgtactaaatgcattgcctttgaaattagggtctgccctttgttttacactggtagcgtgattgctccctgtaacacttgctgaagtctagcattttcttgtgcttaaaattcatttacaggtttcctccaccatctgaaagcagagagcattctatgaaaccttaattgaaatggcataaagcaaagaagccatgacctccaagacacatcttgctaatggatgcacaaataaactgagatcaagcatggatgctcagagacaccatccaaagtcctggtgacttgatgctgagatgcctgtgtggttcctgggagggagcttggcactgcctctgcaaaggttcgcagcaaaacaaacgctgaacaaggttccccttttttttgtaaaagcaaaaatcctcctctagttttttcctgtgagcaaaaactaatgcaggtctttcgtaaaagcaaagtagtgaaaagcactttcaaaaagcaggggaaacctgtaactgttgagttttccagaagcacttagacaccttattttcaccttacaaagaagtaactaggttgagaagctttcatt

SEQ ID NO: 36442 - DNA, 1144 bp, Bovine  19866881045292
  misc_feature (1)..(1): n is a, c, g, or t
nacattttactttttttctcaaaaaattttgaaataattctcccatacatctttatatttattgaaaaaaattcacaatttcccatttattaactgcaccttttctaaaaaagaaaataagataagcattgctagcccattttggagatacgaacagtgaacttcagaaatgtttaatttctctcacaagttcccaaaacatgaatacctgtagaaaagccagaggaagaagtgatgtctcttgacagctaacacagaacattttgtacaatcacagtgtgaactggtgcgtgtgcatgcatgtgtgtgaatgtgtgcaaaaagtttagcagcgaaggctgatgctgtgcaaagtgctagaatcccttgttgttgtttgttagcaaacttcaatcaaaaattcatcagaagcagaaccattgtttcaagttagggtgtttaatcaaagagaggattatagaatcagcttagtgggtaaaactccataaaaagcagctccaaaaacccctttttcctccaaggggagaaattgacacattttcattttaatcccaaagggtaagattcccagagaacatgacaagaaaaaacaaacaggtgtctgcctgtttgaatatttgacaaagaatcatttcattaaaataaaaaagctttccaaacaaaataacacaactttaatccttacatgtgatggaaggctcaatggaagggaggcattcctgtaccactcaccgaaaagaaaatttggcccagcagctgccacctctgatacctgcctgcttccccaaatgaaccaggaaggcaaaaacagcagcttcaataatttttttttaatttgaagtctgaagtttttttcaaatccatcagaaatacttaggtgtcttttatgtggtatccatatgctttcacgatagcaaaaaataacttcagccaggcaggacctatgattctaactctgcaggaaggtcctgcttggtaggcagcacaaggagaattttctgtgtactttatcagtcctgaagcttttcattccagctgggcacagccatctgaactgtgtttcagagcaaaacagggtgttttagagtaaagccggactcagaaatcactccatcccctcttcacgaaaagactcaaagaggtt

SEQ ID NO: 36443 - DNA, 1535 bp, Bovine  19866881083241
  misc_feature (1)..(1): n is a, c, g, or t
ntaaagttaaaaaacaaactataatgaggtacctccttacactggtcagggtggccactgttaaaaatgtctacaaataacaaatgctgaagagggtgtggagaaaaggtaaaccttctgcactgttggtgggaatgtaagttggtgcaaccactatggaaaacaacatggagcttctttaaaaaactaaaaacagagttgtcacgtgatccggcaatcctactcctggtcatacccggacataaccgcagctcaaaaagatacatgcagcccatgttcactattcacaacagccacagtgtggacaaatcctagacgtccatcgacagagggataaagaagatgtggcacttatatacgatggaatactacttagtcatgaaaagagtgacaatagcatttgcagcagcgtggatagacctagagattatcatattcaatgaagtaagtcagaaagagaaagacaaacatcatatgataccactgatatgtaaaatctaaaatacggcataaacgaacttatttacaaaacagaagcagactcacagacatagagagcagacttgcagtggccaaggggaaggaggggtgagggaacgattgattgagagttttggattagcagatgcaaacagttacatataggatggataaacaagaaggtcctactgtatagcacatggaactgtattcaatatcctgtgataaatcatagtagaaaagaatatgaaaaacaatatatgtatgtataactgaatcatgaccacaacattgtaaataaactatacttcaattaacatgctttttaaattaaaaaaaagaagtttcatcctatgttagaaactggttcataaatgaaaagatgttttaataataatataataaggtataaattgggaatttcacaagaatatcaatcatttctcctgggacttctactatgtgctaatataaatttctctgtgctattgcaatatgaagtgaatgtttttagacatctcaattttaaaaatagcagttctttcttagcagttctttccttcaaaacttaattttaaacctgagtctataatttggttcttagttgttatataggtctgatatttatgtttaatcaacatttcacatttttaaatgttatgaagacccattttaaatgttagctttcttagtcaaatcaaaagagaattattgtcacttactagtacccaaaatcatcagggaaaagtaatgtcacattactgtgttgagtttttcaagaaaaaatttctacttaaagatctcagattgaagagaaacacttatcttctcttttattaagcccccactaaaattttaataaaggggttggattcacaatgacaaggagaatggcaggaggcaatgagcagatgagagatttctaccaaaatctgtaagatgaaaagtggccagaggattgctaatcactgtttaagggtggagtatgctcccagaggtcaggaaagcagccagtatgtcctgcagaaccctggtggggcagtggagatcccaag

SEQ ID NO: 36444 - DNA, 3083 bp, Bovine  19866881115924
  misc_feature (1)..(1): n is a, c, g, or t
ntgggaagaggaagaaggagaaagagaattagatgtacagggagtgcgggagaaggtggctggttctcagcctccggtggtaatgatgggagggagttaccctgcaggccaggggaactccaagagcagatcaagatggtctgggacagggacagccccacccaggagaactgggcctcctgtgtcatcaccatgaggttttttttttttgccatgatttcccctggttgtatactgagacctctgagggatttcattcctttctgtagaggataacaatgcctgttgtgtgatctgtaagaaagaagatccccaggaagccccgagctccccaccaagatgtgagccaggtaaggaaggggtattgtcagccctgagctgcaaggtgtcagatgtctgaattcagagctgaacagcatgaccctggttccctgctcatgttgcagttgttgtttagtcactcagctgtctccagctctgtgtgacctcatggactgcagcaagccgggcttccctgtccttctccatctcccggagcttgctcaaactcatgtccattgagtcagcgatgccatccaaccatctagtcctctgttatagtagatcagtcctaaagaaatagtctgtttttcctccacaatctttatgcttgtttacactaaagactcaatattgtgattttaactcctgtgcacctcttatttcctataaagaataaaaggtaggtatttacctagtgtttaatagtaatattatattgttataactttggatagagtttcaaagaaacttggtccttgatatctacttgtcagaaagagagaccaatgaccctaagcccacaaacagtttttgccacatattcttcatcagattgttggattatatagtgctttattgggcttctctgataattcagttggtaaagaacccacctgcaatgcaggagactctggttcaattcctgagtcgggaagatctgctggagaaggggcaagctgctcactctagtattcttgggcttcccttgtggttcagctggtaaagaatctgcctgcaatgtggaaactgggtttgatccctggattgggatcccctggagaagggaatggctacccattccagtattctggctgggagaattccatggactgtatagtccatgggggtcacaaagagtcagatatgactgacttacacttttagtgctttattctttttcaaagtactttggcaaatgagatttcctcacagaattttagttcttagccagggaaaccattattatccctccttagcaattagaatacagaagcacagaaaaaagaatatttgtttttcccttgagatcaaagtaggaggaagggtgaagaccagtgtcctgagtatctcagtacaggtggtggctgtgtgaggcttgtaggaagtcagtgtcatcacatgatgggagtccaaaggcagacctgcaacatctcaatcacgatagaacagaacccaaaccagagagccttccacttctcaaatagagactgtcggtagggagtggaagaaattaagagagagagtgaggcaagaaatgaatcctgctacagggtttgggggcttcccctgtggctcagtggtaaagaattcacctgccaattcaggagaagtaggttcgatctctgagttggaaagatctcttggagaaggaaatggcagcccatttcagtactcttgcctggaaaaccacatggacagaggagactgtgggctatagcccacgggatcacaaaacttggacatgacttagtgactaaacaacaataggatttgaaagacctagaggaatagagctggagagaataagcaaaaaaatgagagttcaagatcatcactgcggaaaaaatgtaaagataggagatgttggcgggggggagagcacacaaaatgaaagatacatcttcataattatacacaattattctcctagtgcagaagcagaaatgtttagaggcaggtctatagataggaaactgagaagcagagggcaggagaatgaggtgaatgaagtggaaacagaggcagaacaggcttcattggatctcaggtgtggtccttggagcagatgtcctttttcccaaagggcagctcacctgtgctctgaacctcctaactcagctcatttccttctttcttttttttttttttaagtggagtataattgctttacaatgttgggttagtctctgttgtacaataaattgaattagctatatgtatacatatgtcccctctctgacatcccttccatgtctgcctcccgccatcccaccagcctaggtcatcacagagctgagctgtctgagctatacagcaccttcccactatctgttttacacatggtagtatattcgggtcgttcctaatctcccaattagtccaacctcccccttccctatccctgtgtccacatgtccattctgtacatctgtatctctattcctgcatggaaataaattcctctataccattcctcatttcttttcagagtcctgtgatcctgaagcttcccaaatgactgataaagaagaacaagaggagctgcccagtcaaccactggatggagaaggtattcatgacttcaactcctatgtaactaattgaatctttttctgtctacggggaggaagatctactctactcctcttcacatgcgcacacagaagaaatacaaggtgccacgtgaaaagaatcaaaaagacggaggaaattagttgtattagaagggagtgagatggggttttgttgtgagattatgttcagcctctggtgatagtgtcaggagccttgttaacctccaggtcagctgagttcaaaggcaggagggtctacgggttgggacattcccaccttggagattctttagccaccatagtcttccccggttgtttctggtagggctttcctactatggtttccattggtcatacactgggtttctaagagatttcattctatttatcagaaggcagtggcacctgtttagaaatatgtgatgaagaagagactcaggaatccttgagctcaccaccaaaaagtgg

SEQ ID NO: 36445 - DNA, 1408 bp, Bovine  19866881430046
  misc_feature (1)..(1): n is a, c, g, or t
nctattggcataaactcatttatgaatgagtccttgacagatggggtaaatgggagtgaagtcctaatcttccatgttttcttacagttctcagaggacccctgtgtgtctttgtcccagctctggccatgagcaagccctggaatctctctctctctctttttttttttttggctctgtagaatctcaagacactatctgggtctcagagaaagcagaactgcaggaggaaaccccttttgggaagcagaggtggagaaggacccattcagatgtgttaagctgtgagcccctcccttggctgcctattgcggtctgtctcaggttaactcagcacggggcaaaacaagagaatgaaagcacatttcacaagaatagcgatcgaggagtcttttattcccaaaccatgaataagcacagtatcaaccaaggggacttcatggaccttctgtaggtgacacctcagagtaagtctctgagtttcaaaggggattatgaggaagcaaagagtagtcaaatggagacttgacatggggcaacatacaggttagcatgatccatggggacagttctagtgtccaagtgccaacagccatgatgctcttaagattcagcgttatagccataaagcagcggtagggacaattaaatcaggcaccctgatggcagagagaaaatcggcggggagtatcatggatttgtctcaattagaaaaggcaaatgacaggcctttgacatctgagctattactggtcattactgcagcacttcataaaaaggaaaactgtactcaaaagagatttacttcatgatagaatcaaagagctagaagaaacatcaaaagaaaaatggagccctgtcccctgcagtcaagaacgatttgaaattaagtcagtgagaaaggcagcaggagacatgaggtcttagatcagaaaaaacctaagttcagtctcaagtttggcctcgacaaggcaggtaggctgagctggtttctcaacctctccaagtcccctctcccacattcctcatctgtgaaatgaataagaccagcactttgcagatttactctgcaggatacaggaaataacaggtaaagccaattttattacgaagttctccatgtgatccggtgagggcaccaggtgccttcctcaggacaccacagaggggggatgaaccaaggatacctgcacatcagtaaaccagtctcctcagcattatgttaaagagcgagatgggagaaaagaagagtggtcattgttataaagagccatcaagtggggatggaaaaggagccatgaaaagggaggtgacctgaccctgcagcatctctggtgacagaaggaagctccaggcagaaagcagcatgtgaaagacagcagagagcatgagctcagctgaaggggca

SEQ ID NO: 36446 - DNA, 3110 bp, Bovine  19866880380034
  misc_feature (1)..(1): n is a, c, g, or t
nctaatttatctctctccccttgagacctttcccccttgggtaaccacaaggtttgttttctgtgtctgagtctacttctgttttgtaaataagttcatttgtatttttttttataaatttatttattggaggttaattactttacaatatggtattggttttgccaaaaaaaaaaaaaaaagtaagttcatttgtgttttctcttaatatttcacctatgagtgctgtcatatggtttttggctttctctgtctgacatgtcacttagtaggatcatctccaggcctatccatgttgctgcaaatggcattattcaaattaaatgactcttggtaaggagcccaacatagggtctagcaacaaatgaatactaaatgaactttactattttactattgttgctgttgttatcatggaaagtctttaaaaattaaattatatttagtaataaaacaaataattaaaataaacatctatgtgctgtgctgtgtgttgtattcagtcatgtccaactctttgcaaccctatggaccacagccctccaggttcctctgttcatgggtgtctccaggcaagaatacttggatataagaacatgtcagtggtgattacatgtgggcaattctcctagcctttggaagaaactgaactgaaatgactcaggacccttccctgcctgtggaacttcgattcttctgctcataatctgcttcaagttgtttttttttcccttgtactcccattctaaggtcttggaatgaaggttgtgttggcttttggaaataatttggaaagtttcctttttcctctctgcttgggaacaatttaaacagtattgaagtttctgttccttgaaggttgaaagaattcacccaggaaaccatctgtgcctggcactgttttcagggagaaagaagtctttaaaactttctcaatatcttgtatgttggcccatacagagtcttccgcatatctcaggtttaattttagtaagttgtattttcctagaaaattatccatttcatctagctattcaagtttatttcaagagagttttgtaaaatattcctatggcattctcataatctcttctgtattgatggtaatttctaagtctgtgtatgtatacttctctctttacttgattaggcaagcttggggttacctactttgtttcacttggttttccaaacaagctctagggtttacttactaattctgctatttccctattttttaagaaaccaatttctgtgttttaatttgattatttccttacttgtgcttttctcaaaattatttggtcttctttttgctaactttttgatagagatgcttgtgcatttgttttcattcattcttgtttcctaatggcagcttctagctgttttacatggcttttaatgcatagtatcatgactattacaactattgttattttttattattatggttacatgtactaaaatactcacttttattacctttgcagtgaaaattatttgaaggaatttaaaatttttttgaaataatagttttaattatttttgtttccaaactaatttcaagttgtttttgccttgcagttaaagagaagagtttgaactattcccaattatggtgtttattgggattacgtttctattagattaattacatttctattaaatcaaccttattaattatgttactcggatcctctatagctttcctacttttgtttccctgtattttattagtcctggtctaattgctgaactctcctcccaccatggggtttctgtcagtttcttctctatttcctagagattacactttaggttgttgaagctcaataactcagtgcatgaagattcatgagactatattctgaaaacacctatcatttatacattttatacatttgtttcccttgaatttcatgcagagttggaaccaggtctagaaggacctgagatttttgctattttgtgaactcttcttaggaaatgtttaaaagtacttaatttttttttattgttctttaaacctaagtaatgttttgtttgtttttaattgaagtatagttgaaatacaatgttaatttctgctgtacagcaaaatggattcagttatatacatatatacattctttcttatatatattctttgatgtactcaattttgagtaaaagtttaattacagattcttagaagagtcctatgaagtgaggggccctgaaatttcagcttaatgtcatgcgggtattctgaatctctttttttgttttctaatttatttcccccattcttccttctttacctcttcatttattagcttggtgtgaaagtaattacagcttcagacctggtaattatttaccaatgagaaataagtttgtttattcctgcagcataaaaatccatgcttcaggattcagtgaactcttggaaagcattttctgtgttctcctggttgtggaagcattttcccttcaaaatgttgtcaagatgcttgaagaagtgatagtctgttggtgagaggtcaggtgaatatggccgatgaagcaagactttgtcgcccaattcattcaacttttcaagtgttgcttgtgccaagtgcagttgggcattgtcacaggaaagaattgagccctttctgttgaccaaagccagctgtgggcactgctgctttcggtgcatctcatccatttgctgagcatgcttctcagaatgcagtggcttcactgggactcagaaagcttcagtggatcagactggcagcagaccaccaaacagtgaccatgactctttttttgattcaactttggctctgggaagtgttttcaagcttccccttggtccaaccactgagctggtcactgctggttgtagtataaaacccacttttcatcccatgtcacaattcaaaccacaatcaagaaacagcttgtggttatttcatagaataagagaaaatgatgctttaaaatggtgatttttttgatttgtggttggctcacaaggtacccacttatcgagctttttcacctttttaatttgcttcaaatgccaagtgactgttgaatggttgatgctgattttttgggcaacttctcatgtagttgta

SEQ ID NO: 36447 - DNA, 1008 bp, Bovine  19866880410520
  misc_feature (1)..(1): n is a, c, g, or t
ncttttctcccctctcagctccattatttccaagtagaatatggttttggttaaaataaagacaacacacaccacctccaatagttcattcaagctgtattagcagtgtggcccatctcttctggctgtgcctattagggttcatactgaggaggtttgaaaagaaaatttcctcaatgagagataattttctaccttataactccccctacatggtgactcttgtgagcatccagccataatttttttttcaattttttttcctaaaattagaattggaaatatgagttttccaatctatttattgatttttttagtcccaaatgatgctgcctccgtgtgaaagcacggagttagagcatggaagcactaagtgaataattagtcctggtaaaacaaacacaggtcactatgaaaaactctgtgattttaaaactgtagaaagaagaaatgcataccaatcttctatcccacctctttccctgcatctgtctcctgctgctgttaacttgttcttaatcaaactgatagggactccagaccagaatgagagctaccagaatactgctgtaacccaggtccttggcaaacatcacaaacacacgtgtgcacgtgccctgaaacactcaaagagaagggtaccccctctgctaaatccatagaatagacggagagagcaggaaggcaaagacctgaagtagaggccctgcttgggaggagagggaagcacacggagcatgaggctgccttctcccagctgagcatggcctgggagcagacagctgtccaggccacttcctttgcttcctgaacccaccatactcttccatcacttcactcccatctgcagcggggactgcaacctgccatgaacacacaacactcttggagactctctggaaagtcatagacatgatctgaagacacatggtacatgccatcaaaagtctgcctgctacttcagttgtcccgtaatcaaggcacaagaaagcaccttcggcccaagaa

SEQ ID NO: 36448 - DNA, 2269 bp, Bovine  19866880434845
  misc_feature (1)..(1): n is a, c, g, or t
ngtatacactcactcatacacacatacatggcattacagcagagacacatatattttgaccttctccatttctcacaaatcacaaataacagcagagtggagatgctatacacttaacttctcctttggaccctgttctcttcaaggcacagcaaatccactagaaaattaaagtcctgtatgttctgccttaaggcccaccacaaatctctgggtaagtgtcagtctagtaggggatgagggttatgctcaatgtttggttctccgatatcttctctgccacactgctgctgctgctaagtcacttcagtcttgtccgactctgtgcgaccccatagatggcagcccaccaggctcccccctgccacactgacatacactgtatatggtgctggtaaagaaaccatattttcatacaaatactcattttattaattaaggtcaatgtaatgggcatattttttactgagacaaccgctataactgtgtcaataaagcttctctctatttccaaccagatgtatattaatccttgtttcttgtctcctggggtgtaaaacaaactatttttcaatacagatgaggtgatatgccaaaagatagaacaggggttatcaaactatgacccataggtcacaatcctgcccggtctctgtttctataaataaagttttattgcaacatagccacattcattcatttacatatcatccatgacctctttggagctacaatgggagagttgagcagttgtgacagacagtatggtccagagaactgaattagaaatgacacagaatatgtactatttctccttttagaaaaaaatatgccaacccctgagattgaatcctaggtctctaaaaactacaattagagtttctatttctcttgcctattctccaccccagagtaaggcatcaattggctgcctttgcaatcagtaactcctatcttcctaaaagtacattaagagatagaaaatgcttccatcaaccactgttacttcttctctaaccaaataaggaaaagtaaaggattttaaaagttcttattttggcaaaagaagttgatttgatcttcaattgggaaaaaaaataattgataacttaattccagtccttgcacccacatttgtgatgattttgcccgctttatacagtaagtccctgacattcaaatacgttcccttctaaaagcaagtttttaacaccaacttgttcataagtcaaacaaagttggcctaggtacccaactgattagctatgtagcattgtactataataggtttataatacttttcacacaaatacacaaaaaataaacacaaaaaataaaacatttttaacctcacagtacagtaccttgaaaaatacagtaggacagtaccacagctggcatacaggggctggcaccaggtgagcagcaagaagggtcactgactggagagggagaagaggtgggagatggtagagctgaaggatcaccgcaggctgcaatttcactcattcctgacatagacggaatgcacattggcatctttgaaagttcacaagttgaagattcgtatgtaggggacttactataccatgcactggaatgtgtatatcatgaaagtgaaagtgaaagtgaagtcgctcagttgtgtcctcgtctgcggccccatggactgtagtctaccaggcttctccgtccatggaatttcccaggcaagagtactggaatgggttgctatttccctctccaggagatcttccagacccagggattgaacctgggtatcccgcattgtaggcagattgtttaccgtctgagccaccagggaagtcatgtcatagatacacatatacacaagtgtcacatgtgatactattgtctcctctaccccctcctaaaacaaatcaatcatatacaagctctcctcaggtatgtcttggttatctttcagcttcaacgataatcttcataatttgtaccacttgagatgtaccttgaaccccacacctaatgtgtaagttgaaagaacttagccatctcctctctgagctatttaaattctgttgaaagacattaggtgagaaaggttcatgctaaaataatgcagacaaatggtggctaatacaagtgaaatgataaatgaacatttgaattctgtctccagtggagatgcggagtgctgatgagctccatgtgtggtgctgaggtctcctatttgtcataattatagaatagattttaggtcatttacctagaaagagtgtctagagtt

SEQ ID NO: 36449 - DNA, 2127 bp, Bovine  19866880592270
  misc_feature (1)..(1): n is a, c, g, or t
ntggtaaagaatctgcctgtcaatgcaggagatgcaggagacaagggttctgtccctgggccaggaagatcccctggaggagggcatggcaacccccttgagtatacttgcctggaaaattccaaggacagaggagactggtgagccacagtccagggagtcgcaaagagtcagacgtgacttagcacactttcaaatagatacaaaaatagaaatgttaaaaattagataaaaataaataccaagaagaagtgtgctattttcacactgcatgctataagagaagttcacagcctccttgaggaggctcttcccccataacctgctactagaaagatgttagaagcactgagtctccaactacattgtaagcttcttggggtgatgagacttcatcttatcttgatttttctctgcatctccatgaaaaataatacagatgcttgtgtctcattggcactcagttttgctaagaagagatttcacgtatagactcgctttgcactgatggacaagaggatgaattgtgaagaaaagatccttaagcatttagttgggctgagttttcaggcagaagacatacgtagatgcctgaggctgggtgagtgaatggtttcattttcaaagcacggctgtgtctgctgcctttctatgggtacaatttgctttctccagaaaactttaaaccacacttctttcttaatgggctttaacttcaaaatccggggaattatatttcagaaaatagcatctgtcagtctagtagataaagaaagtcattaaatctgccatagtctttttactctcttggtctctcaaaaagcagggaagggattatatagtaaagatgcttcacattgacaataattcataagctctttcttcaccaggaaataattttttggcttctagattatttttagtcatataaataatttctcattttattaagatagacatttattttagtcatctgtgacaaactatgagatgtctgcttcatcagcccataaaaacaggcttctttgttcattcctagaggcgacaaagctagatcaatgtctttaaaagaataaagcttaaaaaaattaaaatcacacccgaacttaataggccttgttcttacactgggggatttgttcacacaccaattcataaatttaagcaccaactgtgtgtcaggttctgagctacttcccaattaaccattaacctttgaacataagggtatgaacaatctcgctctaaaggaaaaattcatccaaatgagaaaaaggaagatgcgtgcaacgcacggaagttctgccattgcctttcctctctgtgtgccagatgtgcctccttttatctttttcttctttgttggagtcaaattgcttcacaatgctgtgttagtttctgctgtacaacatgaatcagctatgtgtgcacgtgtatctcctcccactggcacccctccatccccgccatcccacctctctaggtcatcacgagcgccaagctgagctgcctgtgctatgcagcaactcccaactagttacctattttagacatgtcatgcacagcattaaactgtttctgcctctttgctatccctagaactatagcccgccaggttcctctgtccatgggattctctaggcaagaatactagagtaggttgtcatttcctccttcagattttatacatggtagtatgtatatgccaatgctactctctcagttcctcccatcctctccttttccaactgtgtccactctctacatccgtatctctattcctgccctgcaaataggttcatctgtaccattttcctggatgtttaacagcagaagaagcttctcaggcacaggctcttctcagctcatgtcttcttgccaggaatacagtggaagactagagaatcagatggttagaacagtaaaccagaaaaggtcataaagtggccatgaatctatttttcacgctctgtacaatgcagtcttcacctgtagagtgaagcttctggaagggtttcctctccaggatcagttggcaaaagacagccctttaggcaatagcttccagtctccacttgttttccgcatatttcagcaattgtttcttatctccataagggtcatttt

SEQ ID NO: 36450 - DNA, 2062 bp, Bovine  19866880611648
  misc_feature (1)..(1): n is a, c, g, or t
nccacacctgctctgatttctagaagttctttatgaactaggagactggacatttgttgtgatgtgagttgcgaacatactttccaatgacatttatctgttgacattgtttagtatattttctttccgcagtcaatgtaatcaattatttctgtgctgatttctgctatatgacggtttaaaaagactcctacattctgaaaagaatttgtctatgtttacatctgataacattatgctttcatttttgtgtttaaattgttgaactttctattgcagaataagatacatatgtgaatgtatataaactatcattataaagctgactgaattttaaaaatggaacatacctatgtgatcagcactcagatgaagaatcagcatgttaacaggatggctgaagcccccaagacctctctcagtcacaagcacccacctctcaaggttaaacaccatcttgactttagagaaaacaatcttgagatgcctcacagaattccccttgcttcacactctgagtgcccagaaaattattcagccctggataatagtttattgagcagaaccacttacaataatcagaataattacccatattgccaatagaaatggctttgtacacacagaggagagggtatggcaggcatttatcgatgaatcaaacattgatataaaacatctggggacactgtagaagataaaaattacataaacttaaagattaaaataaaatcctgaagaggctgcctttcccatccccacaaaataatttttattcttattgaatgtgccattcctttaatgaatgacaagatttttactactttcattgttgtttaaaatgaaccaaaattattaataatgtatctttccttcctttaatgtccatctaacttgcacggcaaactccagaatttagggaggcttactgataataccttgaagaaaagcatggtttatatgctcaaagaaaggcaagaaaaccaattttgatgaggctggaagttagtcattttttactgtgtaaagtcagaggaatcaaacatttagggattcacagataaataaaaggaattggaagggagtataagataaggtcagagaagtgggctggtgagcaactcctgagaaagtggcatgtttttatcataaaaggggcaaaataaaatgtgggagacaaaaagaatatggttaaattgtgtttcacaattattgacatattgaacagatgacttctctgagtggatcaaaaatgttaaagcttatagcctgtagatggagataataaggaattttgtagctcaaaactagaggaacagcagttttgagcaaatttcaacaacttaagaaaaatctaccttcttcattgcattgacagttctattccaaggttacctgtaaccttccaattactaaatttgattcttttcaattctcatcttacttgacctctctctagttcttgatgctattgatcactgtctctttcttggaatttgtccatccattcagttcagttcagtcgctcagttgtgtccgactctttgagaccccatgagctgcagcacaccaggcctccctgtccatcaccatctcccggagttcactcaaactcacgtccatcgagttggttggtgatgccatccagccatctcatcctctgtcatccccttctcctcctgccttcaatctttcccagtccatcctttggcttttgtgaaattactttctccttttgttatcacttctgctcaatccctgttagcaagaatttgtgtccaaagattactcagaagtgacccagggaaaagaagtaacaggggagggtcgagtaaggagggaaagataataaaaggaaatgtgacttcgtttgctgctatgggatcctagagggcttccctggtggctctttgggaaagaatccacctgccaatgcaggagaggcaagttcaatccctggtctgggaagatcccctggagaaggaaatggctacccactccagtattcttgcctgggaaacaccatggacagaggtgtgtgggagggctacagtccatgggg

SEQ ID NO: 36451 - DNA, 1649 bp, Bovine  19866880710890
  misc_feature (1)..(1): n is a, c, g, or t
ncatcagggtcttttccaatgagtcagttcttcacatcaggtggccaaagcattggagcttccgcttcagcatcagtccttccaatgaatattcaagactgatttcctgtaggattgactggtttgatctccttgaagtccaagggactctcaagagtcttctccaataccacagttcaaaagcatcaattcttcggtgctcaacttatattaaaaaataaataaaatcaagaactctaggactagggggagggaagggaggctgaaggctcaattatatatgtataattatggctgattcacattgttgtatggcagaagccaacacaccattgaaaagcaattttcctccaattaaaaaatcaattattacaaaaagaaccctaggatcagtttgcctgagtccaagccactgacaactccaagttcaccaacaacattacctaagtaagttatgccacttttccaaactacagttaccgtctaatccagagaggttatgttaatatttataacatagagttctgcagtaacacagttcctggcatacgctatgtgctcagtgaatgaccatcagtaatattccctgatgataaaataagcaaaccatggagagaaattaaaatcagattggaaggtatggaaggtgtctcaaagaaggtggcataaggcaaatactgaaaactatgtggaaacggataactggaagaggctgtatgggaaagtgtatgaaagagttcactcagggtggaggaacatgtacccaagtactgctgggagatgggggaagatcagagaaagctttatgtactagaagattctgactgtacattaagatgatttggaagggcaactgaccagtatgtagatcaatgttttttcaaagtggtagctctgaacctggactgatgtagcctatcctgattgacatattcttgaataaaatagaataaaaggaaaggaatagactatattgtttctgcatataaattaaaagtatgtgtgtgtaccagttggtggttcattgaaatgcaaaatgtatctattaatatagaccaatcatagtgactggaaaaaagaatggactggagagagacagtgcttaccatatcagaatctgaataagtggttagattttgggctttttaattacataagaggaaatgttttgctttgatttcttttgcagtccagcaccagctttaaagtggtgaaatttgcaattctctgaatcaatcaatatgcctaagaaatgaaactttatccgtacatgaacgtgcttttcccctttggtgtgtgtgaaagcactgtgctccagacctaaaatattaagacaatatgacctaggaaggctgaaccttggatcctagacttgttccatcctgccagctgtacaagttgggcaccctctctggacttcagggagaatacgaaacagtgtgatctaacaggtcccttccaactctcaacaggtgcttctcctaggccagtttgttcatgaacgcaaatatgctgtgtgagaattcagattagaacttggggtatttgtgttgctaacccctggcatcatcaagttaggcagccattcctgtccagcatgcagacaaatataaatgttttgataaagtgcccaacatgggttctcagtg

SEQ ID NO: 36452 - DNA, 999 bp, Bovine  19866880756684
  misc_feature (1)..(1): n is a, c, g, or t
ncactgtgtttgccggtgatgagcccgcctctggaagcatagcccatcagaggagcaggcagattttctgcagtttcaaacaggctttcccctccctggcatcaccaccaagacgatgtgtcataagtgtcagcaaagatgttggtactccgccaggaaaagcagaagatagtttgtattaaaacctattatcgtcactgtggctcacaggctgctgcacaatgcccatggaaaagtcaggtatactttgtcagaagaaagtgttttctaaataagtattctctccattaaaaatcattctaaaaaccaggaaaattaaataggctttgttaagtgaaaacgtgaaatgttattaagagtaagatgatattagagcaggcacttttacctttagccttgccctgaaataaattaatgtgccaagtgagccatggaaacaaggagctttggaaaattcactttttgaaaaactccagattaatcaagagaatttcagaacaatgctcctctaacaaatgagatgggatttgttgttgttgatgttactattgttttatttccattccaccatgggctgatattttagtaaaatgttatataaatgaattatttaaaaaataaaataaaaagcaaagctcaaacatgcaaaccctatttagttatagtactagattaaacagatattaaattattttgccaaccaaaatttccagctcttcactctcaatctctgcatctatctctttgtgtattggtgacaaataatacacatggttggaaaaatatgatggctaggatttaagaatagatgacctcagtccaatcagctgaatatcattgtttcaaggaaacatagtttgacgcccactattaaagtacaacactaaatgtatcatgcgtacataaacaattccaaaaataattccccttaaaatactcttagttttataatggtctttggtattgtattggttttatggctttgtttttaagttgttt

SEQ ID NO: 36453 - DNA, 1463 bp, Bovine  19866880881720
  misc_feature (1)..(1): n is a, c, g, or t
ntttggaatgtacatctgtatttgcagagctcagacagagccagcacgctatacttccacaggtggggagcatccccaagggcccaggagagagctctcctcttcaagagaagaagtgagatgcttagggttcagggaagacctttcctagacctattttaattctttaaatcagaggatggcgggtgaataaggttttccacagataagctaaatgtgatggaattagtctctctaagtgtcaggggaaagaaagaggctttgcctagaaaacaaccttctaccactatctctcttgacagggaaaaatgaaagactgaaataactaacatgcataaatatacataaaaataaaatgtctcccaggtttgaatactgccttactgtaatctcctatattctgcctcctaaaaaaataaaattgctttaagaaaacatcacttcctaaatataagagaggtgaaaagatctagtgtaggaaatccctccatcccctcaaaattattaagccattaaaaaaaaacaaaagaaaaaaagacaaaacaacaataaaaaaaaggaccagagagaaaatctgggagtgttagacttattttagtaactgtatctgggctgtcttagctcttcctctgccattagtctatagaataaccaatgactcaagaactttcttattcaggattttctctttaaaatgcttttggcatagtgcttcaattcaggaaatgatctcatttggcaagttttggagcatttaaaattctgtacatctttctcatattttataaaacttagcaaattttggtgtgcatacctgaaagcaagaggttacccactggagttgtagatgatttatttttcagtaagacaaatatgatgtggttcagggaagtttctgacctattactgtagaataaagtttatgtcagcatttctcatttatatgtgtatgtatataaagataaaagtgtaaataatggatatgtatctgaagcctgctgctgctgctgcttaagtcacgtcactcgtgtccgactctgtgcgacgccatagacagcagcccaacaggctcctctgtccctgggattctccaggcaagaatactggaatgggttgccatttccttttccaatgcaggaaagtgaaaagtgaaagtgaagtcactccgtcatgtccgactcttcgcgaccccatgaactgtagcctaccaggctcctccgtccatgggattctccaggcaagagtactggagtggggtgccattgccttctccgatctgaagcctgtacttctaaagatattcaggatatgattgaggggaaacccaagtcccagtaggtatcttttctagtgatgcttgggtgtaggttaagaggatataacttctgctcttttggttactgaggttaagaggatataatttctgctactcctgtaagtagcaaagattcttcatggtatag

SEQ ID NO: 36454 - DNA, 1727 bp, Bovine  19866881068969
  misc_feature (1)..(1): n is a, c, g, or t
ntgaaagtgaagtcgctcagtagtgtctgactcttagcaaccccatggactgcagcctaccaggctcctctatccatgggattttctaggcaaaagtactggagtggggtgccatatatagtaagaagtaattaacacatggtagttatcgatgctgagtgatgaaaacatgctcctttagataaatctaggtctgaggaagagtgttcaaaggaacatagcctactgcatgcttgctgggaagtgggttgctgtcagtttaagaggctcacaagttctaaaagccctcagtgacaatggtagagctctggtctggagtaccctcatgatttcagtaaaggtagtcaaagaaaatagtcaggctttaacatctcatggagctggattcaacctctaaatattacttagctttatgtgacttctgtaagatgctaaaaaactcccagatctttaatttcctcatttgaaaaatgagttctgggaccctgggtgtttattcagggtttctacacttcccacctttcctaatactaatatcctagcttctacagtagttcctatgcttgacaacttgattggctttcaactggcagtctgaactccttgaaaaaaaaaagtgccacaaagatctactgaatatctctcctctctctctctctctctctctctctcagccaaatgacatagctgtgtggcccttctgacacgtctttttggtgtggttcataagcgagaagattggtgctaatgctgatataactgaagccccatggaaatattaattaccgaactccattagatctccacccaacctgagctactttctagtaagtgagtctccagagccattttctgttaatttatgacttaatcaaatgatccttcttctttaacccttatcatctccaatcccattccaaacctactgcttatggctcctatgacagaggcttacaacacaacttccctaacaagtatgaaagtcacgagagacatgggatagatctaaggtcctgcagcagcccatgatatgcctgctaacatttccttacatcactatttgagtacactgacccagacctgagggagaactaggctggtgatggatattcctcaaaaacttccatccccctctagtatgtctcctacagcataaaattatctggcttcagagttctggttttgttattttctgcttgtgtacaaggactcaaaaaaaaaaaaatagattcagaatcagatttagtcatatttggaaaagttagataagtacgatgatattacacaattatttacctttatcacagggctttgattctgataaatgtaaagttttatgaatattaaagacacaactgaagttctaatgggttagattatgcagcaaattctataagtgcagtgttaagaggaagcaataaatctaggcttaattgtcattatctctttagaagaactttcaagttgaacctctttgcccaggctcttgattccatgctcttaactgtccacgttttgcttttctcaataattatattaaattagataaattagagtctaacgaaaacaaattttgcctaatatctcagtccatttgtgtctctaaaaacctctaagctatttctccaggcagtagggtagctaattatttaccctcccagcagccttcaaggcacttccgatcctatgtgggaacacagaaggatcccattcaattaggagaaaaa

SEQ ID NO: 36455 - DNA, 987 bp, Bovine  19866881142080
  misc_feature (1)..(1): n is a, c, g, or t
ntcctgttgtgtctaatatctcctgtttaatgtgtccaagatgataggctttttgtttgtttgtttgagcaatttgactatgcatattgtctccttgacttaatacaatactgtttggggaggctgattcctaaatacatgataggaatacaattaccctgatgagatctggtttaaatgatcagaaaactttctaaatgtgtttacatactggtttgtataaaatagtcattaacgcaagatttaaggattgcgcagaaaggttgtatggcttcttaaataggttttcttatttttctttttacatgtgtaatagcagaatgttctctattaactgtgcattatgtctagactactaatgctctgtcagggaaggtaaagaaagggaaagcgagagaaatctgatatttaggagaattacttcaaggcagaaaaagattggacattttttgtttgtttgtttttgaaaaaatcagatttttgctaaatatcaatactaaacataatctcattattttagcaaaatttatttagcatgaagctctccattttaggggctcccaggtggcgctaggggtaaagaacctgcttgccaaagcaggagatgttagagatgcaggttcaatccctgggttggaaagatcccctggaggagggcatgacaacccactccagtattcttgcctggagaattccatgggcagaggagccaggcaggctacagtccatggggttgcaaagagttggacgcaaccgaagcaacttagcacagacacgtgcactgcatatgaaatgagtcttagcatagatgtttcatgtgtatcatagattacttgaggaataataatcagtgaggactaagggaacatagatggttcatcagcacatagaatcattttttcatgtaagtattcattcattcaagagagcatttactggggacttccctggtggtcccatggctgaaactcagtgttcccaatgtaa

SEQ ID NO: 36456 - DNA, 940 bp, Bovine  19866881183732
  misc_feature (1)..(1): n is a, c, g, or t
ngatgccaatattacattcataagagcaatgcttccctgtgtcagaagtcactgtgatactttctggcctgtctggtgcacttcttatgaaggttatatttattctgcctgttgaggtgaaagatgtaataataaaactgtcatgggtaggaaactgtcctaagactgcgttataaaatgctgcggaatgaagtgggctcttgtcctttcttcaatcatgaccagcaccggaggttaccaagctgaagtcttagcaaagcacttgtaggcatctccaggctagctgcacctgctcagctaaatattctttgcaaaggaaagagagatcaaatttgaaactagagacaggcatatacattgggagctgtaattaataataatatgagtaatgacagcaatgttcatgatgatgataaggcccgcaattattcccaccattaacacagcagtttatccatgcccggcactgtgctgatgggttagagtatctgacttaattcgtacctttagggctggatattattaaaattatttcaataatgaggaaaccaagaaaataaataatagtagtggattgaaagccatacataaaattaatatcaggagtccagtggatataaataagtatttgaataaatacatacatatataggggagagagaaagttcttccttaaagaagaattccaaatgtagaaggaataatggaataaaaaattataagtagaactccatgttaatgattgctaggggcatgatttaatgatggatgataaaattagtgggcaaaagtttgaggagaaacatgatatttgctagtctcaaagtatatcctcaattatttattaactgcaaatgggaaaatagaaaatttacagtgggagaaactcaataagcaccacttttaccaagtgatagtagaaatataaccagtaatgaag

SEQ ID NO: 36457 - DNA, 803 bp, Bovine  19866881238384
  misc_feature (1)..(1): n is a, c, g, or t
nctgagatgttactatgctttttctcatgtgcttggttaaatggcaaagaataatgactcattctaagacctctattgatatagtatacataaaagaaagttagcatattaaaaatataccatttaatcaattttaagatatatatacaaaaaaaaccacaaaattgagatcatcattatagttacaatggagaacatatctatcactcttgaaagtttcattgtacttctttgtatactccatttgaccatagtaaataattttaatatacatctgtcagtaacaacaaataaatgtaaaaaaaaccttgtgctatatctgagtaacatgaataatgcaattgatatataaatcagtctatcttgaaactgtagaatacatatatttcaaacacacataaaacagttataaaaattaagaatatgctgagccacaaagcaagtttcaaaaaatttcaaaaagctgaaattcctttgagatattcctttataaaattagaatgaaggctttatgtcttctctaccacaaaagcatagacttaaatattcaggtctaggccatcagagataatcacacgctccagaaaatatgcagcaatcagttctcagtactattctaaatttgctttttctcctaatctgtaacctctgaaggttgtcttattttacatagatcatgcattctacccaggactctttaggtgtcctgtatcaagatgcttttcttcagtcatctcagtcactgtgttactagaattgaaaatccagttttgttactttaaaagtcatagctgtcaaaacta

SEQ ID NO: 36458 - DNA, 747 bp, Bovine  19866881259839
  misc_feature (1)..(1): n is a, c, g, or t
nattttatttcttgccctggcgagtgggcatattaggtattcattttcaatgtgctgtatagcacagacatatatgatagtagtaataataaatagaaagcaatgggaaatgcatttttaatatattctactgcaaaatacagctgcaggtagaaaggggaagaaaagatcccccaaattaatataagggaaaaaaggagttaagatctttaataaggcatttcaggtcaacaaaagcacagacgaatgaagacagtagaaccacttaagcaactgacatcttggagagagtgtttcatatttctgagcagagttatgatgtttagatataaagatagcttagcgacagcaagaaacatacgagtgttgaaagaaaattggagataatctgagcacaggcaatagctgaaaacatgtgagcagtgagttcactgagggacaggaggaaaaaaaaaagcaaagggccttgaaacgccacagagttagtgagcctggtagaaaggagtgagcaaaggaaaagtatgtttatttgttggcaaaggctccagagacaagtcagctttttattgagttcgaacataagggagaagtacccaagaatgtaagcctttcatcacatttgtttcatctgtcactgtatttactttcccttgagaatttaaatggagatagatctgagtgaatttgaaatttgctattttataatgttaagtccaaaacttctaaatagttttaaaaatcatcagg

SEQ ID NO: 36459 - DNA, 720 bp, Bovine  19866881324354
  misc_feature (1)..(1): n is a, c, g, or t
nattctcatactagaatctttctcaccacttggactcctgaccttgacttcagttggcgcacccttattttaaacttaaaaatattaattaatgcttttcctactcccatgttgattaaagcagaaaaaaaaatagatttttttcctttatatgcaccactgtcctcctttgttttacatttgacctgcgaagcctgccaggataaaccccatctttctcttcttccttcatcttcaatggcatttcccaagggcgtttttaaagtgcagatgaaaaagtaacactgccctctgtgaaagaagaggaaagaaatgccaagtgattaagaactgttttacctttttttccatgatctgtgtctgaaacaatagcaccagttatgtttcggttataaatagaactaagcaaactcagcaacacctataactttccagccctaaatttctgtccctgcaaagcagaagtacagtacagaccttacagacaaaacaggaggctaacacacctgagggagtgtggtgtgggatgggcaagaagaactttgcaggcggataaaaattggcttggtttccacatcaagcatttgagaattatgtcaccttgggacttgtttgttttgagcttctctcagtccgtttcttcattcattccagaaatggctactgtattagatatattggaagggtatcagtctgtaagtttacagactgagagtagag

SEQ ID NO: 36460 - DNA, 1075 bp, Bovine  19866881423058
  misc_feature (1)..(1): n is a, c, g, or t
nacaaactgatggcacaatgggatggattgtggaagctaacagttcaacctaccacagttaggaaatggcacaaaagccaggtggacagggaagtcagtgtttccatatacaagtaagtacagacagctttgattttcctcaaaaacaactatcactcattatttctaacatttcctagtgaaaaataaatacttaaaatagacaatttgaattacaaaataaattatcaatttctacttataaaacactttttaattatgaatgtagacaaaactgaataagttggcaagagttgcttgttggtgattcctaaacactagtaagcataattccaagtaaatttttatttcattctgaactgatcgtattccacccaaaccttgattctttcaagatactgcaaagctgacatggcctatgagagaaaaaacaaaaaaaaaagcctctatgtttaactccagtaatttaatagtcttcctttccttacttgcagatttgtctgttaattggaaatagtattcccagctgcactgagaatgttttctgaacaaagggaggaggacatcttaaagattgcagtggaagttaaggcaaaccataatttacatttcagaatataaatgccccagggaagccttctttccctgctgcctagaactttgattggcatttcaataggatgccaccaaatgggaggttggtcccaggaaacccatcctcagggtttccaatgactgtaattccaggcatctgatctgagaaaaataatgcctaggagatcaggacatttaaaaatttaaggcatccatgaaagccaatgagaaccagaaaacgaacccaaggaggagagcaaggacatgggtcctgagggtttgcagatgcttcactctggagatcagatgtatttctaattcaagttatttcagcttgtgtggtcatcaataaaacggcacagagaagatatatgtcccacctctacctcaaaactcattctctccagaaataatgattttccatagtctcttttagattttaagcattataaaaactgcaccttgtggtatatatacaatt

SEQ ID NO: 36461 - DNA, 1308 bp, Bovine  19866881665177
  misc_feature (1)..(1): n is a, c, g, or t
naaggggaatcctagtctctagagggcagggcaacccagagccagggggagtggggccattccagccaggcagagcacagagcatcaagtcacacagaactattcttaggtcttggaatctagtggaattttgccctgctgaattgcaggcttgctttagacctgggatgcctttttcccttggagtttctcccttttagagtgggattatctatcctatgtatgcatgcctaccactgtatcctggaagcagacatcttgttttctgaatgccacatgaagcaggcagaaatgcatctatcagtcaaggaacaccaagaattaggagacactgtcagatgacaggagacaggcatggagcagcatctttctgaaatccctcagaaaaaaagcaactctactgaccctttgacttttttaaatctagcttccagaatgttgagacaacccacttctgttgtttcaaagcacatagtttgcaaaactttttaacggcagccctaagaaatgcccacattcagtctacttatacgagttagcaagaatataaactacagttctatttcaatagattttagaacttatccttagatacagttgaaagtcagaatgctcatatttttttctccatagacaatttcttgtaaagaaaaatgaaaatgtgacaaaagatacactgttgtcttcttcaaaagagtaatcatcaaggatatattttttgctcctaattcacaataaaattagaatgactataagcattaattcaaatgtcacagaactaatatacgtattatatatatatatatatatatatatatttcaaaagaaaaaggtcaagtaagattaatggatatacaatagaaataaaacagtttatagaccaaaattttataaaatagaaaaaatttataaaatagcataaagattgtccttgttttgtactgaatgtgttttcattattataatatttctctgattcaaattcacaggatggtaacacttaggaggggttcagctacataggtaatgatcaaaatgctgtgaagaaagatttttagaacatgctttcatactgtttcactagtaaatataaaaatcattttccaattgttatgataatattgtgtgtgttcttccccttagcttctttcccctgctgtctctcttaacacttaggaataattttcacaaggttacccattctaagtgtgccaataaatgtaattatatttatttcagaaggcagagttaaatttatagaagtaaaaacaacaccattttttatttataaccacagtaaattttaat

SEQ ID NO: 36462 - DNA, 1147 bp, Bovine  19866881877132
  misc_feature (1)..(1): n is a, c, g, or t
ncatgtgttgggcatgttaatacacactaacacatgttaacactttctgtcaaaacagggaagatgcctgctgtaggattggaaataaggatcagtgacatttagatccctgagtagaagtggtgataagatgctggggaggctggaggtaagagaatattatcaagagttcagagttgcaaaggaacaagaacaggatctctagtgaatggaagccaaggagggaatcacagtaacacagccattgttttggaagaagaagtccctccctccttaaggaactataaaagtacagttgggatatccttactggggctccatggctgagtacatccaaaggattggatacactaggataatctgggaaacggacagaccccctgcttcttccaacccactgtgtgcctgcgatggactcattggtaacccatgacatcatgggaaatacatggttcaacagagcacgactaattctcaagctgccaattatctgataggagaaatctgaaagagcagaatggctgatttcagagaacattttgttccagaaccccaaagccattaatgatttgccctgctttttgctgttcctttatgtaaatgtaaatcccttaagagaagaagaatgtctattccttaatgtgtacctaaatataattttatggaagtagctcttatgggattcggagcaattcaaatactctctaattcactcactggctttgggctataaggtacttaacttctctgttcatttgttttctcacctgtaaatttaaaccaaaggtgggaggtttaaggaggtgtcccatatgataagccacatgtaccacttgctgaacagaaagataaagctcttcctcccatcccaccttccatttcctctaagtttctcaaaatgtcctcatcataaagactagaataaaggtccttgtagcctctttgtttatacatttctgatcaaagaaaaatgctccaaaaactgaaatgcctcatgaatgccatggtgcctcatcagagaatgtagtggctgcatttgagccaacagatagttactgggcatcttctctgggtcagctggtacactagagactgcggagatgaaagcagccatgaaatagaatatctgttttaaaaaattcacaat

SEQ ID NO: 36463 - DNA, 1207 bp, Bovine  19866880560693
  misc_feature (1)..(1): n is a, c, g, or t
ncatctgtggcatttttcatttcacattttttttctccctctcctctggaattcctttcaatttatctaggtagtttgaggacctatgagcacaaaatggtatgctttattccaggtgcaagcctatcattcatatggaaaatactatcacatcacatctctctattctattcaatataacataagtgatacaatctctctcagtactgagtccaatagaatcctgcatgattttgtgactgagctatattgaagatttctatcaaatttgacatggtaatttatggcctcaaatatctctgcttcttcaaaagaactaatttacatatttgaagctggatgacatgttttttcctataccatgcatgttgtatcatttgcggtggcggggcggcggttactgataatagtacacaaccttctccatattctgatttgggttggctgttggtgggagcctgtttcatattctttatagcttgtagactgctctcaaggtggaaacatgcccattatatgccagatggttctggattgaaatgatggagctctaaggctagggtttcagttggttaagagtaaagaaatgtattatgaattttgttttggaaggccctgtgaggcaaatccattagggcttaatagctggttgattggttaatgtatttaaactttttaatattggtaaagggtttcattttcaaatggtttctctctttttaattttttgctccttctgccactttgctacctaaaaatctttcctttgaaaaactccaatatgatcctagataaactaggaggaaaaggactgattcatgagtagagaataggctctctcagtggagagcctattagcacaaggtgtccttcacttgcacttacatatatttaaagaatagtagtgcctgtatcagagaaggcaatggcaccccactccagtactcttgcctggaaaatcccatgaatggaggagcctggtaggctgcagtccatgaggtcgctaagagttggacacgactgagtgacttcactttcactttttactttcatgcattggagaaggaaatggcaacccactccagtgttcttgcctggagaatcccagggacgggggagcctggtgggctgccatctatggggtcgcacagagtcagacacgactgaagcgacttagcagcagcagcagcagcagtgcctatatgtg

SEQ ID NO: 36464 - DNA, 4941 bp, Bovine  19866880596669
  misc_feature (1)..(1): n is a, c, g, or t
ntaagattgctgttgttattgagacactccagtcatgtttgaccctttatgaacccatggtctgtgtcatgccaggcttccctgtccttcaccgtctcccagagctcactcaaaactcatgtccatcaagtaggtgattccatgcaaccatctcttcctcggtcatccccttctcctcctgccttcaatcttgctcagtgtcaggaccttttctaatgcatgatgggctcttcacatcaggtggtcagagtattggagcttcagtttcagtatcagtccttccaatgaatattcagaatttatttcctttaggattgactgatttgatcttcttgcagtccaagggactctccagagttttctccagcaccacagtttgaaagcatcagttcttcaccactcagccttctttatagtccaactctcacaaccatacatgactactggaaaaactatagcttttactatatggacctttattggcaaagtaatgtctctgctttttaatatgctacctagatttgtcatagcttttcttccaaggagcaaggatcttataattttaaggctgcagtcaccatccacagtgattttggaactcaagaaaataaagtctgtcactgtttccatttgccatgaagtgatgggaccagatgccatgtcttctctgtgtgactgttaagttttaagccagctttttcactctcatttttcacattcatcaagaggctctttaattcctatttgttatcttccataagggtggtttcatctgcatatctgaggttattggtattccttccagcaatcttgattccagcttgtgcttcatccagcccggcatttcacatgatgtgctctgcataagttatataagcagggtgacaatatacagccttggcatactcctttctcagttttgaaccagtccattgttctatatctggttctaactgttgcttcttgacctgcctacatgtgtctcaggaggcaagttaggtggtctggtattcccatctttgtcaaataaatttaccaatatcctcaatagttacaaaattaaaagcaagtcaataacttactagctaaatgttttcaaccccgattaaaatgtttctgttaggaagcagatcttttcatttttatttcatgatttattattattccaaatattctaaaacatagtccattaggtggactatagttgcatagcaaggttacttttgctagaatatttaagtctcttttacatttatttttgttttctatattcataatgtcatttatggtaaagcatccaatgcaatactcagatttcacaaattagtgaaactatttttgtttttttaacaacattagtaatttcaggaaggttttaaaactgcctttattcatctaaattataatactttattttttaacctaatcagataaagaaaaaagaaagaaaagtatcctttagtccacttagtgtgcttaaaggattatatatttctcctctctacttattaaaaaagaaaataaaactattaacatagctaccaagttaataaccacattaaatgcaagcaaaaataatgtatttatataatgattcaccaggagtagaaaaacattgaaaaaatttttttttcattttattttttttatttcattttttaactttacaacattgtattggttttgccatatatcaacatgaatctgccacaggtatacacatgttccccatcctgaaccctcctccctcctccctccctgtagcatccctctgggtcatcccagtgcaccagccccaagtatccagtatcgtgcatcgaacctggattggccactcgtttcatatatgatattatacatgtttaagtgccattctcccaaatcattccaccctctccctctctcacagagtccaaaagactattctatacatgaaaatttatctacaatgttttaaagttttacctcttgatcccaatatttatcacactatattgaaccttaaatatgctttttcagaaataaacttatatgtgaaaaagttttcaggtgtcaaattttcccctgaactttcattctttgatttcctaggaaacaatggtatggttcaatctatagtaggtagtatagttctaagcatgcttttctaagcaagttgactgcctatgttaaaatctctgctacttcacaaactgcatgtacacattaactgtgtattcctgagctgctttctcttcttatatttaaaattgaataattgtataatctaagtcacaacatactgctaaaagccaatgaaatattttctattaagtgaatatcacagcgcctaagacaaagatcataataatttctaccttaaactcatgcatcatatacaaaaaactgataagcatgaagctacttagatcagcacccataatatctctttaaacactttactgtatatccttacatactttccttatacaaatatagattgacaaaaactgtcatgcaacacctttttatattgcaatgtattatgaataccttactatgcaaagattatttttagtgagtgggcattctgaatatttttaagtttatttttggacattttgaggttgtttcaatgaaaattaaaatacttctaattataatttttaaaaatttataatgataaacactattatctacctgttgacattagatgaatatatatttttaaaaactatggagcttacagaaaaaatattgtttttttaatttatattactaactaaaaggacttttgttatgttttcagagttttgtactacaaatcctgaactaaatgttgatgagagtagttaattcttgatcctttccaagtcctgatatttgagtaattacattaaagacaggcatcagcaatactaaataactcttattatactgaatgggagatgaatgattaaaagtctacatgaagcattaatttactacctaattgtcacataatactaattgactattctatttatttttcccctttgggtagagttattttgaatgaaataaaaattgcagtggaacagtttgcaaagatcatagatagaagcactataattcatcaaggggcctagttggacagccttgtcaaaataggttagtaaatttctcatgaccgtagccagtgttgcaacatttttaaagatagcaatccattatcacttctcttctgccacctgaaaaatatcatcccacagaatctgatttcctcctgggatgacatgacactgctcgtaagacaatgaaacctccttttcccaaaatatcaaacgacaatctgtaatccagagtcatgatattatgttcctcaagtctgttgtgtattactaaggaaataagaaacttaagtaactttgatttactatgtttggatttaattttgttttgattatatctgtaataaaaacaaaatctgatgcaattatgtcctaaaatgtataacaagtcctgtggaggaatatatgatatttatagcttttacatatatatggttttatagttctatataggaaaggtatagcgttagttttgctgctatgtctaaagccaatgaacttaaggcaactgaaagctaagataattatggggaagatacatttttgtaacagggaactggtgagtttcaattttgtaatagctgccaatgcaagatgaaagagatgtgggttaaatccctgtgtcagaaaaatcctctggagtagaaaatggcaacccactccaggatccttgcctggaacgtccatggacagaggagcctgttggccaaaacccatgtggcttcaaagagttggatacacaaatacacatgcatacatatgcacatatatactatatatatataatgtacacattttagaaaacacaattttttttggcttagctaaaaaatatatgacattctggttccacctgtttgactaattatgaatagaattctagatttctaatttatattcactcaaaactttgatacagttttatttatttggcctctagcattgctgctaaaagtctagaaagcatattattttagtgatttttttaaaattgagaatccaattctgagaatataaagaaatagtatgttgtaaacaaaaatgggaaattaacatatgatagagtattattaagtacagatttgttcaagtttcacaaatttttatgctagtgtccattatttattttcataacttattcaagattccacatggtatttagttgcaatgagcagcttcagctacaggcagcaaattctgataaattatttttccatttttattctattcatatttgttacaaatattttttagttttccttgttatggtttcttaaatacagggcttcccttgtagaatacacccccatttagaagtggacatttaatttccaaatacatgggttttttaaagtattcttgatattaatttcttttttaatattaatttctcatttaaatgctttcttctctgcaatcaccttctgtgtttattcagttgtttaactttatttaggttttctatggttaagtcaaagatctctcttggtaaatgtcacattgcagttgaaaatatgtgggttattttcaaatatatttttttatgttgatttgtaacataattccatagtgataagaaaacagactgtatgatttcagtacctttagaccatgaagtttctgcaccttgttttatgtccctgaatatgttccagtgtcccctggtttattgtctatgggtactcgaatagaatttgtattgtgctgttgtgtgaaaattatataaaccttaattatgttgaattggtttatactgcttttcaggtctacttatccttttacttttctgtccattctattaatttttgagagtttgatattgaaactccaactaaaaatcttaatttatcta

SEQ ID NO: 36465 - DNA, 1115 bp, Bovine  19866880757352
  misc_feature (1)..(1): n is a, c, g, or t
natttctagtgtatgaacagagtgtagaaacacaagcctcccatggactgtggaaactagaaaacttttcttttgagattatttaaactccaaatctaaggggagaaacaccataaaactgcatgttacaatccaaaatctccccttccaagagaaaaagcctatgctatggttctaattgataacatatttgtactttttcccgcaaacaaatcttcatatttctaaacctactggttgtagattattctactcctgatggtttgagaacaccacaatttcttcccaaccaaatgattactcacccaaataatttgcttgtaaaaattaagtttttacacataatttcttaaaatgttctatacaaggtttgttttctttttttctgctttctttgctgatgaactgcttattaatctagaatattcatcctagtttcttcatgatttaactttcttgtccatgcaatagataaacagctaaatgtaaatctcaacaaaaataatgtactttctcctttttaagctaatgagtggtaaattctggcagataaaagatgaaaatggagagaaaaacttgaagttggacttattgaacgtttagcaaattgttgacctgatagagattagaaattgaggtagggatatagaaattaaaagaaagagaatttactgctgagaatagggaaaagggtgggaagtggctataaaatagtgagaactgctttccataaaccatgtaaaaaccccacctcattaccgtatagacatggggtacacacacaataaaatctttgtaatctgacatttgagaggaaattaggtgccagttaatgtcaagttatgtttaataaagacttagctcatgttgtctcaggtggtatccttcttggatttcccttatcctctcctttaagacttagacataaaagggcagtggtttctatgtataaatcatcattatttaaaaaacaaaaaccttggcatcgcagaactcgagcatcccactcttcaccagaatgaccacatggcacagaggtcctaccacttgctgtgttccatttgcaatcagcatcctcatctttgaattcttagaaaataggtacctttatctct

SEQ ID NO: 36466 - DNA, 1438 bp, Bovine  19866880806894
  misc_feature (1)..(1): n is a, c, g, or t
nttttttcacatgcagttgagctagtcttactgcagagagacctattattgctgagctttctacaacatcaaaagcaagaaaattcataggcattatttgcctctaacctgttttattccactaggtaagattttgccaaagtctggagattgcatatattgcccagaaatggcaatagaggtgagagtcaaaagtctcaggaagctctttcaaaaagccaatagattcagttgtaattttcagcatattttaaaaactcgaagttaatcccttatttaactaataatcatatccttttactagaaggagagtctaaacgatttgtttggatttctaatactttcatttatttcttcatttctaaacttgcttactgatattaatttgggggagtggagtggcaatatgaaatgattttgctctaaaacttgtaagacatcctttcagataactgaagacaccaaagaaggctacaaggctatacaaatagaaataaaaatccactatgaatcttctgcttagggagaaacatttaagcactgaagcagagtgaaccagtagaggggcatataaagaaagaaatggcaggagagacgagttagtggttagtattcttttcctaaaattttgaaaatctacagattgaacttttattttgcaaagtagttgatcttattgagtttttaaaataaagtatcacatgttaaataattttaaaatttagagattttggaaaatttcaaatttgaattttgttaagtggaactgaattttaaatatatatttaaagccatgtgttattactgatacagaaagaatgttaattttttatatcagagattaaatacttaaatcacacttactaatttaaattcatatttacgtcaatttgtatagaactcttaactcgtaaactactccatttccatgtttaaaagaaagacttccatctggtaactcttatctattgttaattttctccataaacttccagaaagtgtattttccgacacctacataaaactattcagttaatcacaatatgattctaatagacaattctccaaagtttagcttcattttttttacataagagtttgctctataaatatttaatgcaaaattagtcaaagttgttaaaatttgttatataattttacttaaatccaagaatggcttttctcttatataattttctagtatgtgttgataaaataagatatatacaagaagcaaaacacaactttggcatcagagttcttaattctgaactttgacttaagacacaattaatcttaactcttacctatctatcctgaaatgactcaaagttacatcctcggagagtacatttcttcttgagaaaccttgggataaaaaagaatttatgatattacagcaagaagttacatatgcaagaaatcaaggtaagatcaa

SEQ ID NO: 36467 - DNA, 3132 bp, Bovine  19866880950080
  misc_feature (1)..(1): n is a, c, g, or t
ngcttcccaggtggctcagctggtaaagaatctacctgcaatgcaggagacctgggtttgatctctgggtggggaagatctcccagagaagggaaaggctactcactccagtattctggcttggagaattccatgacctggatagtccatggagtcacaaagagttagacacaactgagagactttcactttcactcatttgcatattataggagcattctaatttgttaccctacttccactcccgcttctgtccagcccatcttctgctcattcagtaacaagaatggtttcttgttgttgttgtttagttgctaagttgtgtccacatcttctgagaccccatgaactataacacatcaggctcctctgtccataggatttcccaggcaagcatactagagtggctggccatttccttctccagggaatcttcctgacccaggcatcaaacccacatctcttgcgtctcctgcattgcaggcagattctttactgttgagtcactgaggaacttctaaaattgtaaattaaaccatatcactcttttatttaaaaatcctccaaagatttcccattgcacttagaataaaatgcaaattcatctcaatttaacagtactgggctagaggactacaaataccaaatcccaatactatttctaactgcagagaagatgtcaaactggttccaattgccaaaaagataaattttgctatttagcagctgtgagcccaagaatgaattccctatcctgcatttagttttcttatgtatgataagaaaattactttgattaatactagtaacatcctatgaagagcaaaagttgtgtatgtctgctgttaattgacttttagtacttttagctgtgtgcctgtctattccttcacaaactaaaaattaatgataaaagatcagagtttcatctgtagatgattttgattcatccagcttttcactggagtaagcagatggcggttagctctggaaacatgctgtagtattgttatatagcttgatcctgaaagtgatactggatcttgagtttaaatattcttaatgatgctcattccaggcatatgaggtgccaaacaagtcagtacattttattatgttctgaaatgcaaactgcaccctcttggaaaaagtttatctctcttcattactcagaaaaagaagttaatacaaactggctaaattatcaaagaaacagaagttggtaaactgttcctccatgtcttctatgaagaaattagaagatatttcagaatcactgattaattgttacaagattttgaaaaattagcaagtaaaatggtgttatctactttatccatccaacatatatttatttggtgtttgtatgctttgtatataaaatattcataacatacaactttgtgcaatttattgtcaatattattatacatttcaatctgtgtaaaacacattgtgtccccaaaatccatattatacaattcttcaggctctatgaatcgcatgttttctcaataactctcattggttctttcctgacttttagtcttgtcatccaataaaacacggccttatctccaaaatccttcccatccctaaagttcctatttgccatctttggagatgtaatcggcaaagctggctgtacctaacaaacctttatatcaagtcctgtcactgctccaaagaagccattacagtgaataattttatgagtggcttggctccaaagaagctaaaagacacattatagtttattgtgtcaaaaagactggcaaaaaagaggccccccaatttgactttcaaatgtagagtgaaatcactcccccaggattggtagtgctcaagttaagagtcttccaaaactctaagatatgagtcattttattctagtttgtcagtgactcatcttatccaaaagtgcctgaatcagagccaggacgaatccctcattgattgatacaaccactctccctccagtctttgaaaatgcaaaacttcttttttaacgttcagtcatttgtcacgaattgtgtaatttgtggcagcccaaagatgctccctgataatattccatggagttggctttatttactatgtctgaattgctctaattttctagtacaataaaagcagcctgttaaccccaaagggccatatattttcttgtgaacgccctcagtgaaacaccttagtttatcatgttaacaaaattgttactttagaaatcttgaggggattatacaaaagaatatgataatgagagaaacacaaacgattttcagtggcaaaggcaactgttagaagatcatctttttcatccctccccttttatacaggagctaggtgggagttctgtgatggtccagtggctaagatttcaggggacccaggtttgatccctggtcagggaaccagatcccacctgctgcaactaaaacttccatgtgccatgactaaaatctggtgcagccaaataaaaataaataaatattcttcttaaaaagaagctaggtgattgagaaaaactgaccccacttcaagcccaagtgaactctgagggatctaagccatttaggtcattttttgattcaagtatgatagtataactaaaacctaagctaaagagaacatgggattctactcatatagtttacagtttaggagtgagcatggaaccaaattactcttgcaaaagtaaggctcgggatatttatttcatggctaggagaagaaaattcctgccttcccccagacttatgcaaaatctgggggtcatatataccatagctggcagccttgatgcaatcatgggataaaccagcctaaggacaatctgaatttgcaaaggcatgcaatgagagaccacagggacaggacaggcacctcagtgacatgatgtattaataactgggttaaactcaccctaaagctcacatttgcacagaattttctagctatataagtgaagaaatctcttactgcttgattcaagttttagagcactaaatttttgataagcagaagtcactgagatatctagacaaaggctttaaaaaaggaacaaaaagtaaacaaaatatggagagaatgaatgagagctaaagaagcttttctgatgtcctaatgtta

SEQ ID NO: 36468 - DNA, 1961 bp, Bovine  19866880960047
  misc_feature (1)..(1): n is a, c, g, or t
ntttttgctttctacctagagaaatgggttgcttgctattttatgaaatgcatgagaacaggaactgacattttgaatattaccaaaaaacaaaatcttggaactagtgcccccaaacagtgccatagctaccaaaactcaaaaggacttgtattaaaacaatagttaaaagacagttatatctgtgggtttatccagaggctcctttagcgctaaatgtaagggccagaatattgcggctacaccctgcaggagaagccagccaacttttcatccctcatcactggctttcttattgcaagtctcaggtcctaaagctacaatgactgaaatcgccagagtttgtcgattaaatcttatgtaacaaaattctgatatatctctgttttgcaaataacactcttttacttgcatcttcactctcccatagatactcataagcacctatgcttttctagcattgtcctggccattttaagacatccaaatagattatgagctaggtggcaagtaggaggaacacacacatatggttttgggaaaacacatgaaaaatcattaatcacttaaaaataaagaagtatgtactctttagtttaaagaaacaggaagagaaccaaacagggataggagaactaacatcttcaaacataggttaaaaaaaaaaaaagcaaaaagaccaggcaggttagtcaatggaaattcagtcactgatgtcctgacttccatctcccaaaccacaaactgtaccttcaattttattcttgataatacatataaaatatattgacacaaagaacatgaaaatatctttgagtaaatcaagaaatatacccaaaaggacaaattaaaatcatactggaatattgtttcttcaagattattgagagtttttcttttgttttggcacaatgaaaagcagaacaaacttggggtgaacaaaagacaggcacttcaccattatgcatagtgatcatgcactggccttaggttgaatctaatattgttcgtgcatctgtcgtaatggtatctggaagttggtattcatcatcaaataaacttaccaagaaaaccaagaagctctgggtgtcaccatccaatattgctgaggtcagaggaatgatgagaaccaggaaattttaaagtttataaaacaaaagggaaaacagctgtaaaagatgagatccaaacagacaaatttgtctaaggaggaaaacagatgttgcttaaatttatttcctgtttcattcctgtcaatgatgtagctttctgaactcagacattaagcccagatggttaaggcaaaaggagacctgtggccaaaaacctcgtatcaaccaatttgtaaaaagctattaatttttatgattttattgcaatctttatttgcatgactttcaatttctgaattaaaaaaataattttaaacttttactaagaaaaaaaattcctttctggccagattcatgcaaggaattattttaatagattatcaaaatgaaattcaaggaggtagaactgtctttggcaacattcacagggaaagaaagtgtatgattaagattctagatgcaagcacatgacacaatctacgttataggggaataaaactagagtgaaatacactaatcagacaaaaaaatggttgaaacaaaataatgattgacattcaactcaaaaaatttgaaataaaaaaacaaacaaacaaaataaggacgtatttagatcaaagaagacaaaaatggattggaggaggaaatggcaacccactccagtgttcttgcctggagaatcatcccagggacgggggagcctggtgggctgccatctatggggttgcacagagtcggacatgactgaagcaacttagcagcagcagcagcagacaaaaattatagaaaattagcgaaaaaaaaatctttgaaaatagtaagtcagatgtatgataaaaccaaacaagt

SEQ ID NO: 36469 - DNA, 1705 bp, Bovine  19866881002369
  misc_feature (1)..(1): n is a, c, g, or t
ncaagtactgaggaaaaggataaggaagaaaagggaaggccagtgatatacatgcatttccctttccatgtatctacttgttgtgcactagaaagcctttctaccggagaatttgttgattctttctgtcctaatgacttgagggttttctcaccaactgttacttttccaagagctataagtgtagcaatctgaacctttcctctttgcctgctaccagccagattcttagctaattctccaaccccctgggttatgccctgggtcgtcaccacagaactcctttcctctagatgtcatcctccaatgccatgcagagctctttagaaatggaaacctttggagaaatggcttcataataacttacctgtaacaagattttgctatgtgcttctctgaaattgttacagtaaggaagccgggttcagtattctttttttcttttctttttttccccccacaatctctctgtaaggcacaaggtgagatgctcagaacatattgaaccaatttaaatggaaaagtctatcctagacctgagtgttttatctcctcccctgacctgtattctttttcacagaggaaggaagagaagcaggagaggagatcagcctcatatcagatattcttaaaccagagctttcagaacctagttgggggacacattaccctgcacaattaaatcaagggtcacatcctgtgttgctaccagggcagctggggctctgccttctgtctgcagtgctttccctctgattggtgtgtgaagaaaggagtctatacccttaagagcagcaaaggcagataccaagtaagataatattagattttaatagggtgaagtctaacaacaaaatggtttctttggcagggaggggtgagtgtgaaggtgaaggaaatgatccgccagtctctgtcacgctgggttgaaatggatttcagggattccccgtattgctgtgcactgctgctgctgctgctaagtcgcttcagtcgtgtccgacactgtgcgtcctaggaagcttttattcagcttctcatgtggggatttagtctttctttcatttaacactgccagggagagaatattaatttatgaaagagcagtattcttcatatcatctctcaagggcgtttttcttccttttcaagagaccttgttcttttgcatcaatttgctttactatgtacttgttggtagacagccctaggagagtctttgcttacagtaccataaatgtatcataaataactatccctcattttcttccagtatcattgatcagaatgtccacttctaatcacattgtcatggtggtgtgtgtctcttctccaggttgggtttcagactgagtttgctttatattccatctctgaaaatgtccattgacttgaatgccagttggattaaaagggaaaaaaaactcattttatgatttgtacagctgtttctgagcccagattcttattaaaggtaccccggtggcatttccttaccacaagattgacagattggggaaagctaaacattttcttttctaaagaactagtggaaaacagacctattttcaggattggcttgtccttggtaaaaagtttgaaaccactgagttgcatcatggccataaagcaaaaaagctgttccaaagtcttaatttctagtcagtgtttaagcagcgcaacagaaaaaaaaaaaaaagaattt

SEQ ID NO: 36470 - DNA, 1251 bp, Bovine  19866881040435
  misc_feature (1)..(1): n is a, c, g, or t
ntctcaggacatctgctgtttgtcagctgtcgcaaatatacactgtcaatataaagccgaagcattactcttgtatttgcaatctgaggttttctactttttttaaaatttttgcttctttataacttaaaatcctcaagaatttagttatttggcgcagcttttgttctgtagtagtagagatggaatccttcagttcaaagcatcaagatggagaaagccatgtctttgatgagcaaaagaagcataagataatctagttttaatagacagctattttatctgcttttttgttttttttttaatctgatatttatttccctaaaagaagttaagcagctagcaattaggttggattgcataaccatttattattaatacagaaagcaacttaaagaccaagaattatttgttaaatcaatcttgaatttattagctgtcacacttttagcaaaaccattcagggatggttctttataagttttgtctttggaattgcttaacactcagaaataaaagaatacattttcaataggagatattttagttagaaacaactgagttcacacatactagaaactttatatgcagattttcatagatagtttatacataagccccaaaacttaaaatatcgtgtagagacattaaaacatctgaagtaaaaaccaaagtttaacttgtaaatcaatacaggatttgatatagggctatacatacaaaaaaaggaaatctttaacttttgattcatgacaagaaaaagaaaaaatagcaaggaaagaaacaagtctaagtgttgatatgtaaatataattgcaaatgtgttccttcattgtttaaatcaccctatatgaataagtgcttttgtttttcatgttcctgtgggatgtatcaggtcaaatgtcagttctggcctcaaaatgtcctcttaaaatcctgctctccttcttccaaaagcaggtgtatgaaataaaccagcaggcagtcaaagctgaaattacatttgtgtgttctaaatcatgacattcagtcttgaagagaaagaagaaagcacagatgtctttttgccaaaggacccatctctgtggaaaaaagagaggacaggaaatcacagagacacaccacattcctgtttgttccagctgagcgcttccacagacctttctttgtatccgacagaatagagaccagactctcaccaagtgttccggccaagattagtgctgcaaatgctcagcgattctctgtgct

SEQ ID NO: 36471 - DNA, 2325 bp, Bovine  19866881050038
  misc_feature (1)..(1): n is a, c, g, or t
nccatttccccaacaatttactaaacttatactatatttttagatgagtgaattcattttttctatagttatttcaaatacttatttgaatatttatctgaaaatactctttctaaatggtgatgtatttgttatactcatcttttatatttatgctagaagattccaggaagaagtgaaatggataatagcttgcaaacctttagtttatttttaaaattcaaattgctgtttgtctatgatcttagtaatataattctgaaatttactggcaagatataattatggaagatagaagttaattagagtgtaaagatgatgaatgcttgtgataatgatgtggctgtcagtccttaaatagtatcattttggtagtatcactacctttcttgcagattactcagtttggcatgttatattctctaataaaaaggacattataataggagtcaaaagactgcttattcttctgttagcttgttgttaaaccttatctgtctgcttgcacatattctcatgtttactgtcctaatgcttaacaagaaagtttggtctctagggtgtccctagaatttggcacctccaaagaatatcaggttgttggacttacggtgaaataaaaagagccaagcaattcttgtaaaatgaattgctgaaagcaatgtgtcaagctgtggatttctttagccctatgttgtagagaaaagtaagttaataaaacattcttctgacactattgattgatgatattggatcttctcagagagtacttggggagctgggaaatgacaacaatcagtgaaacataaacactaaataatcccacggctaactcctcctgtgtacaatagttttcaggcttttaaggtcatgctcttctaccagagaacttaaaaaatagtgacagaaaacccagatactagctttgatcaatttcaagctgctgtttcctctccttaaaattgagagagctttttgtacatagcaaaggttcagtatctgtgaaagtatacatcaattacctgaatcaataagttctggaatccttcataatagtgagtggtgaaagtatttccagttccagtttaacaagtgcaccggacagcctagcagatcaccactaatttccaagggcaatagtctatcttctttcttttcaaaatttttttttcaaaaatcttttaatctcaaaagcctggattatgccagtgattcacaaatctgttcaaatttgctaggaaaatgatgctgttcttctaggtagggcaaatattatcaagaaatagatataaaggaagaaaagatttattaaaccactatagttattaaaacatttcttgggagcatagaaggactaaccctgggacaggctttgttgtttagacaatgtgtaacagtgattggattctgcaggaaatttaccataatctgagaattagccatctgccttttcagcctcatcttagatatttccttcattctgtatgcttaccttctgcatgaacttcttattgcaacttagtttgaattctttaaacttgctcggtctttcacaattttagttctccttgcattttatgcaacctgtcagtaagggtgttttctcatgccttaccttacttcacacatattcattctgcaagtcttaacttgtgtcatttccttcaaaaggcaattactggtccttccattgtttcaattcaatctaaattagttcctctgtattttataatgctatatatatatatatatatatatatatatatatatgtatataaatcttgccaaagtataatttatattaatttttgtgacctgtatacctctgagctatcttgtaaaattcaccaagacaggaatcatgtctattttgttcatttcatatcctcactatttagcataattctcacatggaagatgttcagtgcatattagggaaggaaggaaggtaagaaggatgggatttgctgtaggtcatcatacaagaaatttaaaaataagtcatatatttggttttgagtacagaaaataaagaaaactttagctttaatgtagccacagatgtttatatgggaaaaaaaaaaaaaaaaacatttgtgaaacacatggatcatttacataatgaaatacatattataatttcaaatcaaacttagtaattccaagtaaagggataaaacttagtcctgtgtttaaaagttgttcataaccatcagtttatgcatgtatattattttttacttttaaaaatgattctgtcaaaatattccaccaaaaatcaggatattcatgtgcacaaatctaataaaagatattttgtctttt

SEQ ID NO: 36472 - DNA, 1033 bp, Bovine  19866881080031
  misc_feature (1)..(1): n is a, c, g, or t
ntgtgagtgcaagtccgtcctttacatctgcatctccattccttccctttgaatcccaactgctcttgtgatttgctctgaccaacagtggaaacgtgccaattctaagccttggccccaaggggcgtacatgattcaagttctttctttgaaacttgctgccgccatacaaacaagcctgggctggcctgctggataaagacagcacagagttgagtcaccctgttgctgtagtcaaactgccagctgactgcagatacatggagaagtccagttaagactgatcttggccggttcagcagaccagctgacacagacttatgagaaaaaagaaaaaaaaatagttgtttcatgccacaaatatttagggtggtttgttagtcagcaatagataatgaattcaattagcctagctaatttgagaaaagagggcagaaactagggcttttattggcagacgaaactaagatacactaatgtctccgattttacaggactgtcgcaaatgctgcagaaatgcaagccagtcctcatttctatagtgctgaggttgacaaaggggtagctgtttgaatacaaagaaattgaggggataaagactgttttgtgccatagttcagcaagaaatggaaaaataaaattgctatgtagtctctatattatttttctcattgatgctacagataaaattatttccagaaatattttcactacaggacccaatgtaccatgtgaaaatcttctgaaatagaagtaaacctaataaaacaaaatttcttcaaagattcatcttaaaaaatatgtacccacaatgccttgttaaatgcaaatttactaagggtaatatgggaaggaagctgatctttctcttcatttaaatggaaatatttgggtccatatcatacttttgacttacatatcattgatcttcaacaaatgataacaataatgctggcactgaacatttccagttgtatatattttttgtagttgcctagacagtacagaattagagctgaaaagttgtcctgag

SEQ ID NO: 36473 - DNA, 882 bp, Bovine  19866881239765
  misc_feature (1)..(1): n is a, c, g, or t
nctgacaattttgtcgtagttctttgtggcaattatttgtacttccggtaacctagtgtgtacttcatgttcacacatgtcctaattatctaattattctgttctgcagtgagtgattttgaatagcttttaccatctacttacccataaaggtataataagatgattaataagaacatgtataaaacatttggaatgcagaaaggagcaatttttaaaactaatgaaatattacagggagcattcttatttctatgttttcagaaatatatttgttttggcataataatacatgaacccacacatttaagatgtcatattttaataagacatgtcctctataaaagtgaaatatctgtaattctttcattgatttattttgaagtgaaatgttattttttactacaaaataattccatttatttaaaaaagttataagtaaaaattaaaggtgaaaataatgccccctgtattcatctctgtgcaaagtgaccattgttaaaccatcagtagctgcccttccagttgatttatcagtttatatagacacatagctatttgtcacagcagttattaaataaatgcataatgatacatatataattttaatttttttgcaatgtagtgtttttatactgtatgtgtttctcttctactgctttttttcttaatgatgtattagtactttgtatactctgcagaattctgcccccttatttacttagttgcttaatgtgttttatagctaacataaccaattttctattgttaaatgttcacatagattgactttctttgttctgtttacagtccatgatgaaaatcctgccaattaagtccactgcataactttaggaaaatttctctgaaacataactacca

SEQ ID NO: 36474 - DNA, 1966 bp, Bovine  19866880370980
  misc_feature (1)..(1): n is a, c, g, or t
nattagggctggggtccaagtgatgctctgtttgtgggttttctcccttttagttttttttttcctgaaaaaatgtttggattcattttggttttcagttttagttcacggttctcattttccttctcaatctctcctcaagccctacctacctcattcttactaattcttacttctctttctttttcattcttggccaccccctgttaaaaaggcatcttttcctgtaatgagccctgcaagtagcaccacaacaaaaacacacacccttactgtggatttcatattcgcttttgctgagtctgaagagctgggtagcgactctttctccagtggagtgaggcatggtgacaagcgtgtaaccagaggacctggattctcccatatattaggtgtgattaggggccagtcagcctctctatttcttcatttattaaaaaaaaagataatttttcttgtctgcctcacagaatttttacagataaatactcatgaaatctctttgtaaagcataaactgctatgcaaatattattttattattgttatccttttgcacatctggtccccctgctataaggtgccaattacatcacaggaggatgtgattgttctttgttgcacctgaccaaagaatggcagcttctcagcaatgcccatcctgtgcatttctcacttatctggaatcctcttcatcattcccaagaatgctatgattccctgacattaaccataataaagccaaactcaagaaggagaagctacttgggtaccttgaaaagtcaaggaaataccatagccatcatcaagatgcttgccacattactcagagacttttatctttgccttcaataaacttccttagatgcagatcagaaatcagatctcttccagaccactatagataaagcttgtatggcaaaaatgtgcttccagttgtagggatttctgttctgacagccttgcattcgatctcaaccccaactacatctgtttccctgttggatattaaagataattgctgctctagtttaataaaatggcaatttgcatctcctctgggctagactgcttgacagcatttcccttaaaatctcctacatgcttttattttaaaaaataattttcattgaaaaggtgataatgatttttggaaatgacacctaactaaaatctcaaatatcatataatgtaagcagtccatattttcaatataattcctcaccaactgtagaaaatttgatttctgaaaatctccaaggtagaagaatttatatttgagaaatgaaagatcatgcagaaagaaagaaaagaagaaaaaaaaaagagaaaacaggactgtagagctaggattcactgtaaaccttaaaagtttcttacaaataacctttctatcaatttcaatgaagcaattgcagtagcacgctctgtaaagacaatcaatgagatgatgttttcaccatttgaagtttgtgatggtgtgtagagtacttgttttgcctctctctccaaaaaagatacggcaggtagggacaaaagttctcctgggctggaggagggtgagcatttgccatagacttggctgtgggaggtggggatgggatggaaggcaggctgattgccttttacttcctgccagtctacatgagagcagagagcaaatataaaaatgatgccctgaagcactaaaggggaaccaggggagtatgtcaagggaatatggggtgaggtacagggcaaattaccaaagttgagacttagagtccaccagattgctgaggaaggagataaagaagtaaaaatagcaacagctcagagcagagaagtcagagacaaggaatattattatattatattaactccaaaaaaaaaaagcatcttttcctgtaatgagccctgtaagtagcattacaacaaacatacacatccttgctgtggattccaagttctcttttgctgggagtctg

SEQ ID NO: 36475 - DNA, 1973 bp, Bovine  19866880518900
  misc_feature (1)..(1): n is a, c, g, or t
ntattacataacccagtctagttaccaggaggtattactgccaccattttctgtctaaccaaagaataggagagaccaaagaaagtgttctgaaacttcattaggtaagaatattcaattgtctactgtaatttaatatctatcctttataaatttatcttaagtctttctcttgaagccataaatgtttgaaacccctcatgttcatgtaattgatatgatggtttgtggttggatgctattttcctctactctggagatctagatcattattgaaaataatataaatccacatggctaattttccaaaagcttcttttaaaatccagtaaatttattcttaaataatgcaacttctgacctgcttagtattcaaaaccaaaaactgaaattttgccacactctttgcagtctattgatttgagaactacagctgctgaaattaaactttattgttagcatagagctttcagctgaggaagcaatttcaaattggtttcttttctagcccagcctaatattaagtaaatatgtgcctataagtatctctagcagtttattacctaaagtggtacaagcaactttgcaggtgcagctctgagaaactaaaatctactttggtggtgagtcttactacccaatggataaacgttaatattgaaactcaatacacagttaccctcagagctctaagagtgattgcaagttagacatttcttcatttaacatacttttaaatttagtactctaagatacgtgcatacagcaaggaaatggccacagtccctgtctttggggagtgccccatctagaaagaagacagaaacagaaataaatataatgtagcatgtcaataaagagagatttgtactttatatgatgggaaaggcttctcacttatttagggggtagttttagggaatggaaaagactcctgagaggaaatcaagtaaagattgatgagaaagatgtctttgctttatttctctaaaatagcaagatcaatttcctgtttcaagaaatagctcttattctctaaaaataataaaataatgtttcccctgctggcataaacactaactgaagtagcagaaataataacccatcattttatagacattctgaaagacaacagggaaaatgatgaatagaagaataagatgaagagctgtgaattttaaataacaagatcagtaaagataccgcctattttgatctcaaatctataggcagcaaaagtttgggaactagaggaaagaaacacaatgctttttgtgaatgccctattttttaaaagaagtaccctgctttttcaaagttagtgctttgaaatatgatgaacaaaaatctctcaaaaacttgtcttggaaatcaataaaacttgacttagtttgatattgtaccaatttaaacttacatctgaattctatcagacttcccttcttagtagagaaagccatggttactagtctaagcaaagataaatctctacctcaaaaattctcatgccaatttacctgctgtgatacattttttatgccataaaaagactaggctgagagtattgagtgaaactatttgtaaaacccacttttatcaattgactaaaaaacaaggaaaaatggtacaagctgtaccctgtgtctttataacacaaagatgagtgacagcttgtcacctttctacatgatatgaacaaaagaaaaaattaatctgggtaattcaatccaagtgtatttgagtacaagactcaggaatgaagaataagaatggaaaaccagtatatgtggtccacaaatcaaagagacaaagctataaatggcaatgaagtccagggacaactttgtctcccagtaagagtacatgggccaagccatacacacattcttatttatatgcagtgtaaccatcactacccccaccataccaactaatgtttactcagcatttatgcattttgtgccaggcactat

SEQ ID NO: 36476 - DNA, 1449 bp, Bovine  19866880556307
  misc_feature (1)..(1): n is a, c, g, or t
ncgttcttttttaaaaaaacttttcagtgtttatactatatggaccatgattattttaaataaataataggttatagcaataataaccttccattatttctcagctgctagcttactagcaaggagtgcagcagaattgtctgttcagaaattttagagccattttactaagacacaggaagcaaagaggctgactctcaggaaagacaatacaagctgaccggagtctagttttttaggaccttacttagtattgagtaagtatactatcttgcctttttaaagctcttccaatcgcgtgcagacactcctcacacatgttttaaatatatctcacaaaacatagatcagcacttaggaggtagtgcttatgtcagactaaaatgagttttcgttttccttcaggtaggtgtccccaccctccaggatctaatgcctgctgatctgaagcagagacgatataataataacagaaatgggatttcccaggtggtccaatggttaagaattcacctgccaatgcaggggacatgggtttgatccgtggtctgggaggattccacatgctgtggggcaactaaagctaatacgccacagctactgagcttgcgctctaggctccacgagttgcaacctctgagcctgctctgctagagcccgtgcaccacaacaaggagtaaccctcgctcaccacaaatagagaaagtcctcacaaagcaacaatgacctagtgcagccaaaaataatttttttaaaaaattgaaatacggtgcacaataaatataatgcacttgaatcttcctgaaaccacccccctcctgcagtctgtggaagcattatctttcacaaaaccagttcctggtgccaaaaaggttggggaccactgccctaagggaattctaggctgaaagggttaagaactgaatgaaacggcagcataggaaaagcttctggagcttaaagctgccaacagccttgctctagccctgctcatgatcggcacaatgtcctcgagcctctgcatcagtgctctcggctgaggcttgaaatggattgtgtcattttaaattaatcatttccaaacttctttccatatctattttggcccagaatagacgtctggtgtttcaaattctatccaccactcgaataaaaatgactgtcttcatttgcttccatatctctcacccaggagtccatatgaagctgcattttgggcacataaaatataaatattcatttacttaaaactaggttagttttgcttgaaattgaaatcagctggggcaccacagtgtagtgggaaggccaagccaagacctctgcagttacgtagtgccagtctgtcctgggcttaaagtcctacaagtagatattgaattggccaaaaagtttgggtttttctataaaaagcccaagagactgagtattaagtattgttaccctata

SEQ ID NO: 36477 - DNA, 1147 bp, Bovine  19866880605098
  misc_feature (1)..(1): n is a, c, g, or t
nctgtaggtccgtttccatggtgctgtttcccagcttggcctggattttgtcttcccttccctcagctgaacagaactgcttcctctaactactgagctcttaaggcagcacgtgggaaatgatgacgcaagaccgaggggatttaggcaaagaaatgaagtatcaactataggaactagtagacaattacccatttctgatgtgattcagtcaagtatcatgctatttgtaaatgaaaatgttaaataataatctcacttagtagagaaagattatctaacactaagaacctactatcttctatttcagatctttgaaacaagtgtttactaacatggtatttggtgagtttttcttcattgagaaataaaaagtcaacataatcttttactgtaagcacccctttatctaaaactgttgtggactgaggacatagatctcatgagatgactaacatccataacccaggtatttaatcagaataaaataatatgctgaccctctaaaaagaaataatatgctctaacctgataaggcaagggaaaagagaaaagacacctccctttcttccctttttcgataaaaggagtttcgcatgaagctaactggtagtaaagggtatctaaaaggtccgtttatgaagagtaagtcaggaggaagcactaatatcctgaaaccctacagggttttacaaagtgccaaagaaatcactgaacaaacacatggctagcaggcatttgccccagagcctacagaagagaacttccttatttgtgagcagggtctcattttcaacagcagcttctgacctcaggcttacccctccttagccttatgtcagcaaatctctccaaagtttgcctaggaagacctgctccatttacaggtaactgaccaagatagatttgtcaactcggagccaagctcttccactttgctttttttctccacagttttccatacatcttttccatagtcaggaaagttttcctgaaggcatcagagattatacacaaaattggggttgggtgaaataaactaaaatggtccttcctctctctaaattctaagctcttttctatttttcatctggagcaacagaatacgtaaaaaaaaaaatccccctaaaaaccccagagcattttg

SEQ ID NO: 36478 - DNA, 990 bp, Bovine  19866880658274
  misc_feature (1)..(1): n is a, c, g, or t
naatctaatgctgctgctgacctaacaggaggcagagctcagcagcaatgccagagatggggagtgactgtaaatacagatgaagccttgcttgctgtgtgctgctcacctcctgctgtgtggcccagttcctaattggtcatggaccactccctggtctgtgaactggcgggtggggactcgtgggttagagtcccctgggacgggaacatagcttcttttctatgatgtctacaggagtagattcttttctgccagcaacacttcactgggtgtgtcatggaccagtgaagaagaaatctgcctttaagccttcctgaggggcaggggcctcttaattccttcctgcaactttctgtgggtttgctactgtcaaggaaaatagaggtcacaatcaggcaaaggtaaattaaaggagtgatccactgagaagaaaataaaaccctgaaggaccagtatggacataaattgggaagctggagtgagttactccaaagagaggtgcaggaatacaaccacagagaaacgagataacctgatacctttctctgcctcatgcctctgctcaaaggacgatgctgttacgtgcatactatgccctgctgctatcaccctaagccactgtcaggatgcggggtgtcggggccttacgtaaacgcccctgctgagcaacccagcacctaccaacatgctttatttcccctctaggcaccagagcatttggcacgcttgtagagagtaatttcaaggtagattgtaattgctggtaataaacacactacattgagtacaagctggactaggaaagagggtcgtaacaagagatctgtgatgatcatggtttgtaagttgatcttgactatcctaacaagataaagcttttattaaaattatgaatcaaatctcattctttctcatatgaaaaaaaaactgggaaggattattttaggtgtacttggcacaggttctttactttaggaggagtgtgtg

SEQ ID NO: 36479 - DNA, 1628 bp, Bovine  19866880663555
  misc_feature (1)..(1): n is a, c, g, or t
natatctttcttgaaagtaaatcttagagatttcccaattaaaactactttcaggtcccaaagtctaagctccccgtatgatcttaaaaggttagactcctgagcttggctcaggagcactcaatcatcctaccctccatctactctggaaaggtgggaccatttttggttggtggtaaacataagcacaaataaaaagacaataatagcaacaaggtaatagtaataatgacaaggtaatagtaataggaaaaactagtatctataccggagaaggcaatggcaccccactccagtactcttgcctggaaaatcccacggatggaggagcctggtaggatgcagtccatggggtcgcacagagtcggacatgactgaagtgacttagcagcagcagcagcagtatctatacaacatcatatagccaaaagtgctctccaacagatatctcatttgattgtgccaaccatactgtgaagaggctctggcaaccgttgctgctcttgttaattactgctcttaccagtccacttcctctattggatagaacaacaggaggtttcaacaggttcaaagggtttctttgcaagatcacacccctaagtgagagctggaatgagacgtctctgtctccctgggttctttctccccagtgctcacgatctccaagcatcactccttagatgttaaatgaatttcaaattttgaaagttggggaattgagaagcaaagcaattaaaattgtgatgtatgaaccacttgatcttaccctttgtttctgaggctttgttaaccatgtcggcctaggagattcaactgctttgaagactttgccttctggctttgccttaggagcaaaacatactttaataaaggttggcatttcaaatgctagcagtccttagacataataaggactactaaggcacagaaatttttgagaaggcttagaattcaaattgtaattactaatgacaatatttaagtaattataaatgtaaagttgctcattctatctcaatgttctcatgggtaaaatgagacggtatctgtctcctgggttgctgtgaggactgaatgaaatcctgacctaaaacactcagaatattgtctggaataccaggagcccattaatattagctagtggcattattatttctaaaggtagaataataaactatggatatcttcatccaggtctttgtttttttggggtcaaggagatttacttctaatatttagttgccttttacctagttagaaaattctatatatgttgttacagactgaatgtctatatccttccccaaatccgtacattgaaatcctaattctaaaggtgaaggtattagaaggtgggcctgtggaaggtgattaggtgatgaggacggaaccctcataaacggttctagtcttttataaaagagagtccagcagctcccttgcccctttcatgacaaagagaagacatacacctatgagaaatggtcgtcatgagaccccaaatctgctggcatcttggtcttggacttcccagcctccggagctgcaagagaaatgtgtattctatataagccattcagactggttttttggttatagcaatccaaatggactaagacgtatgt

SEQ ID NO: 36480 - DNA, 677 bp, Bovine  19866880663857
  misc_feature (1)..(1): n is a, c, g, or t
ngaaagatgtgttagagaacttaatggacattcagaactcttagaataattttaccctgaaaaatttaaattttgtaggcttgctgatatatcttgatgaaaatttgacccaatcttgaacatgacagacttaagaattctaatgtctatattttgttttttcataattgcaccaaaattgaggaatctttctctgggagctgcctattgatacaccttgtaattagcaacctgcttctgtttctgaaaaagaaagcagtgtcaattggtactttcaatcatataagtgtattaaaattagctacagtctgtattcagtggggtcagaattagctacaatttatattcagttcagtacatagaatttgtcaaatttctcactagttcccaaggtttataaacttgaatgtatgtatgtgagttttaaaaatctaaggactggacaaaagagaaaaattaagaatatggatgtggtataggagaattcaagaaaagcaagggtaagtggaaataatgaagacacaaatcttcagatgttcgtttaaaagggagaaaatgaaacattcttttttttcttggccagatgtatgacagattcagtgaggcatttgtatttgactcctattgattttgaatggatttagctgtttaaactgtagaaagaagtggtgatggtg

SEQ ID NO: 36481 - DNA, 1687 bp, Bovine  19866880670969
  misc_feature (1)..(1): n is a, c, g, or t
ntctatcactcatcttggcaggataactgtacccactgattgcaatataagaatatggtttagtccctaccttattgagtatgtcttctggaattatgcttgttagagcaaccacatacatataaaatgctacataacatgcaattaaaacaaaaagcaagcatgccaatgctgtagtcatttctatgtcgtcaaagcctaagtctttgcctgtgtacagacttgcagttctggttagggctttcccttttgttgtttagctgctaagtcatgtccaactctttgtgaccccgtggactattgcccaccaggctcctctgtccacgggatttttcaggcaagcatagcggagtgggttgccatttccttctccattgtccctttgggaaaatccatgacaaatgctgttcttcacataagactgctgagactcgatcttgaaataagagtaggacaagaggaaactacccaaggaatcttgttaatttcaggatggagagtcggtcatttaagggtgacaggtgcaacattcatattgattttccagattttacttctcaaagagtctggaaggaagatttgagcagctcagacaggatttctactgataaccccagggatggtttgactctggtcttctttagcccttcaattccattactcactgaggtgcctgggcctgggcctctcctttgtttaggagtgacagccacttgtctttggcggcttggcagttctgtaatgacagacagccacccagccaagggggcagcagcaggagcaaacatcccagcttgataagactgcttatgcagccgcaggggaaaaaagattctatctttctgtcttttgtggttattaccttcctctggctgtattattatgtctccgaggagagagagagagagaagtctgtcgagagccaacgtcctcaatttgggaggacaaactgcagttccttcagaggccaaaataaactgctcggcagaaagagtcctagtagtgcagtggttggtctctgacaactacaaaccggtagttattgcctcaggggccccgaattcttcagtccccatcagacactcaggaggtgaagacttaggtgttatctagccagaaccccagcctcggggcagatggatgtcctaaccctgcaggacagacaattgccaagtggcatcagaaagactgtcagaagcccctcctagcactgttcttttgaaatcacaagccagcgcccccaagtccgggcggaatcttccaggctctatcgaaaagctgccccctcccccctaattcattcttgcacggatattctatgagcctatgacaaggggaagaaactaatcataaaacctgttcataaaatccttctgatacttaaagactgcgattaaatctcccggcttcatttaaaacaaaggaggttctctattcacacccttcccaccccagcagaaaatgtattccgggcccggcgctgaccatccgaaagttgagatttctcttagtcgagggcaaagttagcgaatctgtagctgaaaagtctcaacttgggggagggggcgacagcacgggcggggggagagcggcgggaggagggactagagggagagacactgccccctacttcagcgaggtcgtcgcccgagccggtggagccgccggtttgggttttgggaggagg

SEQ ID NO: 36482 - DNA, 1034 bp, Bovine  19866880673956
  misc_feature (1)..(1): n is a, c, g, or t
ngaaaatgggaggcatgaaaagatggtgaggaacaaaaagcagaactgggagactgcccatgtgttttgaaacagggccaccgtgtggtcttcattatattctatgtgttctatgtgaaatttctttggcagtcctttttgggatctttaccaaaaaatgtgcttggaccaattaagagcataaaaaaagtccctaacaaggcagcatcttgctttattgctctttcaaataaatctctcactttctatggctgatcaaccctggtagttgagttcatctgaaaagacacatggagatagtccaagtactttgtcagaaacataaaaatgttctattaaggtatttgtaggttttaaaaaacataaaaacactttctgatatgctctgatcaaaaatcattccttgcaacattcgggtgacttccattcagaggcatttcaaatgaaaattttgaattaattgctgagaaagggaatgtccaaaggataaataaaagtgttcactagtcactactcagaaggcaatatacaaaagtgcaaacatcaaggattcaagaaattaaaaaaattttaaatagacaaagtccatatctttgtcaattcaagagattaaataattttttttttaaatttatatcacctactcagaagcaatttgggtcacaacaacacttgtttcaactatctgggctcttccttgacctcttcactctcttgtttctcttttcttaagtttagatgatgcctttttggcaagagcctagaacagtagcaatccattcccaaactttgaagcatctacgggaagtaatcagaggacaaatactcctgattttcatatactaaaccaagtgatatttgctatgtgtttagcagatatgtaccaatagtattctgctatggtaagcaaggtagttagatcctggactcaaggcatttataatttaaaatcatcaataaggataaacattccaaagcacatgtcaacaagaaaggggctgcctaataaatctagaggggaaggcagagacaag

SEQ ID NO: 36483 - DNA, 4447 bp, Bovine  19866880695195
  misc_feature (1)..(1): n is a, c, g, or t
naagatgtactaggttcacattttatttttcctaccccagccctgaagtcagcctttctccaaggtactcggtttgcttttagtggaaaatgatattttttcatacagtgaaaatgtatctgtttatatttaatattataataaaatgacccaatatttgggccagggtggtcattgttactggggtgacttacttctagctctcttgaaagacagagatgaagataggttgatacctataatcccacagacacctggaggtgagatagcatcgttattatgttgtgatttctttggggttatgattcctacttatcttatatgaaacgtataggatttaagccatgttaagtagttcaaaatggagtcacagaaacccaggtgaatttccatgttagttgttttggtatgtctgtggtagggctgtgactgtcttagaatctgagttactttagagatttgtttgacaactggaacagaagaaacacctgacaaagacaaggcttccagggcacaatgattacactctactgacagattccttaaagtgatacccagcaacttgaatgaaggctctttgctgggggacctgactcttcgctgatgagagctgatccagaggatgctgccagaggccctgttggagcagagggcgattccccactcatctttgttgtgagaccctctgcaggactggagcctctgcttatgctgaaatgcccccttcccagacttctccttggagtagttctttaccaccttttcccctacttaaagtaacccgtgctgtgtgccagttgtgttcaagaaaccaagagattcatgaattgaatgttgctacctttcatacaatatcatgaaacatatctaatcccctgattcttaccttgccctgccactgggccctgccaccaacaatatgaaaccgatagggcttcctgtcagttctattgcctctttacttctgaactcctaacctttcctttagtatctcccagcccagtcttcccacctccataaatgcaatagcatagtaacttgtagtttgtgagacacttttgtggacattctttcctttgatcctcaaaacaatcttctgatagagcctgggaaacatattcttatcgatttccagacgaggaaagtaaaactcctaaaacccaagtgacaaattcagggtcacattgtaagtaagggcctaaatcccaagtctggtgttgttacagctcacattccacatgggaaagcccattggccttcgaacatggctggacactctcggtccaggtaacgtaaagggaagtcggaagttctctccccatctatgtgactactctatctcccttagcccacacctacacacgtgatgggtgagagaactgagctgcttcatatccagccttaggttgaacaatatagtttctcctccttagtttctgtccaaaatattgtggcaaacaagtaacacactgaagttcatcattttgaaaacagtcagagcccccagtggctaatgaaaatatgacataaatggaaatacaaacagtctgcatctttacaaaatcgtatcaaaaagattccatgtcttatcatttttgagcttaaagagtctctgccaataatataagtcatgagaacattacttttgagaagagctctagttacttggagataattttacagcattgtgttattatacatagtatgtgtatctatcttatctaataccattctctccacagaagtcatattgaatgaattcagttctatatccatgtttatctctagctttataactctgacatttatacaaaagatagaattttatgtgacagttgtgaaagatcatgacttcctacatttgcattacatttctcctaagaggagctctttcttgagcatagaaaattgatttgatttatctaagtaatggggcaaccacaaaacccctcagagcttcttttctttgctttgagtcgctttgcttataagaggattaatgctctccttcggggggcaaaatatctcatacctgttataggtgaaatagctgtgctgtgttagggtttcctactttatgagctttatccttttttttaaattttttatcctgctttaaacagagcttcctgattttatgggctgttgctgttctcctcattttagactacaggtagtgtatatcaccacttcctgattctgtgggagacactgtttttccgactttctccaaccatccaccatcctttccaaacacctctctcctctattgttcattcatatttaccctcacagtttatagagggatcatagttcagtaggaaaagtatggtaatggtaatggaagtcagtacgcctggattgtgtctctgctttgttcagaaatatctgcgtcacttcgagctatatcacattacttctcttggtttcagttatccaccaccatgaacatcatccttgaagttcttcaagctctgaaattctggattctatttcaagtacaatggtacatgctagtttaatggtaactagtttaataagaggaattcctccactctgcttgattctgatgtgtgcctttatgcacataaatatgaggcccaaataaaactgagtattgtgattctcacttaggaagttaggcagagagcctaagtgagagctttattcactcatctctcaagtatttttttatttctatgagccagctattcttttagatatcacatatttagcagtaaacaattgctcaaggaccctgttgtgatgaagtttccatgtttaaaatatgtggaggacaaagaataaatatatgaagatattttttaaaaacacaatttcaaatagtgataaatattataaaaaataaaacaggaaaatgagattaaaaagagccagaaagatgagcagataattcagaatgaatcatcagggaaggcttctctgggatggtcacagggaaactgggtcctctggccagttatacaaaaatttggtcatagaattctgaggcaaagggagcagcacatccaaagaaagcttttccaagatggctttgtttgttggaagaagagaatgaaagccagtcactgcagtgtagtgaatgatggcagagtgttgggacctgaggccagggtggtgagcagagcagatgaggagtccatgcagacaggagaaccccttctctgcatgtgccaggaatgatgcttccagggaagggttctttctccttgggaagaaccaagtgtgtcctaggtatgagatcaagagacatcaactgtcagaccaatgggctcatcattgatttagatctcatctacagaaaacctaaatgcaattggaaatctgaagatggaaatccaagtttcagtctaaggcatttaccatacttttcctctggaaaggcacagtgtgtcaacagaggaaacttcagcctttccctgaaaggtggattgtgaaagctggtaattgagagagagaggaaaagagagagagggagggaaagagagaaggagagaaagagagagggacagagaaagagagacagaaacagagagagagaccagtaacagatgatgcagcattaaatcatgcagctaatttgttgggagcctgggaaagacgctttacctctcttgatgtctgttttgacagctataaaatgaaggcttagacaaggtaatcttgaagttcttttcccattctgtagtgaaattgcttatttgtaactctaaaatagctttttaaaaaaggttttcttgctatttaaacaatctgccacattagacttaaaattgaataagaaacatatacttttctaagacagattgtagtttacacttctagcctcaatcctatacataagtaattcatattattcagattatttccattagcacatgtgttctcattaaatttcattatgttagcttgtcatccgtatttttagcaggataaattgaggactgagttgtgttacactccaccagagaccatgatttaaggtcactcatctaatcatatggaaacctctatatttcctttattcccattatatcatgaaaacttgcggtcactcatcaggtgagaatctacattatctccttcatcactagtatatcatacaaattctatctttaaaaaaaaaaacaaaaaaccttttgtaaaactcaaggcaacatttcccagtttctagatatccagaaactctcctattctgcaaacttccttaaaaagcagtcagctaatccatagaactaggacttgacatttattcaactcatttaacctcctggaagggtaaactcactcaaaagtaaattctctctgataactctaaacataggtaggatttcaattcttttcccccaatgtctaatctacatttctggtatggccatcaatctccatcacagagaatatagagtaaaatcaatatattcttatt

SEQ ID NO: 36484 - DNA, 1213 bp, Bovine  19866880695615
  misc_feature (1)..(1): n is a, c, g, or t
ncttacccagcaggcacagcatagcaatgggaggtagcagctgagggagccacggcctatctgagtccagacaccaatgtcacttcttactgtgtgaccttgaaatgttacctaacttcgcctagattcaattttcctatctataaaatgacagtgataacaggtcattttcagcagggtggtggtgaaggttaaatgatccaatccatgtgaaacagctagataaaggcctggaccatattaaacattccttgaatgtgagctaccattgcaatttctagggggaaactggtctgcttgggacccactcttgatcctctgccccatggctcttagcgagctgggcaatattctacagatagaagaggctgcttccctgtgtctcatcttttcactgtcatttttgtctagaatggtttattctcaaaagagatgaaaataatagtgtttccatttatattgtattatccttattttctttagtccctcagaaatgctctggcattatcaaattaggcacattcgaactaatgtgccatagaactaatcaaactgaaccatattttgttccttgataataccctggactctcatccattaatgtaacagctgcactacttttaaaggagactgagaacgcacgctgcagactttcagcactcggtagctgcaatcatgattgtttactgaacactcatactctgtatgtgttatgtggtttagctttctaatgtcaacactcattcactgtagataatcatgagtctgcagcacagagaggcagccctgctcaattcaaaatcttttattctggttgagctttctaactctttatcaacactaaactctcatatcaaatttctgaatacatctaatgaaagaatcatttggaaacctttcctcttgagtaccaaactagtatttcaacattgcataaccctgctaacagtggagtgctattcaaagtttgtcattatgtctgaaacatacatctgatgtggcccgtacatttagatgtcctccttgtttgagatgtgacttacactcttatttcccctgcatacagttcagtcagttcagtcactcagttatgtccaactctttgtgactgctggactgcagcactccaggcttccctgtccattaccaactcccagagcttgctcaaactcatgtccatcaagttggtgatgccatccaaccatctcatcct

SEQ ID NO: 36485 - DNA, 1581 bp, Bovine  19866880704805
  misc_feature (1)..(1): n is a, c, g, or t
nctcctgtgaggtactgcatgttgaattatgattaaaatttcttaaaacttctgcttcttttactttctattttttgaagaaagaagccaaggtacctatattttaaataatattttgacatggtaaaagaattttatgttataatccaaggtgtggaggagaggccatggaacaatccaacaagcagggaaactaagaaacatatggtaaaaagttctttttcttttgacaacctaggttgatttaaattacaaatcaacaagatctacattacataatatgttttgtttttttatctagctgcccggatgctcagaactaaatcaaatgtttgtagcaactggtttattgcagctacttgcaatacaaatttttctctgctttgcttccttgttttgtttgcttttttctaaattgctattttgaataccatttggaagtactgatctaaattgtgaatattaattggagtgattgctaacatcatattgggcttacatgtgccgacaatgttctagaccctttatattaactcatttaatcctcactgaaactaaatatgtacctctctctggctttgggattagtgaatttatttataaaacattggtagcatcaaaggacatctgttttccctttatcaccagtataagcttactaataatttcagtgcttaaaacccatcaaagcatcgaaacagccaatttcaaaaaatcatgtacaaaaaatcaaatccctagaagtcacctctctgagcctcaactccttcttctgcaaaatgagtataaaaataatgacacaaaatactgttgtaggtagttctaatgaaaaattcatgtagaatcttattgaaaaatttaatgtgataaacaaatgttatcgttattctgcaaaaagacaagaaaaaaattgttatcatcttacacatctcatgcattccattgacaaatcattttctgcaaaaagtccagaatttgaccacttttcagcacttcacttctggtcctgggcactaccatctctcactaggaccattgccccagcgtcccaatgggtctcctggtttacacttttttcctcctccacacagcaggcagagtgattcttttaaaatacagttcagctcataccacttccctgctcaaaaccccataaggtaggcagaatactgaccttgcaaaaatatctgcgtcttaggaacttccctggttgtccagaggctaagacttctctctcccaatgcataagaaccaggttcaatccctagatctcacatgccccaactaagagtttgcaggccacaactactgcacacaaggcccagcacagtcaaataaataaataaaaatccttgattttccagatgtaatcacaagagtctttataagaaggaggcagaagtcagaggagatgtgacaacagaaatatggaggggtgccattactggaagggggccataagccaaggcttgtggggggcctccaaaagatagaaaattctctcctaatgtccccagaagaaaagcagccctgctgtcactttgattttaaccccatgttacagattaaattgggtctccc

SEQ ID NO: 36486 - DNA, 1066 bp, Bovine  19866880710824
  misc_feature (1)..(1): n is a, c, g, or t
naaaattcccagatatcctcaaagacatcttcccaagtgttgataatcccccttaatgaattgcaatcaaaatcccatgctagataaccgagatttttagataaatccttcttaaaaattctgctactgaacatagtataatcatttacaaagataagaaaaatttaataaaacaatgttgagtaatggaactcttaaaactttcatgcatgactactagatgagacctagcatctgctgaaaagtctatcatttacatgggtaagcacatttgtgattcattattaaaatggaaaaaatgatgaaaacatctctgcccaattgaaaaggtcttccttcaccttactcagcttccataatgaaacttctattattactttggtttttgtatcttattcagattctcacccaaaatattagccaagccatgtattatcagtgctttttcactatttaattaggttaaaaatctaacctttttattaagtacagattcaagggtgagaatcacaaatatgtctgcatgaaagactcctgagagataatgagcagggggagatttctattaggaataaggaagaactgaattagtgaactgaatctatatttctgttgctaagtttcaaagctgcctggttctttatgtttaaataagaagtaactcaaataggcaacagattttactgagcgtaaactattccagacaaggtgatacatgaaatatattgcaatacacagaggagagtaacacatactctaattttaaggatttagatcagattagaaatatgtacataaaagtattatgaaaaacagaaggaagtgtgaaatacccacgtgaacattaagtgcttgaaggaactcagagagcctttgtttcagcttagtctagagaggcttcatggaggaggtgggatccaatttgcatttgaaaggatactttgatggacatattgttgcctaaccaccatccattcagccttctttgcatatttttcagaaatcctctcctatgcaggacacatatcttagggaaagcaaactctatcctagctccaagggagac

SEQ ID NO: 36487 - DNA, 1397 bp, Bovine  19866880711994
  misc_feature (1)..(1): n is a, c, g, or t
nctttgacttatttactatttgttgctgcaagtagcagaatttcattttttttggaggagtaacatttcactacatatatgtaccatatcttctttatccattcacctgttgatgaacactgaagttgtttccatatcttggctattgtaaatactgctcttatgaacgctgggctgcatgtatacttttttggtgtttttgctttttgggggacatatacccaggagtggaaatgctgggtcatagggtagttctactttcagttttttgaggaatctccatcgtgtttccacagtggctgcagcagtttacatttccaccaacagagtgcaaggattttttgaagtgatttttttaatttctgatgccagcctttctaaatacctgaggatcctgtgggatgcttgcttagtggactgtgacccaggggtgctggtggtatttatgactggtttcttttaattagtctgtgcccggccagtgctgcatactttcaaaagattattttgttccatctttacaacaagccaatagagaaggtgttatattatgaatgaagaaacagactttagtgcttctgaccttaaacactggaccacaccacctttaataggaaattagagatgacagacagtaaggataatacacttcctcaaatcttctacttcctaaaatatatctagcttttatgatagattctattttagataaacctaggaaacaatacttttaattggaacttgaaagttttcctgctaagcaaaataaaatttgacttacctggatatattaagacccaggtcctaagttgctattatgataacttatctaaatttgtacaaggaagggtctcccttggtcactcaaatgaaagaacaagaatcaaaaatgattttaaaggaaccagtcaaagaccttaggtcttaggctcccttttgggccatagaggtccagtgacctctccccaggcaccccattcaggaaccccaaagggcagtaagcttttggagagctttgtcaatgggaagagagtagcaaaagagacagttcctttattaatattcaagtcctatcctttctaggagaatttgctggagaatcccctttacagatcagaaataaaaagggccattctccttgcgacccctccacatctccacagtttagtgccacagaaggaaaggtaaatagactggctgggtctcaaggctaattttaggaggattagagtatttgcaaattaggtccctcaatccattttttccctgtatatgaaaagcaacatatttctgcactattcaaaagaaaagaaaattagtgcgagctgccaacagctgtctgacaaccttgagcactggggtatgttggcactggtccagatttcacatacggagtt

SEQ ID NO: 36488 - DNA, 1116 bp, Bovine  19866880742960
  misc_feature (1)..(1): n is a, c, g, or t
ntaaaccttgtcctttaaacctattaatactttgccccgagaaacctgcccctcagtataggaggggcctcagggccaggattttctctgcttgagcttagaagggcctctgcagccaatcgtcagaaaatgtcattgctgctaaacagggacaataaatccccaagctacccagtaatgcaatctccctcaacgcggaaaaaggtcaggcttgaactgtaaataaattcctgtcacacagcagcgtgtcttttcaggtggggtagtaaatcttcctggagatgagccaccacacacaccataattctcttcctgtggccctggtcttcattagttaatttttctacaactgctttttcataaagtttgggcgttaacattcccttggtgtgtaaagacctcccagaatgcacagcctggatgaaagtagggtaggggtggtgggctccagagggatctatactctaaattataaacagaattcacagagtataggctgtaaaactccttgatggacagaaaatttggatttacagcctgtcggtatttaaaggaagagagaaaatacttgatgcttcctttgatctacaaaattccttataaatttttgtatcaaatcttttaggatgctgtaaataaataaataaacccaacatgttacaccctattactcatcagctttctttaacaggccagaagttagtacttggaatcatatacctaaagtttcaattctgattcttttgccagttgatcagtatttatgaagccaccaaagtataaagatacaaagatggatgaagttggctgctttaaggaattcatagcctggctggggggagaaagacacacaaacaaataattaaaatataatatcatcatggtgctatggcaaaggtttcccccaatggcaataagaacgcagtgcagggagctactaatgtctgtggaatccggaaaggctttgccaaggaagtggtatctgatcagacttttggagaataagtagttttactctaggtagaaaaataaagtttttgcaaaataaagtcttatcctagatagccagatgagctgtagtactccatagaagtctttgggctttgatctctgatt

SEQ ID NO: 36489 - DNA, 1487 bp, Bovine  19866880743394
  misc_feature (1)..(1): n is a, c, g, or t
nttttatgggatgatttaattgccactggggataaaataaatggcctttgaaattctttccttgccttgattctgttctccctgacttgatttcaatgttggccaccacattgcttagcaatctgtatatacagagaggattgggctaggaaacaatagaacatggtgagtttaatgtagatattcaaatttaagttctccctcttactgggtcataaaatctcagcaaggaaggatcttagaactcatcaggtacaagctaagtccagtgtttaactcaatccccacccccctctcttttagcaaatattcatttggtctcatgtgttagcaagtggagaaagctcatggtttgtctgtgttcactgctctatcgtgaagatttttccctactgctgttctcttcggcattttgtagttgcttattcagtagacttggacagacatcaggttataaatgaaagagaaaagggcaagccatctcaaagctgtcctctctctcacataattcattacagaccccctggtgcacagttgacatcttaggtggtatttgagcacatgaaagtcgaccttagtgctttgcccttagtctgtggtcttattaactggctttcaatacattcccccccatgtaccttaaagatagtgaaagatggagaaatgcttctggactcttctaagcaaataagaaaacgatgggcctgaagagtaagggttggcaagaacatgtcattagtagcttgatttgaaggtggctcctaagagctcagtaatttcagtgagtgtctgagaaaagatttggaaggggagaaacaatccatgatggatgaaataactgacagaagggagtggagaagccaagaagaatcgggtgaaaatggtgcttaccctaaacatatccaggactgacagagaataggggcaaagtccccatgcaagaacggcactccatgcctaatgacccctgccatcttgttacttggacttcacttagctgttttattttgtcttgtgtgtgataagttaaatacttgtctaagtccggccacaagagtgaaattaagagcagtgaaccacagcttagtcagtcacctttgaaggctccaggaccttgctccttgcctcttatgcagagagtcagtgttccaaataggcttagtgacagcactttttcatttggtaaaggacctgtacttagaaatggtttttaataataattgagtttaggaggaaaagaggcaaaaattgtcctgttcctcagtacactcagcaggaagaaaatagagcaaaatacggcatatgggagaattgtcttctttcccggaagtcacaaactgacgttaagaagcaacagaatgtaaaaacaaggggccattttccttgtttcattatcaaatggatcctgatttaggggttcttggagtaacctgtttctctaggcctaaccagcctgaggttaaaaagagagtcataaagacagaaca

SEQ ID NO: 36490 - DNA, 1496 bp, Bovine  19866880765644
  misc_feature (1)..(1): n is a, c, g, or t
ntgtcccagtgactctcatcaaaaaaaaaaaaaaaaaatttggaagctcactggaatggcagcagcacagatttcctgcagaacttcaaatcaaaccagagagtcaaaagcacaaaggcagactacgcctgaccagagaaaccagtcaagttgtaacgatagctctggactcataattaatctcaaaaggctagctgggcaattaagcctgggtttggaattagatattaaaatatttttaatgcagtaataaagtagagtgggcttttgttgtttataaggaattcaaaactagtcctagtcttcaaaagctcttccatttccaattttaataggatgtgacataggcagccttgaaacagaagttatgatacgggtagatgtttaagctgctagagagtgcagcttaaatgaaagctcttctcgatctcttgtcctaatgattgttcctttcaacttagaagtcagagcctataggtaaggctctaagggctttcttttcacctctgttttaaccatcaagtcttcatcctttgtttatttgcatcaccctgcccataggtttaagacttgtaaagccaaacataagcaaaggaaagaatgaatgtgcccattcttaaacaagcttaaacaaagtatcttcagctaattatcactgctggacatacattaatgggtaaatagcataaattcaactcacatcttgggagatgcttctagattcctcaaatccccacatccgtgattgccatcatgctgtgtgtgtgtactcagctgtgtctgactctttgtgaccccatggactgtagcccgccaggattctctgtcagtgggatttttcaggcaagaatacaggagtggtttgccatgcccttctccagtggatctttcagatccaaggatagaacccaagtctcgtgcactggcaggcatattctttaccactcagccaccagggaagccaccatttgtaagaggaggaatacctaaatgcccttcccagacactcttaagagaggaggaggggtaaaatctgatgagtcagaatccaatagtactcaaagggacaagtttattaacaggttttaaatatccacttgcactgaactttaatccttagcccctgttcactctctataggagcaacagtctgagtcagggctgtccctgaggcccagtagcctccctgcttcccatcacatgccccaacctgttggtcactaataaaatttcctccaccgggggccaagcagaagtgataaaagattccaaacttgggatgtatgtttgagggcagctgggagactccttttaggccaaaactaagccaagagctccctctgttcattgctagccccctgcaccccaatcatgatgcgattctttgttttaccatctgctattggtccctatatctccctcaggctttcctgggtccctccctccaaatactactaaaactctgcctttgacttcactaaccatataatttcacc

SEQ ID NO: 36491 - DNA, 1035 bp, Bovine  19866880768031
  misc_feature (1)..(1): n is a, c, g, or t
ncccagggactccatgcctgacagaaggctttcattagtgctttttagctggttataaattgttggtactactatttgcaccttttaagatactatccacgaagggaaaaagcagaggtgtttctatagcaggggtgtctttttgagtggatgaacactaaattcggtcaccagaatgtgtgctggaaaatgaatgcatctctaatctcgaataaggaagtggttaaaaagggatgaattccctgagtcattaaacaggatataaaccaaagacaggttgtgccacctagagaaaaactgaaaagcgtacattcgttcttcagtagtaggcattatttccaaagcttgaaacttttggcatgaccaataaccaaaccaccctccatgcccactcatcactcagctggcttcagctccactgaccactctgccttctccactcaccagatcgcaactcccacctgctctccccgcccacgcacccaagcagcttcatttaacctcagcactgacggctgcacagcccttgcggacccggcatcctgaaacccttccaatcctaaagcattttcctcgaagcactgcaggccagggtgagaggagccgaggaataaagcctgtggaccatgccagccatcctcccgctggacgctaacacagccgcggcgcacacctctctagccgccgggggctagaggaaattctggtgcactcagtacatcatatccaggttaccgagctgaactccccagccgacctccgcacaatccaaacactgtgaaatgacctcaacagaaccgagccttaaaggtggtcaaaggccttcaactttcctccgccgcaagccacttaaaagcaacgtgcccagtacactggtcaggctgaagcacaaaaggtctccaggccacctggcacggagagccgctttttacgaagaaaatagacagcaattatgaaaagcccgcagtcctgcggtatgaacttgacagcggggattgcgctgaggcataactctcatttccgaggcatcactcc

SEQ ID NO: 36492 - DNA, 705 bp, Bovine  19866880769032
  misc_feature (1)..(1): n is a, c, g, or t
nataggccgtggttttaagtgtttccatgctctttggtactaagtatagattggtttgattttcaagcacacgggcaaacaatgtttcctgtgccagatatgtatttttgcacaaaatagtttgaaagctctcagcatgaacactccaattgcgactgacctctgtcaggggtggcaatggcaccaagacatggagcttgagaaatggaaatagaagagagaaattcggagcaacagggaacggcagtgaggaaatttcaggaaatacaaaacttaaagtagaggttagaaaaccaaatgccttctggagaaaggcaggtagtgtcaatgggtaaagccagcctcctgcgctcatgcgcacacatacacaataacaggaagtggtggggactgaggtgatccatcagctgggcacaggtttcctctgaaagggagcttgccggggtgcgggggttggggggaaggctctttgttgtcatataagactgggggcacagagcggtcagatcttacctgattttaagaaaagccagacatctagatatttatgtgaaatctcctgatttgtaaatattgtcttttagttcacatttccaaagggcactatgcaaaccaaacaaaacagtatctgcaagctgctttcagtctttagaccccacctcacaacttctaacactgctatttacatacaaatagttttaacta

SEQ ID NO: 36493 - DNA, 1066 bp, Bovine  19866880778350
  misc_feature (1)..(1): n is a, c, g, or t
nctgagaggcagggctgcatcacggttagtgcacaagcgcatgctggcttgcctgaatccaaatactcattcgtttgccagctgcgagaccctcctagtctacaatgagtctgctactcataagtctctgtgtccattttttccctataccatgtgaatgataataaacagtactaaattcatggcgttgttgggaggatgtcatgaactaacacatgtaaagcgtttagattggaagcaggtacccagaaggtactcaatatgtgtttgttcccttaataataataaggaaagagctccttgaaagctctggaaactccagccctgaaagctaagaatcatgtccctccatttagcaagaaaagttaggatcaaagcctaagactcttggaaccatcaataaaagtgaaggtcaaagcacaacaacttgtagcatttctgcctcttcttgattagctctggcaatgcagaaaactgacactggattaacacctgcacatgcttacataccacgtagggaagaaaaatgcattccgttcaagttgattaagaccgtgatacagccaaggtgggcaagcagctgcttcagaacacttgcctcaaagcctagcatacgcacaagtgggagatggcatttgagatcaaacagtgcagtgtcgcctccatacggatgttttcacaaagaggtgacaaagtgacaataagcctagtaatgtgaacagatccagttataacaacacaggggatattaatactctgcctcgggacagtgttagaccagtgatttctttttgtgacttatagtatctcattttcctgactttgatcctgaaatacttttttatattgttctgttggtagcattggtatgaatccaaacacatgcacacacatcagtcagggctttgtaaatcccagtaataataatcacctgccacaaaatgctaggattcatttttctataaaagccaaatcctttgcaaagcaaaggaaaaccatcaatactgacaagaatatactgccgagcccttgtgctgtaaaatctcaaacaaacaatagtttggaa

SEQ ID NO: 36494 - DNA, 1524 bp, Bovine  19866880780398
  misc_feature (1)..(1): n is a, c, g, or t
naaactgatcctccagtgtgcctgcatgtatgagcagaaaaaatgcagttaccaaatgttagctccccaacacattccaacaaattgagtcaggttagagcatgtatcggagaaggcaatggcaccccactccagcattcttgcctggaaagtcccatggatgaaggagcctggtgggctgcagtccatggggtcgctaagagtcggacaagactcagcgacttcaccttcacttttcactttcatgcattggagaaggaaatggcaacccactccagtgttcttgcctggagaatcccagggacgggggagcctggttggctgccatctatgggttcgcacagagtcggacacgactgaagcgacttagcagcaacagcagcagcagagcatgtatgagtgccttttgtgcaacatcacaatagtgcttttaagagcagagaaatggggaaagcagggcaaaagtctgcatgcttgacctgcgtattttgttaataatttaagtgaaaccacttagcacttttgctttctacaaagagcagggacctgtactcccactggtgtattagaactctcatcagccacaagggaacagagagctgtttgaaaaactgcatctctccagcctctgataattaaataaagcatatcattgaggatctataattggtagagacggctaagactagaaaatgagactattaccctctggaatcatcttatgataaatgatacatttattttagagaaataagaatcaaaacacataggaataggaaggaaagttaatgcagttctaagtattactattcagcagagttgacatcaattggaaatgaataatcatgaaatgtagaagttataagaaacaaaagctttaagagacaaaaattgtaaatggattataagaaaagaagtctcaggttttatgaagataaaacttagtcttgaatacaagggctgtacaatgaatatctgatgtacaaattcttggactgaaaagcagggcataaagaaactaaatgcaaaatagaaaataaaagaatattactttttcaggtaacagaataatattttgaaatataatcctaaatatgcatcatccctggcaattcttattacttcaaagtcctttactcagcggaggcattcactgcttcaagaagagagcaggcccaggcagtaagaagaagccattgccatcttagattttaggtagccttattttaaaacaggtcatgaaaacactgatttttgcctttgttacctaaaggaggtacttttcctggactccaaagatgtgctttaaatatcaaagctagcttgaaggacttggaataaaaatccacaatgagtctggtagattttgcccactgagatcaacaccccaggagaatggacaggaactctaaaaagactcagcatccaaaagcagaggatggtccctggtcaactgaaactcccagtagttccagggccaaatcaagaaggctgcaacggagcagaaatgccagattcaggcag

SEQ ID NO: 36495 - DNA, 1203 bp, Bovine  19866880792863
  misc_feature (1)..(1): n is a, c, g, or t
naccaccctgtggagagagaagaggaagcttttagtatttcaccctttagtgagttaatagggacattagttgtttaaccatgggcttattactcgtacaatggccatagtcctttgcctcctggagacattgtgaaatgctgaatggcccagtccttgggctagccaggtctcctgcctgctgggaagagccagcagccatgagagccacactctgcagtctctgctcactattgggtctgttttcaacagccagcaggaacacctgcacgcccggcccttctgaggtgggcgcagctgctgtgacagtgacacatggcctgtggggcaggcctggcacatacttgtcagtccctctgtggtcctcttttctacagcctttcccaccctcctgagactgttctttcttctggatttatttcagtgacccttgggggttgaggcagtttattttgccccgcttcctggatctagcatttattgtctgcaaatactgttatttgcaaagaggactagatcctggtttttagattctcagtaactggcgaatctgctgtgaccagtgctcaagctagcgtccatgctgctttctatgaaagggttaacctcaaggcagcgtgttgtgtcagccccgctggtcttccgccagcttccctctgatgggctgcgggctaccatattaggaatgtgtgaagattcagctccccggtgtacacagcaggagctctcctgtcagtctgaaaggcaggcgctatatttagcatcaggccccagggaatagcagctccacgtgggagggggctgcgggaatgcagttgtgcattgaatctcaactccaatccccacggaggaggctgaagccctgggaaaaagctgggctcttcctccctccacctcctccagtgtctgcatggcatcttttccaggtcagggaagaagtccctttcatctctgctgtttcttttaacatggaggaaaggaaccatgattgttggatgaaccatcactcaaaatgttgtaaacagcaatttgtctccctccagccctcttctcccatatcgagttaactaaccactaatatgatgcgtggaataattttattgccttatgatctctctctactgaggaaataagagaaattgcctccctttggtttttgcagaaaatgtatactttggtactaaaaaggttttatttcacatg

SEQ ID NO: 36496 - DNA, 726 bp, Bovine  19866880804274
  misc_feature (1)..(1): n is a, c, g, or t
naataccctgtagttggtattggagccatataccagttttacaaaattctaaaaagagaggtccccaaattccatggtacttagtggaattaagggagaaattattggatgcagtgttcaaaaagccacggaacttccccttatagattttttacctagttttctcagatttctaatttctggaattgtgttctttcccctcatcccacttatgaccctttattttaaaaaagagtgtactcgtggctcctcttatgttttctaaacctgagatagtcttccccaatgcaaaaagggcaatcacaccaactatttttacttagagatttaaatagtgctcacagattttaacatctctcctacaacattgaaatagacacccactccctatttctctcctgtatttcactgtcaatctttctcagcaagcatgccctggttttcctttcttcatcgttttattcattgcttaattacctgccagagtgatcctcttcattatccctctgaagagtccacggacatgaggacctcccagtcacgcagtattcattctttttccctgatgcaatcgctgacgctgatggtcacgtcttcacagtatttcagctttccttctgcctcaggtcatctctgtgacattacaaggctgtcatttagctcttggactgctgcttctctctccctctcttcctccagtccttaatttttgcaaatggtaaggtt

SEQ ID NO: 36497 - DNA, 1709 bp, Bovine  19866880826840
  misc_feature (1)..(1): n is a, c, g, or t
nggggctgtctagtggctttttgctttcttcttaattctcagttttccggaagttgaggccaaataactgagcagtagatagatagatggaataattaagaatttggtcagtaaattactgagaagttattagaatatataaggcttccccaatggcctggtggtaaagaatctgcctgcaaagtcggagatgccggagatgtgggttccatccctgggtcaggaagatttcctggaggaggaagtgtcaatccattccagttttcttgccagggaaattgcatggacagaagagcctggccatctacaatctatagaattgcaaagagttggacacaactgagcatccatgcatgctttttggactacatcccctaatcgtattgtttttgatgttttattacacacataatatattttcatctttaaaaatatagaaaagataagctatttgaagataataaaaagcatttgtaatcccattgctctgactcaaaaccaagaataattttttgacatccttctgcaacaaaaatgcctgtttttatatatgcttttgtgtttggaaatgtgaagtctactctgtctttgaaaaccagaaaaagcaatatttattctgtgccgcacctgatattttctttgcccagcaaatgttaccccaaattacatgatgtggtaatttataatgttacctgactaatgctttagctacctggtttaccttctatgaaatgtagattgaaaaataataggttttctcacaaaggtgaaaatgtttctcttagacataaattagtttctatttacaaagctgctatatttattcagcatatctcaaaggaaaattgttttccaaaatgattgttatgagacacacatttcttcatcattccgtcagagtcctgtaatggatttgatgcagatttcttttagagaggcttatcttttggtcctaatatatagggacatgctgggaattgcatgtctgcaaatatcggggtcttggggaagggacatgagaagagactagtatagccagaccaggcagtgcagttgtgataagaatactctcacagctccttctggctcctggttctccttcttcccctttgcctgaccatctctgagtctcagcttcctctctgcaaaatgaggataatgccgttcatacataaatggttgttcaggatttagatagatcgtgtcatattaagttcttgtcccaaagtaggacatagtttcagttcaggttttggttcagataaggaggtgaaagcaaggaaatgaaaatgactgttctgcaaaaaggctgaggatatggggggttaggtagtttctgaagtcccgaggccacagttgagggcacaggaggatgggggttgtgtggtcattggcagggagagagtgcctgttggagtcgctggggagatgatagccgtggtggtctgcatcattagtggctccagtgaaccctgcctccccgtgtcctgcccttacatatcctccttctcttgaatttctttttaaagagttttgttgttgttactgtttagccatgccatgtggcacatgggatcttagttccctgaacagggatcaaacccgtgcctcctgcattggaagctttgactcttaactactggaccaccagggaagcaccctcttcccttgattttgatctgagtctgtgacttgctttaaccagtaaa

SEQ ID NO: 36498 - DNA, 1527 bp, Bovine  19866880842375
  misc_feature (1)..(1): n is a, c, g, or t
natctatgatctttacaaccgaaaaggagattttcctcaactccttcaaaacatcatccatccccacttcaaaggttaatatctacggcctcacttgaagaattcaactgaaaaccattgcaaaaataataacaacaatcagggactgcttccagttaagagggtaagggatactataaagaagacatagtctcaaaatacataaatgacttcgtaaaggacttgaatgaacaaaagtaccaagtttataaatggtaaaaggacaggcatatagttgactgataattcggccaagagataatatgcttaaatgagtcttggcaagaatcacttaaagtgctttggctggtaggtactgagtgttctttattagaaatgactatagattaaagagatatgagacaagtgagtaatacaaagcagaagaaatccttaaatcaaaattgacattttaataactatgctttaagtaaatctcccctctgaagtcttctaatgtttaacagctgcaagtaaatatgacaccaggtgaagctaatcaaaaagtttaataacgcaggaaacaaaagagcagaaaggaaactgaaacaacccattttcagtacctctaggatttcaacttctctccctcttctgtcctctcacccacccagcagcctcctcgccaagaattactgagcaagcccgagtgcattcaaaccttagctgtcatattgcatctctctgtgcttggtgagtaatttaaccttctaagcctcagtgttcatgtctgtaaaatgggattaaatcacctgatagggttgttccaagaattaattgagtaaatatatctaaaggcagagtaaacacttaataaaatttcagttattgctattattactattttgctaaagaagaagaagaaactagaggaaaggcaatagagaagaaaatgcaggtggacagagaaaagaatagaaaggaagggtgcctggaggcaactcaatttgccatccaaataggaccaatattcaggcagtgtgctcaggcaggttgactaactggccttgggtttagatcaatcagtaccaatgccccaactagtctaaaaattttgaataccatccctgccttggcttgtgcattattcaaccacaaagaatctttaaaatggcaaatctttaaaattctttaagaaatcaatactgcaacacatattatagactgggaaattgttaatactttatcccactcctgggaatttattcaaatacaaaagaataagctttagacccactgatatttatggagtttttattaatgaagacaaaacatcacaagcaatgtcaaaatccatcaatgaataaatacattgtcattctttatttcaatggaaattatgcactattaaaattataattatgaataacagaagcccatagaaatgtgaagtgcttatggtataaaacgcagccaaaaaaggtagcatagaaaactgtgaatacattctgatataatctgcaaattatataaggatagaaacaacag

SEQ ID NO: 36499 - DNA, 1468 bp, Bovine  19866880853311
  misc_feature (1)..(1): n is a, c, g, or t
naacgtgagacagatcaaagagttcagaacacagcttggcaggaggcagccagagactgatacacagggtgtggtgggcagacaaaaagccagggatgatcagaagcaaggctaaccaaagaagaaggaaaagtccaggaaaatctcagtcactgaaatcagagagggagaggacttcaagggggcacacctgcccatagagattttcgagggaggcagggcactgaaaggattcatgtcaactggtccttagcaggttagctgtcatgggtgacctgtgttagaacggtttcagcgtagtcatagacaggcacaagacactgtattaaaacaagttgaggaggaatttgatctgaagaaacagtgctctgttttgaaaactctctcccagagagttttcctaagaggcaaaggcatgagataagagggcactgaataaacagtggaagaggcattttttctggaggacactcttcctggaccaaagggaaggagtgagccaagaaaaggtctgattgaaagaggtctgcacttctgcaggggtcctcggatgaatggtgaagacagtaactttcagccacgaagatacctttattgcatgtctaagagaggtcgacaaggactctcctggtggtccagtggctaagactccatgctcccaatgcagggggctggggtcaatccctggtcagagaaatagatcccatgtgttgcactgcacaaccaaaaaagagaagaaaaaaaaaaaaagaaagagagaagtagatgcaagatatctgcctggacactagcccctccaaaatctgctctgaaaacaaaccccagatttaagaggacgcaagggaagtctgtagcacctgcacgactgcctctgcccctcaatggagctgataactttaaacgtcattcatcacaggtgctaacttagagcccagcaccaaacatccttcttcctttttagcacattccttgatatttttggtatttccctttcttttaattgtctgctaatactgtccatgggtttctattaaaaaatactttttgctaacttaatgtttttagtccgctttccttcatttcctctcttagtccatgttcgtcttcctttctctattttattactttgcctgtcggtacatgctgatgccttagcttctgcttcttccctcacctccacctcaactgacctctctcaaaccagccaccgcacctcacaccagctgccacacccttccggtgtcctccatgaagctggagaggaggtgacctgctgggggacagagagatgacggggtgcacgtagcttgctgtgaatgctaaatccaggttggttcaacaaatcgggcattcacctgctcagtactgataaggattttgaaaactgttccatatgcaaaactggtctcaacctaaaatgtgtttacagaacagctcaacaggggatgtttcaccatcagctcacatg

SEQ ID NO: 36500 - DNA, 1334 bp, Bovine  19866880887043
  misc_feature (1)..(1): n is a, c, g, or t
nttttacagatgaggcttatagaggctgagattccagggttttacatagtgatacgtgacagaatcagcagtgagaatcaaggctcaccacacttcattggctccatggcattagaatataaatgaccagttacaagtagcattgaatctaagacctgtttgtcctttttcctttttatctcagcattctgctggtgtggtggcctctggtactttatgctccagataatattcctgcttagatccgctgtggctgtggtttcctccacagtggttactcaggaatcaaccttttctctcaggtcaaactcagtatttgaaaactttaatttccttcaagttgacattttaccgtttcatagtctcaagcctcctgcagtttataaaggagcgatttaagacatctactccccacagctcagagaacaattcatttcaatcttgggacattgcccagaattcaagaaaactagatgatcctttcagactggcttttcatttcccttattgtcaaaatctctgtgtacagacacgaactactaggtaagcggtggggaaaaacagtgttctagataagagcctttacttggtgttttgtgttgggaaaacaaaaagtccagataactgatgagtttatttattcatctggatattggggatcatgtatacattggaaaatatattctataaggatttattaccatttaaagaatggtagtatgaacccacccaatttaatcttaatacaatctgttcaatggatctaaaatcaaaccagtgagtctaggaaaaagaaaagttctaattgtttgttccaaggaatgacttaaaaaaataaatgttagggaaggttctataatggtcttttggtaaccaaaaaacattcatagagcagagagaacaaatacagtagaaatgtcaccagtgacttagcttgaaaagaacaaaattatagcattctcctggggactcattcttgataggatggttattgatcaaaaacagtcttgaaaaagtgataaagagactctgaggttgaacatttattttccctgttccttaaagtctgcatatttactattggtcactttttaaaaattcagccaaaatttagagttctcagcagctaacctcgtaagacatttaaaattaaattcaataacaaaattctattactatattaaacatcattcaggtgattcttttaaaaaataagtataaaaacccattgccccaagtcaataacaactctatagattgttctaatgaaaagtaaggctatttataagtgtcagagttaaacattatttgcaaattaatattttttaacatgt

SEQ ID NO: 36501 - DNA, 1232 bp, Bovine  19866880923950
  misc_feature (1)..(1): n is a, c, g, or t
nctttcattcatctgtgctgctgacttgtattctttaaagcagggaataccacagtcaagattcctcagtgaaaaaagttttcactaagatgaccattgaaattctctcaaggccttcattattttggtccttgtctgtcttactaggggtaccctaaaatgccagctgcatgtgattttagtgtgtatttgtactcagctgagcacccaggatacaacagtttctttacaaagtcagccacatgctataattctaaagcactgagctgtatttcgctatctgcaattattggacattaagggcaacctggccttccagttggtatcacgccagcctcaagagcctccaacagccttctcaagccgatgttggcagaatgccactaatacagtgcctgagagaacacccagcgctctcattctcacctagaagagaacagctcctaaagagcaaacttattttttaaaagctttgttgaagaaaactggagaagtgaaagaagcagcactggaggagacagtacaactttgcaatcggacaatcagccactgccctgttctcagcaaagtttcttaatcctctgagtctccagggtcctcttacttcatctggagctggaaagaatgcttatttaacagagtgctgcgggcattaagtgtgagagtggatataaagcacccagtcgggcacataattattgttctgtaaatatttgctattacgatcactgtattcctacttcaagattcgaggtcatcaacaatttatgaaatgatctaaaactagtcatatgtcatagataggatgatttttcagtgaaaatgaatttgattctcactctcctcccccaaaccaccatgacttttaaaatctgttcaccacagatttcaagaaatagtgcaacacagaaaaataaagcacaggctttggtgttagatcaagattagaactgcaaaaccataaatgttgccccctttcctgtttctaggggtacccaggtttttatttaggtatcaatctctcctctccacagcccatagtctggagggcaggctgactcagacaatggacttaaagcgcctatggaagatcccatccccctttctagagtacttggttcaagaaatcagccctcagccaataggctcatttagctggtaaagaatccgctgcaatgcaggaaaacccggttggattcctgggtcaggaggatccgctggtgaagttgtag

SEQ ID NO: 36502 - DNA, 962 bp, Bovine  19866880961251
  misc_feature (1)..(1): n is a, c, g, or t
naagggtgccctgttacaatgggtggccagcaaaggcttctctgttaagaggatatttgatactggagcagatactagaggcaagttagggagccaagcacctatttaagaagagagtaatgaggatgagaatttcaaatgcaaaagtatgaggctgctgggcatgcttgaggaacacccaggagagcagtgtgactggagtgagcatggtgtcagagtggtgggtggtgggaaatgaggttagggttatgggaggggccatcacacacctaccacactcacagaaagcacctcaagtggcagtgtctacaggatagctctgggctgacttccaagaagaagccattctagactctcgagctctcagtagagatccacacactctgactacagactcgaatcacccagccctgctattctcaaccagaaagacatgtcaggcccttggaaatcgggaagccagaagacatttatgattaacttacacatctgctagataatctcttccattattgtttttatcaagcagcatagactaaacagttgaaatgatcaacttgcttaattgcaacttgaagccatgttccctacggtgaaatgaattatctctgtcctgagttatgtgtttgagatttacatgcgatactgctatcatgattttggcttaaaattactctgattcccctctttctgggttcctgttaaaagttcaacttgctagcactcagtaatcagcacacactggggaaaatagctttgtggattctgcaaataaaatcttttcttaattctattcaactattgtcagatgtcctatgaaagcttgtgatgagaactcaagtctagtcaaaatcaatagtcataatatgctttttccccccaaagagtaagggattaggaggggaacctttaaaaagagatttttgttttaccagacttaagttgtgttttactaagaagca

SEQ ID NO: 36503 - DNA, 2133 bp, Bovine  19866881081115
  misc_feature (1)..(1): n is a, c, g, or t
ntaatgtggggaaggcatgtgagtcagacatgtagggccaaattaagccactcaggaatcaggcagggaacatatccataggggaatccttcacacccatgggcaaatgtctcagaatgtatcgatgaagtattaatcaagcttgatgctgcaagggaaggatacatttgagttctactctgattgacctgcagatttttattgcaggtttaggagtatccttcgtagtaaagaatctgcctgcaatgcaggaggccctgattcaattcttgggtcggaaagatccattggagaagggataggctacccactccaatattcttgggctttccttgtggatcagttggtaaagaatctacctgtaatgcaggagacctgggtttgatccgtgggttgggaagatcccctggagaaggaaaaggctacccactccagtattctggcctggagaattccatggactgaatagtcagtccatggggttgtgaagagtcagacacaactgagtgactttctcttcttcctttcactcacccatgatcctctcattaaaatattaatataattctttttttttttagcccatggtggctctagtggtaacgaaccttctggccaatgcaggagacataagagacacagcttccatccttggattgggaagatcccctagagaaggacatgacaacctactccggtattcttgcctggaaaatctcatggacagaggagtctggcgggctacagtctacagagtctcaaagaatcagacacaacagaagcaatttggcactcatgatcatttttaaaagtactttgaaccaaggcaaaacaagggacctaggatcaagcagctaaggaaggctttccgtcttctgcttccccagcctgatggatgagcttttgcctttctgccatccctggtcctttactttgttttgcttttgacagctatggacctcgggagaagccaaacaggtttagaaaccagtttggtcccagcagacctgcccagtgggaactcacctgtatacacacaaatctggggcagtgcctgcctgggcactaggaagtcagcccaggttcccagggagccctgagacatccagtctaaacagatacatcaatctgctcactgagaagagaaagctggctctcccaatataataacaggctggctgatttattattctgaactttggttcatggcagggggtagtgttatttgtgccagtttatggtttggggccaaaagatgaaataccaagctcgtctgattggtttcaagaatccatttgcaccaacagagcttctgcatgtgccaatgtgtgttcggggattatgacacgtggcttagtctctttggcaaagcccttccgagaaggaaattacaagtcttcatatattcagaaccatttaatagctggcaagctactgccaaccacctatgctattgccaaatttcctgaaatatcttcaagggttcatccttgtcaggttagttttagagctaaataaacacaccacagacaacacatgctacattctctccaaaagaaaaaatgattatttatctctagccttggtccttggcagtataaaccccagatgggaaaagaacactctatataaaacattgtggacatccatgtgtaaccatggtctggggaacagtccgggaaatgacagagaccaaggttagaagtataactccaccgtatgacagcttcatgtccttcagaaagtttcataaccctggcaaacctcaatgacttcatctgtggaacgggagttaaatgttgttagagcgagtggttctagataagtcacctcacacaagtgagggaggcactcaggaaacacctacttctcaaaatggcagggtctgatgaggaggcctcttgatgtagaattcgctatgaaacatttttacatttgtgtttacctttcaatcataacttgaaactaatacagccatgttctaggttagctgaaagacccatctggattcgattgtaggcctcaacttggaatctgcatttatagatatccatacattggcaacaagtggtattacttgaattgccatgagctagggaggagagaggaaataagatcgatacaaggaaacat

SEQ ID NO: 36504 - DNA, 1655 bp, Bovine  19866881094277
  misc_feature (1)..(1): n is a, c, g, or t
nttcttggagatagcaataataaataaactaattttggaacaagaaatgttattataagcaatttaagaaataatgacatgaggacactttataaaaataaatggaatgctgcaaaagctatttgcaaagaattattagtaactaattgaatttaatactggaaaatgcatatgaccaaataagctttttccaagcatgatttaatgttaggaaatttactaatataaagcatccataccaaaaggttaaagaagaaaaataatctccaaagatgttgcacagaaatctttcactttaattttaaaaaaaggaaagaaaaacccttagccaatgaggataaggaaagtgattctttaaaattataatgaaaaattgatctcaaaacaactattaattccagtatcatgcttaatgactaaacactgagattccttatttagaagtaataaagagacaaagacttcctttatcagcactcctatttatcatttccccacaaattttggccaatgtaagacaataaaaagcatgaaaatttaactgtcattatttgaagaatcggttacctagaaaactcaagagaatccactgaaaagattttagaagcagtaaaaaagtttagcaatgcaactataaataaacaaaaattagatttttgtataccagcaaagaggagagtgaaaaagttggcttaaaactcaacattcagaaaactaagattatggcatccggtcccatcacttcatggcaaataaatagggaaaaaaatggaaacagtgacagactttattttcttgtgctccaaaatcactgcagatggtgactacagccatgaaattaaaatatgcttgttccttggaagaaaagctatgaccaaccttagatagcatattaaaaagcagagacattactttggcaacaaaggtccatctagtcaaagctatggttttgccagcagtcatgtatggatgtgagagttggactgtaaagaaagttgagtgtcaaagaattgatacctttgaactgtggtgttggagaagacttttgagagtcccttggactgcaaggagatccaagcagtcaatcctaaaggaaatcagtcctgaatattcattggaaggactgatgctgaagctgaagctccaatactttggccacctgatgagaagaactgactcattggaaaagaccctgatgctgggaaagattgaaggcgggtggagaaggggacaacagaaagtgagatggctgtatggcatcaccgacttgatgggcatgagtttgagtaagctctcagagttggtgatggacagggaagcctggcgtgctgcggtccatggggtctcaaagagtcagacacgcctgagcaactgaactgaactgataccagggaaccccaatttggggcagatgaaggcaaattgccagagggcacacaaggagacttctgtaacatttattgaggaaacattatagagactgaagcagtagcatggtctgtgaatttaatattgcccttcacattccaaaaaagcacatggaggtctaataggaccaagtgtcagataccaggagagggctcctggctcagggatagatacatgacttataaatgcttaacggagaaacaccagtctctcatcaagcagatcaa

SEQ ID NO: 36505 - DNA, 1054 bp, Bovine  19866881140884
  misc_feature (1)..(1): n is a, c, g, or t
nttagcagctagattttgagtcttttacatgtaaggaaatgataaatatttaactatttttgcttgaaatgtggctcattttctttatgtctgcttttgctttatatgaagaacaccataattcctctttgtcacaatgctataaagttccatttattcggaatccaagagcttaaataatcacattttctttctactgcaggtgtatagggagaatcagtgttcaaaataatgcccttcaggcactgcaagaattagctcctaaatctccaaaggaagattacattatgttgtttatagcatcagtgttagaatattttattctcattcatagaacattggtacagtactcaattttgtgctcatagcacccaaaccatcccagtttacatacttgctataaatgctgtgggattttcatgcctctggaaataggtataacgtttatttagtgtgtttatgtctttggattcatatttttgtgaaatttagaaggagaataggggcaggaggtggtcaggagacaacttggaaaccttgtggagagtagttaaagcttcgggacttgaagtgctatgtagaaagggtcttagaagcattggattggaacgttagtaatttggagttacaagaagggaggattttagaggccagtgatttatgaaaagtggcttcccaggtggtgctgccttccaatgcaggttagatgtaaggttaagagacgaaggtttgattcctgggtcgagaagatcccctggagaagggaatggcaattcattccagtatccttgcctggagaatcccatgacgaagaagcctggcaggctactgtccatagcattacacagagttgaacatgactgaagcgacttagcatggcacagatttatgaaagaactttaattacgatgccacatatgagagtgctgtgaaggtacaaaagtgcaaccatctttagcctctgttattatgattgttggagagggcgatggcaccccactccagtactcttgcctggaaaatcccatgggcggaggagcctggtaggcctgca

SEQ ID NO: 36506 - DNA, 921 bp, Bovine  19866881217680
  misc_feature (1)..(1): n is a, c, g, or t
ntgtgggaccaatgatttattaatagcgaagttgaaatacagccgttagatattcaacggtgatataaatgctgtgccagaacaatttcttctacctaaaatgatacttaatgataataagtatactttaatcaatattaactacatcagcgaaaacactggaatttgtcaaactgattttttttttaactctctagggtatattcagccagagcccatgtcaatctggattccagtttaacagcactaatgggagatcttggcctcaatttcagcagtttcatgaaagagaaaatactttcacagaacagtacacattcagatcccatccaaataggctttaaatagacagaaatttcatggtagtagtgagatgcttttagccatattcaaattcccaagaatattgtgggtatgttttcttaatagtgttgacagcactcagctgaatcttgaatcccatccacactaagggttgtggtctgctaatgcagatatccaggaccaatgacagagatgtaaggcaggattcatgttcagcaaaacctgaacatgaatttagaaggtaaatcccttctaaaactgaatttggtcagtgtgctgcacaattcttagagaagcaataattctattgatttcaagataattcagtaacagaaactgaataagcaagatgcttttggaaactgcatccctcactgaaagtttaaaacctgactgctagaatactaattttaagggatttttttaaagaaaaattccttgttttggtttgactttttaatgcaatttcaatttcagtgtgtttggatatatgtcaattcagggagaaagttgagatcaaacaggcagttggctctttcagagacattaccaacacggcccaattaaacagcttggtaagtctattcaatgaatgtt

SEQ ID NO: 36507 - DNA, 1635 bp, Bovine  19866881237970
  misc_feature (1)..(1): n is a, c, g, or t
natcaaaaggcattaatcttcacccttctcttttctccagcaaaccagaaactgtatctccttttgatgcaatgtagcaaataagacactaaaatagcaacagctacttttcatgcacaaagaaacaccactattatttctaccttaataattctgcatcttaaaaagccctccaatccatcctctttgaaaatctccattcctgccctaggctctcaacttacatctcctgagaacactttgcattggttttctttcctctactctgacccctctcagcacattctgctaaagacagccggggacagtccatctgctcagggcattttcctccttaaaatcccatggttgcttgcacataggataaaaaccaaaatctttgacagcacctacaaggcttggcatggcctagggcccagttagctccccagcttcatgtcacaccaggttctctcattcttgtggttcttgcaagtttcagctgcaaggaccttcctttaatcgctcacacatgccttgcccttagctcagtgcttctgtccatgccctccttcctctgttcactagtgaagccattcttgatccatacaacgcaacctccccactttatcctcactacacaacaccactgtactttttctttacagcttttcttacacttacgactatgtatttattcatgtatttgcttgtctaatagcttatttcccagtctaaacacctaaagataggaactgtctgttttgttcaccaacatatatcattagtgcctaatacctgacatgtagtaggcattcaataaatatttgacagatgaatgccatctacaatagatattaataagatggatatctgggggtggtggtttttgtgttcttttttaaaatgtaaggctactcaagccaaaaattcaaataaattgaactctagataaaaggtaaattaggttaggtatccctcttcagaaaaaaggataaaagtatcagcccaaacttacccatgcaccttttcctgaaaatctttataaactgcttgtacgctaatcgtatttccccctaaacaacagaaaactattcaataagctcttaaatgacgcaagcctgttcatgggtttttgttttgtaaataacacacttcgtttctataagggaagaaatagtttagatacttaaaactcctcaaacttaggaggggaaataatttggaggaaaaagcaaggaaagacacaatatttctgtttgtaaaattggtttatttacaatttggtatttttaaattatatttggaattttaatttttatatatttctttggcaggcattctgtttcttaaatagggaggcaaaggagaggaggaaacctgagtaagtttgaattttagagatttacctgctgctagtcagtcaaatttaacttttaatccctgagatttagtgaagaatcaaaaatatcttcatacattcatatgtaaaagcatatgttaagaacaataaagaataaagccattataattaatctccccccatatggcaatatgagaagtctctctttcttaaattaactaaagggtgcgctgacagtgcatttagctattagatataccaagagactaagctaccctaggcctcagtttcat

SEQ ID NO: 36508 - DNA, 1843 bp, Bovine  19866881300013
  misc_feature (1)..(1): n is a, c, g, or t
ncatattgtgattcataacttttacctttgctatagcaataatcttttgatattctaagaaaggtttatagtaagactctggataagatttttttttttgtatattattgttactggaaatacataaatgaagacatgtaaccaactcacatttgaagaacataaacactttaaaaagacaaaaggtatgggaaaatataaaaatagaaacatggttgctagaaattgcctgccccataaatagtcaagttttagtcaccatgactgacagacgtcctgcttttgtgggacttttattttgaaaatagatggaaaagttaaaacagtgttacgtggttgccagaattttggctttgtagtaaaaatagatcaactttacttctgaattgtcggaggttcattatttgaccttggttacgttttatgtaaatctatttaatatttaaggccaagatttcatgtttataaaatgagaataccaatgaatctcattataaacttcccagagattgtctatcttaggtgctgcgataaataacaatcacaaaaactgggaaagttctatagccagtgttccccacaaatggtgttcactaattacttaaaaagttgacttgtaaagtattagttatataaaatgtaaaaagtgcattgactaggaatgtagcaaatagtaagggtgcttctgatctttgcttttgggaaattattatacttcttaaattattgacattaaaaacatgatatggagaaaaagggagaggaagtcacagcatttaaacttttgagttaaagatattagagaggtagaaactattgaatgatgagatctcttagaaactactcataaatgcctgtctaccaagctagctatattctgcgtaagagcagataacaggggtctgggtgatgtttcctttccagcagtctttttacaacactttctacttatttgaatattgaaaattgctgacataattacgagtgtccatttgatccaaaatatgctggtgaaaagactactaaaaatatctatttaaaagtgcttctgtttagagacggttctttaattgaaatgttcagtttttagaaggcaatgtttgaaatctctgggtttggtgattggtgtaagcagagactccagttctcccccaaattcctagcagaatgactagaagggtataaaataggaaaatctgcattcacaagaggaagcagaaacgaggaaggatatagtccctgtggcagaaagtgagggaatttgtgttagcatttccttgatgggtctggattgaagggtaccccagagcgtttttctctcactggatccagaaaataggcaagtgactgagggaggcagcatttggcggtgagggcagggtgaaggctggctggcgagcatgtgaacgcagcatcttgagactgaagttgcctctgtgtggcttcccgcattacccttcttccgattgcttctactcactggactccagggtcctttgaagagggaggtgtgtcaggtgatcgctttgcttagttgcctccagggatttgcttgtattttaggatcaaggcagacatccagagcagggacctctcctgcctcgggtccactgtgccttccatgctgcagccactctgacctcatgggcacctctggctctggctctttgcactggcttggaactagttcaaccacctggacatcgtcttgcccctctttcctaggtaattcttaatcatccttcaggccgtggctccatccttatttccttaggggtgtccgagatctgtgctgtcatagcgtcctgtgattagaattgtacagtcattttcagattattta

SEQ ID NO: 36509 - DNA, 1347 bp, Bovine  19866881337132
  misc_feature (1)..(1): n is a, c, g, or t
ncccgtctgtaacaggatgaagccttcctgtaagggccatcatgaaggccatcatgaaggccgtgtcctgatgttttaattccctgaggtaaaaaaggagtcccctgcccagtgtgggggtctggggagaccaaactccacactgagaggagacagctgcagaagccagtctgagactccacagaattcccaggccataaggaattagcctcacgttacaactcacagttgtacttccattaagtaaaagacagagaggaagatggccatgctggctgtgggccagtccagaccactctgtttggaggcagcactcgcacatgacacttcacaccagctgagagctttgcccaggatcaccaacaccagacagatgctggcatggcaccagggccaaggagagggatgcctggacaccctggtcgagcctgaagagtggactccttagaaagggagcatgagcctgaaacacacacaacttccccaattcggggatatacattttgatgtctcaagcacaccccaccggtgaggctgtctttactcagctctctgggaaggagaacattctgcagagaagtgatggaggcagaggggcagcggccacctgatcatctgatgaatctggaaagaacctgagctctcttcacagaactctgcttcctgaattcagcttccgagtcaaagccaacaagtcctcatctcctgccctgctggaaggggcaggaacatgtgcaggatggtgctgagagcagtggctatatagacagaggacctccatccttggcgctcccctccatgatggaatctcatgtgaaagagcaaatatccaagtctcaggggttctggtctacccaaaactcttggcactgcttcagctctctatctctagcatgccgcagtccatggggtagcaaagagctggacatgacttagtgaccaaataacgacagcaacctggctttttgctctacaactaactctaacacaactgaatttcaggctagttttaataattccgagccctgagttttaaattttatggagcatttacataggtcataataaattctgatacaaccaaaatatagaatgtcctgacctttctcaacattgtaagctgttattgataatattgattcataattttaagttaaatttaaaatatctttatttttaattcaaacccagttttcaaacacaaaatataaaaacaatgcctaaacttaagggactctaaaacatttcaaaacacaaatgaattacatgaaataaatctatgtgtaagtatggaacataattaaagtttacttagaatcacagtagtgggatccttcactataggaa

SEQ ID NO: 36510 - DNA, 1286 bp, Bovine  19866881386184
  misc_feature (1)..(1): n is a, c, g, or t
ncaacttcactttcacttttcactttcatgcattggagaaggaaacggcaacccactccagtgttcttgcctggagaatccgagggacaagggagcctggtaggctgccatctctggggtcacacagagtcggacacgactgacggcgacttagcagcagcagtgttagctggaatctcaggagaactttgggaaagagaacagtattgaattaaaacttccttgtgtccttttagtccattgaatgtagcagcagaaaagaaggaagtattagtcactatggatagagaaaaggcagcctgggctgtatatcactgagatactgggatcctccaggtgtgggctcccatggggccgagatacaacccatgggtcacaggagccctccaagttcagaggtcaggccaaccagcgttagcaaggcaagtcagtgaggcacagacaatagggaacatttagttgcatttgctgttgggtaggcttccctggtggctcagatgttaaaggatctgccctcaatgtgagagacccacattggtctaccattgggtagctggtgcgaagagagtttttatggaggttttaaaggaactgattaaaggaggaaaaaaaaataaaaaagatgatcacaacttttcacacacttgctctctaaggagataccatcaaagagacaaggagcctcgtctgcaataattagaggcatggtgttgtctacacataaatattttacattttggtgtgtgtaacaagtttgtcataaataccaagattgaaggaatcctgacaccaaggcgatctcaaaagacagcgtaaatggttctgacaagaagactgattccaaagccttttgaaaaccacatgaaatgaagaagaaagaagcccatccaaagcatcgttttacaaactgtcacatgtgattagagaaattgcactttatatggcaaaataaggtaagtgagaaacatggacataaaatccaacctaggtacgagttatacattgtttcactagagggaaaatgtctaagaaagcttctatttccccatggctttctctctggaaaggaaaatctaagaattatgacaaacactaactttttcagttattcctgatacacaactgaacttgattcaagataccgaatcttatcttcaaagctttgaataaattagatctgggctgtctctccagcaaagaatgataatgggatcatgaaagttttagtgattatcagcttctgtgttacagttttacaagccccgaaaattgtaattttgagtcag

SEQ ID NO: 36511 - DNA, 1451 bp, Bovine  19866881538965
  misc_feature (1)..(1): n is a, c, g, or t
ntccaggcttgtgtttcatccagcccagcatttcacatgatgtactctgcaaataagttaaataagcagagtgaccatatacagccttgacatactcctttcccaattttgaaccagtccattgttccatgtctgattctgactgttgcttcttgacttgcatacaggtttcagaagaggcaggtaaggtggtctggtattcccatctctttaagagttttccacagtttattgcgatccacacagtcaaaggctttagtgtagtcaatgaagcatatacttcaatttttaaaaaagaaagaaagacaaggaaaaggagaagtactcggtaacatgacactacttccctccttcatgatcttgctttctgccagcacacactcttctccacctgaaggcagagctgccttattcttggaagctgaattagccatgtgggctaacagaccagaaccaggagcaagccagggtcaggtttctgctctccactctacattaacttgctccaaattattaagccaaaagccattatcacaacatcataaactgtatttctaattaagatgatatatgcctctttcagaattacacattccaattagcagggaatagttattcctattgtgtactgatgcactgaagttatcatggaaaaaataaaaaatgacttcagttacataaaagtattagtcttttgccaggcttgttctgaaatatgggttctttggactccacttaatggaactatagcttcattaagtatatttgcttgtaaaaacatatttttcaatattttaacaaaatgtctctcagtgtttttaaatagtagcatgtatatatatcagctatgagttctgcaatctctcatacctcgtgtccatgttatttgcatctaaacaattcacttgaccttattacagaagataattttactctagggagatgctagataattttactcatgtgagccctggcatcatatttcctcatcatgtaattattcaatgtttttttaaaaccccatacgttctctagtccaatgatccctgaaaaaagtaatttgtaattatgtgttatgatgttagctagttttattgtgatgatcatttcataatatatacatgtattgaagcatcatgttgtacacctgaaacaaatgagaaatgtcgatcatatcaattaaaaagaaaatactgacaataacatatatatgcaaggacatggagcaactggaattctcgtacactgctggtgggagtgaaaattggaataagcactatggaaaaacatttgatagaatatttaataaaaatagacatatatgtgtgctatgacaaaaaaaaaagatgattttattatgccacaatatttcagttcagtcgctcagtcgtgtccgactctcttctaccccatggattgcagcaggccaggcctccctggccatcaccaat

SEQ ID NO: 36512 - DNA, 753 bp, Bovine  19866881548792
  misc_feature (1)..(1): n is a, c, g, or t
ntggagaaaggagttgacagttgggtctggaatacagtggaaaagtctaaactagttacatttgcaaatttaataaacactttcaaatgcttgctaattaccagtcactgcctacatgctttataaatattgttttctcttcctagcaaccctctgagggaagtacaactgttaaatccattttacctgtgagacaactgagacccagaattattagagtctcccagctaggtcctgagccagaattcaaacccaatctggctccagagtccacactcttaaccactaggctaccagatggagcccagcaacaaagtaggtgtgggtgagactgcagagtaataagaagggagaacagagccctgcggaattctaactattaaagatggggaggggaaggatgaattggcacagaccgatcacttccacagatccgtgaggcccgtttgtcccggcaggtttgtccagtgggacctcactctctgaggttaacagagcccaccagggactcagatgattctcacctccatgaatctggacaggctccccaccatctaccaagtctgacgtttatcctgctcgagaaaccaggactcagcaaccataccgctttctaaactctgcacaattggtgttcctccaaggctgactcttttgccaacaacttgacttgtattatttttagtgaagtaccatgtagcaagctgttccttaaaatatttccagtctggaatgctgtcaagacagaaatca

SEQ ID NO: 36513 - DNA, 1582 bp, Bovine  19866881577030
  misc_feature (1)..(1): n is a, c, g, or t
nccctgctgttgctttgactccattttgaaagttttactgtgggtagaatgctataaaacagtgtagatgctacagagaaataactatttgtgaaaggaagaatccatcgatgtaagtgtcactgctgtcttaggttaagaaattgccactgccacccaaccttcagcaaccactcgccctgatcagtcagcaaccatcagcatggaggcaagacaccggcaaaaagattacccttggtcgaaggctcagatgacagttagcattttttaacaataaagtatttttaaactatgtgcattttcattaggcataatactatttctcacttaatagactacatatagcgtaaacataacttttatatgcactgaaacactgaaaactgtgtgacccgctttattgtagtatttgctttattgctgtggtctggaaccaaacccaccatatctcggagggatgcctgtagtattcttcagaaaaagataacgtgtttggaaaacactggtacaaaagccagaacctattacatgcataggtgggaagtgtgcatcatgattcaacaggcacaactcagtttgaaactataccccattttatgccattcaatggaataaaaaaattaatctactcagtaatgaatgcatagtcccttatagttattgtattctttttggaaaaaaagtaacgtgacagctttattcactccatgtggcaaaccaaattgcttcaagtaaagtgaaataagacaaacactaaaatggagtttttccctcctcatgtacccagaggcatatgctatggctgtaatgcataaactaaaatggcaataataataaaaacagtggaaaaccaaatgaaaatattaaactcaattagacaacttattccaaggggcagcaattttcatgctccatctgcttggagaaaatttcttgttaatcaggtctattaatcagggtgtggggtgttggattctattttctgttaaagccataatagtttctgaacagtgatgtgtcacttatctatcgaatctaatttgctatctttcaaatttcccaactcccccaaccccccgccccagaagtttgcaaactgaatactcaagggaaatgggtgaaatgaattcatgttactgggtattatagcaaacatcaatgaataaataagtcagcatcgaatattcatattagaaaatttgactttttaattgaagtgtcaactggggactgtctcatatctttatgctggagaggtccagtgaatacattcattgaaaatttaaataaaaccagcaaacccaatttcaataatttgtcttaagtgtccacttcccagagatttctgtacatgttcagataattgaaacttctctcaggacttctctttcccttggtcttgtaaacaattctactaagaccagttctattttattctcaaggcttaatggaacatgtgacttggactaatatgcagtttttttgaaaacaaaaagaatatagaaactaaatttctcattatgctctactggtattactattatattacttgaaagcagtgatggaaagcatgggcttggat

SEQ ID NO: 36514 - DNA, 775 bp, Bovine  19866881713666
  misc_feature (1)..(1): n is a, c, g, or t
ngctaagaaattctcagcgagtctctgccaactccacaaagttatagtcttgtataaatcccacaaggagtggaaagggattatcttatcatccctctacatagagtagatgtaaagtaagcaaatgctgctagagcagaggagaaaattgatcaaaataacattcacagcttccctggcaactcagtggtaaagagtctacctgtcagtgcaggagacatgggttcgatccctgatctgggaagatcccacatgccgcaaagcagctaagcccctgtgccacaaccattgagcctgtgccctagagcccggaagccacaactactggacccgtgccgcagccacagaagcccctgagcctacagcctgtgctctgcagcaagaaaagcctctgcaaggagaagcccaggcactgcaactagagagcagcctcaacttgctgcaactacagaagaacctgagcagcaagaaagacccagcacagccaaaaaattaaaaacaaaaaccaaaaattaaaaaattaacatttgtgtcttagagatcttttttcctccatcaaaagctcagaggactatattcaaaatgaaaatatataggtcagcagataacacctgtctatctatctctacctgctgtgactggtcacatgtcaatgttttaactagacattggatgtcaactgagcctcgagtctattctgtataaaacatcagctttccagagtaaactagagagaaagagaaactctatgatcatgagacatgtcaaaattata

SEQ ID NO: 36515 - DNA, 1131 bp, Bovine  19866881738707
  misc_feature (1)..(1): n is a, c, g, or t
natattgctattccgctgggcttcctcttattacttcaagaaaatcgaatgtctaccgaatgtaagccttcaggagagtggaaaatggaaagaaaacaaccagcactttccccttgactcttctggtttccacgtgggagttacatgtgcttccctgaatctttgggaaaggagaggctggcccaggggcttgctttcagagaatggtggaggaagtaccctggtggtccagtggttaagactccacattcccagtgcagggggtccaggtttgattcctggtcagggaactaaatctcaattgtggagctcatgtgccacagctaaagatctggcatgccacagtgaagactgaagattccacacgctgtagctaagacctggcttagtcaaataaataaataagtcaataaatattcgaaaatagagagagaatagtgtactgagtaacaaggtggaagcaatgattaagaaagacttgtgtttgtcctggaatcaagagaggagagaggaaaaaaagaggaaagagggaagaaggagttgtctaactaccattaaagacttcttgaaattactggcatggtatggttttttttgttgttgttatttgttttgtttcatttgtatcattttgagaaaggtaggatcattccactccattattgagacccctttggagtcatccgaatctctaaatttgcttctttcagagaaaattttttatttcttgggaaaagtccttaaattcctttacttctggaacaaatcatatgtttccttctccaccaatatgaaatattcactgtctctatgactagaagagtaaaaatgccccttgtctctccctggagagaaattgagagaaacgtcatcaaaagcagtgacctccatccttaggataggtctttgtggacccaagaggtgattgatgggtatgctctcctctgcccagcaggctgggggcaaaaggagtaagagaaaagaatgggcagtgtcccttatgattatctttgctgaggaccagtttatgtcaagcccacacaagcaacgggcttccctagtggctcagctggtaaagaatccacctgcgatgtgggaggcctgggttgatcccgggtgggaagatccccg

SEQ ID NO: 36516 - DNA, 1134 bp, Bovine  19866881786630
  misc_feature (1)..(1): n is a, c, g, or t
nctgggtcgggaagatcccctggataagggaatggcacccccctccagtattgttgcctgaaaaatatcatggacagaggagcctggcaggctacagtccatggggtcactgatttggacacaaatgagcttgcacacacatgtgtttgattggctttttctaaaatgcctttttaaagactttattgggggggacagttttacagtaagatcgaaaggaaggtatagagatctcccacatcccctctgtcgacacatccacagcctccctggtatcaacattccccaacagaaaagtgagctttcttttttttctttcacattttccctggcttgtccccaagtagctgcttcctcccaactcaccctgtgtattattccctccctacttcccttcatttgtttttcttctggttctcctacactttgttttgtttgtctttggagccatcatatcctctattagctgaggttatctctgaggctggtttccatcgagacaacattcattttattctgaccctactttagaagggaatttgaattaattattcaagcatttttttcctcccaaaggggtgatccctgagatttgctaaggtccctgccagccctacactattactgaggttcttcagctggaggccagctgtcagggagcacacaagcccacccttccctctatttaaggatcacctcactcccagcaagcactagccagcctgcctccagcctcatccatctcttggctctatttttcaaaacttcttccttgatctctaggtattgtcagttgaaaatttaagaatgagagagaaaaaagtcccctgaactccattccattccaggacacaaaatattgtcaagataggctcaatcctaatcctatggtaatagtggaactgaaggctttttaaaaataactgtatttgttttatttttgggctgcgctgggtctttgtcgcactggcctttctctggttgcagggagtaggggctgctctctagccgtggtgcgcgggcttctcattgtgggggcttctgttgttgcagagcataggctccagggcatgcggcctgcagtagtttggcgcctgggctctagggcacaaacacaatagttgtagtgcctgg

SEQ ID NO: 36517 - DNA, 626 bp, Bovine  19866882079236
  misc_feature (1)..(1): n is a, c, g, or t
ntatgtaaaaagcctgattaaattattcctagcccccccccccccaccccccgcccactgccacctcccaggtgcctgccaacgcagaagatgagggttcaattcctggattgcgaagatcccctggagtggcaacccactccagtattcttgcctgggaaatcccacagacagaggagcctggtggaccacagtctatggagttgcaaagagctggacatgacttaatgactaaaccagcaccaccagcctttcttcagaaattttagatattaactttctgggttctgtaaaatggttgggcactttattaacatcttgtaccaataatctgttgtcttttggtctaatgtaaatttattcacagtctttctctggataaaaggaaaaaggatcactttttttcttccatgcagttccacaagctctggtttcaagcaggctcttttatctctggacatctctttgaattagatactttctgcctaagcttcccctcagcagggtgttcaccgtgcagtttggaattcaggccctcgagttagggaacaaagtctgaagctgcctgtccttcagggcacaatagcacagccagctgtttgcttagacatttgtctgagtcgtat

SEQ ID NO: 36518 - DNA, 1491 bp, Bovine  19866880397725
  misc_feature (1)..(1): n is a, c, g, or t
ntgaacattggggtacacgtatctctttcccttctggtttcctcagtgtgtaagcccagcagtgggattgctggatcataaggcagttctatttccagttttttaaggaatctccacactgttctccatagtggctatattagtttgcattcccaccaacagtgtaagagagttcccttttctccacaccctctccagcatttattgcttgtagacttttggatcgcagccattctgactggcgtgaaatggtacctcatagtggttttgatttgcatttctctgataatgagtgatgttgagcatcttttcatgtgtttgttagccatctgtatgttttaacaatgaaaatcactttgagaaggatagtatttttctttcagtgtgatcttctcttcacataaacctaactaaagaatttattcaagggggcagagttatttaaaagcaaaaacaaaaaacacctgccacaactcagggcacagtttgggagctgaatctagaggaagggcagaggaagggaagggtgatgaaagaaatgtcagtctcgagaccactgctcaagaggcatcaggacaaagtggcccaggatgatgcctgtgatagggcttgatcagacaccaggagaaggaattctggcttatgaaaggaaggaggacaggaaagacacaggtctgtggaaggattctgccaaaaaagacacatctctgaaccccaaacataaaccaatcccctgcaacatcagtacctgtgtcaacagggctggtaatagaggatggaaattgccttcaaatctataaaccagcaaaagtccttctacaaaagatttgggatccagccatctgtctttggacccaagacaatggataataacatggctagccgctaacagttacatgccatttacagggttcctccatatcacaaactgaattgagtttagaagagataactaaaacatggtgttaaaaatctaaatattcaacagatgattcacatcatctcagagccaaatccaggatctctgctgcttttgcaaaagacaagatttgatgctgcttggtttgagcacgaggagtacagaaacaaaacttggactgacacttgcagaaacaccttccgagcatgtagatacaaataaaagacgcagcagaacaaattgtagctgttcactccagctacagttttacaatctccaggctacatggtacctctacaatgcatttttaaactagcaaaatttgaagcttaaagcgagctgtaggaagagatatgtgtggtttcataccaggatagttcagggaagacataaaagctacatgaaattttaaatgcaattatttcagattagaatatttggattgaaagatctgggagggtactgtttttgataagacagtcccgcttgacaagaagctgtcaccactctggggctctctgttgtcaactgaagatgaaaggccatcagaaagaattagcttcaacttttaa

SEQ ID NO: 36519 - DNA, 2234 bp, Bovine  19866880416267
  misc_feature (1)..(1): n is a, c, g, or t
naatggattgcctgcccttctccgaagttcttcccaacccaggggactgaacccacatctcttatgtctcctgcattggcaagggtgctctgtaccactagtgccacctgggaaggtcaaatattcagtaggtttttaaatcgaaaccaaagaccactaggaggagtgacaggttatacaagtgaatgtctgaagcccctcctcagacgtgagtgtatggaaaagcaggagcgggctctgaaatgcctaggctgctggacaaagtttggcatcacattgtcagaatcagaaggtgagtaggtgacttatccccaagaagagggctagctcgcatgcttaacacaccagatgctctcagatgtctcagcttgcttcaaggtctttcctaggctaagactaactgtaaagattcaagtaagttcttaactctgctcttctccacccagaggaacagagacatttgagtttcccttcagttcagttcagttcagttgctcagtcgtgtctgactctttgcaaccccatgaattgcagcacaccaggcctctctgtccatcaccaactcccagagttcactcaaactcacgtccattgagtcagtgatgccatccagccatctcatcctccgtcgtccccttctcctcctgcccccaatccttcccagcgtcagggtcttttccaatgagtcaactcttcgcatgaggtggccaaagtactggagtttcagctttagcatcattccttaggtgctcttttatcaaggtagattgctagtgaaatgtttttcctatagttccctctaacctagtccccaagggtatcaaaacctgtagggtttcccgggatctcttttaaccaccatcacccaagtcagttagacctgcagtaaagaggagacctgaggactgatgagatttagaaagacagagacagtcacacggtgggggtctatcttgcccacatgtaacaaacgtagggtatgaatagcccgccttggcccatctctttacctcgggccggggcttgtagcttgcccactggtcagaatcagccccagagagtcgcaccagtggtacattgccactttgtacatacagctccaaaagcagctccagtcacacatcctaagagcaatcaagattcctacacggcacagttaattgttgactatgataacatatcttgttatcagtttttctttaatgaattccttaatagatatcattagacattaagtgctacatgacttcctctaagaagaaacatttaaagaaacgacacacattttatgtcctgaatcagtgctgaatgccatctctagtgatcacgaaccacaccatggagtcatgttctccctcgtgatgtgctcacacttgcttctttggctgctgagaatatgtgtctttgaggatagtatttgaagctgcgattacatgtatgtccaaaaaaggagacaaaagactttgacttccaaggaaatcactggatcccgtaagaaacacatagccataatgagaaatagataagtaatcttagtttgtcagcaccctggtagggaattaaactcacaacttccacgttagtgacactttcgcatttaatttcctgtgagccacgctgaaaatgcatctgttgaaagttgaatttcactccatagagctgtcttactaagtgaatgtgtgcgaggttgtacctgtcaaaacaagactctggaagctcatttagaactataatttgggttaggaggagcaaaggggattgtaccctgtaggactatcactgttttctggatgccattattgctatgagtaattggttattcattagtactaagtattaattattaatgttaataagaactgttttgagaaccaggaacctgctgtctgctgtgtccaggctgggccattctagatcattggcttagtgggtgatatgctaaccattagggcttccctggtggctcagatagtaaagaatctgcctgcaatgcaggagacccaggttcaatccctggtcaggaagatcccctggagaaggaaatggcaacccactccagtattcttgcctggaaaatcctatggatggagaagtctggcaactaacacacgtgcatactaaacctaaaggcagatgtggacccggaggccaggagcagatctgaagtcctattggaggccccttgttacagggatcagggctcctgtggcctccagacagccttgcataagtag

SEQ ID NO: 36520 - DNA, 3276 bp, Bovine  19866880424054
  misc_feature (1)..(1): n is a, c, g, or t
natccagcagcccaggcctgttcccaccacgttgacttgtgaggcacctgattaaaacgaccttcaaaaacagccaaagatggacagtctcacgctgaggtttcaaggactgtgctaaaaataagcctaaataagaggcagagggaggctcacggataatcaaatgtgtaatcaatttacatgtcagggaaggataattaccataaccaaaaagaaaagttctccaagccaaaaggttaagaaagaaaattaaaccagcaagccacctctacccacatggaaacaaaaacgtacgttttcggaaaggacaagcctcctgtgttcccggcagcttccagagccttgaaacttcccttcaggaccatgattcttggtcctgggtgtgattcttgggtgtgattcatgattctcgggtgtgagacacaagactagtgaaacccaaacaacttgtcagacttgtgcacagccagcaatacacgcagttggctagctgtgcaagggttagtcgcttgtggtgtccgactgtgcgatccccctgtagcccgccaggctcctctgtctgtgggattctccaggcacgaagactggagttggtagccattcccttctccaggggatcttcctgatccagggatcaaaccgggaactctttcccatctatgaaaaaatatatatacatacaaactaggagcaagtcttgcatcacatacaccaaattgtctataggaactgacagtcctgctaaaacaataacccatttacagtttagggcagcccggccaggaacaggcccagagcctcaccagcccccagaacacagggcattgtttccattcaaacctcgcaccgaaaggcaagcctgtcagctggcagtgacctcgtgagacaactttggggagagcaaagggctgagaagagaaaggcctcattctcaaggcaaacaggaaaaggaaagagaaaaagaaagctctgtctccgcacaaggtttgctgtgctggctatgaactgttccagtacgttccatcaaatagacgccttcatagaatcaagccaagcgcgaacagcgggtctgggactccccatccccggacacacacactcccgcgctctcgcaccccgggagagtgcttatatgggcttcatgaagctaagtaataaacactttgtcttcgccctgctatttatgggttgcttggggcatcctgttctctccactgcccttaccttactccttctaacgccacgtttaatagggcaacagtgaatgtgaagggttccatgtgcccctccccacccactctggttttcctggccaagaaaggtgggtccgcatccatccacctgtcctccaggctcccttcttccaggttaaacctgatctccctttcctgccttccaggcatctccctaagacatctcgctaagatacctgtttctattttaccactgccagcaattctttcattcttcatgatggatcaaccatcttggaaaatgagagtgactcagaagattgtcaaccaccacgggacaccgccccgccgggggactgtgggtctccggacggccacgcatgtgcagaattaaggaacagatgggtcctacctgttgctgacttccaggttcactcagaagccttgagctccccctgcacacatggtgttggggtcacaaaggggtgggatgcccacgtgaaaacaagaagtgcatccaggccaaggggctgtgcagaggcgggcatggacgatgccagaactgtccacagggtgcaggaccaaggatgcaactgactttggtcagttttggggcctcctgcacttggctcctttgggggtttcagggttctcagggctgatgggtcccgcatgaagagagtcatgactgcattctgtccacctgtgggttttcacacaggcccggcgcccagctgcctcttggcccagtcttcatcttgggctacccgcggtaccctgaaaacacacaagacagggaagatgcgttaactcggcttctccccacagaacacggctcgccattgcagccgtgattaaatacaggacattatctcaccataatgccctcctggccgtgttcccaggaaaattctaactaatcataaaaatagaaagaaaaacgcaacctaaattccattcctcttcttaaatgagtgatgtgttcacttttatttatttttctggaagcgaggcgggaaaagaaaatgaattttagggcttagaaaaacaagctactaatagtactaagtagagcagggtggtggtgcagacagcgggatgtagcggacaggccaggggcaggtccggccctacccctgcctgtgagcctggagctttaaatgggagcacctcgtggagcaaagacagcaggaggagaggaggttgggtggctgtggggccaggtgtaggcatacatgcacacagacgcacgcaccccacaagcgaggtgctcagcagcatcttcacggcctggcaggcaagcacaaagtcaatgctcctttcacccaaagcctgcatctttctctagcaccatcctttctggaggctctggcgtgatttggctagtccctgcctgaaagagtttctcctggagattcacctagctcatttctactcaccctttagagatcagagtgaatggtacttcctacgggaagccttctccgaaaacccctaccctgactccagtccaggtgccggcggcattctaaacccgcccctcctagcagtcacgaggctgtaattaaggcactaattgcatagttggttgtttaagggctctcccctgtcttagatctgagaacctgttggtctcattaactgctttgcacgtgcctggtaggcagtagtttttcaataagtgcccatgttggatgaatgctgatggctttgcccagcctgtgaaccatcccctgtatccacagcactaagtaccgtgcccctcccaggtcatttctgccctttttgctgggaagacttcctggggaaaccatgggaaagctcaaaatcccgaaaaccagctttgagatgcttctaataattgtgccctgagttaaaagaaaggacatgcccacacccctcccgcatctacctgccccggctcctgccattagaatcccaaatgctgccatcccccatcaaggcaagtgctgcagtaatgggcactgctacttgatggcaaagttctagctgggctaattaagcatactgagctaataaccttccattttgggactggtattattcataatttaatgtattg

SEQ ID NO: 36521 - DNA, 871 bp, Bovine  19866880459217
  misc_feature (1)..(1): n is a, c, g, or t
ntttcaccctttatactttgtctcgaaactcttaattcttctgaacttggagattgcagaattagggatcatttttttttcctcttcccttttctaggtccagatgttttatcatcttggatccaagtcttgcttaataaaaccaatctctaaattttatcaaagaaagtatggaaatttacttggctatgtactgagtatatctgggatggtttcattccatttattgagagatggctttgctttttaaattaatttttaaagaggcaatatacccataataaaattttcagaaggtacaggagagcgttcctctcccctctcctcctgtgctgcctgtccctcagtcactcagttcctccagaaacccctgccatgaaatcccttgggtaaggcatatacttggatacagccatcacagcattatagaaatagtttttcttttttttttttttttttaaaaaactaagcattaagtagtgttttctgcttaaaagatttcctccccttatcagagtttctccatcttatttcagagatgtatttatcctctgtagaatacttaatattaaaaatattaatgaaatccagttacttgaaaataaaaaagtagctctcctaaatcacttgggtcaaagaggaagtgaaatgactgttttattcaaatgaataaatgacaaagttttattcagggatgcattcatggctttaaatcctttcattattaaatacgagaaaatgaagataattaagtattcaacttaaagttgaaaagaataaagcaagcctaataagatgcaagtgatactaatgaattagaaaacagaaacgttaaagcgatcaacctaagaactgtgtgtttgggggaaaa

SEQ ID NO: 36522 - DNA, 715 bp, Bovine  19866880475426
  misc_feature (1)..(1): n is a, c, g, or t
naattggttttctttaaggtgttctcaacttatgtggctaaaataaatgatagtgttttgaaaataccacctgttcttggacctgaagtcaggcggtctggaaacagctctgcagtggccatactttggtttagaaaatcaccctctgcttgtcccttttccatctccagtccccctgcccccctcactctctcatgtgtgacagaatttggcttgtgctgtcctttgtccctaatcggacatgattccctagaggcagtcttttctccctggactttagctgggaaaaaaaaaaattttttttttttttgaggctctttttttgaactaaaatgtagagaggggctgtccttccccaacaggttaaggtagttatattaatttgagcccaaattatattgtgcagaaatgacttctagttttcattgcccctttccctcctgcatcagtgtgtgcttaacgctaatacgattccatacatacagctcctccgccttgtgagcttattatatttctaacacttgcacggttcattattgtgcagtcagaaaggactctcagggctgtggggccagccggggtgggtggctttcagaaaaggcgaaagcaggtgcctttctgtgctgagaatccggagtgaattcagactgagcctgggactccagcagggaggacaggggacttccggtgagatttctgtggtgctgccttttgc

SEQ ID NO: 36523 - DNA, 1548 bp, Bovine  19866880492262
  misc_feature (1)..(1): n is a, c, g, or t
ncaacaaattaacatcttcctttggggaagcacaaatatttattatataattgcactttaaaaacaaaaaaaagaaaaagactaaacaccccaaagtgtcaagagtcaagcttaacaaatttaaaagcaatgaaatgaaacccagttaagcacaaaaggtcttttttgaatttagtgaaaagctgttgcaagaactaaagaagacgagatctgtgcctccagtattcggtttattaggtccgatgctcgtcttcaaaggaatatcacagccgtgtggcatttaaggatttagaggaattctgagaatttgagtgctttttgccaaaatggattccgtgtgcactttagccatgaaaactgatttaggaccttttattcactcttagtcctccagctatatttgttcagttagataactacaaaattatccgtcggtaaaggtagaaaaatcgagagatgggcctaaacaaaaattacacatcttagcaaaagaaaaaacagactcctctgtttactgcgaggagccaggcaggtgtggttacagaattggccaccaaaataagaggctgcaagttttcagatgctaaagtagcatttgggtctgtgtttatttgctcaaagcgtattatgattttaaggtaacattggacattatctgtgttcagaaattccaaagtaatcaggaaaatcagattttattgcactttagaaatagtagtagctacaagaatatggctgtggcatgatcgtaaatgtgtgatggaagcacagagcttggagccaggacatgccaccaggacagacttggttagtatccatccacgaccaatccatttcttgattcaggtttaaatagggcattttagacctagccttcagattaaaagagcacaaattcagccttgtaatatgaaaatcaaaccctattctctattaggatcgtcagcaagagctatttcatccatttctcacccaccctctgctccctccttctgtccctggataaaactgggttctagggttaggaaggaaagtgacaggaatcttaagagatctcattttggaatgaggacttcttgtccctggaagtaaaggaataaagccaaagaaaggaatatttcaggagagtggctgataggaggaaagtctgaagtttgaataaaagttttgaagtaggatttaatttaagccagggtattgctttctttttattagcattgattgtgcataagacattgcacagttttttgtgtgttttttttttttttttctttttttcctttctttcagtctttctacttttaatttaaagccaatttagtacatgggacttgttctgtaaataataaaaatagaagagtaaaatcgtccatgtgcaggaggggaggaaatgggggcatgtacctcactacaaagatcactgaatttttaacacaaagaacaaatctgtctatctgacattgtcattaggacagaaagatttttttttcttttttccccttttttttttaatcatttcaatataagaaaaggacccctctcaagata

SEQ ID NO: 36524 - DNA, 907 bp, Bovine  19866880499815
  misc_feature (1)..(1): n is a, c, g, or t
ntaggaaagtgacataaaagctttctattctgaaaggaattctatattctttccagcccattttcttttttcttatgtaagtcagcttggggtacaacattggaggtagagggtgggagaggacagatatgcaccaggtccctggcctgactatctacttacccttccacattagctaacaaacttgagtcattagaggggcattaattgaagcagcctgtgacccatatgaattggatgaactgcctgggctggagaagtttggctgtgaagtggagcggcctgaggcaggtaacatccagtaatctgctcatctggcaggctttcaccagcagctcacccatggctgtcggagcagtggggcagggagagtaggctagaactgagacaataatttaccatgtaatttgttcttagattcctttgatagacttcactaccaaagacatttgcaagagaaggggaccttacaccctgacgccagccccatctggtgacaagagagagctacattgtctgggccccgtgacgaccttattagataggactcacctgtccttacctgcatatttcttccattttcggtttctttgctttttcctttcctgtccaacccaggaatgaagagagagagagagtagaaaatcgagttacatgcaagttgatgaaaaccgagtgtagcaatccaaagacgcaggcaattttaagttcgagcctgtttggcaaatgaggtgtcccatttggggaaatactgttcctgtttaagcccagcaggtgtgctaatgcaaggcaggcttcctctggttgccttatttagggggatgttacaaatggaaagactatttaaatgttcacaaagacattaacaaacaaacataccccactctcaaaaaccctttcctgaaaa

SEQ ID NO: 36525 - DNA, 1170 bp, Bovine  19866880579495
  misc_feature (1)..(1): n is a, c, g, or t
ncatcttttcctctcctccctcttgccttcctaattttgcttttggattagttcctgccttctgaatatttgcggtgctggcgtcatttagaagtttgagttccgccgccgaaaaatacacgctcttcattgcaggagaagtcactggccagttggaaacagtgtgaccagtgcgcttattggagagtaattaaagggagaatcagagctttggagcgggaggcacctttggagactgactagctcaccctctactttcagttggttggccctctggaaaaaccagagcagccttcatttctgtagggagggggtggttgagagagagagagaaagagagagagaaaacttagatgtttgtcctgttgaaaaagaggaggaaggcccaagttaggtcagtaaaaggaaaaaaaaaaaaaagtaattatggtgagctggaagggaaagaactttctggaaaatggtgctttctgctttggacatacctgtgttataatgatgagaacatgcccggagggcaaagattacagttctttgcctggtgtagtcttaagagtgctttgcctggcacagtggtgcatggtatataaactggtttaaatgaaaagagctagcagaagaatccaagagggtcttctctcccgccttctgtttgtgtcatttaactggccttgaggactctgaaagccactgacagataatctcagagagagcacatggccccacttgggcacggagagaaggcctctccctcaggccagggcctgccatggtggaatgcatgaaggcaaaccaaggaaaacaaccttgagccttgaaggtagatagtgagaaagttacgcgtcatcttacttcatcccatgctttgcgatccttggggaaaggtcactaaataagagtataatttcgagctcgtgctagccgggggaacttcatttctctgccatcaaacagcaggtgtgagttctcagagttggcccctggagtcccctcattcctaaattcaggaggtgtcaaaccctcatgttcttttaatgcctgtggtttctggataggtttcaaggggaaaccctaaaaatcatgagctccagtagaccaggctggagagggaaccgtgagtgagaggacagaggctgcatctgagaggaaaacatacaccttgcagggcaa

SEQ ID NO: 36526 - DNA, 1558 bp, Bovine  19866880595690
  misc_feature (1)..(1): n is a, c, g, or t
nacactggtgtggtgggtacccctggtgtacggctttcgggcccgccctcgtgctgccgcataagggatggtcagtgttccctttctctttgtggcattgccccaccgcaaaggtcagctccctccccactcctcaggaaaggaaaggctcaaggagattttatctctgtctgcatttatgtattatacatacacatagagaaatacggtagcttttctgctgggaatccctctcagggcagccgtcaagctgtatagatggtccaacatgcacagccctctgctctgctgaaggggatgagcgaggacccaggccaccctagattcgacccaacaagcaagacagcgagtccagggtcttatctgcccagagggaggggtaccgggggggtggctttgttctgattttcacacgagtacctcatgtgttcgcagtgcctctggtcttgttcacagctgtatccagtgcccagaacaggtgctctgtggatgttggtgggtcggtgggtgggcagatggcacaagtgtagctccttcagggaagcccagttagtctcagctctgtgacctttgccaggtcttccacctcgctgagcctcagtttccttatctgggaaatgggggtagtaaccgtatctgctttggttgagcgatgactgtcccactgccattatgattattgttagataataacgacaagcacatgggagctttcagaggtggctgttgttggtttccacgctcaggctctttgcagtgaagggttttgtccaggcagcagaataggaaagcagctggcatgctgtgctgatcattcccatttggctagtcccttcctcctcctcctccttccagtcagggcccttgtgatcatgtcacagaagatgtcatcctggccaggggctcctggggcagggatgggggtgacctgacgtggagcccgggagcccacggggtggggtgggtggagggtcaggggagacgggagggcccacgtcaactagactcaggaccaggtgtggctgcagccccacagcctggtggcaggtgccgggccgtccctgtgcatgtgattccttcattacggagtctttcattgactcggccacactgtgctgatgaactgagtctggggacaagagcgcataattgacagaaataaattcccatcacaggcctggctgcagccagaagtgagtgtccacctgtgtgtgtgtgtgcgtgcgtgtatgggggtgagtgggcaggtgttcactttcttccctggatgcacccccctgccctccttcctttccagaaccttcctggcactgcctgtgggcccagtgagtggccctgcctctgtgtcccctgcctggagcctcttgcgtcctgtgccgcagtcactgcatcaccctcaggggcgcaagccttccctgggggctggggggcgcctgttcacacacccgcgagcctgccggggggctgggggtccacctgttcccacacctgtcctttctctcgttcaatccatctcccttcatccgtttgtttgttcaccttcagcgctgtctgcgct

SEQ ID NO: 36527 - DNA, 2967 bp, Bovine  19866880616931
  misc_feature (1)..(1): n is a, c, g, or t
naccttttcaggaccaaatgggcatcccagaagaagatgaaaggaagattgtatggaataatacaaggaaacacactaaaagagtaggctaggctctagtctgtggccataaattaatgaggcctaaagcctatgattgttaaaatgaaagtcaaaagtaccaatgcagtagggaaagggcaaaagatatggttctggcaaaatggaccctgggctcccatttcaggcacctggttcccattaatctctcatccctatagacttacagagccttctgcctgtccctaactttgcctgagctggtatgtaaattaaaccaacagctttaatctttataacattatagcagaaaaaatgaagatagtaaaaatcgaggatggagccagaatccataggattcaaatatgtagtagcaaaatgccccaacaagggaactgggacaaaagaacgaaccaccataaaaccagatcttatttcttctttgaacccctatcttccctttacccctttgcaaaatatgcatacataggtcgtgttaagaaaaccttttccagttggcctttttccaagacaagggtacagctgggctgaagggccacatgttgaagttattaatatgcctatgcccttctcccccaccgagttcactgatcaaaggccctgccagagtagcaatggatagcctcgcataatgggaactgaaattctacttaagaaaccagctttgccaaaacacactaccttttaaagtgaaacattccatgcacatattaacctgattacagaaaggaagggggctcttttttccttctgtaccctgctaataattttctgtcaagtctgatttggctttagctgtactccaagttcttgtgatgtgccctgatcaccagtaaactgaaaacagaaggtgctgcactaactctgagacaggatgctctggccatgaattcagacgctgcagaattcagttctttgccaacaaggaaggccagtgacttttttcagtctctgacaaccagcaggcctgcctctgattcacacagcgaaggaatcacatggaaaaaatggtggaaataattaagggttcttagagttaacagaagcatcagctcattacatggggcccctgcctccaaaaggagtgaaccattgttgctgcttaggaaaacaacgactaacaaagcattttgaagtctcaatcagttccagccccatgttgaagaattggttaggtaacagaaatgggaaacaaaccatattttaaggaagcagtgtcatttttttctgtccaataagcaaaaagaaatacttcatggtttatttcactgtattacaggataacctggtacctgcacagctgagaaaattttgtccctagacggagtatcaaagattgcaatattgtgcagctgtccaaatagagggccagtccacagagggtctgcacacgatggccacctttctttccaacacatcagaggacagttcttggtggaagataggcagatgaactacatggctgctttgggagcctcaagcactagaatgtggcagattacagactctgtcaagttttacagtctctcaaatcccaagctcctttgcctacaattatgaacataaagaagcacagacttctctgggaagaaatatgttttataagaaagatttcttgtagggctctgtccttatgtttgcacaaactctaaggtgtggagcagttgctatatcctcaagagagtccagcaacaccctagacaaacaagaagtaaagaaagggcagaagtggtctaagctagtcattttctgtttgtgttcagcaactagaaaattatttgctaataaggaccaaggtccttttcagtgatgtcctgtaacttcaggcaaatgtcctgtcaaaacatattaaaaacttgaggttttatctgaatggaccactggataagcgtaaatagacatgctattccattgtccctggtatgtctgctggcttccttttctttttttgatatgttctcctattgtgaaagctagaggactaatccagagtggatgttctggataccttgcctgggttcagtgctcctcttgacagccctccagctgtcttctagagtcctgaaagatctgttgcttatagatcagaatatcttattagcatgggatttattttctctttttcttgggcaatcagaggaggccatcttctagattaacattgttcataatttcttatagttatggtagagaagacaagaacaaggtagttacttaaaaaaaatacacttggcctttcaatctcgcttttctctaaacaaggaatgaccactgatgaaattctcaaccacatgagccaagaatctgcagtgattcacttcttggcactcagtaaagaagaacatggttttaaagtgctgagtccaaacctaaaaccgaataaacggggatgctttgatcttgagtgcttatctttataaattgtagctgcagtggttgtaattaggtaccaaaatgtaggaaatcatttgtaaattcttgttagagattcacatgcaagagtatgttattataggcagtctttatatctaatgaacctttaaattaaaaaaaactacaatataaattattctttagaaagaaagtgaggtttcagaaaatatttcatttccttttgtagatttctttcatttgtctttatcacactatgatatggtatgttttaccaagagaacatttactaaaagggttgagcagcatgactaccttacttgaatttttaaaatatagaaaaagaaatgagtatccctcagtgtattgtaaggaaagccattataaccagtcactataaatgggatcccaatgcacatacatggaaggaaaggaaggagggagggaaagagaagagggtgagaaggagtgggtagagagggaggggagaggaaaagaaagaaagtaaaaagaaag

SEQ ID NO: 36528 - DNA, 889 bp, Bovine  19866880628248
  misc_feature (1)..(1): n is a, c, g, or t
ngaaaatctgctctgtcaaccgcaggccgctttcctagtcggaaagcagaaaaagtaaacagtagcaatctctcatgtaacagaagatttaggtataatttgtttaaatagtagcaataatgattattaattcaccctttgaatgttaacaaagacctggtttttgttagtttgtgctttcgattcatttccaagctgaagtttgttttaggctaatgctgccattgatgagaaatgcaattatctttaacttcctactcccccaccccgccaaatatattcgacgttcagcaatacaaaataaaataattcccttccagagcactgctttgcaaatgtcgtgagcacactggagtgaatttttgttgaattcttctttacttccctgggaaacaataaggaattctttttgttctttgccacagaaggtataacaaatggatttcgaaatacctgcactctatcagtggtgcttagaagaaaaagaaaaatcaaagcaagaaataaaaatcacaaaatggtagagtctgaccaccactttatccacaatttgtgcctgacctcattgttgaaaaatttggtgaaggatcacggtggctaatttttctccttttgatactataacattagaactaattttaggtgtattttatccagtttggtgtaaaagagtcagagtccctaagggaccttaccacagggacccgttgcttctccacgaggcagtcctgtcctgggcctgctgtcagcggaggcgggctccagagccagggtccagcttgtcccgtcaagtttattgtccactccatcaaagggcctaatggtcagcagagggggctaaatgtgtcccccgtgacctgacattaacggagtggactgttttaagtgt

SEQ ID NO: 36529 - DNA, 1161 bp, Bovine  19866880649232
  misc_feature (1)..(1): n is a, c, g, or t
nctgagttatctcttagcataaaacggtttccaaatcccttacttcctctccattgctgttcctgtatgtttattttgttcctctggcctcttgtccaactggtttctctctggagagcttaggcatgaggaggtgagcaggatagaaggtattggtgatgctgagacaaatgggtattgtagcatcagggcagggaagagaaattgggcatttgttgagtgcctgctctgacccaggcactggactgtattaagtgctttacaaaggttatttcatctcattctctcaccagccctggaaggactgaaatatatgagtcttttgcaaccgcttgtgtaaatagcagtattaaggcagagttgtttggctaaacaagtgacccttccctcttgtagtcactggccacaccatggatctgaacttcttaagctttatgacatacttggtttttctaactcttgagtcaatcatggctgtttttttccattggtcagtaaatggcctaatcatcatgtggccttttgcttcatatttgtcactgtcaagttggctttgtattttggaaagcttccagcactcattaccataatgataaaaggagagatgcagtgggcgcttgggctgatttccattgagagaagttcatattctcagcacaaggacttggaaaactgtttagaggggccattcttgctttcagaatttatcgcttcaaaaccaaaagaacctgcaaacctgtatattaaaaaacgttcatggttatttgagtctgcagaattggagctgtcaacttgtccagaattagcctgcaagacagacaaggttgatggcagaactctaacactaatttacttataatttgcttttgtttcttctcatcttgggagccgttccttggtgtttcataatcagtcacaagccaggcaaactcataggttgtttcctttaataggtgtaagacaagcaaaggaattctaagaaaatctcctaaatggaaggcaggcattttgttttgtttattgtagttgggatcctctgaagagaagaaccttttgtcctgacttgcagagctgtcctttatgtgactctaagagcccaagtttgtgcttattagacagaggccagtgtggcctttacaaggaggaaagagctgactttca

SEQ ID NO: 36530 - DNA, 1700 bp, Bovine  19866880696427
  misc_feature (1)..(1): n is a, c, g, or t
ncaagccattgagtaggcattgttgttattcctaacaacaatggggctagtgtgtctggaacatgaaggaccagagaaagatggctcagtatcaagctggagaagtaggcagggcccagcagggttgtagcaggaaaacagaatctgatttgggttttctgatgctacctctggctgctcattggtgaatagaccaaaacagggtgaaagaggaagtggaggggccatttggaaggcttctggattctaggcgagcatagatgtggttgggcaggaaggtggtagaggggatggcaggaagtggtgatttgaggcaagttttggctgtgttgagatttgagaggcagcccaacagtaaggacacagaaagaaaacacatggactcaaacctcataccagctgccctccaccatgacagcgagggaagggagagaggggtgagaaacagacgcttggaaactggaagacgttcaggaacctaaccaggatcctacctcaccgtcaatctaagacttaaaatatccattgcctgcatgttgtggtttggctgccctagttcctctctttttttttttttttgtcaaatggacacacacatacacacacactccggcacgcacccttcctgatccactaagcacggagcaacagtcaacaataaggcttgtctccatgcaggggagagagatagctacccagaaaaaggggggagggggagtgaagactgaattgtgaagacagctcacctggggaaacaggtccggctaacctccagccaatcattaaccctgcccgaggccttcaggacactcacacactcgggaattttaggagcccggaaactcagagcaaagtctattttcagaacatggcctgaagaaggaagcaaaggataaacagggaccaaatgttttaattatttgaaatggtttccaccccaacaccattccccaagtgttagaaaggctggccaggagaatttatgggagggcctttacccccagcttgctgccatccaggcttgcacagccccacaaaccctttggcatgacagcccctcagcaggatgggctgggtgtgcccctggctgccttgtgcctgtagccaacaccgggcctcagagcccagtgagcttcccgggcagccatctggaaccatcctggccttcagaacagtagccacagttggttctccagggactgcctctgagtttcctgcgatacagttcttcatctgggttttatagagaacagggtcttgaccctgggatggaagagagcacagccttgttagcaaactgtccggggaaaactttaaggaaaacgaatgtggaggaggcaagggaagtcgggaagggctgaaggaggacaggcccgtcacccggcactgggccccaacagactccccgggcgtggccttgagaccagcgaatcaagtccagatacctcgcagagagccagaggacaggacagacgtgtcagggaaaaaataactgctaatatgataaaatgccaagtggctacgacaggccgcagcccatcagagatcgcagcaaacacagctcggaaaaagtacaaaagtccttcagtgtgaggtaatgaggcgcgtctaattatatttaagaaagaaccagcaagaaatgctttcaaagccttcccctctttcttcccttcacgaaccaagtccaaatcccaaacgga

SEQ ID NO: 36531 - DNA, 1203 bp, Bovine  19866880711601
  misc_feature (1)..(1): n is a, c, g, or t
nagatgcaccatttatgtaattgttacaaatttctgttgtacaaccaattcccacgaaatgccactgcaattgttcaaatacttgtggaagagtatcttaaaacccctacattttgcacctttaggttaacaaaaataccatcaaccaagattctaacagttttatcaagaattcccctgctgttcagaatggagggataatatcagttgcttcatctagtgagatataaagttcaagaaacatcacatgaactatagtactttcacagacatattttccaaagaaaggaagatcttcatatttttatagcacagagttgtgaaattttgcccaacttctgttgtaaaactttgtaagttttttaaaacccacagataatttccttattgcttacattagggaacattttattgtgatttaagtaatgtggaaattagtttcaaaacgcatgatacatctgaaatcaagactgaattggaacgctgaataattccacctttcagtaacacaaactccatttaacacagtcatgttgtgtcaaaaaataaatgaataaataaaaaacaactccattgaaactgggaaactacagaggtgacagctaactgatgtttctttgactgaatatataataccatgtcagatttctcagtgttactaacattgatcttactattctattaggcacagtttttatacatgattgtcacatacgtggttcctgtaaagtggacatacatttcacaaaaccttagtaaaattttcttgctccccctactttctatgccagtaagagttctattaatcagggtaaagcgaagctctgctgtggtaacaaagaaacctccaagcattagtctaagccttgacacatcatatccatacaaagtcagatatggttcaggcagccctcttccatctagaaaataagtcatctagaatatggcttctgatgccattgtgtcagggcaagagaaatggaaaaagacacctggcttttatctatttcagcccagaagtgatacatgtcaattcctctctcccaaatcactgaataaaccagttgcctgactctaactcaactgtctgagaaatatgagagcacgtgggtagttggtgagcatcagctgcctttgacacaggcactaaaactgtataattaagtgatttgaacacacctcaaaaggtttaaactataggca

SEQ ID NO: 36532 - DNA, 1412 bp, Bovine  19866880714089
  misc_feature (1)..(1): n is a, c, g, or t
ntttacacaatcttaatagacggaagggttgcgcttaaagttttcagttactctgtgttgtattgtatagggaaatcgtatattgtagtaatgacagagatgggcgtttgtgaagctgtctttgtaaatttctagaccaaagaattattcagaggcatggcctgaggcattgaaggagaatgtcatcatgcactgcttcattttgttctttgaacacagatagtcttgtgcacccgtccttagcagaacccatactttttgctttagttttgtcatcagctctggactggtagtggcttgattttctagctagtaagaactgcccagagaggtaaaaaggacagaaccccatgttgtttccacatcctggtcccctaagactcttgggtctccccttgggggaatctctcttggacagaacagtattaacaagaccatgccaagcagggacctctatggtcactggttgaggggagggcaagtggagtgtgttggactctgtttatctaattcatctcacccaaaattcctgcccagagagctatgcttcatgaaagacaaaatagcttaagccaaggggccacggaataaatagccccccaactggtgagaaattgaagctgagaagcaatctgacaatttccatctcttaaattaaagaaaatagatccagagactttggaaatctttcagctccacaaatgcgagtccctaggcccaagtgtctctaattcttcacaccagaaaagttagaagcctcaggacaggcggcaactacaggtctgtctctggatgctcaagtcattaaactctgtgaaagcaatttgacagcgtttgggatgtgttttgtcattaggggtgggattggtattgttgttcattttagccgggaagaggtgtgtgtgaaggtgtctgcatgtgagggtgtgtatttcagatgcaggtgtcactgagtgtgtgcgtgttagggatgcgtgtgagtttttcgagagtttcattactgtttttgttttgtgttgttcctgctgaagaaacactcctgagtttgattcctctggaaattttgtgctactctcccatatgactaggatcgcccaaagcaccattcttcctctgaatcattttgaccagatcactctgagcagcccgaattttacattcacttttcctcctacctaaaggaacaagttgtcattctaattaaataacaactttatttcataatgccaaggaataaaaatctctgaattactttcactaacttcccgtttaaataaaatcttgcaaataattatttgaacataaattatttacccattaattctttatttgaatttggaggaattcaaatatgttttctggcaaacacttcatgataagtgacttggttaattagcagtaagtgtgttatt

SEQ ID NO: 36533 - DNA, 775 bp, Bovine  19866880722075
  misc_feature (1)..(1): n is a, c, g, or t
ntgcctctttgaaatctacatcctcttcgacatgctggaaatccagaacttttgacaagctttcaatacattgtaaaagttctaattttaaacttctaaatgttataggccaagaacttgctgttttgagttgtcaattaggcagatggctctgttggtcaattaaatgatttttgtggttttaaaacccgcataaagtggtgttgagagtctcaatgtcattcttatcatctccatgaatatttgtggagcccttcctgaattaaagtacaaaagagtaagatggagcacaggttcccagctgtggatttgagatgcctgtggcaggtttctatactaccccattgaagcccacagtggtagagagaagtgacaagcgtgatgggaattatgcaaaatatatatatatatatatatagaaaagggttctcgatctttcaacatggcacctttcaactttgaagggatctgggaaaggatttcccatccttgagcctagctcaggctcacctcctcgtgtgaatcctgccccctggcccagtgttaaagctgacctcatccagtttctcagatcccctctctgggtagacttcctggattagtttatccaggtgccaaaatagcatccttgagatccatttgtttcactgctcaggacctgcggtgatgtgcaaatgcacctgggtttatgaatagatctgcattctttgttatgggtcgccccaccctgcaagggtagcatatggagcttgcattgaacacatctccataaatg

SEQ ID NO: 36534 - DNA, 736 bp, Bovine  19866880747385
  misc_feature (1)..(1): n is a, c, g, or t
nactgcaggcagattcttcaccagctgagcccaagggaagtctgacccttctcttttcttctccactcagtgttggaattgtctctaccacccctacttcaccaactccaagatccattttcacgaaggtgtaaatgggttgattagtttattcagggctattgacaggctgcaggcactggagcattcagcctatctccctgcaggctccctggtggctgcaggggcttccctggtggctcagaggttaaagcgtctgcctggaaggcaggagacctaggttcgatccccaggtcaggaagatcccctggagaaggaaatggcaacccactccagtactcttgcctggagaatcccatggacagaggagcctggtaggctatagtccatggggtcgcaaagagtcgggcacgactgggcaacttcacttcacttcacttccctgcaggctcaagcaggccatggttacttccatggcctccagcagcaattgagtgctggtttgcactggggtttggagactgagagatgtgtcattccagcatccctctgactatgattttctgaagacgtatagttgcctggatttaacagggccactgaaagtgcataggaggacggggaaagacagcagagagcctgcccatgggaggctgtgctaggggagaacagaacagagtccttgcattatctgctgtgcatacctgggacacagacatgcatgcaaaacccatgg

SEQ ID NO: 36535 - DNA, 1793 bp, Bovine  19866880755034
  misc_feature (1)..(1): n is a, c, g, or t
naattggagtatagttagtttactgcactgagcttttaaaccccattttctatcaaataacctgaaaaacagctgtccagacctttcagccattgaaactcagttctcagtctggtgagaaagtgaatattgttttaacatcattatgactttcatattcccacgttgtgggtaccactaaaacctgggccacttccgagccctgcagagaagccattctgcagagagatgccgcctccagccccctacccctggaaatctgagtattaaaagtgtgactgtgcggacctcagatcaaccttgtccgattgtgtgtgggggcatggttgacattggaggctggataatttttgttgtcaggggtgtccctcatttctccaggtcagataccaggagtccctgctccccaaccccgactccccatcaaaaatgtctccgggaatcacccaatgtctccttggcaggcatggagaaccactgggctagagactgtgtttgttttctcttggataaaaagatggtagattcctgccgcctctgagttatatatatttgttgagcgttctcttaagtttgtgatttgacctagctgatatcagttgttgccatttgcttaatttcatggtcactttagcattgaaacattaagactctttcctttaagggcacggccatgggctggtgtttgagactgtgacattttcgtccccaggagggctgtcctgtagaaatagaactcaggccccatctgtaattgtagacttgctaggagtcacattaatagaaaagtaaaaaagaaacaggtggagtgaagtttaaatgtctttttccacacagtatcggcatgactttctcaccgcagcagttgggacttgccttgtggccagtgctcggcagtggcagatgagcggtggccaccatattggacagctcagccccatctgggatggttttgtggtggccaccgtgttggacagctcaacaatatccagaatgactgtggccctttccagctgtggaatcacaccacgggagcaagttttttttcttcttttcttaaaaaaaaagaaaaagacaaaaaaaaaagggctttgtgtttattctctgcaaagtggggccttggctgcacagatgcagctgtgtggagctgtggcccagggagcggggcctctaatctctagggaagctcccccggcctctgtgggggagcaccctgggccagcctgggaggagggtaaataattccaagggctcagtgtactctctcacaccgcacagactaatggttcgggttaattttgtgtacaaggtcccttttgttggagaagggggtgaaagtccgcagctgtgaccggaaacaggggacgggcctactgggatgaccttgttttggaaagtctaaatggagcactaatggcagagatctaagacgggtgatgtatgtgtgtgtttgagtgggcctgaagataaggtgaagagtattttaaaagttactttagtgcaacctcccagataaccataggccgagggccagttacaatttatggcaagctggtagtcaggcctggatgttggcctcattttatctttgagtccaggctctgtagcttaactggtggtgctctctttgtttatgttagtttttggagggggagggcatggggggcggctggtcaggttctgcagtgaagcctagtgtcattttatgatgcagagccactggtcttcctgctcctgggcgcgctgtgtgtgtctccttgccatccctaattgtaacgccgccgggcgttgca

SEQ ID NO: 36536 - DNA, 1374 bp, Bovine  19866880765653
  misc_feature (1)..(1): n is a, c, g, or t
nactaaatcgttttactggcctatcacacttttctaccgacagagagcaaaagtaaatacaaatcagtcgtgtgttgcaccataggaaatttatgatgaccccaggcaagtagctttctgcaagactaatttatgtatagtcacatctgtcactgtggcacttggacacatcttaggcttttttattagttattcctggtaacaaccctgtgagatcacaaggtgggtcagatattcccttcctcaagaggcctctgaaatttcattcgatgctactacatttcaggactcagtcctcaagtcaggagtttggtccagaccactgatcaggatcatctcaagtcctaggactcagaagctctatcaggcccaaattcattactccatttattaatttttccccacaataaattcggagagggaatcactttcctggggtcataaaatgatttagttgtagtagggattaaacttccttgtaagttaatgattaacaaagactcagatctggattcttattctgactcagccatttattaatggtgtgactttgggcaagttgcctcccttctcttgcaacactgtcatcttttgagagcgagggaaacattgcttatcctttgggcattattgtgagtgttgtagtaacaggtcactatctgagtgttttctgggctaggttatttatgctccttcctgtgtttaatccacaacacagccttgaaagaggtggagggtgcctctgtatagaactcctggtacagaatcaacactcaatattattaggatgctatgtggtaactcattcttagagttagtagagaacatcaccatggttgtctttctttcctgctgtttatttactggaaacatcttggaattcagagaggaatctcttcaagttgcaaaattacaggttaacagaatttgaagtaattttggcttaaaaaactcaagtgtgggcagagaccaactgatgaggctctctgctgactctcagaacaaatgcatataatctcagctttcatatacaagcctgaaactcaccagatccacctgtctcctgagttacagaggcacggttgtacctccagccagagtcatgctcaggtaccacagagcattattgcttgatggctgtatacacataggcccttagaatagcacatgtcctacagtaagtgctgagtaagcattagctagtattgttaccataagcattaccctactctcatcacacccactagttatgtctgctagatcagctttcttaatatacaaagctagaaagattctcctgtccagaatgagatttgtttgaatggctttcatattcttatgaccaagtgatactacctaactttccatgaatat

SEQ ID NO: 36537 - DNA, 1660 bp, Bovine  19866880783356
  misc_feature (1)..(1): n is a, c, g, or t
natgtgtcttggtatgtctgatatgactgatatcagacctatctgggctcaggtgaccagccccacccacagcctcaggctctccctggtgacccataggcacccagactcttcttatttgtactccacacagacacacacagccgcacgatggaaggtatcgagaaccaggcagtccctcttagatgcttcagagagactttgaagaagctgatggtcacaaaagacaatctcttttaaatcattgccctgttccctccagaatttaaatattgtgaatttttattttagcctcctagaagtgtcctgttagagtgaagcctgccatatctgtaattcacaaatgccaaagcgttctagatttgagcaggaaattaaagcttcagatgctgcaatgtcccatcatcctggagtagggaaggctggaactcctgtagaggctctgaatcccattactgcagatccaagacatcctagcatctccctcaaaaaacgtctgtacccaaaggttagtaccctgccctgatttcacttctctctgctgttgattataaaattctttctccttctagatttacaaatggtagtgggcaatgtttacatttcttttatttcccatctgttagataagaaacatgttcgaatttaagcatgagtcttaaacagcatctcaggacctctcttgcatcagtgcttagcaactgcagttctgggcatgccctctgctcctcagaggggaggttcatgggccactatcaagacctcttttgcaaatgtacacaagacctcaaacaaagctaaaaacagggagcttgacaaatgactggcaccagaagttcttcctagagtatgtgggatgctcagagtcagctctgagccagttaaccttggcagggtcagagagagctctcatccggaaggatgaaaagccctttacaaaagcagggcaagcggtcttgaaatggccatcatggctcctcctgatggattctggttccaggacacaaacagttaaaggcacctgcctgttccttcagggtcagcacacctgctcaccaggtgctcgttgctcttagggaaagctgtccattccaaagaaagggcgaggggagaggagcagaggccatccacagtgcaggcttcctaatcaggtgcgagcagatgctctgctgaacaactccatgttgagatgtcactaatgtaaaaattagtgtttttctctttctgccagaatgcaggatttacatgatccctcacacatatccctggaggactggggtataatctcataaccagcaaggagccaataaaccttcattcaggagaaaatgcaactcccagaaaactcagaaagcttgctttcactggcagctgcccaaacttctctgccccatgtcagggagcccatccccatgttgaggtgcatgtctctctcactcccacctgcggtcccttagctgcccttttatggtggtcctgagccatgcttgtgctgggcagcctgtgaaatcagtggggaatgggagggggagatcccagggcaggtggacatatacaaccagggtgtggggactgaacgcagggagcacagagcttggccacccccggaagaacgaggatgggacagtcctggtttaataagccacattggtttaataaa

SEQ ID NO: 36538 - DNA, 1959 bp, Bovine  19866880791727
  misc_feature (1)..(1): n is a, c, g, or t
naattgttagagaactggcaaatggactttgacaaatcgcaatttgaggctttaaaaatgaacttttatcacagagcaagaaaacaaccagatactcagctgtgcttatgtaaattccttgagcgacatataatagagacgcaactgatgaacgctcaacgacatttaaagactagcatcaaccccttcttgtgggtgggaaatagatgactcaaagattgctctggtcgaataaaatattggattaatagggaattatcatctataccacacatggattaccaattttaaaagaattagacctcaacaaaatacatttaatttaatctttctttgatgagtcagagggcacttcaagatcttgctctgccctcaggccatcattatgaaccactattgatactggtgaggcctgggagatagctaataaagagatctggtcaacagaacacaggaaaacagggagtctgctgtttttagacatttatgtcagggtgtttccctttcaattttgatctctttatatccccaaggaagcttacagctcactattccctttcctgtctaggccatagcatggttacatcataagaaggatttctcaagatttttcattcaaagattcttactggcatctggagtcttctccttcactatcatgtattcagtatttttctattaaacacattcacaataatttttctccccattctccttttttttcttcttcttacatgtggtcgcagtctcaatatacaactaaacagaatccttagaaaggatctatttgtgcagaattataaaaagagaactaaacacgacctgtgtcttctaagaggtactatctcagatgtgctgatacacgtacacagagaaaggctgtccagaaattctagagactgtctaaagacttcaagccagaggaaagtgccagcaaggagctagatgatatgcactagtctcccaattaaataagaactgtttcaagtttactcttctgttactgcttgtttttttgaagttaagtttttcactttcctcttaaattatagggccccaaattagactaaagtggggtattaaccagtgcagggtctaatgagaaggttacttgtggtttcaacattttatgtttctggccagagatactttgaacagtggcatttgattggcatcagctcatttgttttgcaaataggtaataatgaaaccaaaaaaatgtgttccatatcctgcagaccagtaagctttgctcattttctaactacagactacaatactttggccacctgatgtgaagaactgactcatttgaaaagactttgatgctgggaaagattgaaggtgggagaagaaggggatgacagaggatgagatggttggatggcatcactgactcaatggacatgaatttgagtaaacttcgggagttggtgatggatagggagggcttgcgagctgcagtccatggggttgcaaagagctggacacaactgagcgactgaactgcgggatattaaggcttgaaaataaaagtgactcaccggagaggcacagttgttggccagcaacgaatatttgggaaaacaatacctgccagtcattaaaagatcaaaatcatgcaaatcaaaataagataatattttttctgttaagttcatttggaaaacagaggagagcagagggtaagcaatgtgaaggaagggagaggggaggatgagtaagagataaagagagaaagcccagttgtggtgcagagaagtaaagcagcctctacaacatggcagatgggaatgtaaattagcacaactttctggaaaacagtttggtaataaagagtcaaatgtaggttcaagcttcttggccagtagttctactgcgaggaatctatcctacgggattagggaagctgcccttttcctagaccttctcactactaccctctgtatacactgccag

SEQ ID NO: 36539 - DNA, 2454 bp, Bovine  19866880821011
  misc_feature (1)..(1): n is a, c, g, or t
ntttctcctgtgcctttgctttgattgcttttacttacatctctgaactttcatcttttctgttgactattacagggcctcacttgctctccagttcctagagcccctaagtggtcttcttacccaagtctcctgcccgccacacacactacggccagaattatccttttgaaactggacaatgttctcagagcttccccaaccaggaaactgggcatattataggagcttaaaagtattttaaaataaagaattagatgaatctcactgaataaatatcaaattctttgtcttaacactcaaaatcccttaaatttggtttcccctagaggattcttgaaagtcaaagtgttagtcgctcagctgtgtctgactctttgtgatcccatggacgatagcctgccaggctcctctgtccttgggattttccaggcaaagatactggagtaggttgccatgcctttctccaggggatcttcccgacccagtgattgaacctgggtctcccacatcacaggcagattcttcaccatctggtaaaggtaaacccctcctaaataagtctattagttctagatctacaactgtctacagtagcccaaaatctgatatattagattcaagcatatgcacttgtcaatacgtaactgtttgacctacaaaacagccattttgtatggcccaattcaacatatatttcttcccctgtgattctgcttaagccattctaaatgccagtttatcttcctacgccatccaacttattcttcagaatccagttctaagtctctcatcttccacagagactccacaatggatggtttctcttctgcacttccatagaactttgcaacctttttttttttttttttgcatgttctcagttgccttgtaatgatgtctttttgcctgcatatctctcctcccattatctccccaagttgtcagtaaactcttggaggacaggatcttgtcttgttttcttcagacccttcacaggttctactgcaatgcttttcatagagcagttgttcaccagatatttactgaatgaactcaaataatgtttaattttcccaagcatataaccttgtattctaccttaaaacaataggaaaaatagatgtacaaagtctgcaactgtttccttttaaaaaaacaatcattccttaaacatacacttatcaattagacattatccttcgacactaagagtaggagataaaatgcattgggggtggaggcaggagtacccttgtgagatatattaactcctcaagtacaaagagcctgtgttgtgtgatgatctttttcctggcctgtctagcatcttgaagacgtgaactgacctacaagggcttatgcctttggataatccacagataaatcttctgttctgagcatcagcagctacttcatttgctctaaacaataggtgaaggaagggaagcggccaacgcttccgctgatgacgaaaacgatgacggcatttacatgattccgcagtgcttgacaaactcagcaaattacttgtaaagttggcagtcagggctgtcaatgaggaagagtcacctcggggccagaaagcagcagccacgtttgcataaaaggagagagctcacagcacctgacaactcagagagaggtatgctctgtgtgcataggaattcacagagcaaatgggcttgagttacagtcaggaagactgaagcatgggtatgagaaaggacttcagaagagccagggcctccacaaaagaacaggtgttcagaggaggttatcaaacttgcttagaagaagttaaacagcgtgctgttggcacctgagtaaacagacagaccactagaataaagcagaaagtctgggacgagacccaggcccacgtgaagatttagtatatcctaaatataaaggtgacatcaaacatcacttgggtgcaggtgatcttttcagtaagtggtgttaggacacctgcggagccagtcagtcagtaaagttgggcctatacctccaaacacacaagaatatagtctgaaatgggtcacagagagctgtatgaaaaaaaaaagaaccctacaagtcctgaaagaaaacatgggtgaatttctgggtatggaaaaaggatttctaacttgaatcaatatccacagataataaaagaagtgattgataaattcgattacataaaaatatttgtaaaagtctgcatggaaaatgcaataagcaacattaaaagacaatgagaaatgggagaaaatgtttgcaatatatattacaggtaaaaggctaattttttccaatatacaaagttatcttaaaatttgagagaaaaaaagatataaagcccaagaggaaaacaggcaaaggacatgaacagtcagtttgaaacaaataaatacaaatagcatttaaatataagaaaaatgttcaacttcacacataagtaaatgcaaa

SEQ ID NO: 36540 - DNA, 1666 bp, Bovine  19866880916993
  misc_feature (1)..(1): n is a, c, g, or t
ntcttccttctggtgaaggcctaggaggctgcccgagtgtcatccttgtgaaagaccaaaggcagctactacccccacttctcaaccatcagactctgagctaaagcaccactgacagcccctccatctaaacttccatctcccaaaccagcaacataatggaggagccaattaaatgattattaattcatgctactttccgtaagccagaggttctcatcgccttgtgttccgtaaaccagcttgccacctgccccagaaatttacagcaatcttttctatctatctccattgactaaggagaaaaaaacacattcgtacaagtccagacttgaagcttgagtttgagataatgaccccagcatgctagtcacagaagcttcactagacctgaaaatggtcattcagctcataacaaaaatgcaatgcaaggggcagtgagctctctccacaggccaaccccccacccccacccagcttttcagaggccccacactcccctctagaaagcagaaatgcatggtttccagaggatgctctgtgctctatggtcctcactgtcgttggctgtggggctgctcttgccatctgcttgcaattccctcccaagagcagaggctagggttttgtgctggatctcctgcggagctactacgcttggtaagtggccagagatctggctaaactctctcgcttcactacgatagcgaacgacggttcctctaaagggtctgctctgctgccaacatggtggttgaacattcatggttctcattctgcctccagccaagcacttaaagtcattgcagaggaatcaggagactgtgtgaggcgaaggtgagcactggcacagccaggggggtctccgtgccctggccagtgcccttccccaagaactctgtcctagagtccagcctggtgaggtgagaagccttccattcagaacagtcccagtctgcgtaactgcaggctacactgcttctgcacatctctagatagagaagttcagacacccgctcaaaaagtgagccgagcacccctaggtaggtggagtaagacacaggcctcatggactcatcacgtatagcttcccgtttccatggagcatttcaaagaaaacttgagctctactacagatgggtgtgactgctgctggggaatggctcattagttttctccaccaactcgaaggtgaaccagatagctcggcactttgaaaacccagaaactctttgctgttgttatcttgatttttatttggaaatacagattcatagttaatttcaagaatagtacagggaggtctgtttccccttcaccaagtgttactttttaaccaaccagggttgagataaagagtgctaggtctctgatcactcctcaacatgaccacgtctccccgctcccattactacgatctagattcccttggccagaccaggacttgtgtctcctctgcacacttctgtcttataggaaagcttagtccctccctcatatgccagggacttcagaagtctgccatccagctaaaggagaaataggtctcaaacttcatacctgtcacagagaccagagccccaacattctcaacttcaaatgagtcccagaaatcccccagaaaacttgctaaaaggcagcccccaccccctggaacaggtctgat

SEQ ID NO: 36541 - DNA, 1188 bp, Bovine  19866880919552
  misc_feature (1)..(1): n is a, c, g, or t
nctgatgaatgccccacagtttatagagttcttcatttccttttcaaatccatttcccttatttcttatcccagcctcagctgcaaaatgcaggatattcccacctcctgcctctcctgtcccttgccagaaatgtgctatgccattttctgctgaccaaatccaactcccacccacaaaactcactggtgaccacatctctgtctctctgagcatcaacaatagtctctatttcacatctcagtttttaaaccagtgctgctctatcaacttcggtagtttctctgactacgtgtaggatcctgggtatatttcttcctccaaaatacctagcacactagtaggctttgataagtacttaatacttatccacctgattaatttaacccacagactgcatttgaaatattagggctacaactgcattcaatgggtaggggacacccaggatagtggcaggggcagaagaagaatattctgttttggttgcatcctaagaacaaaagcctaagtgtaacagcatacacctgtttctcaggtcgaggtttgtaagtggaagcattgatttcaaatgtcaaagaaacataaatattgctcttagggcaataaatgcaaaacaaaactgaaaggctttgatgacatttccactgggtggctgtcactcatcaattccaaccttttaacaaaatttttgtttggtttaaagcaatcatgaagcttcacgagccatcagaggtggagctgtaggagatgttagcaacgacatctcaacagttaggacaggtgaacaatttctaaacattttctctgaataaagagtttctggtttgaaagaagatgaacacacaacactttacgactagggttgatgcagttcggggtggaacacataggtttgcccagctttctgcatgatcacctttccttcccaacttcatcactggtccctttcccctcagtgaaggcaatgcgttagggaccaaagttagggactttcatctttaattgttctttattcaaatttggacaatgtagtcaaagactactattcaagagatactaaaattggccaaagaattaagagtaaacatttcaaaacagctcagcattcagaattagttagatggctagaaggtagttaacagagaagaaattaacggactggagtgaggaacaagtcagtaggaa

SEQ ID NO: 36542 - DNA, 1321 bp, Bovine  19866880966750
  misc_feature (1)..(1): n is a, c, g, or t
ngatttctggacacaaaatgtgtattatcgcccaggttcagccaagaagagggctctctgaggccgcatgcatattaaagtgtgtaatcttgctgttactatggggaaatgatttacaggatcatacaacccgctgcctcctgtcatctgctgggaccctgtggttgccgtggctgcacatggagactcagctactgagttaatgtcacctactgtgtaaaattgcacctcagcagaaggagaaggctgattggtttcagtcggggcttcatgtggtgaaggcttaactaggagaaaagccatccgaacccctgtggcttccagtgagggggtggcagagccagacctgatactgagacctgctttggtgtcaaagctcaggtcattctggctgaagacgcctggacattctgttagcgggtctgtggtaaacttcagggcatttcctcaagactttacacaaacctaaggatgtgagtcagagaaggcagtggcaacccactccagtgtgcttgcctggagaatcccagggacggtggagcctggtgagctgccatctatggggtcgcacagagtcagacacgactgaagcgacttagcagcagcaacgagaatgtgaatattcgacagaaggaaatctggagaccaagtctacgtgtccacaatatgatattttacagagaacagagttaggaaggtgttgggtgtgtagagaaaagtgagacagcaaaagtcagagagaagttgtctggtagatgtcttaggcatccctaaatatctgggacaggtccaggcaaagtggcagcatgagaaatttggaactaggcatttttcacagaaggacaaatgaacttgctattgaacatcttggtatctcagatcagatcagatcccaggcttggaagagtatcctcaagatccagtttgtagcaactcagctgttattggtaccaatccttgatccactggggcttctagtatcttcatctgcaaaatgatgaagctttaacaaggtgaaattcaaagcccctgcctcccgggcgcccatcctgccataacacaagcccctcagtttccatgtccaccatacactgtcctgctgtccagctgaatgcctgacacatagtaggaactcagaaaacattgcatggaatgcctcccgcagcagagtgccagtcagtccttatgagtccagaagggaagattcttctccagtgagcgcattagtgttaatgcggccatgccccttgtttctgctctgcagttcctcaagttttccaacaggggaacagtaacagtacatttaaaggcagtcaggaga

SEQ ID NO: 36543 - DNA, 1241 bp, Bovine  19866881005717
  misc_feature (1)..(1): n is a, c, g, or t
nctgttctcctatttatgctttctagtttttattgtctatcttagcaggctgcaatgagggttgtactacctggtaatcctccatgatccatatgtagtttataaaaatcattttttatctctaaactttgttctctgcctcctgtacttgtctctctagaattcatactattctggaaaactttggaactctaagtctcagtaactccctttcatcaaatacttaatggcactactaatttggttatatggcactactagataaatctaatgtcttcctcctgcatagataggataggctgaaaatttgaggctgaaatgttgatgcttgcaacactaaatctctttagaacatgcatttgttgtcttctttcacattcaccaaaatgccttggaagagaaggacctcctacatctattgtcaattcattatgcattggtttcctctcaagaaccagtcagccccattcaaccagcagtaggtggttggtgctttcccagaagtcagtgacagcatcactttcatggctcttgattctgaaaaatcccatgtccctaagccaccgcagcccaccttcacaactgaatggtaacataacttcttgtgaaacagaagagaactccatcacatgtagaaaactcagccatcaataagcagctctgtaagcccttcagttggggaccaaccacagaacaggctgtccttcaacaatcaaacagtctttagctgtgatcagctgcttccatcacctctgagactggcagatttccaataaagccaatagcaccccctcccccagggtaaggtcatcagcaggaggcaggcattgtcgttcagcgcagcaatttgacaacagtgttagcttacactctattagccagcagctacaccctgacccctgaccctgacattggcctcagatggccctctcctgaggtagactctgatcatttgaggtggcccgccttgctggttagtatgagaggaggcccatcaggaccaagcagggctccttgctcagccctgctccccacaggaggctgaaggcttgcagtacagaaacaagccagagttgaacccaggatggcaaaggtgaaagttcagaaacatatccatcagcagcctgtcaccaaaggatgctgtgagaactacgggagctttcagcgtagggctagcccgttgtctccagacagtcccgctccttaatggaaaagacatatcaaaatatggcttacaaaat

SEQ ID NO: 36544 - DNA, 1437 bp, Bovine  19866881049064
  misc_feature (1)..(1): n is a, c, g, or t
naaggcagagagaaatggggctttgggaaaataaaaatctgttagtactgtactgtctgatagacagtttgtaggctggacaaaataaaacaaataacaaaccttacccactgtacaaaaccccccaaaatcacagcattcaggatggccaggtggaaaccaaaaccactgtggaggctctcagtggaaatacaacatgtcagtctgtaccaaagcaatcgtaactaagaaaaccaaatttaaccacccaaagtgtttctcatcaggcttctctcctttaggaagcagatagatacagccatggagaacatccatctgagaagatgtcccagaacaaggccaaagggacccggggggagaaaagcttccaacaggccatggtgaaataatagggtgaaaatttctaaatgccttaacattttatgggagaggtctaatgtttctacccaggtacattatatgatttccactacctctgatctttactttccattttacagcccactgaataacaggtttcttcaagagggaaagaaagaaaacagaccccctataattgaggacaactttgcctcataaatggtttgtgcgttcagagagcaaaggcacctggaattttctacaggaaagtactttcaaatactaccaccacgtgctggtaaggcaatcctttcccttgtcaaacagtactaaagcttgagctttttaccacgatgcctggagtaactgccagggcctcttatttctcgttgccaaaacagatggggacaagttgatcaaacacagaaagctgcagtggtctcagtaacagcatcaggatgtcaatggcgggcttaactggagagaccactgtgaatggggtgagactacagccactgagggtgggctttccattcacagcctccctcccaatacacacagaggactcctttatttccattttcctcttctcctttctctgcccccttctctccctgcaacccatttctgaaagtaagtcaaggcctccagtggcaggtcactgatgatagatgctgactctaactgctggaaatagccctgtgacactgggccatgatggaattaccctcactcagatcttctcttgggtctgtgcatccttccaagatcaacttacgagacagtgggccagaggcatgaaggacaagaaatgcagacacgcacgcttgtctcaggtccagatgctgcatctgacctaagtagctgtgtctgaggggcatccgcctgccctttcatgcctccttgctggtcagtgcaaatgcaccatgaatgaagcaaacacagaaggataaagaaaccatggcagaacttcttggaacataaaggccttttggcagattctggctctccctctcctccaccatcccctccatgggaagggatgcagggacagtgagaaaactatttgaagaagca

SEQ ID NO: 36545 - DNA, 1706 bp, Bovine  19866881141914
  misc_feature (1)..(1): n is a, c, g, or t
naggaggaggttttcagagcccagggacctgggacatccgaagaagcgagaatcacaagagggctggctggcaggaaaagcagcagcttccattgggaccacccagagcagaagcaagaggagaaggaaagtgggagaaatacctggcttctcccttactcccaccctctgggctcctgaccatccttccctttttggctgactccatccaaccaggagccatttggagagggagctcttgggaaatagagtttgcacagggctgccctctggaatatggggcaggaaaggagggtttgcctctgagagcaaagaggccaatgaccagcggcccccctttcccatccgtcctcaactgatgaatagaaacccttcctaccacctctgtgtagaaccaattttgtaggatgcattcctaagaaagcagaaggctgaacctttagtgcctttgttttcagggcctggggactgccagctggaggctgtgctgaggggctctgcttcttgctttttttgagcttacagatgccgcaccttactttaggatttacaggcgattgcagtttcataaatcagcgatgtgcgctccgtgtgggagagtctgcaaattctaaactaatatgtcgctctttttctgtctagcatcatatttatgttaaggctgtataaatcgtgctctccgcttctacagcacaatcacagtgaaaagcgatgtagctaacaataagaaagaatggaaattaaaatgcaagaaaacaaaatgaagtcaaaatccatgtgacccgagagttaaagccacttatttcagaaatgtgcattgattaagggaaggaaatcaagtattcagtctgcatttagccacttagctgctaagccgttcagcctgttctcttgctgtgtcaaatgtgtctctggtcaaggccctgaggattgtctccacatctgaggtggtggtggtggtggtaagcttctgagccttagtgtcttttcgggggcaaactttccagagggatcttaggggccattgtactgaggaggaattgtaagagcaaaactgggaccaaatttcccaccaacaggtgaagacagaaatggaactcaagaaagcacttctcagccttgagccatgaaatccactgtttcctgcctagcttagcagaccacagtaaggtggattttagcagaagtatttctgccatacagatctcagtgtattttatgggcacagatttcttcttttagtatcagactcctagaaggcatgaacgtaccagagctaaagaacaaggctgctgctaagtgagttgttcctttggcttgcagagggcagtgatttcaaagggaacccacccagagacatagcatcttcctttcctttaggggtatttgcttttcaggtttgtttattacatttgaaaaaccaaccgaaacatcagcttatgcagtagaccaaggaataaaaggtaatattttaacatgctaaaggaattctgccagccagtcataagtatcaatccatcacaattattagaaacaatgtactctgcagtagtaaagagatacagccaatatgcagacatacacgaaataaattccctcttaggctggctgttctgcccgccccccaccctcgccaaggcaaatgcagagactgtacaaaagagcaacatggagacaggggggaaaacaacatcacacattctttt

SEQ ID NO: 36546 - DNA, 1418 bp, Bovine  19866881158402
  misc_feature (1)..(1): n is a, c, g, or t
ncccatggaccgcagcctaccaggctcctccgtccaagggactttacaggcaagagtaccggagtggtttgccattgccttttccataggcaagtacatatagacagaaagtaggttaggagttgcctatggccagaggagcagggagataaggtgtttaggggtgatggagaaggaaatggcaacccacttcagtgttcttgcctggaaaatcccagggacggcagaccctggtgggctgccgtctatggggtcgcacagagttggacatgattgaagtgacttagcagcagcagcagcagcagcagaggagcggggagataaggtgtttaggggtgattgttaaaggatagctaagtttcttttggggatgataaaaattggtcattgcataactctgtgagtagatttaatccactaaattgtacatttaaaatagatgagttatatgatacatgaattatagctcaataaagctataacaaaaaaaattaagagatgtatctgtacatttgcattttaaatgctaataagcaaagagaaatatctgactacttttgaaaaagagaactatgatttgtttaaagatattttgtctggagtgaaatttctagattaacatgctagttaatatgttatacatattgacattctacccaagacttgcatttctattataatagaaatagtaatttattttgttggtgaacttgtgcaaatactttatattagttctttttaacattttgctataaatcatgttgaaatttaggaagaatgagagaagtgtaatcagaacttgagttaatctttatttttaaaaatgtgtatgatactatctaaacctttcacatttgaatttgaatacagttagaatattttactttatattttgttttgaaaactagataatgacagcagtattttttgttttcacttttgtttagtgtaaattttagcatacattcggcaaacaattttaaggatatgcatatttggtttactagatacctgtgtatttaccactcagattaagaaacaggtcactgtcagctctctggaagccccttttattggcctctccaatctcaatccttccaacctcttcaaatatggttcttgagatgatcatttccttaagttgctttaaaattttaccatatatgtaggtatccctaagcaatataatttacatttgccaggttcttagctttatataagtggaatgatttggtatatattctttgttaattttttattttggtcagcattgtgcttgcaagattcacttaagacagggtaggcttcttatgctgctgctgctgctaagtcacttcagtcgtgtccgactctgtgcgatcccatagacggcagcccatcaggctcccccgtccctggggattctccaggcaaggacg

SEQ ID NO: 36547 - DNA, 1039 bp, Bovine  19866881180392
  misc_feature (1)..(1): n is a, c, g, or t
naatcaaatcattgtcacctaaagtgctaattatgtctgataaatgtatggcatgcacttaatgcaaagagagcttaggaaatgatacaccttccgtaattacagtgaccaacctagctccatcaatctaaattttttttcaatccatgttcatttgggtggctttattcttattaaatggctttcttaagcttcaacagacccacttgctgctaataaggaagctcacataagtattttggaactgcctacaataagacggcgtgttatgtgatacacatccagatgagtgtacacagataaacaggaaccacagaggaatatggttacagtcttctcccactgggccttggaattgcaaactgatggtaaaatttgccattctttgcttgcctaatgaatttgtgtatccagttaactaaggtactgtatttctttatcagaggagcctgaaatcctttcatagctgacaacagacccgttagtctcttcccctggagacataaatgacctcgtgggtaggcatgctgccctcagaacctctgacgataacatttaaaaattactcctctccccctgtttttctccatggaagaaagccaccattcttctcagagccaaattgtatgtggcctctaatcgaacctgacacccttacacaaatggaataagagtaggttttaattagactgaaggatgctgattttctctgaagccacttcagagcccctatcctctccgagtcctccagcagacgcactggcttgtttcacgcatccatccatatttggctgcagaaaccttgctccaaagggtgtgtgaattcaggcctatcatcgggactgatcagctgaatagtattttcagatttttgttttgctctatcacaattctgtctttttgtgtgtcttaattgcagatacaggcaaggtgctctgtgggaaccgtgtatatctgggcaggcttttctttgcctcactgaagtccaacaaaactattctcttgtttgtgcctcttctttctctctgggtctttttct

SEQ ID NO: 36548 - DNA, 994 bp, Bovine  19866881243239
  misc_feature (1)..(1): n is a, c, g, or t
ntgtctggctctaggtgagtgatcacaccatcatgattatctgggtcatgaagatcttttttgtacagttcttctgtgtattctttccacctcttcttaatatcttctgcttctgttaggtccataccatttctgtcctttatcgagcccatctttgcatgaaatgttcccttggtatctctgattttcttgaagagatctctagtctttcccattctgttgtttccttctatttctttgcattgtttgcaaagagatccaaccaatccattctaaaggagatcagccctggtgttctttggaaggaatgatgctaaagctgaaactccagtactttggctaccccatgcgaagagttgactcattggaaaagaccctgatgctgggagggattgggggcaggaggagaagaggacgacagaggatgagatggctggatggcatcattgacttgatggacgtgagtttgagtgaactccgggagttggtgatggacagggaggcctggcgtgctgcgattcatggggtcgcagagttggacacgactgagcgactgaactgaactgaagtgaaggtttatttcctgttgtccccctttttgtgttgggggtctcagagcccagcacattcctgtgactgtagttgattcagcataattgatgcagtctcatttcccacagtgatgaggattatatcagcttggtttaacagtctcattttctgctcccagtgcacacttgttttaatgtgtttcagttaatgaggtagaagagagaacgaggtgttactgtttatacgcagacagtgagtttgtacggggagccccgccacagcccatatggccccaggcgtcctcagtggcaggtcccacagagcgaagcctcctttttggaacatgtctttttttgtggctaatgctgataatgatcattagctataagatttcctgatactctttataatggcgcctcttggtgtgtctctcatgtgtcat

SEQ ID NO: 36549 - DNA, 698 bp, Bovine  19866881260335
  misc_feature (1)..(1): n is a, c, g, or t
ncccaattgtgctgtatattgaggttaaaccctgtagggcagctcatagccccaggcatatgggtggggtcagagtagcaggtgggctgcgtggctccacatcgcccactctggagcacattcgcactctacccatgtgctgtggcacagcagacgggaggtcctctctctatagctctcaggatgttcatagcagagttgtttacaacatcagaccaaaggctatagccagactaggtgcataatagaagtggataaagtccgtatgctaacatctaaggaacctttacaaagtttgatataaaagcatttgttggcaaggagagatgttcatgatataaaacacagaaagaaaaaaaaaggacatggtaaaacaggatacagcatttgatcttattttcattttttaaaaaaggaggtggatagatagatccatctagagagagacggagagagagggaaacaggcttttagaacagtcaccaaatgtttacagctgtgatctcaggataatgggcttacaggtgtttttttgttgttgttcctttgttttctctgtcctttttctataatgaacatggatgactggaaagttttttataaaaagtcacctgttgaattcctatagaattattaatgttcaggttccctttcagtctaaacatagtttccccagaccaacgactttcaacctttca

SEQ ID NO: 36550 - DNA, 1324 bp, Bovine  19866881270812
  misc_feature (1)..(1): n is a, c, g, or t
ngatgtgattctctgccttcctaacaccaattcccaagccctcttccctgtaaccagctgccaagtttaagatctaaaacctcacttccattgtgtgtctgtgtgtgtgtgtgtgtgtgtgtgcgtgcttgtgcgtagagctgctggtgtgtgatgggagtttgcagggatcttctctccttgcttcatgttttcacaactcccacaggacaggaattaaaaggaaggaagagctgaactcttcccttaggcaagtcgatctgtgcaaaaacaaagagtcagaagctaggtctccaacaggtcagtctggtttccttctctgagaagcatcaagggctactttttcatctcaaccatgttcccgtcttgcataatctataataatgtgattctgaatgcattttagaaaatgcaagatggaatgggactctctcagctcctaccaaacacgtggtctgagagacctacaaggagctgcactggagggttcactaaaagaaaaaaggacagccacaccatcctctgccgggggaatgtgcttccaaattgacggctcatggtcattttttgttgctgttcctgaaaaagagatggcaatcgtggagttggaggttcaccttttgctcttgtgtttaattgctgcaaaagccatttattaccttgtgttcttccccagagggaacattatcctccacagcagccaggcctggctatgtctggctcatctgactgcccagaagtgaacccatcacctccacatgattctggcgcagctctgtctccacgtctgtcagcctccagctcaggaaggccttgtaaaagaaagaacggtagaaactgggatttctttccttttttgaattttgcataaaaatctccccaacccacattaatgagaaaacatcaatcatccgtctttccccgggaatgtcgggagccatcccgagctggtccacagtcctgctcatctgtacacatgcagggctgctgaaattgctttcccttagaaaaatatgttcatttctaacttcctcggatggctgtgtcaaatgaaagtgctttgtcatttttaatgcccagtgttgcctttctccccactgcctcccgtcacaatccagccagtaaaacccacaggtattttggtttaaaaaaaaaaaaaaaaacagccagaaagcacaggggatggttggaacccaccagggtcccctcacaggctcttggtgcattacactgaggcaaacatgactgtaggaaaagttctttctgttcctctggtgtttcctgggaccttgggcagcatctggatagacacacagagacagtg

SEQ ID NO: 36551 - DNA, 1082 bp, Bovine  19866881460817
  misc_feature (1)..(1): n is a, c, g, or t
ncttatcatgagtcttatataaaagctaaggaaaggtgtaactagctgtgtatttcagcaagattcaatctactgataaaatagattatcagtaggagaggagagcatcatagactccttagcatctttttcaagccagaaagtttgaggcacagaggcacagacaagtcaccttactgatcagcttgtcgagaaaaacctgacttctcatttgtatgacttaaagcgccttcgttttttgtttttatgtgtgtgtttttttaattttgttttgttttgtttggccacgctgcatgacctgtgggctctcagttcccagaccaggaactgaacctggacaactgcagtgaaagtgtcgagtcctaaccactggaccactagagaattcccaaagctcatttgaatgaagaatcttgcataaacttcagatgtgtgtttttcaaccatttgttcctaataatgatcatgcctgggaaagagttgacatactttaagaaaaacagctgttagtgggaggatgttgaaaggtggtagaagaagcaggataagctaaggggctggtgtgaggtgtctcctgaattatggatttcttgaggtgacaaattttatcttgttgcttgcagtatccagcatctagtacattatctagaaatgagtaatatccctttaaattattctacttaaaaactatccacaatgtgtatctccaacccattacttctttaatcatatttctgggaataaggaaagtaatttgtaaattttcttcattaacaaatatatcactgtgttataatcttttaaaaaaatcaatgttactccagtttctccccccaattatattttcaaaattcttctctcaaacaaccatttaaaaattagatgacttctggggctcaaatttattatggatctattcttttagagaaaaagcaaccattcgtgaagtatcctaatttttcaggcttagcaaaacagtctgctgaaaagggctctagcccaaatgagcttctatttgatcctaaacaagattctttcaccagaaaacaaggagtcctgggagagggaggagagttatacca

SEQ ID NO: 36552 - DNA, 744 bp, Bovine  19866881506961
  misc_feature (1)..(1): n is a, c, g, or t
ntgtactgctatgattttcataaaatattaaaagtcaaattctctcaaatctagtattgtattaatttaagtacacttaaatacatgactgaaatcatatgaaatgcatataaaggaaattggtgttctgtgccagtgataagcatctggatatgactcaccaaagaaattactatatatctgaaggaaatattaaaataaacagcccagcactagtgattgcatagaactgtatatattcgctctgtgcactggacaggaattttccatttcatacatcatttacaacttgctgcagtgattctgcaaaatcagaccataccattagcacacacaaagagaaacacccagtgttctcattgctggaaaattcaagtgtttggggcttcagtgtgcaagaatgtcagtattccatctaagcagatgttgctgtgataaccaggataaggacaccaggtgaccaagtagggatcaaatatccacagtcaagcacactgactttttaaaatctatagtccaagcttggtttatactcacagatatacttaatttttaaaactacttgatataaatgaaaacaaaatggtgaaagtcataagcaaattcctccagaggggtatagtattgtttttaagtgggaaccagttcttatttctaaagtattttatcaaggcattcatttgaataccaaccatctggtttcctgaacacttcatcaaatgaatatctgatgcagtcacccca

SEQ ID NO: 36553 - DNA, 1271 bp, Bovine  19866881615953
  misc_feature (1)..(1): n is a, c, g, or t
nacccccatgaatcgcagcatgccaggcctccctgtccatcaccaactcctggagttcactcagactcacgtccatcgagtcagtgatgccatccagccatctcatcctctgtcgtccccttctcctcttgcccccaatccaagctgaaactccagtactttggccacaattaagaatcatgttaattcactcttctatagattaaaatgtttatataaaagttgtgaattgtttttataagggagaaaggagatatgcaagctgctgatatatacgacatataagggaagttaggtcctcttaaaatctgtagcccacaaaaaaatactatgaaaacttatgcttttccatttaaatcttcttggacagccattttcttctcttttttcatcaaaaacaaattgtgacggtcgggttagttgattcctttgactgcataaattagtcagcaatgtggtcactgctaatgcttattaaaataaatatttctaaaataaatttaatgttattaagtagcttgatgtgaacattcccacttaccctgcactttctgagttgttgcttaatcctaatgtttgttctactaagatgcagatatacagagagatgcctatctgttagagaatgactttcgtatcagcctgtttccgtgatttcaagatctcacagtatcatggaagtaaagtgtgcgtgagagacactccaactacacgtcacccccttccctagggatccttattttatgttttgttaaacttacatggacctctcactgacctgaataagactaattttaaaggaacatttctggggtttatgtgagttcttatttaagaagtgtgtgactagtaaacctgaaacacaatgaaatccattgaaaaattggtatgtacaaaaaaattatggcataaacatattttgcttatattataaaaataatagaaaaggtaactgtagagcttttcaggattaacttattataatttagaaatatgtaaacatgataggcgttcaacagttgcaggcatcatagtgttctaagtataggtatgaataaaggatggttaaggcattagtaatagtttcaaaacacagttttctgagctaatttttaacgtgagccccgtggaagttaaggccacacaaagaagtattattctttatgtattctccctgatagtgatatattgttttgctttctcaacataagagagatttagtttagaaactcaaatcgatttctgcaggcttgcacctgagcttagggttt

SEQ ID NO: 36554 - DNA, 1132 bp, Bovine  19866881641727
  misc_feature (1)..(1): n is a, c, g, or t
ntgtatctggcactgtgttttgtgatagaaatgcaaaaattagtgctccctactcccagagacacacaggttactgagaagcatttagcagacaaacaagcatttagcagacaaaacacaacacagaaggtactatcatagaggtatagtaatttatttaacagatgtctattaaaggcatatcatgtttaaggtatactagatactaatatcggcagagaaggcaatggcaccccagtccagtactctttgcctggaaaatcccatggacggaggagcctggtaggctgcagtccatggggtcgctaagagtcggacacgactgagcgacttcactttcacttttcactttcatgcattggagaaggaaatggcaaccactccagtgttcttgcctggagaatcccagggacaggggagcctggtgggctgccgtctatggggtcacacagagtcggacacaactgaagcgacttagcagtagcagcagatactaatatgcaaaatggaacccttgaaagaactcacatccatgtgaagtcatttgaaggacctaggggacagagtacaaatgaaaccctcattctatatatctagatattgaaaagtcacaagtaaaaatcagcctagtaaataggatatttgtaatttttaatgcctaactgatctgattccattcctgcctctcttttataatttaaataaccattattcacattttctacttaccattcttccttcttgataatccattttatgcaaaacaatttggattaacagttcttgataatccaaaattggaacttctaataaataaatatcaggttaaatcaattacctgcctagaatcaaatccaatcaccttattaatttccaatttgagacaaatcaaactgtcattgagcatcctaatacatatatctttacttcacattcatgattatttccatagaataaaattctccaagagtgtgatcattttatgacttgtgaaagctacggctacactgccctaaggctatagtgtataagtttacactcacactaatagtgtatgagaaggttgttttgcctgtactatacctggtggtggaaattctaagttctttatttttttgaggatttttattta

SEQ ID NO: 36555 - DNA, 1518 bp, Bovine  19866881666210
  misc_feature (1)..(1): n is a, c, g, or t
ntggatggatctagcaggcaacctcagtggttgcctcttgaatcctgttggggcaaaaaaacaaggaaggggagggtaatatttagactctactgggaaaaggttcactgatcaagttttccccattctaggcagttggctatgatttaggaaggcgtaggctgtccagagactaacactgcatgacggggcatataaaaccttgcaaaagttgtctgacagcttagacgttatttttgtttttatctgcatcaccccatccactactgaagttgatgtcaagttatatttacagttgttaggggccaagatagaatggtgactgaaggtacctattctagagccaaatgccagtgtaaacacctactgactgatggccttggacaactgactttacagtcagtttcctgattgtaaaacggagatgataatagcttctatctcatatggttgctgtgatgattaaatacaattaaacattcagcatatttaaatacagtatccagatcacagcaaactcttcttattgtcattattttcaatagttatttggtccttcatattttctcaaggttctgacaaactcaattggactgtctagaaatactttgccatttgaatatcatcaatacctcctctgacacctaaaatagattcattagggaagatgccctctagaccacagcatttgaaactggcaaggagataaggaggttccctactttcctcaaggttgagattctaatgtattcctgatgaaaatctatatacacattcaactgtatttgatctttatttctatcccatctggctagcaagttctcattaagatatgatttaagaaccaaaagttcattaaaaagatcattctatgacaaagtgagatgagcaacacagaaatgattccatatcttctccagatcatcccatttagggcttttttccaactgaatccagcataattcataaaagcactgagatttgccttttaaagccctggaatgactcaacaattaacattatacattcctgatatctgatggatgcactggctccaaatttgaacaaataccaccattagtaactgtcttctacagctttcttactttaagcacattatcttaggaatctttccttctatgttcagttctacaggaaaatattcacaaatagcctctgacttcaatataatttcaccttactttcttaagaataagaatgtggggaatgaaaaggactgaagttttcattcagaatgcttaaaacatctttttttccagtttttttttttttttcaaatgaataaaacaaaaactcatagtaattgcaatgttactaacattcttttaaaagcagggatcagtcacagaaatcttgtgttctacaatgtcaaaatttgtctgaacgacactttaataaaatcacaaaataacagcatgtctattcatgctatataaatatgaaaaacaccatcaaatgtaaaacatgagatgcaccatttatgtaattgttacaaat

SEQ ID NO: 36556 - DNA, 1156 bp, Bovine  19866881776448
  misc_feature (1)..(1): n is a, c, g, or t
naggatgaaatttcctcttatatataggaattactagtgctattgctgttttgaagactgttcttatttcaaattctactctaacagagtttaaaagccctttgctaggaaaggtaaatgtagtcagtcattcatttaattcaactcactttttgtatccttgcgttgtaaacagtggatccaattcccatttcagagaagttaatcttacctctttcctcgctgtcagcaaaacttccttgcttgttgttgtcccaggtacctaaaatttgcatataaacatgtgaattaaaagtatcaatgctattagaactctctggggccaaatatcatccaagctggcaggcttacccttctcaaggaaataagctagtcagtcagctccatcaccaacacttcctgcaacttcataagtgccaggagagacaaggacacctagaaatatcaaagagctgtgtcccctggagtaagtgtccttgctcacacaacctcaggatcagccatccacctctctctcacacacacaaaatctggtgacagagacaagaacttttgctcatattttttttaatgtatcacaatgagcaggaaacatacttgatgaaatattttcaaaggagtatattcaattaccatctacaatcaacttaactatgacaacaaagtttttgtgacaaatttttttcagtttgaaagttccatgtggttctgttagtctccatgtattttggtacagttcgagatcagcattgttacagtaacaaaaaagctaacaagactacattatagaaaaacaccaagaacatcatttttggtttcacttgctctatttttttttttttttttttgatttttgtttttttgtacattgcaaaggctgctcatatacctcttcacctcagggtcacgttcatgtatgctttctttcctacccaaacttgcccccctcccccccgaaggaagtaaataaacaaaaaaactagtcaaagctttgtttcacagtgggcagtatctcagcgccaacaaccaaccaactcaatttatgcttctatttaaaatgttttaatttaatttattatttaaaaaaaatatatgtccatgaacatcaagtgcacggcttgggtcactgcctctctctcctgcaacttcctgccag

SEQ ID NO: 36557 - DNA, 759 bp, Bovine  19866882100243
  misc_feature (1)..(1): n is a, c, g, or t
ngcgaactgggccggtgcgcagccggtgcccacccaagggcgggtgagccagcaagtgccaagattcaggaggagactgtttcactgaagagctggcatcaacctcctctgttccccactgtcaacctcagatgcctcggaaccactcaactcacgggaccccacctgttgcccccggaggagccggtggacaagactgtgcctcccccgccccatccgacaaggggccgtgggcagccggggagaaccagcaggcccttcccctgccctggggcacccagaatttgcctaattgaacattaacaagttgctacaataaagttcctctgttgtgagctaggaaccttttcggcaacaacagaagtcttgttacaaaccgctctctaaagccaggcctcagcctcgacaggtgtgaacaagatttaaacacctcctacaatacaatgcaatccaaacaaaggggaaagtcaatcccaacctcctggggtgaaccttgtctaacatcttcttcactcatgcagcccaagggagccaagtgaacgcgtggagagactgtctccaggctgggcaaggagacctaaccaaccctgaagcaggtctctctgccactccagactggccaccagcctggtcaccctctagcagaagacgaggctatgaatgcctcacatgcaatcctgggcccccacacgcacgttccatccacccctaactcggccagctggtagaccattctggcgagcttcctacactcctggc

SEQ ID NO: 36558 - DNA, 927 bp, Bovine  19866882209101
  misc_feature (1)..(1): n is a, c, g, or t
ntaaaaccaagaaagggcttttgttttagggaaatttcagcctgctgtgggcagagagttagatgaagagataaaatagagagatgagacttgggactccaagcattctgttaacaaagttatgaagcattcccacaactttaacctggacccatgttcatggaaacactgggattactgggaaggagcacatttcatattgagttttgaaacagtcttcagcagggagaaaaatgtaacttcaccttaatggaatgtgaatttaaagcacagtcctgtatgtaattgagtaaaatgaatggcgttaaaaaaatttttgtgtttatcatcacagccagagcaacaggtaaaatcattttgtgcatcagagtctggttcatttgttaaatcagtggtcatctttagttactggtgataaaatctctccacatgaatttttccagaattgagtacattacctttaagaatatctccagaaaaggattcatttgtatttgtaatcttgaaggacttgtctcatttacagttttattttaactaatagccatttccaaaaaaaaaaaaaaaaaaatccatgacaaactaaatctcctgatgatttcctcactcattaatgaagacttttagtaagtactactgtgcaaatgtctttgaactgttttgcttaaaataatgtttttagttctttcgaaaaggtgctggccgagcctttaggtatcaaaatctctatgcttagcgctccttttacatggaccctaaaagttaaactgctacacctgggggatttttctttaaatttaatttaactgaaaatctcttcaaatttgtattggttggctttggtgcagggcatgaaataattttccatcgcaccccacccattcctcgaaggtcagactttggaattgggctgttactgtcttgctg

SEQ ID NO: 36559 - DNA, 2954 bp, Bovine  19866880371870
  misc_feature (1)..(1): n is a, c, g, or t
nactgcagcccatcaggctcctctgtccatgggatttttcaggcaagaatgctacagtgggttgccatttcctcctccaggaaatcttcctgacccagggatcaaacccacgtcctgtactgcaggtggattctttactactgagccactggggaagcctaagagggttatatatctaggttattgcaatgtattttcttttgttctttggaaatgttcatggaagccatacaatttatgttagagaatgacaacatggaaaatcctgacatcatgtagttaaactgtgaatggaggaataccttacagagtataaacatgtagtgactgaatccatatatacaacttgctcttggtagagatataaaatattacataaaatacattaattgcaatgaatcatttgtctcctgtcttttggttgtcagatccatcaaatacaggagaaagaaatcttcaagtatcttagtttatgagattcttggagaattacatgaatatctcagttgctgtaaatgaccaacagattgagatgcttgcaataaatgatataaattttagacttctaagtccagagttgtatgcttttaaggtggtcatagctaataactcagcttctcatcagtttcattagagatatgccaatctgctatcttgcagcaaggaggaagagagagtttttaggggtctattctgggatgtggtcaggaagaaaatgggcaagttgtgtgtaactgttccgattaagaattcctgaagtctctgaattccttccctctatattaagctaaaaaatatctggccatttaaagtagatttcttttggcaccatttggtttatgagttaaatttggcaacttaaccaacactggaaattgaacccagactctggtgaaggcatccttatcaagaacctggatcatatcgaaaatgggattccacactcctagaaagtgcatttctaaagcccatttgaacaaattttattctatgataattatattgattgagattaattcctaaaaatcttgttgaatatatttccccttccaaattctgattatacatttcatcccatagtctctgtttagtttaaattcattaatttatgctttcctgtgtacaaattgtttattaagtgctcagcacagttactggtgccaggggtgcagcaaagaacaaaatgagctgcccacccccacccggaccaaactcctgttttcatggaattcacactcttgctggaaacatgttttggttacatcccactgcatacaaaaccacctagttcatctcctgcctctcctggtgggctgactggactcatctggactcaagtgcttttgttccgtgtgatgttagtttgaagggcttggatgtccagtgtccaacgcagcgtcctcttgtgcctgacctcttagtggaaacagctggagaactggagtcaagtgggccactggagggctgggcctctcagtttctccatgtagtccacgggctcactctttccgcagggtgttgtctgtctctacagagtctacccaggggagttaccagccttttcacggggtagcacagagccctcccaagcacaaagtcggaagtcagcatgccctctgaaggcttaagcctggaactggctcagcatcctttctgacagattctcaaggttcaaatgagttgcagagctgcccagattctccaggagggggactacccgagggagtgagtcccaggaggcggggttcactggggactatgtctgggaacaaaggacacaaaaaagtaaaatatatagtggatggtagttaagtgcaacagagaaaataaaacaacaaagggcaacacaatattgggcaagtgttgcaatttcaaatataacatccagaggaaatctccaggaggaggtgacattcaagcccccaaaagttggaaggaggtgagggaacaagtcaggcaggtgtgggaacttccctggtggtccagtcgttaggaatccgccctgcagtgcgggggacgcaggtttgatccccggtcggggaactgggttcccacacactgtggagcaactgggctcacgcgctgcagcaactgggtccacgtgccatcctcgctggcaggagagtgtggcaggagagacggcagcaagggcggagagtgcagaggcctgcaatgggagctcccagcacctgagcaagaacagggagcctggggtgaagcaagcaaaggggagaggggttagagatcaggagggtcaggggacatgaggtcagtaccaaggcgctttggcgccacaggatccattcaatttctcctgtgggggactctgcttcctcagtcaaggagggggagggcagaccaggaatgttggcaagagcgccggtggctcaggtttcttcaggcttaaatgtttactaatatatctgctgcacagctcatatcccattatttccctcgagatctatgcaagatacatggcagtattctcaattgccttgatgtaacaagctgcacggtccatctccagtttggttttcatctgtctcagccccgtgacaacatagtaaaaagagatgcatggggcatggggacaggaagactctggattttagtccgtgcctcccagtgaaaatggtaatatttgaggtcacagttccctcagtttcatttatccagaaaccagataaacaatcacaaaagccaacagttcctagaagtttcacccacagtgttccaggcagccccatccatgaccttatttcccagctctcctttatatgactttaaatttcccgtatcagaattttaatgtcggtgccattgctttttatgatattttagcttgagaattgattccacatacaccagtcatctcggggtgggggaaggtctgtgccctattctgtacctaacagcctcccttgctttggctcatttctgcatccttcagtgtt

SEQ ID NO: 36560 - DNA, 1169 bp, Bovine  19866880473194
  misc_feature (1)..(1): n is a, c, g, or t
naattgcatggcactgtatagtccgtggtgtcgcagtcgaacccaactgagcaacttgaactttcactttcatagcaataaaataaattctaactctttaagactatgggcaacgttatccataaatctgacccatgttcatctgttcatatcaatcccctgtacaatccctttctaagtatgctgtgtaatgaaaaaaatgacaaatctagaatgagtggtcagttgtattgttttagtttttatgactttttcacaggtacacagagatagaaagcgatatatatgtatctgcatattggcttccttcaacccaaacttttattttcttgtctagatttccactgaaatctccattagtgtcaatcaaaaatgtcaatccactaaatatataccagttagtcagcaggataatgagtgctaggaatttaacttcttacagcaattaccatcaatttgcagtttgaaagaatgaaaaatctgagaattgtatagtggaatacattatgataagagactgaaatgacaacaggttgtgattaagtgaggtcctcacaattctgttaattttcagtatactagggcttactttgcatactagatatattttatacccgatttaattatcagaaaataagtttgtctcccaccattctaaataaaaatgagcaagtttcaaattgcgcatgctctgtgttcaagagaagaagacctcaaggcacatagacttgtgcctagaggcaaccactcagaaagcaactgattagggcactcaattcccactaaattattcagaatctctaatggaaatcagatccaacgcttcctggtgtggagcagcccgtcttggttacccaatattcagctagctactcaagagcttttgagaacaataaagtaaaaggtaaaatatattttaatggtgttcacagtctcttgggtgatttcttggcatgaagttcctcacttcctgacagctgctgccgttgagaagagacagagaaagtgaaagaaagaaatcaatatttaaatctgaaaccgccagaaatttccatgaagggtgccagtactaactggtttgcatatgtgtttggcctttcaaaagcccccagtcttaagaagagagaagacattctaagtaaacaactcattaggaatcacaccgcaag

SEQ ID NO: 36561 - DNA, 3300 bp, Bovine  19866880486200
  misc_feature (1)..(1): n is a, c, g, or t
ntctccaggcaagaatactggagtcggttgccatgccttcctttcagggtgtcttcccaacccagggattgaagctacatctcttaacatgtcctgcattgacaggcagtttctttagcactggcaccacctgcaaagccccttcttccttttgtagttattaggaaaataaattgggggagaaaacaaggtgattaaatggttgaccaccagtgcttgcaggtggcaaagactttggacttaaatgagatttcacatccatttgtagaacttgaggatatagcgcattcataatcactatggtaagtggagctcatcctctccatattgtaaatccatactgaccacatctgtgaagctctccatagcatttcagaacttcagcttagaacatttctggggtacacactgctctccagaacctgctgccctcaaatggactagatcacactcccatcataccctaaaccctgagcatgcacaaattgtagttgcatattaatcatttggggaaaaaaaattacagtccccttaaatccaccacactgtagatcactgtcattgcttctgaaagcccaagctggaaagctggaatacccccttcctgacccagctttgcttgtgccttcaaactcatggcacttgctgcttcctcttcccacacacaaacatcttgtctgcccacttctgccaaaactttccaccatctcctccacactgctcttttttgccatgaacaaatttccttccacacagctccttccctgaaaacctcctgatcttaactaacatcttaactccaaccctggggcatcctgtctcctttaaggatgctttcacacctggctcacagtctttacctccacctcatcttcctgacatactgggtgacttttcatgtccatccagaacagtctatccatccctgctcctcatcgtctctaatgaactttgccttcacccatacagttacccagaagactgtcatcatctgaaactggcccatgacttctttaaattctgaattcaagcattcaactcattttctacaacttctcatccctagagctcttattccagttaccagcactcctcaatattgtaaagaccgtcaacaatgttgcccatctaacttaaccgtattgtcagctcccttctctcttcaggtggtttaaattccacaacccatcccttcaatactttattattacttcaaataactttccccactgcctcctcgtcacccattcagaaaattcctttttctagtaaaagcaagtctgccttctccaatgctatattccgcccttccacgttctgttttggaaatatcccctccatgaagtttggggccactagaacccatggtctccagcctccaccaggcccttggagatcctcaagggtcttgtttccagaccagtgctacttgttctatactcttctaaacctcttctgcttgggcaacaactttgatgtctgctttctttcctgcagcatgtctcatcagaaagatatcctggtttctacctcacaaacaattgtctcaagtatgtctgcatgtggcaaggccactaccttagttcagtgccacatcgtatttcctctagattattatagacatattaaaaaaaaacacaaaaactaagctacctctctggtcttgctcttcttcacatactaactagtgtgactacttgacaatgcaaatctgtccactgatttaaagatattcttcttatacctcttagcaaaacgtcaaaactcctttgtgtaacactcagcatcctgtgggatcttctccatgatgatttattccagtttaggtctttccaccctctctccatctgctgacactctccatctacagttccttcacattcctgcccttgatgaactctacagccatcatgatctggcctttctctgtatcctgcctacttcctgttattccctctgacaggtttggataagagcaattcatctttcaattgttggttttggcgtcattcctctgggatgcaaagttgcactccctccctcttcggcaattagagttttactgtcaccccattctcattaccaaagacagaccctttatgttgaattgctgtttcttctttgcttgtgttttatgttgtggtatatagcttgacagaaggccatttggggattgtttgtttgtttgacattttagaaaaaatacactttacaaaaggatgagaaacagtaactctcaaacacttgccaaatcctctgagcctcaacttatatatttgttgaatggagattataatatgatatgcatagaatgagtaatgtatgattaagtgattaaatgaaatgtcatatattaaatgtctgaaaaatattaacctttaaataaattataatcacaatagcattttgtaaatttattagagcagagggttttaaggtcattgttgcaaagatgatgccagattttatgtaagatgtttcctttcagagatctacccacatatatggccactgcagggaaagtaactaatgcttctaacaaaaacagaggtcataaatgattaaaagaacacttaagaaggttaccattttctttctactacgatcagtaaaggtgtgaaatttcaaagacatagtttgagttattgtgatcactgtggttgtgacatagactgtaagcccttcaacctgtctcaagcatgtgttccttgctgtgtctgcaccaaatgattgcatgagtcaggggtgaaaataccttgtcggtcaagcaactgatgagttgtttcaatctaatctgttgtttagcctttttcagccaaacttaggctctgagagattagtaacttcttagaaagccactcttgaatacagactcaacacaaagagacttgcattgcattaaagaaccccaaagctacatggtatgacctatgtgccaatatctcaatgagcatgtacatataccatgtatcctagtgatattttcactagtgttgcaagcaactctctaattttttttaattaaaaaaggctttcatcatttaagaaacaaaataaaaggaattgcatttttttttttttttgtattctcatctcctacaaataggtaggttacaaataatttcccatctgttaacctgaatacagtgatcctaagggaaaactgtgttggtgtacggtgtgtacacatatatttctaagatcttttggaattgtgccccggtggtactctagcaagaggctctaggttggcaattacttttacatgttgggatcagttatcataccatcatagactga

SEQ ID NO: 36562 - DNA, 1132 bp, Bovine  19866880492677
  misc_feature (1)..(1): n is a, c, g, or t
ncaggctccagaggagaacctggggacttaatctggaaaagtatgggtttttgttttcctttttgatctcaaacaaagcaggtccagcctgtttcatttatacctacttgaaaatttaaatttcatttcaattaaacatttcaatggtaaaaataaataaataataaaactatacgttctagtgacaatggggaaaaaatgagaaagataaaaccattgattctaaagcttagaatggagccagctcaggccactgtcaaaggcctggtcactgagtgagagagggcagagaggaagctgttacagtttgggggctgtgtgcagattctcatgcattagggctgaggtccagcaggaaacctgaaattgggttcagatttggacctttctttgtggagatggcataacttaacagcaactcggttttagggaatgactgaagagaggattgagaaaggagcagagaggaatcttgtgtgcctttccttagaagtcagcaaatctcttccttactggttcattatagatattcaatggcataatgcagggaaagtacagataacaatgctgaaaatagacctagctacgataagtaggagacggcagaaatatttgttgaatcgactttatcattttctcaaattgtctatcctgctttctttcctttgtcttcactgcaggaaattgagttttgggctgcaccatgactttgtaggagatggctgcattttaacctctttagaagcatttcccatagagcttcgtgcaatcaggacataaaggtaaaacgatctgtatcattgctttgaaaagctcaggaccattctaattgcttagcaggagagaaagactgtgcagaggtctgaagcactaagatgagctgttatgaaaagggttacatgtatcttagctctgttggttctttgaaaatcaaaacgtctgacaatacaccctggggaagcagctgtgcctgttcttttcaggcagatgagcttaatacttgctatagcagtgatttcagacatactgcctttctggaaatgagattgtatttaaaagaacaggctcttggcatctatctcttttcttccaatgactagtaagaaaagatgatgtttctgaaaggagattt

SEQ ID NO: 36563 - DNA, 1147 bp, Bovine  19866880553763
  misc_feature (1)..(1): n is a, c, g, or t
nttagtaattgtatatggaaataatgaatgttaaacaaagggaatctaagaactttttgtcattttaagtactttctacatgatcagatattacttaagtataaactgctgtgtaatatcaaagcttttttttgggatgaggggtaatgctacatgttaaatttattgtcacttaagtaatattgtaacacttaagtaatatatgatcatgtaaaaagatgatgtaaaaatcatgtaaagatgacaaaaattcttaaattctctttggtaacattcattatttccatacacaattacttggtttatatcaaatgatcctactacaaattgagagtcatcctaagagaagttttcatgtgattgggctttagttttacctgggaaaatgttttcattctaataatacaataataatcagatggaattctcaaaatataaccattcaacctaagtctacaataaaataaaaagatgttccataaaacagccattgaaaaatctggtagctcatcagaatcacttgggaaacttaaaaattcttcctgggcttcataattgatgactctgatatacgacttgttttgtaaactattgtcatagcacagggaaagtaaaggaataagtcttgcaatcaaactcttcaagtctgaagcacttagtagaattcagggccatatacaacaaaatttcattataacaacaaccaaaaaatacaaagagagtgttatgaaacaaagctatttccatgtctcatgcagctggcccatagaaacagtgccttattgatatgattacaataaatactatacaatgaataaacacgaacatcaagtgctttctctttgaggccatataagtaatagctattgttttatgaagaaactaaattgtatacagtttacattgaaagcagggagagcagagcagaactgatacactttttgagatatttatgcaactgtgtcctaccattaaatagcacatgctatatattccaaccacctaccaagaaaataaaatgaataattcaatggaaatggaaatggcttaaaattataaaagcaccaagttaagtgtatgttggagtcctctgttgcattcttcctaacaaaatttcatatcaatgacagtgcacaatattgaatac

SEQ ID NO: 36564 - DNA, 799 bp, Bovine  19866880593303
  misc_feature (1)..(1): n is a, c, g, or t
nataatggatgatgtgcctgtctcagtggaataatttagtgactcgctccggtgaaaggtgaaatgctgagtgaggattgaaatactccatatgtcttaaaattccacaaacctaggcgtgtgggagacattccacacagaaactcaacatgactaatccttagaaaacagtctgaaatcgatctttcttccccgctgcctggacataccgcagaaggcatccccctggggctctcatggagccatctggaatttttcaggtttaatattagtactttgcttctacagaaaggcagcaaaaacccttcctcccgggtcttccacctgagacatctagtggtccatccatcggcatggattttcctttattcctataactctgtgagaaattaattgtgaaccatccaagacaggcttttgcttacttctcatcagaaaacaccatgaatgaagatgtttccttgttactagctcttttttatgtcctgggtagcttaaaaaattctccagtttcttttttcctttttaatttttattttgtgcaggagtggtgttgattaatgatgttgtgttagtttcaggagtgcagcaaaagtgattgatgtacatacacatatggtcagttctttttcaaattcctttcccatttaggttggaacagagtattgagcagagtcccctgtgctatacagtaggcccttgttggttatgttttaaatatagcagtgtgtacatgtcagtcctgctgctcctttgttcaggcccctctggtcctttattggatggtgggcatgtctgg

SEQ ID NO: 36565 - DNA, 953 bp, Bovine  19866880606247
  misc_feature (1)..(1): n is a, c, g, or t
ngctgctgtgccctcctactatctctctggcagaccacctttccttgtccttcattccagtccctcctctgtgctcagtaattcggtgttttggaaccacctccgtcaattctaaggacaaacaatgatgaatttttctgacagctcaaatgcccatgatttctccttccctattcactggtttttttgagtggattccagtttttctccccatgggcggtgctgcctttcctatttaactctacactcaatgaatagagacgttgccccattctgtgctgtgccctggcacagagttgattctctctgtacaagtctcactgttacatttgctgcaatatgtgatgttggcaaacaaacccttcagtacacatctttgagttccattgtagcctcattaacattgttccctcttgtagaagataggttagtgctggtccttttccaaagaaattcattactactgtgctgaaaagatggcctttaatggtggtctcactgggtgctccccaggctctgtgaaaggaagggatcagaaatggcagcacgcttttccttggcttgtcttctttcacatttcctaggaaaacagacaatcactgctgattaaaagcaaaaacaaatcagaaccaacaaacaaaacaaaacaaacccttaccctgggctttctgaaatcaggttatattactttacttcttccctgaccctactgttctctctcactcccccttattaaatctgactattgactgtaactctataatcctttgagccttctgggttctttggaagactttgctggtgatcattatctaattatctcttgaagactaattatagatgtctgtgtgtgttgagtggggagcattctttactaagatttatgtacagcttcagtttagattgccttggcctcagagaagatttaagttaaaggattaaaaacatgcaaa

SEQ ID NO: 36566 - DNA, 1187 bp, Bovine  19866880749643
  misc_feature (1)..(1): n is a, c, g, or t
natacatcaattacaagagaaccctgtcaatgttgatgatacatggagtttgttgcaaagcaaccactagcacagaactcccagtctggggaaagatgggggtcattgtagataagatttgaaaccttgtataagatatatgataggcattagaggaatgacaattggagcagaaaagaataaaatgtgacttgctagagagtctggctggctgatcagagttaggttttatcactgcagcttccttcttctttgtttcgtggtatttataatgcacttgataatttgtcgttcatccctctttgattgcatatgagaaaagagggagtaggagattggcatgtgagaagaccgggggaagtgattttctgtcatttcctaataatttcctcaaataataatgtgagaaaggaagaatactgcacaagggcaatattacagtgaattcactcattcattgatccattcattccctctctccttcccaccactgttattcatcattttaagcactgaatcattttccttgaactagagttcaactagaggaaaatcgtatgtttctactgagaggtatcctgtggtcttatgcattctttctctttacctactgtcagttttctagattcggtcaccctgtcttgctttcttcctcttttctctctccttattcttcagtggctgtcagattgaggagaaaataatgtttatgaagcaactcagatgggtcccccatcagatgcacaggatctagctttctaacccttcaatattgcattgaaaccacagatcttcagggttggtaggagcagaatgtggtccattagtcagtcccactgtgttctgtaaggtgaatgccgtggcgagtgggctgcttgtcataagagcataagtcgatggatgagtttatggggatgtgagaagagaaaagtcctttgaagacatccagtgtctctttccaatatttggtacaggacaaatagttcttttttctaataggatggtataaaatataatattggtaattacactatgttctatcattacagaatgcaaaacattcctttcaaagcaatattttaaattaatttctctcttacctcatttgttttctttctaccttctttctactgttattaccatattcactctatgatttatagaattaattaagctattattaagat

SEQ ID NO: 36567 - DNA, 1380 bp, Bovine  19866880765940
  misc_feature (1)..(1): n is a, c, g, or t
nacagatgagcacacgcacagtgagtcagtgtggccttgattcctgggtaggcgctttatcaccaaaggagtgcgagcaagaacatcccaggaaagggaagcagttcctctgccttcaaaatggacattctgtaccccagacagtgtactatttgcttcagtggttaaagcagatggatcatgtatgtgtgataagccctaaaccaatctgttctagttagcgtaaagtttaagttacattacgtataagccagtatgacttccttaaacttcaatatatgaaaatttcctccatcaggattaccatttattttgaagaaacagaaaccctcacaagctagcttatggagaaatttttttataaagaatcatgtatcacagaaacatgcaagaagaagacaagcttatgcagacagtggtgagaaacgtagtgtttacaaagaagctctaagtgcaagatcaacgctgccattccctgggatgtagagttttcctccaaagcgtttaccacatgaactgctccacagaaatggcagctagaacttagcttctgagtcaaggtattgtcctagctcccgtcttccttctttctttctttactggccagaagtgtgggtgctcagtgtgccataccgaggacatttaggggacatcatctggatgcgtctcattgcccagaaatactcaactacattttgagtatttttgagtattagaagatagtactgtcatctgttttactacttcatgactctcaaggctgttgtcccattaattaatttgatcacttcagctagttagaacccaccatttttggtgatgttgctgagtttgacaactggagaaatacacaattcatgtcagaatcttctctaccactttggtgaagaatatagcatattagcagtgcatgcatgctccgtcgtgtctgactcagtgcgaccccgtggacactagacctccaggcttctctgtccatgggatttcccaggcaagaatactggagtgggttgccatttcctgctccaggggatcttcccagccaagtctcttgtgcctcttgcattgtgggaagcccatacaacatgtaactttacccaaataacctcaaaccctcagtcttcagtagtaattcagaagcaaaatctcctgaaaagataattccgtaattaaatgtaaaaacttcgattatatttggatttaattataaataagcctccacacttttgagcagatttgctcctcaaagcccctatgtctttaatataaagaagtttacttcaaacagaaaagtagcaagtactgttgaatgcttccttcaaatttttactatgaaatgtggaaataatacaaaatatctaattcattcattgccgagga

SEQ ID NO: 36568 - DNA, 798 bp, Bovine  19866880816104
  misc_feature (1)..(1): n is a, c, g, or t
nattaaaaatttttcctgtatctcttgagatgagcatattttttctattatctattaatgcagtgaattaaatgtatacattttctattaaaagtatcattgtgttcttagaatatagtggtggtggtttagtcactaagttatgcccgactctttgtgaccccgtggactgtagcctgccaggctcctccgtccatgggatttcccaggcaaaaattctgtagtgggctgccatttccccctccaggggttcttcccaatccagggatcaaattctggtctcctgcattgcaggtggattctttatggactgagccaccagggagcatatggtttttttccctataatctattaatgcagtgatttttttattaaaacattattgcatgtttatgatgtatttttgagagtactgggtttcatttgctaatattttatctaggactcacaatcatgaggaaaataggatataatatttattttaattgatctagtttggggtggtatcaataagaatactgtaccacagcaaaaaaacttccaaaattttagtagcaaaacattatagttttatttattggtcatgctacatgctcatctcacatcagtcacacagagatgcaggatgacagagctttcaccatctggaaccttgccagtcaccagggagagaaggacataacaaagcatgcactgacttttaaagacttctttttggaagtcacacaaatcatagcgactcatatttccttaggcaaaaccaggtcaaattgtcctgattctcatcaaaggattag

SEQ ID NO: 36569 - DNA, 2479 bp, Bovine  19866880843670
  misc_feature (1)..(1): n is a, c, g, or t
nttacactttgagaagcatataagtgtctgtgaagcttcttctaaaagaagggacttttttgtaaagtgccagacactaagtattagagacatgggaagtcacatttggtttctgttgctcatgtttctgcttttttaaacaactctttaacaattcaaaaatcattcttggctagaggccatacagaaacagatagaggctgtacttggcaccaaacctaggctctaaaacaatgcaatgacgagctttgggaactctaaagcaacacacaaataaaagggatcatttgctcaaatccacactattttttttctgacctcccaatgcgtacttcacttattttgatacttttttttattctgttgtgatagtcattgcttgataagctagagtatagttattctcttcataccttacatacacatatttagaatcattttatataaatgtatatattcaaaatactttatatacaatcactgctcaattacaatgtttgttgttgaagccatctagtctatgacatatatttgttccaggagtccgagctgacaaagacatgccccatcaatccagaaaaaacctcttactttttaaacgccctgttaacccagactttagttgagttagtcccacccttctcctctattgttgcaggagtcttaacacctctatcatagcacctatatatcatgtgttcttcaccacatctccaaggaaaatttgtcagggctaggattatggttattcatctttgcatcctagatggccaacagagtacctggttgtacctaattttacagtaatgttgaagaacaaatgaataagcaagtattaccactgtatcaggggcttcccaggtggcgcagtggtaaaagaatctgcctgccaatataggggatgcaagagacatgagttcgatcactgcgttgggaagatcccctggaggaggaaatggcaacccactccagtattcttgagaggagcctggtgagctacagtccactggttgccaaacattggacatgactaagtacacagtgctcaccactgtgtcagtatctgtcccttacacagcacttacacgcactttccatataataactgataatatgggaggaagatagaaaagtaagctctaaatacagaatgaaagtgatactgacatgagtaacagattttttcctcagtttgaaatatgaataatgttccctttatatgaatacatatatatgtacatatacatacacacacacacacacatgggcttccctggtggctcagaccataaagaatccacctgcagtgtggaagacctgggttcaatccctggtttgggaaggtcctctggtggagggcatgacaacccactgcagtattcttgcctggagaatccccatggacagaggaacctggtgggctacaattcctggggtcacaaagagtcggacacaactgagtgactaagcatatatatctccttggatttgggattttttttcctgagaaggatggagtcaaagggaattcctagtcatgttcatctgtttcagcaagctgtattccagccctctctgaaatccacaggggttccacagacaaaggtagaaagcagtggagtccaatctgattctccctttcctccattattaaagaggtgcaatctgccaaagaaggattgccatccctatctaaatctttttctttgaatctatacgaagacgaatgaaacattttctaaaattggaggcaaattagctttcggtctcctcaaatacaatttctctgagaacaaagtctcatccgtcttctgatgtgattaatcttactagtaccaactacttgggagttcacactggagaaacatattgataaaacacaaaacgacttcctgaggtttttgttaagatgttccatttaatttaaggtcatcatttatgtggaattctctgctagtgaggcaagataaacagctttatttcttggcaaaaacactcttttgatttttgccactcagtaacccataaagagaacacagtatttacaaacaaggctctgacatgttctcctgtaactttcttgtgctttcacagtttcaaacgcctcttaaaatagctctgcaagtgccctcccaacattccccaggagcacatcacgttccggtgtaagtgacagtggtctgagagagcattctgtcacctcattgtgaatttctctggaccatgaaatacccagtgtcccagacaacaccaattttcaacttatcgccaactgcttctcctctccattttactctgatataaaacgaagcaaaaagacaaccaaaaaaatgggcatttcattttgaaaatatttgtggccaagttgattacatttatggttatcaagacttcaggatgaagtaatctgctattggaagaaaagtacaggacagaattaggagagatgacatcaaactacagctttccaattgtctct

SEQ ID NO: 36570 - DNA, 3030 bp, Bovine  19866880851268
  misc_feature (1)..(1): n is a, c, g, or t
nagtgtagatggttgtatccattaggcattagtacagcaaagtattccatgatagaggtaggattcccagcagaggtgcataaaatctcttatggcctaacatctcaggaatggcatcgcattgcttctaccacattaattggccaaagtaaatcacagggcttgcccagattccaaggacagagaagtagactccatctcttgattggaagacttcaaaagatatggatataaggaaaggaagcactgtgaccagggataataactcagagtaagaggctaattttaaaaaatgagtctatttaattacatttaagtaaaattatttagtgaataatattaaaagtggtgtgtggatgtggcagaagtataaggttgtaatatgaattgttaaagtttgaaaacacttttctactcttacattattttcacttttatagcatccctttgtcattgtcctcataaactatctttgattgttccaatggccacttctacttgaagcagggcattttttttgaaaatgtgtggcctactctgttcttcatggtagtgtggtattctgattgagccctgcattagttaagttagatgtaccatgcccagcttcttaactgtatcccaccacatctagatatcagttcagttcagtcactcagttgtgtctttgtgacctttatggactgcagcacaccaggctttcctgtccatctagatatgctgtgcattatctctgatcagcagctagtctatgataagccaaggacaggtggaaagtagtgtgcattttcacacttggctaaaatatgaagaatgatttggaattaaaattaatcaattaactcatctgaatctcttcaaaggccccttgatagttttataagggagtcttgaattctatagtcaatataaaagccattgaagagtaaagaaaaattagttgtgattatttaaaaatattcagtctgggtttattccagccagttgatgtagaagtaaaaggatcaggttgttggttctcttccaagccatgtgtacatgaaggaaacaattaagggcaaaacttgaactactgagctgcatcccagttcacacaaaaagagcttatttctaatgttttgaaaatggataaaagcagtagttttatcttttactctgagtggcgatcttaaagaggccaatattcatttatctttaagactgaatctataaacaaaacagtttaatcattcactttttccttcaatttctttttgagttacaaacagataactatactttctgtgaaaatgaataataaagacatagaatcataggatatttgaccagaatttaatgttgtaatcatataaaacttagaacaaactgctgtcagtcattagtaatatggtagcttaattgctacacaatgtgatttttatatcataattaggaattgggaaaatatatgtaaatttttgaagttactattattctttcatagtaaagccaagtttaaaaactctctcctttattattacttatagtatctttaaactatatcaactatacaattgtattatatatattcaataatatatgtattcagaggcactgttctagttctgaattttgaaccacctcatgttacccactacagcctattactaggattctctcctattctttatctttgcctctaatttgaattatctgggagccttttcaactattctctgtcttgaagtcctgttactatatgctataggtgataggactgtggctataataactctaagtcattcagctttgggtggccagttaacaacataggaatatagccatgtgcttgtgtgtggttacaaagtggatgagaagagccagagatacaggaaagtcacataggtgtggaggcaaaccagtgttcagcaaggacggctccaagttaaagccagtaagtcccgccatatgctccttcatctctcctcaccagctcagggtctttcaaattgttctgccttaggagatagaaggaagtttggaaagaagttcagaaaaatacagctaagccttcagggattctagaccaactgatcaggttttcctctgtgatcagctttagaggaagatttcacggtaatattaggtaagactttaagagcagtgggcaggatcctgttaggatttcctctggttatatgccagtatacccccttgacaaggtagttacaattgtttcaatattttttgcccaaaactaagcttggacttttttagtcctttgtgataacatagtctgatattcttctggatcatgtgagaatgtgtttgaggatcaggtttaccaagagtatcgctagtcttttgggttagttctcagattcgtttccaatgttttgcttgcatttccaaagctgattacccaggcacttcccctggatttttaattgttgtctgcactaagtctcagtgtcatcatctaactttaaacatttttttttctttcaaatcaaactacaaccactcataccttaaagaggttgtcaattatcaataaacgatgcctgcatccttaccagtacccagtatgcccttgaaagcaaagtgtgaagaaagggcaatgagagaagtcaaagaaacccaggttgcctgaaagggaatttaaaagggcttgatagtcagtttaaaaaagactttaaaaaggttaagtaaaacttggatgacttcactgttttgtttaaagctagctctttttactttgcatcgtgaagacaagctggcaccctgcacaggagtgttttaagtcatgcacggctgtacacagtagcctgtgagaggatccattcccagtcaagcactatatcataaaatgttaggcctgtaagtgactttagaaatcatctattccaacttcctcattttacagatgaggaaactgggaccaaaagaggttaagcgacttgcccagtgtcagtcataatgactctgtgcatagaagcaatcagccatatcattgactccgtgcctggaggactagctgctccctagcta

SEQ ID NO: 36571 - DNA, 977 bp, Bovine  19866880978614
  misc_feature (1)..(1): n is a, c, g, or t
naatatggcatacagatagaaacctattttatacctctgtgcctctttaaggtataaaagatgattctcaatatcttggaagagtgattacacctgccagagtttatagctcacttcctgggagcggcttaacactgtacacaacctgtctaatcatatttcacacaggagttacctagcagcattgaatatataacagaagaagacatttaagagattgcacaatgcagttacagaaaaaaagaaaagaaatgacccatccaatctcatatatccatctggtcgtagaacatagacaaagactcaagttggttttaggtgaaatgtgttaagtgtttcaacagatatgaagatcctatgagctcatctcttagatctggacatctgtagccaaaggaatcaattctcatttagttttctgccttattcccttttccacatctattatcttactccagactcctcattaatatggatgtttaggatctaattatacttgttacagtgttaaactagataaatttgtttcaaatattctttgctggttttgaattttaaagattataaatctaaatctcgttacagtgcaataatatgtttatttatatgtactagagtaccacactaatcttgaatacattaattggtaacatcatttgagacgagctagagttcatttgtgttctacttgtgaaaaatgcattttggagcaattggatggcatatgcaaactttaagaactgtagttaagccattataaaagatgaaattatttttaattaacataaagaatctatttttgatagtttgcatgctaattatgaatcttatctttccaataaaggaagtcatggatattcagtaaggcaaagctttgttaaactggttcagtctgtgtggcagatgaatttttttaattaaaagtgtcaaaaattaaggcgttacaaattccaaaactgctccaatttttcacttaa

SEQ ID NO: 36572 - DNA, 1714 bp, Bovine  19866881042338
  misc_feature (1)..(1): n is a, c, g, or t
ntcgtaagatttcactctcacaggttcccaattactgtgaacagaagctggagactaagtcctaatttgtaacaataaaaacatataatgtatcctaggcacaatggttttcttagaaaactggctaatctctgtccccaggccatttcctgcctcttctgactctcacatgaattagggattggaaaccagacaattttgacttcctgagcttgctttgctcttggcaacgatggaagaataatttttaaggcaagaaaatgaaaatgatccatttacctccactctgccctcactctgaaggaggatcttggagctggagaaagaaaataccagagagggaggggagccttccttccccgcagagcgttgaccataagacacgttctccttttgagggctcagcacttgggtttctccacatattttaatcaatattcactgagccataacaatctggcatccacagtcactctggtgttgtgtttcatgaataactactttttccactgggtggagaagaaatgactctgtacacggctggcagatcatcattccttcgagcaaagcaaaatcagcagtttcaagggaaatgtgggcatctcagtgtggtgatcagtgcacatctaaaacataaactcaaattatagaagccaactcacaggccaactgatctcttttggaagatgtggcttcagaccattccacgtgcatgtggaatacctagacctgattacagagttctcctgaaagccaatgcatcccaggaaaccttacgagacacagcaaaggaataacatgtattccccagcaaataaaactgttaacatgaccttgcctcattctggcagaagcatgttgcaaagtctcctggggaggaaggtaccgtactgagcctgggaatttgagttcagcggggagcctggtctccactgcccaagtgctgcaagcctgaggctccttctcatgaaatggcctccgagatggtgaagatggccatgaaggtcagacccctgagaagcctagatccagctcatgccccattctgaggataatccatctttccacaattccttcaagtccaagacactccacctcctctcctatatcagctctttctgtaggtttcttccatcagtgggactggaattctttcaaattgatcagcatctcatttttactcccccttcacacccatcgtaacatctagacttccatcctaatatcagatagcttctgttttccttcatagtgtctccagaaagaattcctcctaagtacccactaatgtgaaggcatcagaaatccattcgtttattcattcttacagacatttgacatcatgcaaagcattgggctaagacctctatagttaagtaggggagaaacagctatttaaaataactgccatataaaaatgaagtcaggattcacactattgtccctaccaggaactcccacattttcagtctttaaacacaagtccggagacacttcctcctggaagcctgccatgaatccactcccaaatgaatcaggtatctctcttatgggctttcaagagtgcttatctagatcactgcactaaccctgcacccattagccattgatggacctgctctccaactagactgtaagctttaaagacactgtcatattcatctctgtactgctgctgctgctgctgctgctaagtcgcttcagtcgtgtccga

SEQ ID NO: 36573 - DNA, 4483 bp, Bovine  19866881057889
  misc_feature (1)..(1): n is a, c, g, or t
ngcataaaatattccttgattcaatagttggcctggagctttatttaccaggccacaacctcaaataaagcaaaccggagaccttcctcttcttcctcttttacaaagcttgtccactcccctacctgcctttgagcttctatcaaaggcaaataatgttctgactctctggctatagcaagatctgaataaatggcctctgttctcatttgggtgattttagtttaattccacaagtcagaccatctcaattgaattatgtgggatgctagaatctgcattttaatcaagggcatcagatgattcttttgcacaattagaatgtcagacctaaaatgggagaaaaatgaaagatttactatctcaacatttggtaaacagtttagtagagaagaaatgtatatgagatctttttcaggcttaatattctcctgtgtcacttatctatcatgtagcttaactgagcttctcagatccttaattttctgactcgtaaaagaaaatatcagtactttctcaactaacataaggttactggaaagataaagcaaaattatgactgatgctgaaactgaagctccaatacttcggctgcctaatgcgaagagccaactgattggagaagaccctgatgctgggcaagattgagggcaggaggaaaaggggaagaccaaggatgagatggttggatagcatcaccgattcaatgaacatgagtttgagcaaactatgggaaatggtgaaggacagggaagtctggcgcactgcagtctacggggtgcaaagcatcagacatgacttagcaactaatcaaatgaccatgaaaatacttaggatgtggtatataaatattaactattataatgaaaaagtgtgagtgtatatgttagttgctcagtcgtgtccaactctttgcaactccatgaactgtagcccgccagactcctttgaccgtagaattctccagccaagaatactggagtgggttgccattcccttctccagaggatcttcccaatccagtgatcgaacatgggtctcctgcatggcaggcagattctttaccatctgagccaccagagaagcccataatgaaaggatatttgcactcctctatcacaacctcaatttgaaaattagtatctgattaacatttcttccaaaattacaaactttgtagttaattgtaattaaagtttgtccttcataatgaggagtgatgtcactgttggtgttgtcattcgaggacacaattgtgactgattgaagatggaagtgtggctgtttgtggcatgatgctctttgttatacagtaagtacaggctctatctaactcaaaggagggcttctagaatcataatagcttgtaaacatgtaacaaatgattctcgaataacagaattcactactatattgtcatttgtgtagttatttcagattgctgcagagcccagctaatacttttgctttcactgcctgacattcgttggttttgaattactgcttaaaagtatatatcagctacatgtctactataactaaaagaaaagagcccaaaaaagtgcatatcagcatagagtagactgcttcaacctgccagaagaagagcagcctgccaacagaacggtatgagcaagagcagttcctctttactacacgctttatcagaaatccactgcaaattctaatagatgcgatgcactcagaaatatataattagcattcataaatcaaataaattaatgacactgttcaagaaaacaacgatgccatctgtgaatccaagtcttagggaaataaagagccaccataagatgagacatgaaagactcgtggcagatactgagattggcatggacttggaatcctttggacatcacactgtacttttcaaaagacagtttataaaaataacaactttgttgtttttaaccttattagtacatctttccactaaatgttgctacattgttaaatgtttggtatgctaattgtgatagcattatcaatacatataaatgtgccagtatatacagaaaattttgtgtacttcatttaagctactcattaagatgagttgatgttaagtaaaaaaaaaataggtataatttataaagccactgaatacagctgtataagttgtgcacttcacaattccagctcattccactcagattgctatgtggacagtctcaggaattgtatggtataaaatcagcacaggtacatggggctcccctggagttgctacatcttggcaaagccttctgggtatgcttcctggaaaataaacattctgatgactgggcaacaagtgctttcacaagtcagaaggtttccagttccttgttttcaacaaaagtcaaagagcatttttgacaaataacttggaaagaatccatgaaatgaatagcactgctataataaaattcctctcattcctatcttgttgtctgtgtgaacacattttctcaggaactgtatctatagaaatgaaaaacaggaatatcactgatcctaaagtctgtctcatgccagcaggaagcaatagttagccaagatacatggtctaaatgaaaggaaaatagcccaattcatcagactgaaataatttttgataaatttttacttttgatttaatttaagcgtctttatgttgtttggttaattataataatcagttcagttcagtcgctcagtcgtgtctgacttttaatcagcctagaaatttttttactacttgagaatcaagaacataaaatagttaaaattctaatttatgtacatatttgttcagagaagtttaaaaggtagtaagattttcaagtataaaaacatatagatgatactttctttgaatgtttccaatatgcatgaatttcagttaccaccattttgttaaataacaccaatccatcaaacagggttcaagttttaattactcttgtgtatttttaataactttaattgcataaaatagaaattttgtcctctagctcttcagtccacaaatcactgcataagtaacaggtgagcatcatggttagcgaccaatcacgtctcttctttcaaagtccattgtgattggtcagcgtgcatctgttattcagttcacagacagacaacaaagcttctagttgtcttgcctcctgtctgtgataaatctgcacagtattttacaaaaatagatgattgaaagagggcactggaccaacgaaaatggaaaacgtagcaaagaagtaagagtgatattgccaaaagcagagcttgaatttagcataatgaagttccaggagagagggctgagcgtgggaatgttgaccgtgccaccagtgaaaagaccagattgcagccagctgaaactcggtgcaggtgaaacttgtctgacttaaagaggaaagtggttgttgttgaaaaaaaaggtaacagtgtcctagaagaaagtaacgctggtaaaaattttcactttcaaaagaactcttggagatatgtcacaacattgcaagtgcaaaggataaaatgttggaagctgatccaactttagaaataagacaattcactaaggcatagaaacatgatcactctctattgtaagttacaggacaaaaagaaggcggtgaaaactctttattcttaataaatgttttacaaaaaaacttatacttttatttccaatgtttctaattgcagtgtgtgtgtgtgtcagttgctcagtcgtgtccgattctttctaccccatggactgtagcccaccaggcttctctgtccatggaattctccaggcaagaatactggagttgatagccattcccttcttcaggggctcttcctgacccaaggatcaaccccaggtctccctcatcccaggcagattctttaccagggaagccacttggagtcttttctttttttcttcaaatttagtttcccaagtagcagggctgagattttctgttgtccaaaaagacttacaaggccacgtgcgctcttgagagcagggaatatgtctgctttttatttttttattccccagagtccatgacggtatgaggcacattcctttcaaagcaagtttggtgcctggaagccaaagagtgagttcagttaaccactaactgaaagtgtgggtgcatgggagaccgttaagcaactgggcctgctcagacacaacacattcccaggaaattccaatttcacaagggcagatttcttaagaaatctatttacttggaacagaatgctttcttgcgtttttccaatgtcgagatagcaccaattcatgaaacctggtccagtctgctctacaggcagggtctgatatcgacagacagctgcactgggccaaggaggccaagttcgtcctccggcactatcaaacttggctctaggggagcccctgtaagcggaaagactgatgaccgcctgtctctgctctgtttctcctaccccctcgcttccctccctagttactcgatccaagcgt

SEQ ID NO: 36574 - DNA, 4175 bp, Bovine  19866881088088
  misc_feature (1)..(1): n is a, c, g, or t
naatatagatgtatttatgtctacaaagagtcggacacgactgagcgactgaactgaactgatgtcattagacaacagtcactttctgctcctaacacagaagcaatttaactttaatctcagctaattagagggtgaaatagttggtttcattggaaagaggatctgtgcagatttatgtactgtattcattattttggaaaaccttcagttctatgcagaataaacttggaggcaagagattagccaacaagatatttcaataatcctcattcaaaggtgagaaggctgtggaataatatgagctttaataaatatataagcatgatttttaatatcaattatctgtatgtggaaagtggccagatgcaaaacaatagctttgccatatgcatatatcctatctatattatatagaaatggccaagtacaaaataattgcattaacatatccctcatagtctatatgaattatatcacagttagaaatatggtgacaagattatattcattgtgcaactaagaataagttcattcttaataagatatatataaatatgacttgtgtcaaatacatatgaataaaactgcaagacattgtagaaggacaaaagcaaaacttaaatgaataggaaaacattactggatggaaagacttactactagacagtcattaatttttttccgagttaatttataatagcacactaacaattccataaggaaaatttcacaaaatactctgaggtttatatttaaaagcatgaaaatatagtaaataatttaaaacagttcactaataaatgaatttacttataattagagtgtctaaatataaaattaaaataggaaaattaacattattgatacaaagataaactggataaaataatgggatagaatggaaagcccagaaatctgaattttggaaatatttagtagattgcagaactaacttttcaaatttgcagagaaagtgtaagttatttaataaatgttcctagagtgatttgtttaactctttggggaaaatatcaagattacatatcttcatatcttattctcaagtatagggccatgtatatattccatatagtccatagctaaaacttcaaactgataggatattttattacctggtttgcaaagttattttaatgataattcttatttttataaacagctgtaggaaagtaacataatcatcaattgctggtgggatcttactatcaaaaacagcaagtgtagatcattttgaccaatgatccaagttttaagagtttatcctaagaaagcaattagcaatctataaaagaaaaaaaatgtacatgaaacctcatttcaccattgtatactagagtgtaaaattgaaaaggacctaaatgtcacaaataaaagattattcaattaaatcatgatatcatcacaaaactaaatattatgtacccactagaatgatgcattaaaagttgcctaaagtccattattatctttatttgaaaattttatcagcgagtcaatgtcaaaggttataaagtaggagcctagaggtcaaatctgtccacacaacagacttgttttgcttgcttctcagtattttataacactgagccaagatttgtaaattaggagaacacacataggaatccagatttccagtgtatctttacagttctgaacacctaacaatattgtgaccacacttcaacctcaactgggactggacagtggaagttctcctctctttcccccaaggcccaccagccaggaacatacttttctcactcttccagttccctaccttgccccactgagatactgaactgatctctaccatgtgatctggaacttttaaaattaaatgtgtgcataggtgaatatattcattgcatgctcatgtgtgtgcatataggaagatatacaacacaatttcaatagaaataaaacttcacaggcaccattgtgtaaggtctttggtaacaagaaacaagtcaacactattcactattttatctctcgaatttaggtaaaagaaaattattgttgaatggtcaagtaaggaagataatagctcttatttgtcatgtatgaataattcagaatctttttttcttttgcattacatttctactgtggtaattttaaaataagaaagaaaatgcacaataacttttacttttttaatatccaagggcagaaggaagtctgtaagcaaaggaaaatatatattaaataaatctcatgtatttataacgtaaaaaagaaaacggcaccattagttgagatgatgcagaaatccttggcactgaattctgctgtatataatacaaaacacaatacaagagccaattgattcttgtctgattttgtacttttgttttgatttctccaatatacccttgcttactctctgcaaagtgctacatatctcaaacacaccctttccaagagccttcctctcacttccctcctttgttgctgggatatttagacaataattataatgatactatcaaaccagcatgtaagtcactgaatgatcatttctagtctgtccactaagtaagtccaggatgaaatcaccagcacagaggtgtcagttaattgaggaatcagacagctagagagaccagactgtgagaaaatacccttatcccaaggacaaacctttgctctgacattggagagaatacacaaataaacttgccaagtaaattactttccttccctaattcatgatctcttgctctagtgctaaagccactatttttttttaatgagttggtaggtaaatatggagctagattgagagaattagttcatgcttgtactttttcaatattgtgagtgaaatgaagatacagatagcaatttgaatctaatttgcaggcttgcatggatgaaaagtcacagagggaagctgagatgcaccaggatgttgagggtggaaggcatggcgacagtgacaaaaccagctgacacagagcagaggcctcttcagtaagcacagcaaaaccaaaatatgatcaactcaagacagagcagttttctccctgtagttacatgcagtacaatagtaaggaaaatatagatctaaggccaaagccactgatgatcctttctgacctcccagtcatcaccatatggatcctaagaaaattaacataaagttagagtcctacaatgcatttaagctgaaagagacattggagttgaacattctcactgcacagaggacaaaaatcaaatccagggaggcaagtactatctcctgaaggagcctgcagataatttaacatcccagacccctgctcttgtcatgagtgtagaccaacactgctgtttaaaaacaaagagatcaatatgtgaaatggcatgagtggagtggttatgtgtctacagttgattggcttgaattcctgaaatagatgtcatcatccgtaactgaaaatttttattttgagatgaagcagattcaaaatagaaacccctcccagatagtatcccccaagttcctaaattaaaataagaaaacacacacaccgtgactcaggagaatacaataggaccagcagagagccagctaaaaggaagtaaaacgggggttttggggtgaaagtaagggctgcaagggagtttcctgagtcattcagctgcctatatcagacagtatcaaatcttaaaattagaggaacccttattcagataaattgataattttgagccaaggcttatgccacatgttaggtttgtttaattcggtcattaaactgtacaattcacactattttgtacttatatccttcttttctttgtcatgtatatatttttcatcatatagcataaaatggaaaacatttgagtcattattaataaagtcatttactgtttattattcttcaaaaatacattaatagtaaattgtgggcttacaggtggctccgaggtaaagactccacctgcaatgcaggagacacaggatacatgggaacccactccagtattcttgcccagagaatcccatggacagaggagcctggtgggctacagtccatagggttgcaaagaatcagacacgactgaagcaagtgagcacacacacagtcatacataacacatggcacatttttgctctgatattcatatctgatgccattgctctacacaacaggata

SEQ ID NO: 36575 - DNA, 1113 bp, Bovine  19866881094231
  misc_feature (1)..(1): n is a, c, g, or t
ntaatgtaaaatatcacataacttcaaaaaacttacctcagttttctatcacttaacatgtactataagtcaacattctaaataggattacagtcctctattataagtccctagtggtactatggtatattgatacatttaaaaaaaatgctactacaaaatttttcttttcattttgtttctgcctattgtgtacttaagctatagataatttttgaataaaaagcctacggtagatataaatgcaatagttaactgatcctgtttgctgatgtccttttcatggtccacggaaggtggtggcttttagtccagcatcttctcctgtttcttgccttcctttttcttcttcttagattctgctgtgattaaaataaaagaaagagaggaaaaagtatcacattagtaagctatgagagagggagccacttttataaatggccaggaatgaaatgattaaatgcatagacaaagtacgtgtgcgtgtgtgtgtgtgtgtgtgtgcacgtgcttttgccagagtgcgcctatgatcataggcaggagtaatacagcttcctgtgtgaacacctgtaaatgcctggtttcatagtggttgcccccatttgataaacaacatactgtctgggggtctcacttagaaaattgaaacacagccggcctctctgagagaatacactgctcaatggagagctaccaacgctctcccagaccctcacttcccacattgcctttccatgggacaggtgataagcttttttttcctgttatcattttcaaagtgcttctgctcctgaggtatcctctcctgatgtgtcttctgtttatacatttggccacctagtcacagatgaaggaccacctctgaatctaccaaacatggagctttgactctacagagactcctagccttggtgaagcaagtaagatggaccaacctgggctaaaccaggtaagtaaaactattaggatttaaaccaaaagacttcatccttttccattcagtcatctgtcatttcccttttcctaagcctaggagaaaacagtatggaataggacatgtcagctttggttccaaagatgagaatggtcagcatcaccaggctagcgagt

SEQ ID NO: 36576 - DNA, 1143 bp, Bovine  19866881166430
  misc_feature (1)..(1): n is a, c, g, or t
natgtgtggaaaattagtgtcatagaccaaatggtgcaagtgtacaccaatcccagttattttcatatgactctgaagccttgaaaactgaagtgattgtgcaagattgcgtgttcccaagtggcaaagccagaacaaaaggtgtagatccctgttcctttaacgatgtgatttttctttccttatttagctctgctgcttgagcaatggctttttatcatgggttcctaacacaaatctgatctttctaaaacaaaagtcagcttttattttgaagatgaatttagacatctgaacatcttgggagttgtcatatttagcgatgcaaagtaaagtcaagtagatcctagcaaggaggtaaataaattcagagaacatttccaaagctgctagaagatgaaaactcagctatttttgttatccttggtccagatttttctgtttctataaaaaaaattgtgagttaagctgtataaccattggttttggcattttttcaaaggttttctttcattttgcagaagacctcatttattccaagttctcccagctcccaggaggttggaaacccagccagggcatctgatttatataattagcctttcgtgagtatggatggcctctcactccagcatgaagtgaggtgaatttgaggaaaaacactcttcctttatcctcctgctcaccctccctcccactctagttctcatttgtaacccgatttaccagggaaagcaatgattctacaatccagtgtgatctcagcctgtcagagctttcagccagaaagacttagaggccatcaatttcataataatgggtgtataatgacggtccctttggtattgctctcacccaaatccccatttagagacggcgactggaaggacaaaggctagtgtttcaggaagggcagatttagggtagatcagccatggaaatcagcattggctcacatgtccaggacctaatgagaatctggcagaggcccaaaaaggagctgaatcctctctgcctctgcattctagtccccatttcagggcttttcatgagaatctgtaggattgtaaagggaggaaggtgagggagccacgcaggcaggcagtcatgacaggatcattagctgcagggttattctgtgtc

SEQ ID NO: 36577 - DNA, 1287 bp, Bovine  19866881243925
  misc_feature (1)..(1): n is a, c, g, or t
nttcagcacgattatatgtttacaaagcatagaggatttattctaatattttcccacctggaaaaactgggcttaagcgtcttcggcaatcagaaagcaacaccgagttcttcccaatatgtcatgtcacttttatagcaatcatacttgcaggaatgggactgggcaatggtggtaactgtgaacgttctgatgtagaaattgcagatggagagcttggctctggggatggacgcggaaaggagcagaaaggagcctggagaaaaggctgtcatatttgctcagaagaaccgccaaatcagagagcagagaagatttcattggaggagcgccttcaacagcaactaatcccgtcatattgaaagaaaattgtaaatgttttctccagaaattgtctgcccatcgcagctaatcgaacacacactgacgaatacacacacactctctttttataccaaaggtgcccggacgcagagacccgctccagcgagtgcgcgtgacacacacggacacgcatacacacacgaacgcacacacgccagcctgcgggttggccagagccttgaaactgcagattccactcggagatcgccagaggcaccgaactaattagtaattagttgcccctacactaataactacttccccaatcactttggtgaagaaatgaatcccgcccagctcgtcagtccagccaggtctccgttctgtcttgctctccagactcctcttcttcgtgaaagccaggtttgaaagtcctttttgcttcttcacctttggtgttttggtgtggcgggcgggggcagtgtcactttaactccagtctacaccgccaagggcctccagactcgtaaagtgcctgggacgcgtgtggggtgcgcgactctgctagcgcgcgcccgagccccgcggctcttgcccgagcctttgggtccgctctctccccgcctccccccgccccacccctcagagtgtcgcggcaccaactaatcttctccttttcgtttgcaagatcaagggagagagcaagccggcgcccggccttggactctgagccgcgcgcggctagctccgcggcgggtcagccccgaacctgtgaagggctccacgctcctgccagccagcccacgccagggatactgcagcccggggaggcaactggagctaatccggcggcaggtaaggacagccagctgctcagccctccgctggccagcgccagggaccctggcacctcccgattctccggaacgggcgcggaggggactggggtgaggaaattggcaa

SEQ ID NO: 36578 - DNA, 1666 bp, Bovine  19866881264470
  misc_feature (1)..(1): n is a, c, g, or t
nattagtcatacaagaaatggcttgagccttacaaatcagagaaacatttgtcatctgaaatttttcctatcaactcctttaatacctgacatatttttaataaagagccagttattaagttctctgtttagagcaactgatgtccagtaataatcccacaaatagtcaaatagtaaatactcttaatatatgtataatgaggtataaacaatgtgttcttagagccagaaggaattgtgtcccacttactcctttctcaacccctagaaaagaactttagatactacgagaaattaaatccacatagaagagtcccattctcaataagctggctccgtgacaagcagacttacaaatccagaccaagagagatttaacattccctctcttcacatccctgcctctcccaattccctgggtacagcttttagttttaaacagcaatatttctagtactttttttcttgcttgtgcaatggatgccttgttatctttccagaatgatttcattgtctctctttttaaaattttaactatgatgttccatctgctgttactgaactggactgtctcaaaatgtaaatgtagactcaatcccactgggaattgcctaaaagaatcatttgcctgataaacagcaaattgcaaaatggattttaacttgcttcaattaacaagggcaacaacatcaacaaccaaaacatcgaggaagaagaaggaagaaaaggaggacacaatggcttgcttagattgcattgcaggcatgtctgaatccccttattctctatccattgagtggaagggagcccttgaagcagccacaatacttaacaccgatagtggagttgcttgaaattttgctgggctggggggttgggcagaaagaaacataagggagctgacacatttctgcttcctataatgaagaatctcagagtacctgaaagctcccccatttaaattttttctttttacagtatttataactagatggtttgcctgccaacttgcttgatagaaaggaaggtactccctcccttttttgtgggaaagtagtaaaacaactttgaatacttcaggtatagaaagactaaatcatttattcaactatttattgaatgcctaccatgtgccagagcctctgctaagcactggatgagttatctatgtctttgagtctgtttctgttttgtaaatatattaatgtgtttcttaatttttaagattctacatatatttctctttttctgtctggcttacttcacctaatatgataatctctaggtgcatcaaggttgctgcagaaggcactattcattcttttctgtgactgagtaatattccagtgtgtgtgtgtgtgtgtgtgtgtgtgtgtaggggtatgggtgtgtgtgtgtgtgtgcctatatatgtacgtgtataccacatcttctttatccattcatctatcagtgaacatccaggttgctttcatgtcttagctattgtaaataatgctgctatgaacagttgggtgcaaatatcttttgaaattagagttttctccagattttttcacaggagtaggattccaggatcatatggtaattctattcttagctttttaaggaacctccatactgttctccatagaggctatactaatttacattcctaccaacagtg

SEQ ID NO: 36579 - DNA, 1695 bp, Bovine  19866881266644
  misc_feature (1)..(1): n is a, c, g, or t
naaaagaaaaacaacttgttttcaagatttaaatccatgtttggatagggttggatagggtgaagattttccatcatctgtctagcccatgaaacaagtgactgcttaatacatcagcatatgtaaagcatccctttccaaggccatgtactcccctaatatcaagtaagtagtttattattgctgatgatatgaatggtgtctttgcctatgacatattttagattaagatatgtacgtacggaaatggagataactagagaaaagggaatattttaaatgtcacttagcttctaaatttcccataattaggaacaaaggtggaaactacaaatgtcacaatgcattgtaattttattgattataataagtgattaatatgtacttactaatcattttgttgaatgttaatatacaaattgcctttaaatgaataacataatttaaaattcataaatcagtcaacacagagacaaatcaatcatagctaaatgctttaagaacctcatgtatgtgtatatatgtgtgtctgaattttgtgtacacataaaaatgaagaatgaagtaatacaggccttaagtacaattatcattttgatttgcttctctgcattttctaattttttgataatcattttgtattaccttgcagtcagagaccaaatcagttataattgtcaaatatctgtaacatttttatagtggttctaatagtacatttggcattttcttccgtattatctctttatgtctctacttgctttctaagctgaaaaggctctaaatcgaggtatctagatatagctggagactttgtgttatgctctcctataatctgctctatttcaaacagatcaaggtcatacatgccttcaagttccaagatcaaaccatttctatcaagccagtcaacatgaatagagtttcttacaagccagtgatttaaactagtacattgcacttcattacattctgaatactaatatacttatgcttttcttattgtctcttggcccaaagatagaggttttgactagaatgaaaataggtagacttttgtaatttctttctgatttattcagtgatttatacagagaatacttacagttttaaatggctacataaatgaagtttccatcctcattgactcaaatatataagctcaagacaggataataactttagtgttagggagaattctggctttttaaaaaatttctttcctcactttaattctatttatgagcaagaagccaaattgaatgtaagaattaatttcagaaggtactgcagctatatcctttttcagttttttttttggatattaatgattttgttatggtctattcaataaagtagattcactttattacagtacattcaccacttggtcactcttcttttatttaacaagataaaaataagagatgaggcaatgattgtgattgcgttgaattccagctccctgggtagagtctaagcagtttgaattgacatttgtggtcactgtcaaaaaccaactgcttgccacatccatttggtgttaaacacaacatctgggttcagtataattaggttttcaagtaagctgatgagaaaatgagccatatgcacttatccaaatagagaagcttgaaaatttttcttttgattgacataaatacatgacatgaggttgaaaagacagcatttcag

SEQ ID NO: 36580 - DNA, 1911 bp, Bovine  19866881489071
  misc_feature (1)..(1): n is a, c, g, or t
ntgacaatcagtttaggctcagagaagttaaaaagtaagttaatagtttcctctgaagaacaaactggaatttgttaagataaatgggattagaaaggattaggaggtacaggaagaagtgaaatttcttctgactataaataaaatgcaaatttagataagacacgtataaaaggtaagtggagaaaaggacacttggttgtatttaggaatctagtatttattttaagcatatctctgcttaaggttgcactgcttatggaaagaaaaaaaaaagttaatgcatgcattgctcttttcataaaaatgcacatatgaaaagtaaaggtaagtggattatattttacagacaaaattttcttggctataacctccgaagacaaaagcacccacagtgtaagcttaactgacaccatcattcctctggtactaaaacctagaacagatagagtccaagagaacaaaggactccaaaaagttgactcttgagttttctaacttttcaatgacagaaatgacacaggcctcatatactgatgattcacaccagattcaataaagctgtaaaaataaagtagtaacgaagtatacagagtaatgggcagcaactatttttattgtttccaatcgaaatataaaatgattgtttcctcagagtctgattgcagcctatttctagaacggatcaaaatgaccacagtattatcccactaaaatgtgaaaaatgagagcatgaagcagattaaagtctttactaaatgatctaatgccaattgagatgaggaaacataaaaagctacatcaactcggcaaggattttttgtatccaaagcactaatttagagttaaaataaagcaaattggccagagagaatgaagaactttatgtggtaaatcaggacagtcaattctcctacctgattaaaatgaaaccactttgttcgtgataactacaggctaaatcatgacataatttactatatgcgatacatgtgtcacataggtcatcacatgcggtcttaactctctattcccccaatcccaccccctttcttctcccaacaccataagttcaagcccaactatatatttaaattccctaactcccaattcttcaagataggcttcaacactatgtgaactgagaacttttaaatgttcaagctggatttagaaaaggcagaggaaccagaaatcaaattgccaacatctgttggatcatagaaaaagcaagataatttcagaaaaacatctacctccacttcattgattacgctaaagcctttgactttgtggatcacaacaaaccgtggaaaattcttaaagagatgggaataccagaccaccttaactgccttctgagaaacctgaatgcaggtcaagaggtaacagttagaaccggacatggaacaaccaactggttccaaactgggaaaggagtatgccaagactgtatattgtcaccctgcttatttagcttctatgcagagtacatcatgtaaaattccaggctggatgaagcataagctagaataaagattcccagggaaaatatcaataacctcagatatgcagatgacaccacccttatggcagaaagcaaagagcctgttgatgaaagtgaatgaagagagtgaaaagttggcttaaaactcaacattcaaaaaatgaagatcacagcatctggttccaacccttcatggcaaatagatgggttaacaatggaaaaagtgagagactttattttcttgggctcaaaatcactgtagatggtgacctcagccttgaaattaagatacttgctccttggaagaaaagctatgacaaacctagacagcatattaaaaagcacagacattactttgccgacaaatgtccatatagtcaaagctatggtttttgcagtagtca

SEQ ID NO: 36581 - DNA, 937 bp, Bovine  19866881720761
  misc_feature (1)..(1): n is a, c, g, or t
ntcattagaaggactaatgctgaaactccaatacttctgggcacctgatgcaaacagccaactcacaggaaaagactctgatgctgggaaagattaagggcaggaggaaatgagggagacagaagatgagatggttggatggcatcactgactgaatggacatgaatttgaacaaattcctggtgacagtgatgtgcagggaagcctggtgtgctgcagtccatggggctgcaaagagttggacacgactgagcgactgtacaataacaaccacacaaaggtgtgctctcattaatcatcgaatgtgagagaagactgcgcctcctctttctcttctccagtcaggcaaacactcatagatcttgagtcttaaattcctcgtattctgcctactggtgtctcctccactgctgaaatagagcgtgtggggtacagagcacacatctcacatattccattatcacgtcttcttcgttgggatgaacccatcggtggttaatgtaaaggccattcaatgctacagtggtctaagactcagataccacctgtgccaaattccttttagcttgtaaaccatagatggagacataaataggttttgtgtctctctaatgacagagttaatcctcaaattcaattagcccctgctaactgaatgcatgaatgtatatgggttctttccatctgctgcagcaatctttctgaagctgctattagcatggaagacatctcctgtttgcagaaaaaacaaacagcctccccgccccaccccccaactcatccagcattcccttctggcagagaatgtgcaccttgctgccagagcaccaggatgtgctctgttcacagtcacttccatttctcttacagatcacggaattagccataaacctgaaggaaccagatgtctctcccaaacatctcatttgtttatctc

SEQ ID NO: 36582 - DNA, 946 bp, Bovine  19866881875324
  misc_feature (1)..(1): n is a, c, g, or t
nccctcctgttcaggagttgacttatttgtgccggaactgaactcgccgggaaacccaattaaatcctaccactgcagaaaagcacaaaataattcatcattttgggttgttttgaaatagaatgaaaattagtttggaggtggaatgaagggagaaggaaacatcaataaaagcaagaggaaccagaatcacaggaaccattaacattgatttcattccaggacagtgggtcagccagaaagcttggcatgctaattgcagaaggcacatttggtgcattggaagataacagcagacaaaggggagctggaaagaatcaaagaaaaccatgccaaagggcagcccagactatgttcagaaaacatgatagtttctccaattcgattttcatttcaagctccaggacatgtttctcagttagaatcaagtttgaacactagaaaacagaaaggcccactattattagttcctcttttctgtagtctaatttctactagaatgtaaaatgcatctgtatctaacttcttgcttttagaggggactatgtgagggctagtgggtatttctgagatgggattgtaggtgggaggggtttttctacaaatgattatgctcaccttagtgctagttttacctgattggagttgaaatttgatttgactatctggatacaattttgaaatatattacttcaccaaaagtgaaatcccttacataaaatcaatattcactttgtaataaagtatgtccaaaaaaaatacattataaaaatgttactttttccattaaatcaaattaaattggatgtaaagccccatctggaaacttggtggtgctagtggtttagtcattaagtcatgtctgactcttgcacccccagggactattagtttaagttattgaaagggttgattctctattcaccaatcatacaaaggtcttgct

SEQ ID NO: 36583 - DNA, 1505 bp, Bovine  19866880388827
  misc_feature (1)..(1): n is a, c, g, or t
nctttcgttgctggaggttatattcactgatacttactgtatttgaaattgaaactgagagttttaaaatatctattaattaattttaaaataacaagataaagccaataaaagttaacattagagtgattacatcatcccatgtttaatagcctctggaaaaacccatgctataagcatgcatgaatgagaataaaaaaggcaaatactgtctcagaagtattatggggatcattttgaccttgaagatcccctgaaagtagcctagggactccaaggtgctctaaagtacactcaaggaaccctgacatagagcaactgcataaataacattcaaaatgacaacaaaccctaacaagaattaaatcttagaaaggcactgaataaaagtcacattcataagcattctaagtagtttggagaatcccatgaacttcttctctgtctttgtacaaaataaaatacattagttaaaaaggaagctacttgtatatattaataaatgtatttctatgcacaaaacccttgatttaagtccttgtatgctttattccccatttagaagtcctttaagtctattctgtggtaataatattcaaactcctataatttctaccagagtcctacaatcccgcttccatctgccaaagtccttactcatgacaccttagtcttttgatgttgagggctgatagtgacttagtcctctcaaatcctatttacttcttcatatctattgccttatctatactttttagcaaaatgtcttatttacttcataattgtaaggtccctgagacctgggatttatttttatccctcatggtttgttacacaaaatatgtactcagtcagtacttgttgaatgatagataaataaaagagtaacaatctcttgttgacatgggttgatttacatctaatgtaagctttttctttgcaggtcttggccacctgtaatgttgaacagtcctttttcaatgactggttcactgggcacttgaacttccaaattgagcaccagtaagagaaatagtttatgataaagggaaggggctgtcactaataactgtcctccatatagtccagagcactagacttgcaatcttaagggaaaaaaatgaaccaggattctctaaaggatgctatttttcaattaacaacaacgataaagaaagaagaaagaaagaaaggaagtgtcacaattgcgagttcagttcagttcagtcactcagtcttgtcttactctttgcgaccccatgaatcgcagcacacccggcctccctgtgcatcaccaactcccggagttcactcaaactcacatccatcgagtcggtgatgccatccagccatctcatcctctgtcgtccccttctcctccagcccccaatccctcccagcatccaagtcttttccaatgagtcaactcttcgcatggggaggcctaagtactggagtttcagctttagcaccattccttcctaagaacatccaagaccaatctc

SEQ ID NO: 36584 - DNA, 1551 bp, Bovine  19866880675514
  misc_feature (1)..(1): n is a, c, g, or t
ngttcgtctagtcaaggctatggtttttcctgtggtcatgtatggatgtgagagttggactgtgaagaaggctgagcgctgaagaattgatgcttttgaactgtggtgttggagaagactcttgaaattcccttggactgcaaggagatccaaccagtccattctgaaggagatcagccctgggatttctttggaaggaatgatgctaaagctgaaactccagtactttggccacctcatgtgaagagctgactcattggaaaagactctgatgctgggaggaattgggggcaggaggagaaggggacgacagaggatgagatggctggatggcatcaccgactcgatggacatgggtttgagtgaactccgggagtttgtgatggacaaggaggcctggcgtgctacgattcatggggtcacaaagagtcagatacgactgagtgactgaactaaactgaactgaattttatatatatatatatatatatatatatatatatatatatatataatatgtatagtcagtacattgttagtatatttacatctacttgtggggtgtgtagtaatattttttgctgataagtatgtagaaaccactgcttaggaaatgactttcagaatcccatcatactcctggaacattctgtaccttgagatgaccaatcacaaaattttgcatcaggcggttccacttggacttcttaaatacggaaaggtgtcccaagtcatgttgcagaaatgaatcctgagcctagaagagacagggttactgtcagagaagttggcaaggtaagaagaaagtagtaagtgaggccactggtaggtttgggaacccatgagaacagtgggagatcttgtctgacctcaagccaagtgtgtatctgtcacacttgctgagttctttcccatctctgtgcctttgcacaggtggttctctcagcctagaatgctcttctctccactgtcagaatcttccagtgtggaatggaaagaggatgcctttcaagtcaggctaacttgggctctaaactgtccttcaccactttacaaattatacaactcttggcaagctagttggtagctctgaactcagttctttgtctgagaagcagagattataataaaccttgctcattcagctgtcgtgcagccaaaatacatgtaaaattcctgataatgctaagcagtcaaacaaatatttgtttcctttcttgactctaaaagttgcttttcaaagaataaagcaagttgacttttcgagaaaaaaattagcatataaaattttgtaattaacactgatgttaattctccatgaaatcatccccaattgcctcaattagaattagatgcctctttctgctcccagagcacatgcttgtttcttttccttctgccttgtatcctgtctagatatttcaatgaccagctcctcccctggatgactgtttcccaagggcagggtcaggtgcatttccctttgtgtccacaatacagtgctgggtcatagaaggccatcttcagagatctgcacttcattcaaaggat

SEQ ID NO: 36585 - DNA, 788 bp, Bovine  19866880683790
  misc_feature (1)..(1): n is a, c, g, or t
ntgctgacctgcccctcttaatgttgacatgttctgacacttacataaagcaaactgccttgtttgtgtctgaagggattaacctcacaggttccctactcattatcctcatctcctacgttttcattttcatcaccattatgaggatctgttctagcaaagggcagcacaaagccttctccacctgtggctcccacctgacagctgtcactatgttctacgggtccctgacttgcatgtatctgagaccagcaaacaaccaatctgtggaacaagggaaaattgtgtcagtgatttgcatttttgtgaatcccatgctaaatccatttatctgtagcctcaggaacaatgatgtgaaacaggctttaagaagaatatttatgagaaacgttggtgcaatgaagaagagttctcttttgacagtttcccagttaaaaaaaaaaaaaaaagagagaaagaaagaaaaagtgtctcgaaagcagccccaaaatataccatcgtgcctgaagaatccaatccacttcagtattctttcctggagaatccatggacagaggagcctgtcaggcatcagactcctgtccatggaatggcaaagaatcggacctgacccagcacacatgcacattgacacacgtttgcagagctggggatcgagtctaatggaaacaaagaatggaagtgttgtttggaagaaaacacaacagaagtcagtttcttatgattaagcaggtttaagcttttagcctcactcaagggactcatttccacttgcttggcatatattt

SEQ ID NO: 36586 - DNA, 1270 bp, Bovine  19866880743192
  misc_feature (1)..(1): n is a, c, g, or t
nttaaattatatatatttatattcttttccattatgatttaatcactggatagtgaacagagttctgtgtgctatccagtaggaccatgttgtccatccattctatatatattaataatttgcatctcccaaactccccaacccacacctctctacaattccttccccttggcaatcatatctgttctccatatctgtgagtctgtttctattgcatagatatgttcattcctgttgtatttagattccacatgcaagtgatatcatatggtataaaaagtaattactccaggcagtaacaagttgagtaggttgtaaaaatgactgcaaattctttccttcaatgcagtctcatcatttcaaggtgatgtgtcagatcctttcactaaatggtggagtcaattcctctgactccttaaatctgagttggccatgtgacttgctatggccaatgtcatatcagaaactgcagcagaatactcacgacttggatatgcttggcactcagtgtaattagtttatgcccaagcaagaaggacttattccttattgattgtagagcttcttttgcttcctcatttcataggcagtagataaggaggtttaacatggggtcataatgccacaagataaggatatttttccctattcttcagagttgatagatttaggctgtaaatacatgagagagggagctgcaaagaatgatgagagcggtcaggagcaagatgcctgtggcagaggactttttctttccccatagcaaaggacaagctcaggatggtgaaagatatgtgtatatgagaaaacaagtaccaacacagctcaaaatgaagttaatatatagaatagattaacatttcactaagtgtatttttaatgagtcattgaaatgattatagatttacttgcagctgtaaggagtaatacagtgagatcctttgtttagttttcccagattcctcttgggacaggcagagtaacagttcccaaagatcttcatatcctaatacttggaatccataaatctgttaggctacatggcaaacaggaagtaaggtagcagacaggctgacctagagctggagatattattttgaattttccaagagtctttaaaattggaagagggaggcagaacattgacagtcagacagagatttgaagatgctgtgtgatgtttgtgttgaagatgaagtaaatggttatactcaaggaatacaggtggtttctagaaattgaaatgatcaagaaagtagatttttctaga

SEQ ID NO: 36587 - DNA, 617 bp, Bovine  19866880753130
  misc_feature (1)..(1): n is a, c, g, or t
ntcccaccggctgccgcagctggctctccgcggagctcgccgcccccgctgcctcccgcagcaggcgtgtgaagggctgtgggtgtcactttccacagccccgcccggtgacacccttaatcacagccaggaagagcggggctcaggaggtggggacgaggtgtccttgggtgtgagaaaatgattcacaccggagggctggccaagtggaccagcagaagtcatttcctgaggtcccggtgggagaaggcggggccccctcggctttagtggagactcagctcttgccttctgcttttgtcctgggagccaggcggaggtcccaggcgagggcacggggtcacaggcttcatttggccttggaatttaaagccacggtggacaatggcggggccccaatggtgggaggtccctccgccgtggctgagagctgctttgctgcgtgggaggtgtgtggggggttccctgcaggtcagctgggggcaggctttgtgaccgtgggcaagtcactccacctgtctgggtctccgttcctggagcctgtcagcagtcacagagggctgctaggacatgcaccggtgcccggggttagttacaggggttaatacaggtacctc

SEQ ID NO: 36588 - DNA, 1743 bp, Bovine  19866880766012
  misc_feature (1)..(1): n is a, c, g, or t
ncgggagaggatctctgtgatatgtggttgcaaattaaaaaaataagctacaaaaatactaaacatgaaagaaaatattgattccctaaaccacattaaaattgagaccataggcttgcctttaagagcataaacatgtaagacacaccaaggaaagatgtatttacagtgaatatagctggtatacctgaaatacatgaataattaccatatatttttaaaacaagtcaggcaatctagtgaaaaaatgtgggcaaacgcttgaataactattggttatataaatgtcctgaaaatattgcaaagttgctcaatctcactagaaattggcaaaatggctggtaaagttccaaagcagcattagatttgcctttttcagtgaaacatctcccaatttctcatggaaaaatctgtatatacagtagaaattcttcacacattttgattttcagtgatttttttttgtccgtattggaaaaagacactaattaaaatgatcacaatgtcaaataaggtatcctgtggaaaattctctattataatgaactttagataaacagttccagaaattttgtcatcattactctgaagtttactctgtaaatagctaaagaaggaggtaagaaaaggattcaaacacagaaaacaaatattttgatcccagaggattttaaaaagcatttagaggcagcaataacattttaacttactttcctcttaataaaattcccaaggtatggcatactttagggaaacaaattctctcagaacaaaaaatgatgtaactacttctgaaaatcttaattcatgtggagattttttttttttttttttcagagtggaatcttcctatttccttgggggaaaatctaagaatacgaccaagtgactgctagacagtcggacttcctctctgtgcaaaggcacaggtctgggtgggaagatgaaaggcatgctgaaaaaagagcacagtttgtacttcaatgttaattttctaaagaagaaaggaactcactgccatgtaagtttaactcactttttaaacctatttctgattctctatatcttcaaaagttcaagatgagttaaatggatttatggggaaataagattgactaacattcaaaatattttataggttttctaatgtcgaacaaactcctagttaaaccctaattttctctctaaaacgtttaaggcatattactctttagaactgtatttgatttgctggcgtttcattctagcttttgtatgccaacgttcccaaactgaaaacctgcaatttcttttcttatggataatgttatgcttctaagtaatttaaagctttgtgcacaataaatttcttgtttttttccctcactctagtgactgagctaaccaatggctggtgaaaactatacaaggatcacagagtttattttcacaggctaaaagtaccatccgcatgtgcaaggcttcctcttctcgctcttccttcttttttaccttgtcaccatgacaggaaacctgggcatgattatcctcatccggatagattcccgcctgcacacaccgatgtatttttttctcagtcacctgtcctttgcggatgtctgcttttcatccgtggttggccccaagatgctcagagacttcttcgctgaaaggaaagccatttctttcctgggctgcgccttgcagcagtgggtcttttgggttcctttgtggccatcgagtgccttctcctggcgtccatgg

SEQ ID NO: 36589 - DNA, 2449 bp, Bovine  19866880867922
  misc_feature (1)..(1): n is a, c, g, or t
ntcatatatggatgtgagagttggacatgaaagaaggctgagcatcaaagaactgttgcttttgaactgtggtgttggaaaaaactcttgagtgtcccttggacagcatggagatcaaacctgtcagcactataggaaatcaaccctgaatttgcattgaaatgactgatggttaagctgaagctccaatacattggccacctgataggaagaaccaactcattggaaaagaccctggtgcctggaaaggttgagggcgggaagagcagagggtgaccagaggatgagatggttggatggcatcatggactcagtggacatgagttcgagcaaattctgggagatagtgtaggaacatggaagcctggcatgctgcagttcacagggttacaaagagtcagacatgactcactgaccaaacaacggcatctcggctcctacaccttgtcataggaaccgggctatgtgtccaggctgtctgcctgatggcccactcgtctcagtatagtgcgttgcttcctgacacacagccttgagggatgcacctgggcctcaggagtcagcctaagtattcgtcttgggcctgcatgtaaccagtcctctctcctcagatccctcctatccccttgtgagtttgtttcttcattttttttaagtggaaatgtaattcttattctttctgcctcacagtgatatctggatcaccactttgtactaagtatttcaaaataatggtacaattgtaagctgttttaaaacatgaagtgcaaaaaaaaaaaaaaaaaatgaagtgcttaatattgcctaaaatccctctaagctttatgtgcaaccattctagtgaagtctagtcttatggaggccctgccctctgaagccagtttttcagtcaaccaaagtcttggtgaaataaaagtggtgcttttcgtggggaatacccaaaagtttggagccaggaagaggtgaacctggagttcttcttctttgcttttcagaaggtagtttattctcctggaactgtaatttctccaattgtaaaaagaactatagttagggtatagtcacatcattgactcaacagctatttatggaattcctaatacaggtccaatcctgtgcctttaggtactgaggactcagggatgagcaaaattgacatagtctctgctctcatggaaactggtttaacagggaacatcaaacaattataagcagtcacggaaaaagaaaagttatgtgtaagttgtgtggcaagaagtaggtggttagaaacatggaattactgtttggcacagggccacgcatcccattcctttgtttctcagaggtttaagaattctgaggatctcaggaggatgacactgctttgaaatacttggaatcctctcatttatgccattgcaggtcctcccaggcaggatggctggtttcccacagaaaatgataaattggccctgtaatatacctcatccccatccctccacatactcttgagtcccgagacctcactcacgtttttgtttctctcctgattgggctcttctggagcaagctctccaatgagcagtggtttaaggtacaaccgcacaatgtcagggtctggatgcatggctctgaagacgtcctgtgaatcagagagaactgttagaggcttaaaaatgacacgcttacacacagattatctcccctttcttacctcattctgtaccgatcttacgaatcagcaaagattatgttatagagcatttacttctaactctaggttgacacttccagttcgttgatcagaattacccttgaaattcctctatgaaagcctcacactggagatccacccactgagtacatggcttactaggcaagtcctgggtagaaagttgatctccaagcattggaagagatagttgtttattttattgagcccagaagcagtagttggctttgagattatgggccatggtgaatctttagagtcaaacctcaggcttggtgtgggagttgcccacattgtttggagcatgcagcaaccaagactgcctatgcaaatcacatctctcagagtttcccttttggttcttggtcaaggaccaggggacagaggtccttgaattaagttatttccaaggaaagacaagttaaagttgatgataacaaacatctaagagagcatgggagcaaagccctcgaatccttagttgtctaaagtggcactttcttgggttaagtttatcactgaaggagccttagcactctttctaaaaaaaaaacagaaacaaaacaaacaaacaaacaaaaaacaccatggcattctctgtaggggctggagacaggcacaaaatagagctgaccaactatattttttccaactccattcccatgttaagtagtaacttccaagtggctatgaaaagcagtgttggttctcatgtcctgcttaagtttggaaata

SEQ ID NO: 36590 - DNA, 882 bp, Bovine  19866881462049
  misc_feature (1)..(1): n is a, c, g, or t
ncaccaacttattgatccaggtgtctgcacacgcaagggaaagcagtggtgaaatatcacagaaaaagtgattgataacattttggaccacagaagggtaagcaaaaggtgagacttgtatgagtcttggtgcttataagagccacagcataagggcctataaccagctgcacacagaccctctgggacataatgagtgtgtacaacaagggcttacagatggctgtatatagatcataggccatggaagccagcaggaaacattcagtggccacaaaaagaccaaagaaaaacatctgtgcagcacaacccatgaaagggatgcttcttttctttacaaagatatcacacagcatcttgggggcaatggaagaagaggaacacaagtctacaaaggacaagtggctaagaaaaaagtacataggagtgtggagtctgggatcaatccatatgagagtgatcatccccaagttaccacccagagtggcaagatagaaaaaaagaagaatgaaaaagagaacaatctgctgatagagatgatctatgaggcccaagaaaagaaattcagtcacagttgtctgattctgatcttccattggtcatctgcaatctgttataagaaagatgttttttgatgaaaaacaatcattgagttacaaataacatattaagccaataaagggttctgttagataggtctacaatagacaattactgaaacactttggaactaaaaaataatattcccagattctaggttgagcttctcagttggtgcagtggtaaggaatccacctgccagtgcaagagacactagagacatgggttcaattcctgggtcatgaagatcccctggatgtatggaatggcaacatgctccag

SEQ ID NO: 36591 - DNA, 2951 bp, Bovine  19866880392909
  misc_feature (1)..(1): n is a, c, g, or t
nccctgacaccatcaacgctttctttatccaccctcctttttcttgtgggaggaaaaagcagatatatatttccttaaaaatttatacatcaccccacccccaagaccccaaagcatgaggcactcaattttcattatgaagtgactagtgaatatttagaagcctgcgtttaaaattgcatgtattaaatgcacataaaatgaatatattgtttgtgaaatattaaacacaagtccttttttttcctagttgttaagcacaaatatgggcctgccatgcatgtgtgttatcttgagaaaatgtggggctttattatgcttctttaaatcatactaagtattccttttagctataaaggatcttttcctttggtaagtgttttgttgttttttttttctccttttgactgaggataacttcacaaaagcatatgtaagttaaccagaaatgcaaagaaaaaaataacactttttcagaagtgatgtatctttttaataatcacttgggggcaatagaaaaggcaatttttaaaatgaaagtaatctttaggaaaaatattatgaaaaggctttattagtattctgttgtgttgtgttagcatccatttcatgggaaaagacgtttctttttaacaagatactccatggcaagaaaattatttttttttcttgtttggcacaattccaatccttttttcctttgccctcccagtggatgaaatgatcttagtggaaaacacattttttttggaagaacagatttacaggtgaatgtgaccaatgaaaatatttgaagtgaaaaaatgaaaatcaaatgattgttgtagatccttatagtgagcagttgggagttctgctgacttcgtatcaggaatgaccatctatcccaactgatgagggagcacattttaatccactaaggttgtgtattgattttggcagatttgcagtgtgatatgtgcaataggtatttttgcagctggtaccaagtgtatccagtactaatatttattttatttttaattatattcttatactttccagtttttaggtgtaaaagttgatatttacccttgatatattgggttggcaaaaaaattcatttggatttttctgtgagatgttacggaaaaacctgaatgaaaaatttggtttctgtactacttggaagcctgggagaactgtttctgtttgaaagttgtgtgtactattttcctattgctgttgtaataaagtaccacattacaaacaatatacatttagaatattacccttctaggtctcactgagctaaaatgaaggttctggcagggctgtactccttcctggaggctggtcatttgtatccttgtcttttccagcttctaagggccactggattccttggttcatggcctcttcttccatcatcagaggcagccaggttgcacccatctgactattcctccatagtcacatcttcctctgcctgtcacgttagcaggaaagggctttgttaaggacttatgtgaccaggttgggctcattcaggtaattcaagctcaaccaccatatcaaagtccttaacatctgcaaagttcctttttcagattaggtaacatattcacaggttctgaggatttggatgtagacattttggggaggcccttattctgcccatgtgcacagaaagatgcagagagccccacagcaatggcgatgactgccatcagtgttctttggtgcctcctttgtgccttttggggcttccctggtggctcagaggttaaagcatctgcctccaatgcaggaggcccgggttcgatccctgggtcgggaagatcccctggggaaggaaatggtaacccactccagtattcttgcttggagaatcccatggatggagaagcctggtaggctacagtccacagggttgcaaagagtcagacacgactgagtgacttcactttgtgccttttacaaaaatgaccacctatgatgtatagtcggcactcagtgagtatttgttgagaaaatgaatggatttattgattcttatctgtattcatcagatggcattatttggagcatttagcgtaagtgggaaggcacttcagcactggttactagcagagaaataggtcttacaggaatttattgatatttataaactaatccatgggttggtataacattcgccagagccatgaagctacagtaacttaaaactaatcatcaggtgttggaaaaaagtcactgctcatgctcagaagtcagaattgaaacctgtacagctgttccctgaagaaagcagacagcagaaggtccataactcttgagtgtttcaacccttcaactcttgagttaaatataccgggagaggatggaaccaaattcagctcacatgggctacttagagtaatctggtgttctggaagattcttcttgggtgtggtcagtggagttacgaagcttctgttaattgagttttggttggcatcaacctcatgtgactctttgagagtgaacagaacacacaactacctttgttcctattgcagattggagatcccaaagtgcaaaaaggcttcagaaaaagacctgccttcaaatcctgcataactgggtaacagagtatctctaaaacagaggtaatgtctaccttgttgattgatggaagcattagcaagatttttaccaggcctagcataggaacaacaaatatagtaggtactcaataagttttattattatttacagaatttctcagccagcttctaacattgccggtgatgttttgttatacaaaagtgtcattcatctcaggtaattaagaggtgcattttggttaagagtgtagattctagatttattcatccatttattcattctttttttttttttccaccattccaaaattccctattgctgttatgaagacaagaaggacagagtagtcgtgatctgttgtg

SEQ ID NO: 36592 - DNA, 1879 bp, Bovine  19866880411285
  misc_feature (1)..(1): n is a, c, g, or t
nataatgagttttgaacgtgtctgtattgcaaggggctgcctgggactcctattttggagcctaggctggtcctacccctgattaattatgcaagcctgcttcctgaaagcccaaaccatccttgcttcaagaaggaaccgccccaaattgttttatcactatatcttacacatccagctttaatttaatctttggtaaatttatgaagctcttcaacctgtttcacttaaatgtccttttaacacacagtcttatatcatttttatgttagttcattatttccagcagaagcacgtagttgtctggaaagctaaattttccttaaaatacacatccacatatttttggagcttgttagagactcctttttgtgtttccatcacaagggaacagaattgtgccaccagactgtggaagttgtttatttttgtccctcttatgtacattttcagaaaccatctccttcttaatctccactggggaccagtagttttttttctctaattataaagtggtctcatttctgacctggggtagttttaaattttaattcccgacttgtgtttataaactgttagactacattatcctgttgggaacattgagagaaaggcttcagtcttttgtgttagttttaacaattagatattcattcagtgtcttaaaatgtattttgggtgaacgaaaaatgcatttttgatgttgatttttttcctttggtatttcacttatctatatttcacattagcagtgaagcttttcaaactctggatgagtgatggtgatttgctgtaatattattaaaaatctaagaggagtgaacataattgataggattactgttttgtttttaactcttcacttttggtttcaaaatgtttatgtggaaaaaggtatagacatcttggcataggggatatatttttacatattttggcagattctgggtcaaagctgctcaaacatcaaggagcctatgggttggttgttttttttttaagagttattttctgcctttatggtaatactaaggatcattgaaaatgactaatccttgcccaactcattaatgccaggaatgttgagtttctttattctgttgtctgtgactcattagtctgtgttctgaacagcaaattggcaaaatggcctcttgtcactggaaagtattccttttgcacttggagaatataatgtacctgaggggctgcaaaaatatttttcttgcagatctggatgccccaggctgctaaaacccgaggcagtatagaattatgcttagtgtcccaaagacctaattatagtactgtctacccttgtggtactactttcaatgtattttaaaatatttggagccaaataaagatgcttttttttgatgcagattcaaatacctttagcagatcaaactgaaaccaatccctgaataaacaattttgtagcactggggaccagtattaaagggagtaaagacgctcattagtgtctgatcataatttacaaaattctacaagattaagaagttttcatacaattctgtaacatacacatccatgcacgaataaaacaaacactgaagttcttttaagagatgttccatttagtatttacatatatttatgtatgtatagaataatgcatatagttgttttatagtccttaattgtacatataaaacgaataatttcaaatattttataaaattttaaatgttttgaatgtattataaatatattttaaatattacttgaatgacacaagtatattttatataattttaagcataacatttaaatatattatataaatgttatgcttaaaattatggggacaggattggtaacttctaccccagacatttttgccagcaaagaatca

SEQ ID NO: 36593 - DNA, 1900 bp, Bovine  19866880456685
  misc_feature (1)..(1): n is a, c, g, or t
naatgctttattatgttctttctatggagttcagttaacagtgccttgggtccatgagtaggggaaacttaaaggtttttcttaaacaaaagagaggagagcttgctcctgaagcaggtttcccaaggtcacggccacttctaattacaattctaatgaaacataaggagatcttcccaggagatcattacttggtaatttttcaacaatagctataccatcttcttccctatttggaaaatacagaaaaatggcccatcagcgtccctaccatagatttcattttcacactcggtatttctgaatccctgattagttctctgacaagcagcacatttatatacagtatgaaatatgagcgttatctatgcctcagtcttaatttaaaatttgcattatacagtatttatgtagaccttttctgcaacctttcaagtactcaaacaaatgattctccattaaaagagttgatcttgaaatatctgtctgaacattgtaaatagcatgttatggatcacgcgtttatttagacaagtgaaatacaacatcaaaagctatcgctgaaaaactaggccaatgtgggcattaaaaatataacaccacatatcttgggcaagaaagttctccagatcccacgtgtgatgatggggaatatttagactctccagcaaagattacatgtttcttgattcatctcacagcgcaagtctacttcatttgcaaagtgataacctattaccataactaaaccgcctattgcatggaggctcagaaataaaataaaaagattagccagttatcttatttacatatattgaattgcagtaatacagcccgatctctgcctctcatttgattctaattaaagcgtagcagagaaactgcaatccacacaagagcttattttaatagtcagagctggcaaagtcccaatatcacaatgtagcaattaacagcacggctgtatttgctattcatggtttgatgtaaaaacttgtttattaagatgggctggaggcgctggtgtgcaatagacctgcatgtaattagattccaattatttgtctgtttctgatattgtaaactggcacttagcacatcagttaaattgacacacggcgctgcatggtttactcggtaattaaaacatgttctgttaattagatgatgaccactttatttcagggctcttgtgtttgggttttctagtgtgctctgtttgtatcatgagccaccagacgctcttctaatgagtccttgttttgtttcaattaccacctgctgttcaaaagcaaagcttgttttaactaaacaaaattaatgcttgtctcttcctttgtaagaacttaaatgttagacaaattaatatgcttattatcgaagtgctaagctctggttttaaagactgctaaggcaattagaagaaagttataaaatgttgtagagtgtggcataaatattgtttagcgtattaagaggcattacaaacaatgaaatatttgctggggttgaaagggagcagagagacttagcctccccacccccaaattaaattagctcttgcaatttgcacagggatatccagaaactaaagatactagtgacttcctaagagaaggaactgaatgaagtcagacatgaaagtatgtggcacggctataaataaacccatgaatgatgttggattgccctgaatggttttcaaaactacatgcctgctgcatattctttttcatatgttgttttcatgctaaacaatcaatggagctgtttcttaaaacttatatagcaaaccctatcagaaaagccagttcacattttccagggtgttagggcctgttctattacctatgcctctgattccaaagccacctccacaccagcacttctcccggggaac

SEQ ID NO: 36594 - DNA, 866 bp, Bovine  19866880600945
  misc_feature (1)..(1): n is a, c, g, or t
ntattttcaatctaatttgtggaaggagaatttttccttttatcatctataccttattcctttcctatattcaaccattacttttaaaatctctgtccactaaaattttctcatctcttcgccaagaaattcatttttccccttataatttgtacaacattaacaattgtattcttagctcactgtggcttacctatgtagatcctgtgtggttttaactttattaagatcataatttagggatatactgatattcttttccaattagtctctacagctcttcaaagaattattttatctcagaaacatcaaataaaacagcttacaattttttatttgctttatagttctttaaaggatacaaagacatcatttgtgaatagttgatcaaatgttagaatttctctttgaatccaaaaagtcctattaaactgaaattgtatttgaagttcaatttatttaaatgtcctgctttaagactgacccatgagaggtggtctggagaaaagactgatcaagataacatatttttttttccctttctctccaaggagcaaaaagaaaaaaaaaaaaaaaaagcattcttcactgatgtaggtagaaaaccaggtattgtatgaaagaaatcacacttgtccatcctacttggctacgtagatctcagaactaaaaaagccagacaaagtcaagaagatgacaaagaacttgacaatgagcagactcaaataggagcaaatgactgcatatagtcaaaaaatgcctctcatccaaaagagaaagatatttccagatattaacattttacagtagattttattgtactgattgaagacaactttgttttagcattgccatacctccatcaa

SEQ ID NO: 36595 - DNA, 1538 bp, Bovine  19866880620585
  misc_feature (1)..(1): n is a, c, g, or t
ngaaaattgagaaataaacttcttaattctcctttcaagtctgatttgttcctcaaagaactagctcgtcatttaaaatggttccttaaaattccctctgtaaggctgccatgacatttagcatgcttctcacaggtgaatccttccaaaaacagagaaggagatcaaacactgaaaacctcttagaaaataaattgtattttactaattacaataccaaggcagcatagtaatcatgttccatattcattctataaaataacaataataatcataaagggtggtgccattccattcagcttcctcttagcaccttttatttaaatgcaatcacaagagggtatttttgaagatgaaaagcaactttcataaaaatgaaaatgactctgattccctcaccactagtcaaaaacctttcagactaagataaatgactcgaagccattagaaaaaaattattgccaacttatgtgtgcctgagcaccccccctactttgcattttgattcatatttaaaatattgattccatcaaatggaggaacagttagtgtcagcaagaagatgatggagaaaatgaagtcaaaggcgaacaatgtaaacagtggatttatttatttacccttaggtggaggtgccatatttcacttctattgaacacttgctcaatttattttattaatttaatctttctaaagtactacttcacactctgatgcaatttcagatcaaacagatcactgtgtacttgttgaattcatggtgagtgatacatgaatttataatccagaatgattcataattgagtgagctaccttattttactcccctattaccggagagctttgcaatgaaagataataatgttcgaggaagaaatgtgaaagatattctcaaaaattgaaccatatgataataatgtcaagcgaaaatgaaatatttaatgtccatatttaggttctccatcatgtattatgtggtcatgtaaggggtgtcaaaagctgatgagaacttcaatttgacctggcaaaaatgaagtaagcaacatacagtatttcatccattatgtccattttcacagtgaaggatgggttttataatactttattccatccaatgtcaaggtcttaaaaacaaattttgaaagcacttaagaggttcttttaacagctgtatttagtaacaaatgacagatatctattaatataagtacatcttatataaaatattttaatatggattttaggtgatagtatattcttattaacatcatgtgtaaaatggcacatcatagcagctcttttacatgaaagatccatttagtcccatcttcaaattatggattaatacaatattctacaccataatggttccaaaagcattgttagcattatgtattattcatgttttcaggtaccattgtttcagctcataatagagtatctcacaattatgagtgaagcttataatgaactgaagaaaactacctaactgtactattttaataggtcacctagttggttctgatgacacctgagca

SEQ ID NO: 36596 - DNA, 962 bp, Bovine  19866880634184
  misc_feature (1)..(1): n is a, c, g, or t
natattttccccaagcattactaatacctcacagttagagtattttggaagacttctgaacacattcttatctaatctttctttgtttaaaactctgaatgtttataagcctggaacccaggaatcctcatttggtcatattcatcacacttattttttgctgtttgatttctgctttagaggatgctgtccatgcaggcacagcctcgaccaccagcatccagcatggtatcggccatgcgtggtgatgaaaaacatctctcccaggaaacagacacccttcaccactattcatgttaagttccctttttaccttttgatagttattttaatttctggggaagggccaacccatttggccaacccatttgggccaacccatatttggctaatttgtccaactgcaaattagcaaaagcagatactgtttcaccaaattttgaagatgattcctttacaagtgccagaaacaatgtcatcatgtacactggaaagctgtttaccaattttgacttcaccaaataggcccatattattacttggcttaggatattttagaaagaaaccacttccatatgctatgctgaatctcatgatagatcattaaaactcttaagggagacattatttttctctagagttaagatatactcaaaatcatgggcttctaagtgggggaaaactacagttaaccaaagccacaacaacagtgtttagcaaacgagcgtgatgtttacaacaggactgaatgtgacagctttcaaagcattatgtatatttccatgcatctacatggctagctctgacagcatgtcagttatcatttttgtaataacatggatataatttattagaattcaaatataggataaactgagaacatgcttcggcctgaagtactaatttgtctgttgctgacagttttgtatgtgttttaagtagaaataaagacattgtaattg

SEQ ID NO: 36597 - DNA, 1093 bp, Bovine  19866880651762
  misc_feature (1)..(1): n is a, c, g, or t
ntatgaggcatatcaggatagcagaccagaaggtggcactttttcttttttcttctactcttttggccacaccacatggtatgtgggatttagttccccggtcacaggtcaaactcacaccccctgcattggaagcatggagtcttaacccgtggaccaccaggaaagcccaagaaggtggcacttttatctagtactgatgcagctcctgtccttatctccattcctcatcccttcccacatcccgggctccttcatggtgacgtaacgagctgtctagacctatgtagaaaataccgataatgcacttttggtccagtgttgattataatcactcgaacattatgctctactcaccctacctttctgaacaattcacatgagcctctacatggctcctcttcaggttttaactcagctatcttttttgaagaacacccaagaaaatattaaaccaagtacttaaattttataattttatcacaggtcatcagtttgtgtaacctgggcgaacttaatatgtaatgggcaaaattcttagagtccaagtgccttcattaagtgtatgtactgttcttgtgttcagttctgtaaagggagaaatttagaggcattggataatgaattctgccctgcagacatttccacctacacatttatccttgaaaaaatgctgatatgccttcatgtggtatttcctatttgtgaaggttccctgactgaatatgttgtctcacttctttgggaaaaattttgctttattaactttgattgtccagcattgataattaattttgtaggcctatcagcttatgtagtgggaaaatttcattagcaagttaaatgtaacttcgtttcttcatggcttcccatattttgtaggcttttagggaagcaatggttttataaaaatccattgagcagggcaaagacaatgtacttatctggttatattgtgtagaaaaaaaaaccctctttctggaatccctataaaggttgtatgttctcagagctctcttatctagtgtgcttccttaaatcagaatgttcttttccctaagaagcccaccttaaagaacaacattatctttat

SEQ ID NO: 36598 - DNA, 1195 bp, Bovine  19866880660823
  misc_feature (1)..(1): n is a, c, g, or t
ncctaatccctacatagcactggatctcttaggtggatggtttcaacatcgtaggtaggaaaggaccaatattaaatttataaagatgctatgagacaagctgaactaaggtaaaacattcttagagaaaaaaattttaataaagagaaaataatttagttgtaatctgcagattggacctgaactgacgtttattaaagataaacaaataattattatttccctaatactgttcccattttaaatctccctaatattgtttccattttaaatcaagaactcagattttgtgcccagctaaaatcctgaatttcccaggctcccacctggttctaatagaccaggaaaaaaagttctgtgcaatgaacttttagggaaaacgaggttatctttaaaaggaataggaactgcctttgccctgagcatcatgtttaagccacacttttttgaattttcttacctgcagccataagtcatccctaacccaaacaggggtctgacatcttacaagcaatttattgttatgaaataggatgtcgtttcaaattacatgaataaaccagcacatataagctaactagcataataaacttttaaagctgacagtagcagtatcttaatggagcagaatttccaaggactacaaaatgaagctttgttttctctttctcatgaatgcaggtgtgacaataaactctctctagcctgactcagagaacttccctggtcaaactgagatagttacttaaaaataaataaataaataaactattcatgaagccaagtaacaacttgggtggggtgggggggaggaatctaggtttcaatataaccaaccagcttgtaaggaatataaaaatattttacctggcctgtggttacttattgaataaaaggcaaaatgtgctttaaaagggcttcccaggtggtgctagtggtaaagaacctgcctgccaacacaggaaacataagagatgtgggtttgatgcctgggtcaggaagatcccctggaaggggatttggcaatcctttccagcattcttgcttggagaatcccatggacagagttagcctggtgggctacagtccatggggtcacagagagtcaaacacaactgaaacgacttagacatatttttaaaatgaaaattaattgaacaaagcttaatagaaagttttcttgatagaaaacttt

SEQ ID NO: 36599 - DNA, 1103 bp, Bovine  19866880696370
  misc_feature (1)..(1): n is a, c, g, or t
nctagcagccctatgtgtataaataaagctttattggaacactgcacatgcatttgtttatatatcgtctattgctgctttcaggccatcaaagcagattgaaagagtacaacagagactattaacctgcagagactaaagtatttgcaagctgatcctctccaaaagaagtttgctgacctatcatttagaagataatcatagccaatattttgagagcttacgtggccttagaccacttggggtacgtgaattgtctcatgtcctcccagagtcttgaagagtaggttttatcattttttttttttttccagttagggaaagtgtggtacaaagatgttctataatgtagtcagggttacccagacagtgaagagcagagctaggctgtatcctctggctctgtagctcatgctcttagctccctttctctctctatctcaggactgtatcggattcctgccgtggctagaagaaaagccccaggctaccagtgaagggcatcacttagctaaatgatttattcatctgaaaaaagggaaggattgggctggattttaacctagccattaatgagcttgttaaccctgacctttcagatcaatcttctaggcctacctttaccttttagaaaggattccattttctaacaataaagcacattttcctcttcttacaatctaatgatcacttgctgtaatgctgcacatcgtagcagcccatcaaaccattagttacacataaaacctattaatgtacagtattcacagttgcattttctttcaagtcaatagaaaggaaacaatttattacaagggcctgatacacacctcagtacattaagacagtctttcccaaagagctgtgtgctaatgctggccatatttagggaccaaagtggtgagagaggcatggaattttctccctggccaccgtgagttgtgtgaactcgctggggactaaagcttcctgagtattagtttcctcacctataaaatggagatgatgccacctaccttgaagagttcttatggcataaactttaaaacttacataaattatttgagtgttgggtatagaataagtgtttcataaattttaag

SEQ ID NO: 36600 - DNA, 1413 bp, Bovine  19866880710194
  misc_feature (1)..(1): n is a, c, g, or t
ntatgacatatatgaatggacctgttcacccgcattccaatcattcacttcacttctaacccaggactttaatgactgccaagcttctacattcactggcatgcactcatctccgtcatgttcttctgacagcttattcaaacaaaaggaatatgactaaactccccaagcaggacagagggagttctagtgctgaaaagcaagccaaatttacaatttaaaaataaattccagtcctgttcaataaattacctattgcatactgtaagaattacattattattgccataataatatatggccgttattagaatgacagcaataacatatgcaattgctaatggacttataatgtagcatgccattgggaaataaaaacgaactatattttttcccattaccaaacaaatgctgctagaatctatacagtaattggaaactgagtagttaaaactagaagtttatacccatatttgccttgcatatatgggcctctgtcacataattttccactaaagttaaataagaagaaaatattacacacagactgtttctatatgcccaaactgttttgattattttgatggactcgactggctaagtcaagttatccagttaaaaaaaggtgaactcaatcaaaaaaaaaaaaaaaaaaattcagagaggtcaaaagaataatcgtgccagtcaaaaactgatttataagttctttttttttttttttcctgaagagattgatttgactggtcaagtcagttaaaatagtcaaaccagtttgtgtatatagacataaccacagtattgagtcatatctagttcactgcaaaaaatagtagcaatacttcttaactaagttgatattcaatatgagttctctgaggtgggtgggacaaagctttccatttctatttttaagctgaagagttttagagaaaactggctagagtgtatcatctataacgaaattacagaccacctccaaatcatagacttaaaataatgactaattatttctcatagctctgtgagttgaatggattgagctggagagtgcattggctccatatgggatagtctgaagtcattcatgaagttgcatttagttggagcctgactgggattggaatatctaatgtgaactcccatccataaaggtttctatccatattgctactcattagttaatagtttaacctgagtttctaaggaggcagttgactccaagaggaaatatttcaggagggcaactccagtgtgcaagcataaactcagcctctgcttgtatcacacgtgctaacgtcctgctgtcaaagcaagcccagacacaaggtaggagtagctctggaagggcatgagcatcagatgtgatgtcttgggagtcacgcacataacattctaccacaatacaactgg

SEQ ID NO: 36601 - DNA, 1338 bp, Bovine  19866880766055
  misc_feature (1)..(1): n is a, c, g, or t
ngcccctctgtccatggaattctccaggcaatattagagtgggttgccattcccctttctcccagggaatcctgccaatccagggattgaacctggtttctcccacgttgcaggcagattctttaccatctgagccaccaggaaaaccctaatgtgaccataaataaggagcattctgtgtgcagtattttcaaacctttgaccacaaagcattttttctttctttttaggtgactagcagctcatagtacatatctccagaaacattgctctatagtaaggagcttgtagtgactttattcatatttagcctcattttgaggctattttctttctctttggatttctgccaggttttttttttttttttttggtatgttggacaaaagaagacatgtgttaaatattttggttttgttctttccaagtatcaatatcagtataaacttcccaagttcaaaatcttcatagtcatgttgcttaagtcgaagtaaaaaaatgcctttatttttatggttttctaagtctattttaccaaatgtacacttactggattaaagatattaataatatttgtcaaaataataatttatacctaagccgtgagctggggctttaaacacattgcttttaccaggcttcccacaaattaagacaggatttatgaatttagacttaatataaatttgaattacttcaaaaaaaaatacatccctattatttttcactgttggttttaatacagagccagttcctggtcacaagatagtacaataaatattttaaaattcggacatctcacactgaagtgaatgtggtcttcagatctgattttaaacttgtcactgatgaacatcttaatgtgctagtaaaattacatactatgatcataattttatttggcattcctaaagctacatctgtcttaattcttcttcccctttaattttactgatcttcaattagtaaaaaccaagtaaaacaattttgagaaatagggtcagatttttttcacctcttatcttacagcttttaatacagttttcagtttcagtgtctcagtggtttttactctaattgtttaattttattttctgtgtatgcacataattacattattcattaatccacaagttcatacttttattttcccttatttattttgcaaatgtgagtgaggctttccaattttttaaaatcgactctgtgagggatgtgtttgaaaggaatttcattagagtaacttgtttagctttctatttgtttgatttaccagactcccctctccagtaaaagagcagccgaacttatgtgggctttttatgaggtctagtgtca

SEQ ID NO: 36602 - DNA, 2174 bp, Bovine  19866880838106
  misc_feature (1)..(1): n is a, c, g, or t
ntctatctagacttctactgactaagtagacgtttggaaattggatcaacataacagaggttcgatggagtttgcagctgggcgaactgggaagagaattttgacattttaaagaagggaacaggaagctaggaaagatgacgctcatttctcatggatttattcccttggttctcacttttatctgtcccttgtcctaaagaaatgttttttctccccttgactaatacgggtcaccccctcttctattccccatggcctcaagtcagccttcagatcgccaacactggccaagagtataacaggggtatcactccataactgctgaaggccagggggccccatgcaccatcttcaaaggtaaaagctaagaagattacactcattcttttagcagagaaaaggcaacgtgggcctgaagttcattgaacacaatcatattctacactctcaggaggactaatcattttaagaccaatttggcggttctcactcatgagaaaagaattcttccaaaaaaagtgaaggatttgggagacagaaaaaacactagaattacagaggatggagcgaggaaggggccaggccactcattctgtttcacaggctgttgaggctactccaaggcctctggttctcatgccgtgtttcagagttggggggaaactgaggttcatggggagaacttaacctgaggccgtggagctaggaaggaacaacagtaagactagaacccaggtgacatgatgcttggtctgacgttcccaaatgggtggtccctggcatcacctggcacaccaactgagaacccagatctttgcctccctcccgtctcctaccctgacctacgcaggcagaacctggggtgtgtgtatgcgtgcgcgcacacgggtgcacaatgttagccacacacaggttacaaagaagcaagcctcgattagttgactgaggtccccagtttcagggactgggatctgacctaatcttgtccagttctccaggggagggatgcaggagtaaacgcttctaataaagacaccaagggtccacgtttaatgaggtgcgttggggaaacaccactctcttctatgaactgtgtgtgccttagcaggagcgtgctccataccctcagccactggtacacactgacagtcccaacaaaactgatggaggcagaatggatcttgctacctggtctcttaagagcatattatcaaaaagaggaaaataagtttaaaaaaaaaggggggggggagggcagcaactggaaggaggagaaattaaatttttctaccaaactgagtatttaccaaatagctatcttccagccactctatcgagcggtggtcattcacagaccttcacaactcggccttgaaggccaactcgggctctcagcgggtaggcaacctacggctcatttcaccccaattgaagaatttcccaacttttattgtattctgtcaccatcttaacattcctcacgtgttattattaaagactctcttgacatttcaagcagacgcactcggatactctgtcatagtctaggaattctaatgctccccgagtaaagcaggattttaaattatgaaaaagaatcgtcttggttttccaaggggagacgaggaagggagacacgcagagaccctccctccttttcctcggcccctgtcagagcagtggtgccacgaagctctgatgctgttagcatctctctgttcccaccacccttcgagcttgttcagagagtcaggatgctggggagtcccagttgtgaggcgctgtcctgagtaccgcttcaaagggggttagaaaggcccaaagggcatcagagacaggtaacatacgggccaacgtcccggaagttggtgtgatcaccaacagccctgctgacggcggagggatcacatgagtccccacggtggcgcgtctgtgtgaggctgattgtctccctccgctgttgcagcctgtgcactcccttccctgctgacattttcttggagcgcacagttcctggggtggatggatttggacaccttccacgtgggcccagcatcaccgagctccagcccaggctccgcctaccacgaacttctcggggagaaagctccttgaggcagaggagagcgcggccccactggccgtgtttccaaacccttgatctgcaaaag

SEQ ID NO: 36603 - DNA, 1365 bp, Bovine  19866880848177
  misc_feature (1)..(1): n is a, c, g, or t
ntgaatgaaaactagtattccaatgaatactagtctaggaagaaaaataaaaatgaatttcagttcagttcactcagtcatgtctgactctttgtgacctcatgaaccacagcacgccaggctttcctgtccatcaccaactcctggagttcacccaaacccatgtccattgagttggtgataccatccaaccgtctcatcctctgttgtccccttcttctcctgcccccaatctttcccagcatcaaggtcttttccaatgagtcagctcttcgcatcaggtgcccaaagtattgttgagtttcagcttcaacattactcaggactgattttctttaggagatgaatttcaaggttaaatatatctgtgaaattcttcatgaaccctccttggagactctcagatgttaactctgaaaagtcctatggtgataaaaccagtttaattttttttaactttttgtatttttgaaaagtagcttggtggttctctgtactgtttcacagtggctgaagggggtcagatgtacagtgatggatggtaacatacctttggtggttatcactttgtagtgtaattcgacacagatgttgaattataatgctgtaacttgaaacttatataacattatatactaattttacctcattttttttaaagggaaaagcgtagcttggtaattgaaacaaggattgaaataaggatatcatgtgacaagatttttctgtgtccctctacttttagtattcacttctcgaattttagaaatcctcatttgaaaaggaaaggttgcccttttctattctttaaattgtctaactctttaagaaaggaaaccagtccttggctgtgctctggggtgacatgaggttgagagggccagacaaggaattcttttcaatcaggagcagataagaggcatttggggcatgaaattaacattgtagtttattactaatgatgtctattaataaccctcagtatctcataaccattcttgcctgatatatctggtaatgcagaaaagtaaaaagtattaaaagtgtggagaatatatagcaatgtagaaggtaatatttcatatggtaggggagaagtagcaatttttaattctaaaaactgtcttacaggtttatgtaagcatcaaatgtgtgtaaatctttaataccactcctgatatcaataaatatttactattaaaaatagcaaagaataatttctattcacatttatttgagactaaatttgtacacattctcagttaacattttgataaaagtcacctctttcacaacatttgcttcccaaactagtatggtgactttatactcgattaaattaaaggcatatgcattgagtactta

SEQ ID NO: 36604 - DNA, 775 bp, Bovine  19866880865749
  misc_feature (1)..(1): n is a, c, g, or t
ncattagaactgattcaaatgtattctttttaaaaataatccatctagaggatgatttgatgttaactaactagattgatgataaatagctaaagggtgacttgaccagtgttaaggtgatcccattaatcctcccaggataacacaacttaagaaaaggagcaggcagaaagtaataacacattttgctgctcagtacacagcatgcagtatctctgggccagactgtgtatcatcttcctgggcaaaccttaaggttggtagaaaatgtcaatacaataatgaaagagaaaagctatccttaaggtaataaagcccagagggcaaatttattaccaatccacccatacagctgcagaacaaggagaaaaaaatccagtttaaaatgaaaccaggaacttacagagagtttttcattcatgtgacatgattttgtgataaattactttaatgctttccaaaccctgataaatggattgatatgataacagattttgttttgtggcttatttactccctaaaattgcattatgaagtgggaagggtgtgtactcttttataccactggaaaaccatttagggcactggactggggaaagtaataagaataatgacttgaaggaggatttctaagcctctttacacacctgaagaccttaccagaatacaaaaatcacaaagacaagggattagaaaacaaacacccaaataaagagcagttaacacttgcatgtatgagattatgctaaaattccctgtgtcactggagcatgca

SEQ ID NO: 36605 - DNA, 1624 bp, Bovine  19866880890090
  misc_feature (1)..(1): n is a, c, g, or t
nggtgatccggttgaaggctcattgctcactaatctttaagcttcttctgggtgatccagttagtgaggcagattaaattttcttcttcatagttccacactcatccttcctgcatttaagttctcaaagatgccaagagtccaaaatagacttgtgctcttcagggcatacaaataaccccctatattataaaaactttagtcatgagagtggcatggaggtgattctgctatttaaaaaaaaaaaaactattgtgggggggagaggaatttagactatatcttttgtcacacttattagaggaagagagagaaggagtggaggagaaggaagggaagaagggaggtggagaaaacaaaatctttgcctttccatgttaaatgtttaacagcttcagaatcctcaacccaggataatgggtagaggattatgaaatatttcacaggggcgacttccttgatcaaggtaggtcatctcctcgaaatgctgtagtgtttgtagctcctttttgaatctctgcttctgttagcacagtggtcaaacgaaatatactattgcttctcacagaagatctgctctgttgagttttaggaatttgggggaaggaacctcatccaagctgtcacatttggtctcttcactgccaggcaaatggtcaggatcaaaggactctgcctggagaaacagtctgttggatgacagaagacaacaggcttgccaagtttcttaatatttgtcatgtttttccatgttcagtaaaaggacccagtgctactgaattacggagtgattcatcaaggtttaagtaaacagttagtaaataaactatctcagatgctacactttgaaaacgtactttttcccaatcaatattgcttctgttaaattttcagtagaaactataaattaaggtcaatgtaagttcttgacaatatcactgagtttaaagagccatggaggcagataacccaaaactagcttcaaaaatattactctctgttgaacttgactgcaagagaattattagaaatattttcttttaaataacatacaactaaattttaaaggttaatcatcctgagtccttacacagggctcaaataagaattattattagtttacaataattgctaaattagtatttctagatattttcaccaattaacacagaaaacagtgctgactaggccattagtccactggttaacagtgtacacaagaaaaatttgatagtgtgacagggaacttcttggttcagtttctttgattctcccaataaagaaaggtagtgctaaaagagtaaggttggagatgattaagtccaacattcttgtttcaaaaatgaagaagctgagaaccaaggaaattaaatgatgtgaccatgttctcattgctgattctaaacagggcagtgattagaacactcttctcttgacacatgatttagtgcttatggggtcaatctgcttcctacaaatgttcctttttcctctcctcccatttctctatttccccccaacaccatcctttttcttcctcagttcagttcagtcactcagtcaatgtcccactctttgtgactccatgaatcgcagcacgccaggcctccctgtccatcaacaa

SEQ ID NO: 36606 - DNA, 3088 bp, Bovine  19866880903867
  misc_feature (1)..(1): n is a, c, g, or t
naaaaataaatttattaaattttttttttaaaaaaaggaaaactgatcttttttccaacatatgacacatttggaatttgcgcaaaaatcatatatttcttagaaaagacacaaccaaatcacaagtttttaactattatggaaacttcaaacatatacaaacttaaatatgcatgtatccaaccattatccagggtcaaagtcacttcatttatacctctgtttcactgattcccatatccccactctaacctctggatcattttgaaacaaagctccaacactgtgtcatacatctgcaaagagttcagtgagtatttctaaaatataagaagagtttaaaaaacgtaactgtcatgctaatagcacgtccaaaaatctaacactaattccaccacatcgtcaaatatccaggcaaatttcaaaattctctgatattctctgaaaattcactgatagctacacaatagtattttttaaaattagaaattaattgtcacatttgaaaatagtatgtagtgtataataacctataagggaaaagaatccaaaaagtatatatttatatgggcttctctggtggctcagacaataaagaatccacctgcaagaggagacctgggttcaatccctgggtccagaagttcccctggagaagggaatggctatccactccaatatccttgcctggagaaatccacggacagaggatcctggcgggctacagtccatggggtcacaaaaggtcagacacaactgagtgactaacactttcatatgcatacacacacacacacacacacacacacacacacacataattgaatcactgtgctttacacctaaaactaacacgatactgctataaatgaactaactacaaattttaaaaaggggaggggaaaggaaagaaaatagaaatattttaatcaagtctagatttctgacttctctcttaacaaaaatatctggcaacactgagtgcacactgcagagcattgagcagaaatgatggagccacttccccctttaagcaggtcttgagtgctccagtcaccacactcctcaacacccctactgtcttgcccactgcacactccacacacctacatcactgatctggcttttggacacaactgagtctacaattctaaatctaagctaatggaaattttggatgattggaacctctcctagagcttttgggtaaatgatgtcttaagtggtggccacagctatgattaagctttacagacttgagtaagtcacagacagaacagaaaggaacaaccctgaagacaaatgctcacatttgagggtcaaaccagggacagaacagggaagatgcaaaatcaacagacaaggaagccaagagagggaatggaggagttatgaggtacagattgatttgattagttcaagaattatttggagaaccaaattatgtgctgggctttcctctttgcaaggtattccaagacccagagatgggtaatgttgcttttaaaggagttacgccaagtccaacactacataaagccttcccaccttccctattcgtcagttttgaaatgtgagaatgcaagcccggtaggttaaattaaaagtgtagtcaccggggcgacatattaatgctcttaaaattgaaacgaaaattaaaatctaaaataagatctcttgcattcacctatatctactaatatatgttgactccttcttagagaggctggaatgcttgagactcgttgtaagaaaataaaatggtgtgtgtttcacaaccagatactattcaaaattaaaagagcttaattttaagaatggtgcaagaaaagacatataatttgcttgctatgcacacagtagattaaaaactaaaaaaagccaatgagtgtgaaatattaaatatttacttctcagggtatttttgtgcactctgatattaatgggtaataataattactgtaccttatccaaaacacacgtagactgagaaattaaattcccagcatatggagagagatattggtcgatgcacatgcttaattcccattatgttaacagaaccagaggaaatgcacctatggaaaaaaaagagatcccttcagaaacttaatataatgggaaatctggaagtatcttttcccctggaagtagatgaattaattccattaaaatttcttaaaataaatatgcatacagacagaaaagttgagtatgtaaatgatttcatagaaaataactcacaaaattgatacttgtcagtctccttgaagattaaaaatgtgaagatggcttgggaccctaggaggaagctcagtcaaggaaatcagtcatccatctgagacccccaccatcactcacatctttaataggagatgtgttgcccttctgttcccttttctatttgctaattctaattccccatcaaagagtttatctgaccacaggaataggaagcccagtggatatcagagccatatctccatatcacacatggaaaaggtgatcagcactggaggagtgggtaaggaaattcacaatcaagaggctggagtgctggtgcaagttctacactttagccacttagatgaccttgatcttgacctgagtatttaaatccataaagaaggatgttaataatcccttatccatttactttacaaaattgaaagtctccaaaagaatatgtatatgtgaaggtaactgcaaataagagagcactctacaactgcaagtgccttaagtaatttagtgctataggttctgtttttcagagctctgcttcatttattattatttgttttgtcttctggccttttttcaaatatcagagtcatacacatcagtataaacaaattagaacaagataagcagactaaagaggggatgttaatcatgctgtcaccatcccaaaataatgcccatgaatattatacttacagatcgacctcagccagggttatctccccactccaggggacatctggcaatttctggagacatttttggttattcacaattgaggaagaggtagattataaatgctgctaatatttagtgagcactggccctggaggctgctaagaat

SEQ ID NO: 36607 - DNA, 773 bp, Bovine  19866880985756
  misc_feature (1)..(1): n is a, c, g, or t
nccctttaacccttcagatcggagtgagctctctgctgtgcctcaccattccttgttaatttccctacacttacccacatctttgtaaatcaattttttcctcaagtcctttccgcattcctttgatatggtgttttttgctgtcttgccccaggacatcgccttatatatatatatatatatatatttttttttttttttcatgaaaactagtttttttagtgttcttactcagagtttttataagtagtggaccatcattaagcctcttgctaagcaatttgggagacaactttggattcctatccaggtacacttagatattcttgctgctggagtaattgtatgctcttaagtatgtgcatttaaatacagctttcctgagtagaagaaatcatcaaaaaatatttagaaagggcagtgaccttttgtaaaggcatcacattaaaatgttttacatttttaccttgcccatcatttttctcattaaacaatatgcattatttattaataaggccactcacagggacaggcagcgaattggcaaattggcctttacattaagcttttaatgttaaatttataatgaatacgccaaactgcaatatatgaaataatagtctgtctgctttctgtccgtaactgaaaaaactatagtaggcttcaggactgttgtgtatatacaggatctgtttccttctgaaagattttctgacctaaatgtaataaatcacatcctttctaatcctactgtcttgaattcctgagtctgt

SEQ ID NO: 36608 - DNA, 1054 bp, Bovine  19866881010786
  misc_feature (1)..(1): n is a, c, g, or t
ntagcctgccaggctcctctgttcatgggattctccaggcaagaatacagaatgggttctcatgccctccgccaggggatctttctgaccccgggatgaaactcacatctcctgtgtctcctgcactgcagacagactctttacccactgagccacctgggaagccttacataagaagcttatcttacataagaaatagaatctcaagtcatttatatagtatgtgttgttaaaatataaataataaaatgataaccctcattgtagggagatgatgatcctataaaaagcacccaagaactgaaagcctcaaatggaaccacagattcatatttctcatctaatactcatgttagggtagacgcatacagagcagacagtaagtaaaatcctgactttttgttttgtgtttcattctttgcttcattttgttgacctttctctatttatgaaacaaaatcttttaaatttaaatggataaagtgtttacaagagactacactagattagtatactaacatgattccattgtaagaaaataaattgggtttaaaaaaaaaaagaagaatccatggtagcaatggcaggagagaaaggtcttcatgtatctaccagaattccccttcatgggagggcaattaagacaaccaggaaggaaataaaagtttttcattgttggctgcaaggtctacaattgcttcttagtcaaaagaacatgtttaattaatttttttaattaagaatttttagcagtaggaaaaatttgcacacatacaggaaatggataattattttaacatttggtggccttttattaaatattctgaaaaatataaactctggagatgccaaattttgcaacatgatcttcttcagtctgttactatacagaagtaagcagctgagtggaaagaaaagcaaagtttctctgctcagaagaaagatggcttttatttatctgtcctcccatgcttttccactcactgctattttagaaagattacacttgtaaaagttttacttatggtataatattagaccagatttattaata

SEQ ID NO: 36609 - DNA, 816 bp, Bovine  19866881058928
  misc_feature (1)..(1): n is a, c, g, or t
nctctttttagcataagaattaaactcttaaaagatttaagcagttattgtcacagtgtagaaggttgatgtaagacaatgtagaatcaggcccgccacaagacatatatggaacacctttggaaataatctatcagataaaggagaatgcacaaattattttgttctttgcatacttttttaaaaaaagaacttttctgagatagtttttgtgaaggcaactctgtcctgtagaatgttgtaaataatgctgtttgtaatagtaaggagtgctaaatttattgtggcatatttttgaattggggcttagttgtgcttattccagatgttcatttgttcactcagacagtttggcactggttggtgtgagggtggatgtatattctcacctgcacaattaacttgacgttatttttggaatcattttcattttcagctatcaggatgataccatacttggggaaaatgctgttgagtttaagttaagagatgctgaatagctaagggcaaaatgtaaccactggggcacaggaagtatttcaaaacagcattgatactgttttattgaggataaagattttgtgtgctgctgctgctaagtcacttcagttatgtccaactctgtacgaccccatagacggcagcccatcaggctcccctgtccctgggattctccaggtccttcatgttttatggctgtgtttgtataaattgcatcctagccatcctacaggggctctattcaaccattctggctacctctgatatcatcaagatacaggagttgcttgaaatgcctacagaaattttattgta

SEQ ID NO: 36610 - DNA, 1378 bp, Bovine  19866881073521
  misc_feature (1)..(1): n is a, c, g, or t
ntttcgattattgtaggtatgactagtttcctgagaaaccagtcaaaatgtgtaaactcattcagaagttagatgaattccactcactcattcaatttgtattttagtgccaggttgtaagacagcactgtgagggcgacaaggagacaccaagagtattgtcagctcttgtgttctttggctgtgtagttcaggagagtctgtgattatgtgaattgtgagtggtgaaaattttgactaatgatgtgacttatgcagtgatccatgtcaaaaacagagctacttgattagtgacagtagttcagtatatctcctttttattcactcttgtcctttattgattttatgcccctaaaaagacagctatgctgtactcacttgatttacatagtgggagaattcacattcctttttcagaaaattcctctggatgatggtaaagattaacaagtgtcaaatgatgcttgaagagcactatggataatcccttttcagctgtgcttttgaactagcagtatgatgccatgagtttgaactgtgatgcccaggacaaatgtggtaaacttttgaacaaatatccaaacttagggtcacaaatctgcaaaagttagaatatgcattcactgtagggaatcacactggctgcttgccttcgtgcatgcttagtgagtaggaccgtacaataccattggcaagacaattttgaagcagactggcaaatgtgagtgaaaaatcccagccttatgctggcaggtcaacaatttaaattcacatcagacatacagtgacaggagctctcctgatggccaaggtccctagcacagcctcttctcccagctcaaagtcagcggctctgcctgactctgacttcaagagggaagttggattagtggccactgttcctcccaagttgcttttcttggggccacttaaagtcagaaaacatgtgctgtagagattatattccattcacgaagggatgtagttttatggaatgagaaaactaaatccacttgaacattaatgcttggaagatttggtaagtaaagaacaaaccagtgaaatcaagatcgtgtgttgccctcccatatcaactgtctaaactataggtgatgcaggaactggactatgattcatctcatgtgaagtttttggaagatggagaatgaggaggtattcattaagcttaatgtattgagttggccaatacattagttcaggataacctgaactaacattttgtccaacacaaaattttaaaaaagtaattttgaaattcagtgtagctatcaattgattcgaatgttaaattctcaaaatcctggtgtagatccatgagaaaagtttcatatactggatcttttttttctaccttgta

SEQ ID NO: 36611 - DNA, 1060 bp, Bovine  19866881100899
  misc_feature (1)..(1): n is a, c, g, or t
ngcagattacatatggagaaaataattgcagtatatttatttgaaaagaacttcatttgagaacacgcatatgcacagatgctcataaactctggttgcagtcataactgtagatcagtctctagactcttcagtcttaagagcagttgagtctcacttttaagttagtatgctctgaatgtctgccatttgcacatggggagttctgattggcacaatcttttaaaatattcatatgctctaacatagctctcacactactggaaattcataaaacctgaaaagaaaccacacagtcaaagctttatgtatgagtgtgcgttgaagcgtgttttaaataatgaaaactttaaaattatataaatagctgtcaataggggtatagaaccagacaataaaatgttatttatccaataaaatataaaactggaaggaagcatgcaaaaatgctgacagtgggtgaggggtgtggctgattttttttcttaaaaattttttgaacatatgctaacagtgaacctgttattaaaatttaagtgtaaagtttagaaataactaaaaaggtaaaggaaggtaccagagatataaaagagaaaaatcttgatgttagtgttaattaactaaatcaaaataatatacttatcaggtcaggccctactttatccagtgtctcccagtagttcttattttatattccagatgtctcaggatagaagacaaggttctttatcatttaccctttgtccttctgctctatggccctggttctagccatttcccagaatactctctattcatagtcaatgctagagagagtaagggttagcatttcacataatctgtcaagaaaactggtcttattcagtctagagaaagtaatcagccaggtcttggacttgagcataaattgtgttgaacaagcctggaagcacttgaagagcagggacacaattgctccattcatgggcatctcagaagtaagcactgagcagggctttctagattactcttctgttgtagatgtgtaagtatctatactcctccagattcgctttcaact

SEQ ID NO: 36612 - DNA, 3481 bp, Bovine  19866881104242
  misc_feature (1)..(1): n is a, c, g, or t
nctctgcattcagatgcttgtatctttccttttctcctttgcttttcacttctcttcttttcacagctatttgtaaggcctccccagacagccattttgttttttgcatttcttttccatggggatgatcttgatccctgtctcctgtacaatgtcacgaacctcagtccatagtttatcgagcactctatctatcagatctagtcccttaaatctatttctcacttccattgtataatcataagggatttgatttaggtcatacctgaatggtctagtggttttccctactttattcaatttaagtctgaatattcttgcctggagaatcccatggacaagagaagcctggtaggtacagtccacaggattgcaaagagttggacacgactgagagacttctttccgatatagaagactttaatttctttttttaaactgaattgttaagaaattccgtggtagctcagctggtaaagaatccacctgcaatacaggagaccctggttggattcctgggtcaggaagatccactggagaagggataggctttccactctagtattcttcagcttctctggtggctcagatggtagagaatccacctgcaatgtgggagacctggattccatccccaggttgagaagagcccccagagaagggattggctgcccactccaatgttctgtcctggagaattccatggacaggggagcctggcaggctacatgtccatggggtcgcaaagagtcagacacgactgtgggactttcactttcacagaacttctagtacaacactgaaaagaagtgatgagaaacaattacaccttgtttccaatcttaggacagttccttcattcgttcacaattaggcatgatattcattgtatgtttttcatagatgccttttatcatgttaaggaagttcccttttattccaaacttgtcaaaattggctgtggcaatttaaaaagtggcaattttcttttctaatctttaacattaagtttttacctagagcaaattagtacattctagatcattaaggttcaaagtttgtacaataaatgtcttaacagaccttttcttccttttcctccagagaaagagaatactggaaataagtaaagctagaaattgttgtattttatggatatattttgctttaggtgatctctgaactagacttatcttctacataatccctgtccaacagaaatacagggtaagccttaaatgtgaactatatatgtaactaaaattttctagtagttccatgagaaatgtaaaaaaaatacaggtaaaattagttttaataatatattttatttaacccatcatacccaaaatattatcaaatctacatgtcatccacatgaacattctctcttattttttgtatttagtctttgaaacctgggatgtattttatacttacaacaatggaatagtcacatttcaagtgctctgtagttacaggtggctattggctacagtgttggagattacagttctatatccttacatataaaactgtagttacctagtaaatattaaataggcatattggtggaaacatgcttaatatttgatacacagtaataggtatagaatatatagttgttaatttttgtatttaaataacatttgagcagaatgctagcatcttctaatattgacaaataatcttgtgatatgttatacctgaaaataaaggtcatgccttaatgcaagattttcaaaatgcatttgaatctatattttcacagcctttggacatggagagttatatactgtcttttgaacaatataaatatagtaaaatgcctgtaagaacatggtgactaaaagattgagctgggaaaaatatggccagtgttctcccttcaatttcctctaaaggaaactggattttctcctacttggagatctatatctcttggatatttggtcaacaaaatgggatcagctttcttgccagcataaagagcattaaaggaacaaatgggcatcacagatccagatgaacatcagcactgactgcattatgacactctggctgctaaatctttcatggtaatgggctgtgctggagatggctgcagtgataggcttcatgctggaagaagcctgtggtcattgtaggtggtgctaatgtcatcttatcgctgatttccaaggatcacttgcacaacttgtaatgagagtggctaaagtattgattttgagctccttctgaatgtgaaaaagatgatggtttcaaatcttggagagatatactcccagtgaacaccaccacccttactgaagcagttttaagtagtggaaaataaagcatttttgtgtttaaagctgcgtgctcagtcactcagttgtgtccaactctttgcaaccctatagactgtagctcaccagactcctctgtccatggaattttccaggcaataatgctagagtgggttgccatttcctcctccaggggatcttcctgacctaggaatcagacccaggtctcctggagtcacccgggaacactccttgtaagactcatgtattgtgaattgaggggaaaaagtattctcatgcttccctgttctgtctttggatatcttggttagagtattagtcagaaggcttgaaaagttcaagggcacagattcagtcatcatacaggctagtgattttcaatatttcccagccacagatcattctccttcctccagctgctgtgttgactgtgtacctagtcctaagggaactaagtagtagtagataaggaccattcatcactcctggtgttgaaacaactcagaacctgtggagtgtgggtcagaagtggcatgtggcatcttttaaagaaaagcagcacatagagattataccatcaggaggagtcagatgcttataaactggactgtgtaagttttcgctgaaaacttggcactaaagctgagaatagatgcaaagccagtaaacaaaagcaacagaagagattagctctttgatatatggggccatccgtagatcctgaaagaacacaagctggtaagatcaatgagcgcagataagaataccgtttagacttggtgttggtagccaacatcagcattaatgtttccatatcaatacttatttatggcctctctttcctaacatttggcttacttaaaagagtattctcaataaatagtatcatttctgcttgtccattagtttattagcacttttcttgttatatttaaagtgaattttaatttcatacactattctaaagggagttgttgattatgttttatcaagaaacaatgggtaacatgtggaattcataccagtgtctttgctgacatttgattcaagttttctagctgttttctgagtttgctggtctccatccagtttagtagctgtgcgtatctaactgaggagaaagtgaaagtgaggagaaagagtcattaaatacctaaaaatataaaaggaaa

SEQ ID NO: 36613 - DNA, 779 bp, Bovine  19866881136638
  misc_feature (1)..(1): n is a, c, g, or t
ntaaacataatttgagtgtagcttaaactgtgtccaaatgggataaaacaggtcacctgggaaattagattttgtagaatacaatcattcaatcttacattgtacttaatggagacagttttttaaaaacaaaaattttcaggaagcaattgactggtctatcaattttgtcattatttctctatgatacatctatagcatggagcagctgaagcaaaacaagataaacttccctataagtagcagtaaagaactcctctgtcttggtgggtttggtcttcccaacaaaaacacagaggaatctttagcctgagttcactttttgttttttacttctgtttttttttttttttaagtttgtatttaaaagattgtttaattaaaaaaaaaaaaaaggatttcttagctctgtggcttttggaaggaaatgattctgaaaatacttcatgtctgtacacacttttatcctgaaatgaagtcttcactagagatgagtgccagctattaaatttgattatggggccctggggcagaaggataatctttttaaaaaaagtgaacagttgaaaaatgacagtggtagtaaagagcaattaagaataagagtggatgggagatgtatatgtgagagtgaaggtgttgatttaaacactttaggaaagtttttgagcacaaatcatgtcctgacaagtgacttaaacatcttttctttgaaacacagggaaggtggtagttaaatttatatgctgcggagtcacacggtcgggatcaaatcccag

SEQ ID NO: 36614 - DNA, 1805 bp, Bovine  19866881146798
  misc_feature (1)..(1): n is a, c, g, or t
ngcccgttcttcaactatgccttaggtactctctgaccattgagaactggggagaaagcacgcaccagttgacagaagcctctgtcactgtgggaaatgctttagctccttggttatgtgcaaattagggatcctgaacattttgtggggggaaaaaacagtcttacttacatggagaattgatcattttaaatatgtgagttaaaatcagaaccttctctcccccttctctcctcataaaatttaaccgaacacaggtaataataccacctggaaatcttttacagtacaaataaaaatgaaagttcagagttctaggtgatgaggtgagacccaacaagataaaagaattttatctagtagtttctctatgtttcctaaaaactgtttgaaatgggtccttgtaattaagatggaaatgttaaaacaattacatataagctgtttgctgctggtaaaaataaagctgctttctggaaatcaagataacatgtatctctgtcacaagttctctgagtcacacagaaatgtgctcattacttgagagacatggtttggccttcttatcaaccttccctatgatgatccagtgtataaaccaatctctaaagtttccttaaaatagaatgctgaccgtaaactgtaactgttaaaagcttgtaatcccagttctaatttagggtggtatgctagcgctttgcaggtctcaggaccccattgcttaattaactcttcttagtgctggaatcctattgactaatgaaattaatataacattggaaaatctatgccactttctgttccatcagtaaaataaataatgcattattcagtagaatctaaagttatgagatatgtctctccttttccagagtaaggggaagcaatggaaagggtcaactgattattattggtcctctagtttattctaagagattttcccctactaatcattacttccaagttgagagcttctaaacatgttttaacacactaatactacaattcaaagtagatagaggctattttccctatgttcataggcaactagagacttagatgaacttctctagataaatacttggcatttagcagatgctttcagtcccttgggaaatggattaaaatttgtccccactgtgaagcccaaggaaaagccagactttgtgactaagcaaattagaggagcacacagccagtgatgggaagaatatctggtcagtattataaaattcagagatatgatggtgaaaatcaatgttagagcgtacagtgtttatggacgggtcagccagcacaacttttctaggaggtaatttgataatataggtgtgattattgtataggacttggttaattacactttttgtcttcctaatgcccctaccttttccctcaacccccactcagtattggaaaggactttccttggcaaaatcttccttatctcttaaaacctgttgcatttggtcactcagggcagttaagagtaaacttcttggggaacttcttgaaaagagtcaacagggaaaaatctcctttgggaccatgagctttaaggaattaggtttaggaactggaaaaggaatttgaagaaaatcccacttacaatagcatcaaaaaccatggaatgctggagtagtaaatttaaggatgtatgcatacagcctgtatactgaaatctacaagccaatagatttttgacaaaggagactgggtaattcaataggggaagtagtcttttcaactaattgttagtagaactactgggtattcatagagacaaatcccaactttcacctcac

SEQ ID NO: 36615 - DNA, 1233 bp, Bovine  19866881159724
  misc_feature (1)..(1): n is a, c, g, or t
ntaaggaatttcctaaaaagcctgaactcggcaacacaatgacaatgctgagagagctttgtgtcttagaggatacgtggagaaactgtatcacacatccctggagaaaatactgtaataattgtctatagtttcttagactgagtaacagaggaggtaagggtcaccttttaaactgctttgcttctgatcagctaattatctcctcaccctgtgatgccttttatctcccctctaagcaacttgactcacataagtaaaattctaattcttcacagattttcaccttaactacgtttctaccctaacctccctgctcttctgtttcatccactggttttctttggctccattgggaacatggtgcccatttatttctttaatccacttcaccacctcatagtacattctactctgaggatgaattttaacaagatgctttttactgcatagtacactccagtaaagaactaatgtttacggcgatgtgtatctctattccaactgaaaagcggaggtgccgtggacctctaccgtgttaattttctcctgtttgactttttctcagtgcctctttgagtgatttagatctgttatatataatggcagtcttatgggcctgtccacagggtatctatatgctgctgaaatagcagtgaagatagcccacaaatgaatgaagtcatcaaatgtatttgatgataaaatcaaggttattttttaattttttgatgatgtgaaagctgtggagggatgctaacaaatctgtttgatcaatatatggaatataaaaagaagaggagacaagattgactgatgaataaaatgaaactgacacaaacaggctgacagccagctgtaagtctctttagggcaaatgcaattaacttagaataatagactcaaatttgatggttagaaatgcatttttattaacaatcacaggccgaatcattatgctcttatgaataaaatggtacttatatttcgtgcatgtgtgtgcatgcatatataaatatatatatatatgtctctctgtgtatatttccatgcctcccacattcctatgtgctctgcttacaatcgggatggaaaagttgatttttagaataatgtactttaaaaaggaaattcattcataaattgtctccaggactataaattctgaatattctcccaaattacatatataaaaatcatactacttatctggtgctattagacataaagcca

SEQ ID NO: 36616 - DNA, 1634 bp, Bovine  19866881164120
  misc_feature (1)..(1): n is a, c, g, or t
natatggattacttgatggaagtactgctgatcccaattctctctttttttttttcttaaacaacggaagcacaggtcaggttgaccacaaatccgtgagcgaagatcaggccttagcacttttaatcttgtgaaacaagcaattacaaatagttgcatcgatttgttaaaaagctttaggtgacataaattgtttcctgtttagcttattgctctgatacataaatgtcacccagtccagcatttgtgaggccacaaaagaagacagggtgacacagagatgtgtttgtcagtccttctgtgagctttctggagagccgctctccctggctcgtgtctcattaatatgaaggagaactattttgctatgtgaatctttaataccagtttaattttcgattctcaactgggattttgtgcttgctttcttgccactcaacataaagcagcacatttgaaaaacatcttctaaatagaataatatttacaaggcacttcagcctctgaaaagctaatactcctcccttctcaatacaagggactatattttggattgatatttctacacttaaaatacaattttaaatggcttgtgcatgttattgacttaacataaatcaaatgtatcacatactttctttaggttggcatgccacttagaaaaatacattagtttctggggtggggaaaagtctggagaaaatttattaaacagaagtttttactgtaatagaatattaatgtaagccaatgctcatttgccattaagctgatctttttttttttttttcctttaacatacacatgctttttattattttgcactcaagcaaaaattccacattcaaagactttccatctagtcgggaatgtctctggcaagaaatacgttaagaaatcctgacctcgaaagacagcagaccttccacattgagcttcagccccaccaggcaacacatgcaaacttaaggtaatgctagtcaacagtggggaatccagagaaacaattactctttaaatcctgcctcaccgctactccaccagcgcgcagatgaaaatgtttgatttgcaacataaaagattcattaattaccacttgaatatttaaagctattttgcagtctaacagagatagataaagcagtgaattaaaacctctaataaaattgtaaaaatatttcggtaagtttacccatgttatgatttagggagagattcaagcattctcacggaatagattcttagcagttttcaagtgtgtatttgaaggaaggagccaagtgttgtgggaataatttgtttctcactttcaaatgtttactaataatttatttgcaaatcaagtttgctactttagaattccaccagtgtgaggagtggggggtgcagtgggaatttgccaggcaggttggaacatggtgtgtctgatccagaaattaaaatactttacaaaagtattcaattaggctggaagacttagaagccctcacatgaaaggggtgagttcctgcccacaaaatgcaacaaatctagaaacagccaacccccaaaacagccctaccacttctgcccagcattagctgcattgtactttattatcctttatagcatgtcggtgttaggaacctgggatg

SEQ ID NO: 36617 - DNA, 1300 bp, Bovine  19866881166090
  misc_feature (1)..(1): n is a, c, g, or t
ntatccacttatcccccacaatttccagctattttggactcctttctgaattaacctttcatatcaaaaggagcaattctgcacacaagagactcctggtacaatttcatgcataatttattcactcagttcaacattaaacgcacagtccttgactttgtcaaggtggattctgttggcagacttcacaagcagcaaaacaggagaaatgagatctacaactcaacctcttcacctattctgtctggtgagagattggggctgggggcagaggaaagagaaaaagaaggcaagattgtaatacatgcgttgtcatccacagaatcacttgcaagaaccctgtatttgcacatcagtcacctctcaaaggtatttcttaagtccagaaaaactgaaacaagtttgaattctctttcacccacagaagtctagggccatttgttatcttcctgatgattccaccattcacgggaaacaatatttttatcctgagttacctagtaggtgctgttggaagaaatgactcaaagctgttgttcaaacagatccacacatgggcttgagggcatattagaacagctcgttttagaaatttaaagaacacgactttctgatgagatcccaaatccccgatttgcactcccaaattggtcttcaagaacgcagacattcattttctctcttaaactacccatctgaaccctcaaatgagggatgtgtgcaaccagttgtaaaaaccaaatcttgtccggattaaaacccactgactgctctatttcccactctcacggatgacaagctgttttgttcatgctgtaacagagggtttcactctgtcaatgattacagtatcaggacttaatacataccagcaacttcactgtcattatagaatttattccaaggaacatcaccacagagatggtgttattaatatccacgagtcgcagatacagaaactgaggctcagagatttcttaacaactaggcaaaccacctcccttgcaggcctcactcagacttgaaaggcaactctaaaactaaaggaataattaaatttaacactgatttccccaaatacactaagcaaagtgaactgctccctaactttagcacttgccctttaaaacctgacctcccagtaaccatggcccactttccaagcttgtggaaaatacgaggcctaggagtatacatggagacgcctttggaaatgccagaaaatgctggaaattttcatgcaggacccttggcaaaagtcttaaattcaactttcttagccagctgcccccacaggcta

SEQ ID NO: 36618 - DNA, 1375 bp, Bovine  19866881246711
  misc_feature (1)..(1): n is a, c, g, or t
ncccccatacctggtcatactttcttaagaagaaataacccataaaaccaagcagcagttttgcagtatgacacagcagtattgcttgcattaggccaattttccacttatgacagcagtaatagcactaaaagccaataaaagcagtctgttcattcagagatcagcttttatggcttactctaaatattatcaagtgaatcaagagccgtcattatagtgtctaaaaagccttcgtaccttgtaagcaaacagtgtgactctgacaaataatcattagcgtgcctgtgtgaggccagaactgagggaaaaaaatcaaataactgatatttccatttacataagtcattagggtaattttggttagtttcagaataaacaaaatggattgcatatgtaaaatgatatactattgctttcaacaatcccagttattttttaaaatcttatttgcaggcagctgaagacacaggcttcttagattgttgaagccttctcaggccttataagtagagaactaaagcttgaaaaaactactgagggctcagtcaattacacagacttcgccaatatttcttatgtctcagttaaagtatatctcaatatctctgattgcattcaatttcagatttagtaattactcatgcttgcttgtttataaagacaaggacaaaatttttcttattttcttaaaaaaaaaaaatccagtatcctcttctgaaactcactttacttacctggctttcatatatcatacatatacatacacaatatatgtatatatacatacataatatatgtatgtatatacacacacacatatgtatgatgggcttccctggtagttcagctggtaaagaatccaactgcaatgcaggtgaccctggttgattcctgggttgggaagatccactggagaagggataggttacccactgcagtattcttgggcttctctggtggctcagctggtaaagaatccgcctgcaaggtgggagatctgtgttcgattcctgggttgggaagatccccaggagaagggaatgaccacccactccagtattctggcctggagaattccatgtgtatcagatcagatcagatcagatcagacactcagtcgtgtccgactctttgcaatcccatgaatcgcagcacaccaggcctccctgtctatcaccaactcccggagttcactcagactcacgtccatcgagtcagtgatgccatccagccatctcatcctctgtcgtccccttctcctcctgcccccaatccctcccagcatcagagttttttccaatgagtcaactcttcgcatgaggaggccaaagtactgcagtttcagctttagcatcattccttccaaagaaca

SEQ ID NO: 36619 - DNA, 854 bp, Bovine  19866881256644
  misc_feature (1)..(1): n is a, c, g, or t
ntgacctttagcaagtcacgcaaaaccttgaattcaggcatatgggaggatcacagtaacatccactgtgaagaattgttatacactacctggttttccaatcactttctcctcattgaaaatcggtgggctaattttgttatttctcttttgtagatgttaaaatggaggctcagagaggttaagaaacccatgtccacacaacgaagaagttaatccaggtttttaatcaagctgactcacgatgctccactgtgtcctacagctattataaaatacagtaatacagccaccaaacactgactccatgtgagaatcgcagatcatacacattggtttaagactaatcaacccaaggttcccacacagtgcagtctcagataatcaaattttaaggggaaagtttcagctgccaaaaagaattcttaaaaatatcattaaagagggctcaaatattttaacaacacttatcaaagttctctcccctttcctgctgctttcctcatactcggcaacacctcactgacttctcagcacctcctggagaaaacctatccagccctcgcccacaacttatttttcctcttctcccatcttctctttctcagccctttattatgtagaggcacctggcacctctcgtagaagaaagagtccatattattcagaagaaaggaggaggaaatttggactggcgatttgaaaattatctttggcaggctggggagctgctcaagttcacgtacgagtccatgttagtaattcttgttcttttacactgggtcctcattaaatgttaatttccttcttccttcccttgactatccaatttttcttcctagcagggagattct

SEQ ID NO: 36620 - DNA, 675 bp, Bovine  19866881300825
  misc_feature (1)..(1): n is a, c, g, or t
nttatatattaagatgtatatgttgctgctgccataattttcaaacctggttcctaccacagatcaacagagacattgctaaagtcacatattcttttttaacgatccaaataaacatagcacaatcttgttaccagtttccttctcaacagcacatgtccttgtgatccttacacaaatgatttaagtagatagatgtttatgaagcactttttcacattaaaagaatacattacaaaatagcacttatatgacctaaaatttttcttcgtaatttttggcatcctaaaaagatcctgtaaatttgataaccatctcttcaaatttgacttttcgtttcatgaacaacacagggagtgtgtggtaaaaaatgtaaatgctagggctctgctgagacacacataaatatagatttgttggaattactacagctatctgtcagccttgtggctttttgagccaaaatttcctaattccaaaattatgagcatctgacaaaatctgatttatattgctttgtgaaactagggcctccgtatacacaaggtaatagactgaaaaaatggacttggacaaatgagaagtgcatcttaatctgttgtttagagatcatttgaaaacgtgtcttagactcattctgttttagagtgagaaaaatctgaaagacattggatg

SEQ ID NO: 36621 - DNA, 1748 bp, Bovine  19866881302277
  misc_feature (1)..(1): n is a, c, g, or t
nacatttataggaaataaattgagagatgaatgtaaacctatggcatctggaggtttatttgcaaagtccctgcatcaaagctttctccagatcacaccatattagctatgtttttccagtccagcagaatcaggaaggtaaccacagacttccttgatggaaaacacatgaaaaacagagcaaattttaatatgtagctgaagttgctggtcaaggagcatcccttaaaataattttattaccagtgttttcagcacattgtttagaattgcattaaaaacatgaagcaagttgatcttgcctatgatttccttcaaaattacagggcacatttctatttatttataccaataaaagtatatctctttaatagcattttcttgaaacctcaggactactttttggcttggatatgtaaaaatacgttccaatcaaagagaacctcagtatttaaatatggcatgcacacaactgttcattagaatttttacaaatagaaatagtatgtacaaacacactcatatatacaaaggccactttactaagctttgtagaatcacattattataagtaatagttaaaaaacactgattggacagaatgagaaatggtcctcaaacttaatttatatatatatatatatacatacacacacacagacacacacatacacatatataaattcctcaaccttgaatgctctctgcagtaggttacagctagcattacctctgatttcaaattaattctcatgcagcctgttatataaatcattatgaaatgtcaaaagcttgtacacatctattttttaagttttcacttactttccaaatagtttccatttttcagtgtcacagacttttcagccactcagtccattttaacgattttttttttgtcactctaaaaatttcccctcatttacagcacatttgtgtaagcctacgcacatacacgcacacattttgtaccctggggtatgggtgatatacatcatggtaatctgaaaaattctggattcttttctttggctcacactgaatggccaaataatggacacagacaaaaggataaaatgttttgctatttaaataggcaacagctacagattgccatgtataaataaatagcaaagattaaaacaatagtacactggcccccctgccccttgctgtccatcacttcccatttagaacagttactaaggaaaatggtgcctcacactttgtggtcattactcaattatccatctcagtgaaggactcctccctttacaggttacgctttgaaatttatggcagtaagttaatgccactcacaacttaaaaaaaaaaaagtatgtgagcagcatcacttaaaaaatatgtggctaactgctggaagctattaaaaaccaaataaacaaaagagattacacttcaaagaaatgtcaacagtttttcctctctcagaacagacgagttttctttacttatatccacagccacatctggaaaatgcttatggctttatacatcttttatggtaaaatgaatttattgagttttaaaattttcgtgatggattaatgcaatcttcataaaaggtaaacccacaccctagtaaaaacctgtcttaacactgaaaaatgatttcaataataaataatagtccaatgttaattttaaggagcaagatgattttgagaaagcatttggttaactagatttcatatatttttttctattagtacatggaaataaaaatg

SEQ ID NO: 36622 - DNA, 735 bp, Bovine  19866881382067
  misc_feature (1)..(1): n is a, c, g, or t
ngtaggtgccccagcaaacctttcagtacagaaaatgttctttccaagtgagaagaaagcatctaataacagagagaatggacagctcagtcagaactactccaggaggttttccacccactacgggtaccattaactttcttgctaagtgctatggcatacctgttaggtacctgagctggagactgtcttccatgacctcatgtgtcaggacagtgaagggtaccttggagctcacgctttatacaagagaaggggccggaaggctataggactgggtgaccttgcactgttcactgacttattgctgccagaacagtgcccaaaggacaagggactgccaaaagcacctgtggaataatacgtcatcctagaaaatgcctaccattccagagaaacaggcaggtatgcatgcatcagagaaacagagaggagaagaaaggaaaagagagaagagagatgtttgacagaagaaattctaaaagtacttcagtgtaggagatcaaagctgaggtcttcgtgctgtccacatgcctgtgaaagctgcaggcaatttggccagggcaagattgtgagatcgagtccagcattctcccaacgcaggcatagcactttagcgtgtgtgtctgtgtgggcatctgcatctccatgtgtgtctgtctgtctgtgtgtctgcaatatcaaaacaaattatgtaagatgtgtatttgtactgcaaaatgcaaggaagtcagt

SEQ ID NO: 36623 - DNA, 778 bp, Bovine  19866881397049
  misc_feature (1)..(1): n is a, c, g, or t
nctttcctttatagtaacactttacatacccacagtatgtatcaaaagtgagaaactgacgtgcaaaatagtcaactgggctatagttccttatgtgattctgtcagtttttcaatatgaacaactattttgtataattctatgaaattttatcacatgtgtagatttgtgtaattgcccaaaggtgatgctttataatgctggcataaaggaaaagaaaatgttttgaaccctcagttttttttttttatgttttgggattactctgtccctaaaagagtagaatattcttttaattttaattcactattaccatgatgcaagaatgattaatcatagtatagaaaggttacactttatagaaaatgattcctttcagagggtataaaatgactccattaaaaaaataaaattcccgtacatgtacggtttaaaccttacctattagatttaatttctaaatatttacagatggaaatgactcttaacttttctgtatatctcctgcactgagttgtatattgaaggacatagccttgtgttaatacgggctacacagtccattgtgtgcttttgtttgtagctctttttaactcagaaggatatgcaggcaaaacccccaagttttcagtgtgttccccaaagccccagatatcagagcttcaagagcttaaaaaagggttaaattttaatgaaaatataccctctcgtcattgtgctttaaattataattttaaaagccaatcacttgcttttttgactgacatgtggcattttg

SEQ ID NO: 36624 - DNA, 1230 bp, Bovine  19866881409573
  misc_feature (1)..(1): n is a, c, g, or t
ncaaagatagatatgcccagggttttaataaaagaaagaaaaggcacatcatcctgctctcttctagttttctgaaatgtaaaattgatcccctgtcgggaaatccaaaacatcatggactttatttcttagatctgattaatttcttatgtttgatcttaagacttgatccccttaggtcaactgatttctacctcctctaatgtttgacacaaaagaaaatccaaaggtttactcatcctctaaaagtcaattcaaatattatatccccaagtgaagattctttaacatcttcagtcaagtcatatttaaagaatctttccctttctgctactgtacttcacgggtttttaacagagaattggaaatgatggtttacatatctatattcccttagacaacggccaaggtgtaaacattcatctcaggaaatcctggcataatagatacattaagatgattgcatgaatctaattacagagcaaaagattcactcctctgctctagataattctatagtaacttcagagcatattaggaaagtgttacccatttaaaatgtgtcttctatctttggatttattttcttgctttttgatcttcatttgtggtgaaaatgttagaagaatgatgttgcctgctgccgagttcaagttgaagaaggcactatatcgaggtgcagtctgaaacgtgacagcgtatgtaaatgtgttggtgagctaaaaatacatggataaatgatgcatgacatccacagagtatgcacaactttgtatttatatagtacctacatgtagacattaggattctatttatgcatttgccaagaaagggaaaagtgtctacatatgtctcgtaaatatggatccgggctcatgcccaatgcagatgctgcagagagacgggagtggggaaaggggcgtgcagctctgggagcagcctgtctgtcagatcatttccccagaataggtttctggaaacatgaacaaagatgatggcctgtagacaacgcacatttatccaaaaaggacgaaaattgtctcccacagtgcttcagtattgtgtataatttttttttataattctttgaaaattagtaatctagaaatgtcacatgtggtagcctttatttaagaggacccaagcgttcacatttcccaggtatagaaacagaggagctctgcctattccttatcttataatcaggatagtgattcataaggagacaaa

SEQ ID NO: 36625 - DNA, 865 bp, Bovine  19866881444715
  misc_feature (1)..(1): n is a, c, g, or t
naaccaaaaataatattcagattttccactttccacagggcacatcctgaaaaagtatttttatttatagcattatacataaaacctataaatgctctgaacagtatgggtttgatatgtctgaaggttgtttttttttttttttttaacttatattcacaagatcttccaggagaaatatacgacaatgaagttaaacttcagctaaccttctagacataactctcaaggtactcccagatttactagtgatcaattctccacacttgtgaaaaacgtagaatagtctctgacactttgatatacaaattccacttttaaaattacgatgttcacagagttgctggaaagaatagacttcttcatttgtgagaagtagagaatagagaaaaggtaacaagggaattttttaacatgtgttttctggacagcaggcaagcaaccagttatttctggaactctttcattgcattaaaatatcacagagccaaattctgccctcaaatgatttttcttaaacttatttgagtccatatgtttctagaagctgaatttgcttcagtgcatctcaaggtctaatcttgctgttattacacagacagaatctccatgaaattgaatttttgtttatgtaagaacagtgtatttgaatatttcctgaagcaaaatgtgggcaaagactgtgaagaattagggttagtggaaaataaattgcagatcatcaaaacatctctgaactcactaatttttcttacaagatttctcctttacttggagaatgtttttttcttcttttacaggaggacatctgagaacacagaaaggagtatctagaggatttttatttaaaggtatctcttaaaaa

SEQ ID NO: 36626 - DNA, 2008 bp, Bovine  19866881703402
  misc_feature (1)..(1): n is a, c, g, or t
ntccaagacagaaatttcactccctggccatcaaatgctacctttcagcttgcgtgggaatgaagtcctggtttgagactccgaaagtaaaaagacctgaaaaatgtaagctgtgatgaaaaagaaaccccagtgtaagttggacagtgcccattgtctgacagattccagcccaggagcatcaggtatgtctttatgcccacacgtgctgcggtgtatgtcttagtaaaagatgctttatttgtatcatgacaaaatgccatggggcacagactatgcctcaaaattttttaagttttaatgaatattccaattctccccttcaccaaagtccatgacatgactgttttcccactgtgatttgaaggtaagcacagagaaggcaatggtaccccactccagtactcttgcctggaaaatcccatggacggaggagcctggtaggctgcagtccatgggatcgctgagtcagacacgactgagcgacgtcagtttcacttttcactttcatgcattggagaaggaaatggcaacccactccagtgttcttgcctggagaatcccagggacgggggagcctggtgggctgccgtctatggggttgcacagagtcggacacgactgaagcgacttagcagcagcagcagcatggcagataaacatgaaaacgatgcgtgtcgtttctagcgggaggctttaaaagcctatgcctgatgcattgtatttgtattttccgcaataggccatcatataatcgaggggcaagatgtatcaacctcatgctcagggtgactagaagtggccaagagcctgtggcttctgttggttatgtagcatgatggacatttaaagtcatgccctgtgaagccaccgatctccagaggagttttcggttattacaacataaactagcatattctgccagatcctgagccaaatttgaaacacactgaaaataaagaatataaaggaaagaaggagaaacccatggctacaaaggaatcctttggattaagtaaattggaaaggacagcagaaggagctaagttacttggtggagggtatttgggggtaaaggataatgggactggcctattgctgtgtcccttccacttttcaggtggtggactttaggcaaagtacttaacaagtactaagtctcaaatgtcctcttttgtcaagtgagagaagttgtcatatgttacagcatcaaatgtgcttccctagtggctcagcggtaaggaatttgcatgccaattcaggagatatcggtttgatccctgggtgggaaagatcccctggagaaggagatggcaacccatgccagtattcttgcttgagaattcccacgaacagaggagcctggcaggctactgtccacggggtcgcaagaatcagacacaacttagcaacacaaccactaccaagagcagcgtcaaattcaaggctctaagggtctgttgtaactgaataggaactcagcctctgctcctggcccaggctgtgttctacttccatcctaagcagttcagcctggttataagatcataaagcccaatagtgatcttaagcttcaaaaggcagttaaactgcaatcgaagatgagaaaaagtaaaaggaaatacactgaaacaaaatcacgaggaccaggttaatgtatcataaataattacatcctccatatactggaaggtagcattctagcatagaaggcaaataagcagctaaatcaagtgtcaaatcatggtataagtttgagaccatgatgttcatgctgacagtctgtggggaagagcatctccttgaaatggtctttaccgtgatgcacactgtagggcacttgagaatcatccaagagcatccaagtaggcgaggcctagtacattcaccaccccacctcagatctgatctgtgccctgggagtgtataccaagataggataggataggataagctgtgctgtagtaaaacaaaataataccaaccacgctgcagtccggcttgcatc

SEQ ID NO: 36627 - DNA, 1222 bp, Bovine  19866881824921
  misc_feature (1)..(1): n is a, c, g, or t
nttctgagtgcttctcttaacatagccctgcaaccagtggttatgaaacacactttgagaaatggtggaatccattctgataagctcagtcatttaacatttgactttcaacatttctaagtgctaatgtaacttaaagtcccatttagacagtcaagattaaatgcatacatagagtgtgatcataggaaagcaatgaagaacaatgcttgctgatttgcagtgtaactccttccagcccttttcaggagatcttgaaccactagagaaaggctggtggcagaagatgcatgctagcataggaaaagcacagtgcatggcaccatgacaaagaaaagaggttgtggagggactgtttctcctcctctctccattctattttcctttcggtgctgagttagaagatgaatatgtgaatgcaaaagaggctataagataatgaacagaaggcataaagatgttgaaagctgaaaccaggttagcctgaatgaaatggaggaaagtcaggctcagagctaatcatacacttcacttatatcttaactcaactgtttacatgcagaggaaatgtttctgtgggacacaagttgctgcaaggtcagcaaggcaacactgtaaaatagaaaaggttaatttttgatggcacttgtttctcttggtgaagcaagcagtggctctcaaaaggagttctttgggtggccataatgactggggaacatcactggcatatcaaggacaggcgttaggatattgaacatcctgttgtggaaggaggatcccacacaataaaaaaatgacctccccaaaatgagtttcctctgtgttaagatacacagaaaaaactctgtctgggtctatttccttttctattccagtgttttcagtatgtgtgtatctcaactaggtgtggatctgataaaagttattgcaggaagattgaatagggctgaactttcaagtgttcatttacatttcaaaagaggaaataatcaactccaaagggtctctaactaattgaggctgttagagggaaaaatatattaaaatattttattagagtagtattgcagtcttattctatggagataaattttgagatacttctttccttttgcagtttgctcatttcacattctactctctctccttctatgcacaatacttcccttccaagaaatcatatgtgagtggctaacattgcacctgcatgatgtcaaccttg

SEQ ID NO: 36628 - DNA, 936 bp, Bovine  19866881989282
  misc_feature (1)..(1): n is a, c, g, or t
nacccatttttgactctgtagtcattctgcaggattggtgcaccaggttactaatttaaacagacattgcacatgcagctccccttactgttggcctgttgtcattccttttaagctaaatactcctcctgtacccaccaggaaagctccgagagagtaattcttttttcatactacaacataaaaggttgtataaatctgtcagccagatttttaggtgacctttggactgaattttccatcgttttctttgcctgtcatgggagtcagttgataagggaatgctagactatatttgctaatattaaatgtttgtattcccatattttaacaaagaagggatgctgtgaaaattgatgggggtgttaagctcatggaatgatggcataagcaagctgtttgaaggaccagtgagtattgtaaatgcaagacagctactgtagagagaggagctgatttcactaggtgtaatttgtagccatttttgcataaaaataaaaagtgaatttggtgagatttttttctttcagttgtcaaaagtttgtattagaactgttatcaatgataaaaatccaaagcccttcccaagactatatatgacatgctagtttgcgctaacaaacacaaacacaaatgtgttttgcctctttctgtaaccttgcctgtcttctatagggaagcagagttagggtagtagacttgaggttgaggcaaaataaggaacctgggtaattctcaaaatgaaagataaatctaagtgatattcttatgaagaaaaaagattccctccagcagcaaagcaccagggttgtggaggtgtctgggtgcacagattctccgtgtatgtttgccatgtggtggtaccacttttgaccaataaaaggtcagcctggtagacatttggacggaacatagaggtaatggtttcttttgatg

SEQ ID NO: 36629 - DNA, 724 bp, Bovine  19866880353654
  misc_feature (1)..(1): n is a, c, g, or t
nctattaaaaaattagtaagtatattttaggttctctaaccacacacacacaaaaatcacttacctcattgtctagacgcagtaaaatacaactttcttccttattaaaatgtatcttatggggagggctttcacttctttcaacgtcgaataagaagtttattagaagcatcctcaggccaaaaggggacacactaaaacacatattacacatattttttttttttaaaaatgatttcaccatgaagacctttatcattttaataaacccattagagtatacttaaaatagtttaaaataaacctctgtcaacactactctggttactgtattgcttagctataaactgttgattttgagatggggcgccacttgtgggcactttgaacacaaacagtaatgggtagtaagttgaagagctaaaataattagagtgctgtgaagagatattaatgtggtccagagctagagtcagactgaaaagtaagtaagtaaactgagcccaaagtgatcagtttaaaataggggaatgttctattacgaaaaaatcacaattgggttgtgggtaccagtaatttaagcagtagtcaaagtacacacaaatgttgagtcaggacaaatactaaatccagagtcttagaagtcaaataaggataaaacaaaaacacatgtgtacctgggcagattcatttgatattggcaaaactaatacaattatgtaaa

SEQ ID NO: 36630 - DNA, 923 bp, Bovine  19866880432437
  misc_feature (1)..(1): n is a, c, g, or t
nctcaattgcaaactcaggctgagacccagctgttttgtttaaaaatccctccaggtcatcctaattgcatgataaaatttgagcaccactgttcagtccatttagttctctagaaaaaatgaaaaccatcttataaatataagcatttgatagcaatttatttccctcagtgacttttcattgcttttaaagtctataattttgtcaaaatagtttataatccctgtgtaatctgaccctaggtaggacacctgattttacctcttttctatgttttgaatatgttcttgggccgtattgggctacttcagttctttgaacataccatacattcagatatcttcctaccatgaatcatattccctactaaatttagaattgataacttccattaatgtgtcacttagtaggttatgtatcactttcaccatcacatacctgaaattgaggctcctactgtggagtctttagttacggactttattctcccagagtactgcgtatttaacctccataatggcacttaaccagtttgtagtttgctttctagtttgtttttcaccaggcaatgggattcttgaatacagaatattcagttaatattctttgactaaatgttatgttttcaaggacattttaatggtagattggtctagggcaggatagattctgtttatcactctgccatttcacatgcaagtgacagtttttactgcttctttttttccttttcagacaactgatcaatactggattccatgtttacatgatgaaactgagaaattatttcgtaagggaaaataaacaatgtttatttttgacaaaacaaaaaatactatgttttgtcagtcaatgggcttgacaaaagatacttttaagacaagtgataatacatagataaggatttttatgaattgtattg

SEQ ID NO: 36631 - DNA, 1229 bp, Bovine  19866880590187
  misc_feature (1)..(1): n is a, c, g, or t
nagtaattttaatgctatacttttatgaagccttgctgtatttaacaggcgtatttaacattctctttgccccctcgatcccccatccctgctcattttgtagatactgaagtcattatggcattattgtgtgattagtgcagggcagaagagacagagctctttgtaccgggtcatgggctctgggaacaatcctagtcctctaacagcctctactgacctataaaaagtgttgtgaatcttcttactgtctgccttccaagagatatgggaggagaaatgacgtaatgtctacttagaccttcgagcttctcggaagaacagtctacagtaatatgatttcttaatgcatttatttgtgtggtaatggagtataattgcatttatcccaatttctttctatacctctaaatctgacagtctcgcacggggaagcagtctggctttgggagtaagaactgggtctagactagaatcctccaaaagtacaagtgtactggctagaaagttatgaggttgagggaaggagggtgggagaggaaggagtgggagctacaggtggtgatgcgggggaggcagtggttataattatcttcagagtgtttataacattttaaaatcctattattttactaaagatcaacatgtcaatatattttaaaatatacgtatttgttttaatttacaatattgcatactggacaacttatatgcaatattgatcctgccatcattctctgtgctcataggctctttgattgagcctcctccaagatttaccttattatgttcctcgggtcacagtttggttgttgaataactaatttctgagtctgatatggtagttctctacaaacaccaacacgtttatagattcagttgtaagaggcctagtaagttactaaataatcctttttctttgttctgtagaaaaaggaataacaagtgttttttttaattgaaataatcaattaaacaaaatcaaataaccaattgaacagtggattttttgagtagctttttgagcagtattacaattgagttggctttctagtaagtcataaaaggagaaattaaaacaaaggatgaaaagctgaggaagtatacataagcatcatccctgacattccataaatatgtcagtttaggttacccttatcgttattggacagttttgttggggaattttctgattgtgattggttctttagcatttctaatccagtgtt

SEQ ID NO: 36632 - DNA, 2748 bp, Bovine  19866880598590
  misc_feature (1)..(1): n is a, c, g, or t
natttaaattctagttcccatctcttccttgttcctgcttctactttgcataagtaaccatccccttcctaagtgacatttcttatatgtaaacagggcgtttactctggaggattaaataaaggatataaataaagcatttcttgtacccagaacaggaagacatgcattaaatgggagtcttttccttccagtttctgtgccttttttaagtgagggaactctttttttggaagcctgaattgggaggtccattctgctctccatcttatggaggaagatagggtatccttgactgttttctttgagttgatggttaccttcctcccacttttaatcacacagaaagccagtaaattagacatagtgaaagaaaaacatgatcgacagtaaacgatagttctttgcaacaattaaccagttaggagggttcattttccagcatcacatttttaagccccagctccaagcagttgactttttactatttttgcagtataatcctacaattttaagtatccatgctttctacctacaggctttatttaccaggtcccgagtaaggaagtcattcctgactgcaccacccaccactctgctttatctttcacctggaggcaaccatgaagaaatcagagaaaggggtaacttttctctcttttccttgggtcaagcagataaattactttatataaggcaatgaagaaatccaggctgtgtacaaaatctaccttttgtgtggcatgcaagacagaagtaacaaatacactgattagtgttaaatttatgctttccccaaaatggtagtaaattcaagggtgaaagtgagcaaatctcaataacaccatagaagatcatgtgaaagtagatctacaagaacagaacagtcatctctaggttataagaaaagaaatatatttattggagaatatttattatttgttttaaatgtaaaacaaaagataagcatttccccatattccaggagtgagttattttctcatctccttctccagacatgcagtatttcttaccaaatcttcaaaaccatcaggacttacttgatgatgctctctggaatatggatgcaatccattgggatcagtccactgagttctgctaaactactgacgtatttaattttactgctgaatttggaacttgaaaaaaagaaaagaagaaagatttcagtcactcctctcatccctcagacttctgcctcttcttgaaaatccttatcaccttgcccccagcactctgacttagaagaatagctatattatttgagtagttactatgtgccagactctgttctaattggttaatatatattaactctggggattttcctggtggttcagatggtaaagaatctgcctgcaatacaggaaacccaggttcattcactgaattgggaagatcccctggagaagggaatggctacccactccagtattcttgcctggagaattacatggacagaggagcctggcaggctacagtccatggagtcacaaagagtcatacacaactgagcaactaacacagacacatattaactcattttctgtgatagcctaatgaggtaggtactattatcattctctttttaaagataaggaaatttagacatagagagttaagtatttgcccagatttcaccttcagtcagtggcagaaggtgccacttacctataatgattggctgttttataagaaggtgacatttttgtattactagtgtaatagcaaactaattctaaaaatatatcattccatttgaaagggaacttgatcaggcatcaaactcccttgaatggtctctaatgaaaaggcctccccagtctactgagaagatgctctcaaggtcacttctgcatacatccagctttcacattttacttgcagttttgactatgggctactggctgtggcttgcgaacagtcacttcaagtcctgataagccttgggtgaacacacactactaacgataagccacattaggccacttccttcctctggaatttctgagctaaattcagattttgatttaaaaaatggagggggtagaataagaaggcagaagaagtcatgccaggaggacacctccacactggaatgtacagttttctaaacagcaaagtgattcagtttctcatattcagatatgtatttgtaactgaatgtgaaaaagaatattttttcttcttggtgtattggtacctgctatttcctctacctggctttagctagccaatcctattcttcaaaactcaccttgaggatgcattcttctggaaagcctctctcgatgcagactctctgtcttcacgcttcacctgttaccttagaactcaccctcactctgagttatcaccctccagcttcctttgttccctctattgcagctgctttcttgtctacctgtgtcagctgccaggctgtgacctctttgaggaaatcaattgagctatttaatttctcaacctgcagcacctaacccagtgcttgacacagacagacagttcatttaaaaaaaatgaacttgaggagggagggataaattagaaggatgggattagcagataccaactactatattaaaataaacaggtaaacaacaaggtcctactctacagcacgggaactatagtcagtatcctgcaataaaccataatggaaaagaatatggaaaagaatatgaaaaggaatatgtaactaaaaaaatactctttttcgtagttaca

SEQ ID NO: 36633 - DNA, 1459 bp, Bovine  19866880628660
  misc_feature (1)..(1): n is a, c, g, or t
nttattttccattataggttattgcaaaatattgactataattccctgtgctatacagtaaacctttgttgcttgtttcatatctatttttttaagttagaaattgagcgttctgtgccttccagaatctcctttttttgtctgtgttcacttatatttatttagcattcccatccactacattccaacaactagggtagcaggattcaactagttttcctctggcaggagagctctttaaattactttaaagcataatacaagcctttaagatatattttaaaaaagctactaattttaagattagcagaaaatgctttgacaggcactaggaataaatgtacaatgaagagcttatacaaacttttaatgagtaaaaaagcaaacattagaactgatattgattcactgatgtttgtttaataattcagtttctattttaaaataaatatatttctccttggtaaatatttattatgtcaagagtatgagaaagaattctaattcaacatttattgaagggagtttcaagataataataattcccttctctaggggatcttcccaacccagggatcaaacccaggtctcccacattgcaggtgaattctttaccagctgagccacaagggaagccccaataattaaaacaaaaataattaaattatggcaagtagtgttgtggtaaattacatgtaataatggtttacatttattgagtacttacatgcattattttatttaatgcctaatgatggtctgaaggaggcactgtttaccatttctgtattgtagcaaaaaaaccctaaggttaaatgaggtcaaataaattgttcaaaccaggagccagcaaaccattctgtagagagtcagatattaaatattttaaatgttatgggccatacagtttcagtcaccactacttagctctgccatggtaggacaaaagccatagataatgtgtaaataaataagtgtccctgtgttccaataaaacttgatttatgaacactgaagttgaattttctgaaatgttttacatgtcacgaaatagttttattttaatcatttttcaaccattaaaaaaaaatgcaaaaccagtcttagcgcaaagatataaaaaaccagtaataagttggctttggctcacaggccatagtttaccaaccccaggtctgtggtaacatagccaagaaatgataaactcaggctctgaacccagtgtctacctaattctaaagaacacatatttcaagtacttaaacattatgttctacagtttcagcatataaaaccctctttaaagatccctgtgaatcaatctatgttagtgtaacagattttttgacctgaaaaaagaggtcactaaaatgtattataggtcttttcactgctaaagggtaacacctatgacagaggtatatagcaaattcttttttttaattcatgtatttttaaa

SEQ ID NO: 36634 - DNA, 2104 bp, Bovine  19866880631571
  misc_feature (1)..(1): n is a, c, g, or t
natctggtaacatttcttcatccagcctaaccctggcgtcttccgtcttggggttgcaccattcaagtacacaatcatatagtcttcagctaccatcaactctaaagtacttattacatatctgatcacaggaaggaagagaagtgttttaagttcccacatgatagagttcatcttatttcaccataattatataatatttaaattacagggtgcataacatttaagaatgggtgcacatattacctcttcttcttgagaagaatgcagttacctaagatcacttctctgagagtattactcatttatttgcacagttatcttttttttttttttttaatgcaggtacacttgaaaagtctgtgggtcagaaacccaactttcaaaaatatcagcaatgctattgtacactaaaggacaagtcagattaaataaaggcagatataaatgaagtcaggttattatcagttgactaagaacatgttatcaggaaaccaaaataacacttcacccaaaaaaaatgttataaaatttaaaaatatgggccaaactgtgttcattttgttttcagtgcattctcctgacaaaacagctcctctgaagctttcagtctcttgagcaattttccttgatacagatttcattgacttttaatcaaaggcttggaaaattctacatcaaattctgcatcatctgtttccttttattaaagatgttctatctgccattgcatccccacagacattaactcaaaacattttattgtaagcatcactcacaggaaaagattttccatgacatagtggtagtccgcccgactgctgtctggcagaaaacaggcggcaaacacaatgatggcatttaggccatccccatagtatcctgggggacaaacaaaagacatttgtaaccaactgaaactcttaacaagatactatttaacctaaaggataaatctggaagccttggcaagtgtatgtatgtggatgtattagatatatctttaagtgactattataaagacgatacttctgtaagtatatacacacataattatcttgcagtggttaagatacaatacatagtgtgaatatatttgcatatatagggcacccaagtattatggatgattatatgtattgtacatagtcgtgtaagtgggttataaatattcaacttaaaaacaaaggatggtgaggcaacacattttgacttaagggcttctaatttatataataaaaaagctaatctgtataacactctttcctttaattgctaagagagaggttctgtttgattctgtttagtatttcctagttgtagtaaactctgttccttgaaaactcatctttgaaacacgtggcagatgttggtcaagtctctacaaatttgtatatagaatctcatgtgtcttccagacttaaaaaatggaagcaatgcactgtactttcattttttaacatccatttaaaaatatttgtgattgtatcatataacatagttctaggctttagaaacattagagatttcctcaaagctttgagtaggaggacagaatacaccctcaagcctgatcagaatttggcgtgtttcactttttcagaactctaaatacccctctggtgattacaaggcagtaaaatactggctagatatagatttggatgggcttaactctcgaaaagcagtttaatgagatgttttctacaaggatagagagtatgactctgccacaaaagaggtgggggaagaaagtgataccaactaaaaatacatcaaattatgggtttgtgtatattactaatttgaggctgctgcagataatgctacatatcttagaagatgctacctatgtaagtgtatacctgatgcaacgtgtttgcaaaacaggaccgcagtagcttccctctggattttttgctttagtcccatcttttccaatatgtaggtattttgccaactttttaaagaaggtggtatgaaggaaaatggcataaggagatatattttcatacaagaagtggttgttccacaaataatttcatttaggaagattcataactgaatagaaatccacaaggataggggggcttaatgacattaa

SEQ ID NO: 36635 - DNA, 1603 bp, Bovine  19866880766082
  misc_feature (1)..(1): n is a, c, g, or t
ntctccccatatctcattaagcttcaaacagactagctgcctgacattcctgaagcacagcagaagggctttctggcctcaaggcactgaataaatactacagtaagtgacggatcagatgaacagacaaatggatgaagtaaactaagttcataataggtgctcctttccaccattactactgattccaagtcaggtaccgtggtcctgactttgtctggcagccatgctttacaaacccacggtccacttaaggataaacggtggggaatgtccatctatggccacacttaccatagaagcccagttagtcaagacacggcttctccctcaaatattgcagaaactcgtcagatgacatgtttggggggaaacaaggctgtgaccctcactccagagacattcctcccctgggcccctaattccaccaataaaaactgctgtgcaggcatgttctagacgattctcctccagttagcaattgtttgcaagaaatgagccctaagttctgttgactgaagaaattcctggggttgcaacttttcagcgaacacagttttagaaatggaggctttaagtgattcggagccagcctgccctctgcttacatatcggctttcaggagccgctctgaggagggttcgcgttgaagtaggccttttccttgtaacccgagagctcggctaatgaccctcgagtgtttctctgagagagaacagcaacctagaggagcctttaaaggatagcttgcacattaaaaattgatgcaacacttcaaagtttaatatctaaacaaaatgcttagtgtttactgcttctgcacattttcatatgtattgaatgtgggggagaaagtctggtgggcctggggagcattactaagaaaattgtctaacgtccatggtatatatttctaaaaagtcaatccagggtttttagtttatggctattctggaataatggtttttcttcagcctacagacaatatttaggttggaaggaaggttgactgtcatttcctccaatggtcacaagtactgaaaaatttccaaaacttggcttctacactagccattctcaacctttatttctgcaagacattgagggttgccactagctgtaaatgatcatacaaaaaaccagttattaagaaaatgcattttgtgttaaacagagtttctctgaaggaaagaataaaaggtgcctggcaaaaacaagcatgggctaaaatgtcaaagagtagggggtggttcactttatgtaacaagccaggaagaggaaaaacaaaaccaaaaagcacacagaatgatgaaagcttcctataattaaatagtccagctatattcaggtggtacttgtaaagggaaaatactaagtgtaggctatagagtaatgaggctgtttccataagccacagatgaggaaggaccagtttcagtatgttctcctggcaccttacaggtgcagcagtgaacgacctccaacgtcccccacttacactcatcactccaacatctttgctcaagagtgaggatcccaggaaagggcctgatatgtcaagtgttactcatccattgccaatcacccaggtcaactgcctgtc

SEQ ID NO: 36636 - DNA, 2294 bp, Bovine  19866880886652
  misc_feature (1)..(1): n is a, c, g, or t
nccattacacaagagcaggatctcatccaatcccaaggccaatattcagctgggatagaatgcatcaaagggcttaaaggaaagaaaattgagcccaatctgaaatcaggtttataatcactgattacagtcagttcttgttatttgtggcagtgatgttcttacagatctgaataacatactgaaccattgttttcagggggaacacggggctaagtttctgtgagtgcttggtcacagcattctcctttgccaattaacacacaaccttgttttatgtccatttctgtttaaagataccttacttgatctgtattgttgattcactaactttgaactcagggccaacaacactataacctgtgcctgaacaaagcttatctaacacacacatacctccctaaggcccatcacagccatcctgtactcaggaatactagatgatacataagcataatgtttggggaacattcttaaagagatcaccagcaaaaaaaagcacaaaaataataaaaataaacatgccatgacacagactgtaaaaggccatttgtttgcagcgtgagagctgagacaagaaggcagagccccactgggctccacctcagctgggaacccacacagcaggtgactgaaatttctgggcactctgttaaagtccacaagtgaccatgaaagtgccaaagtattgcttaggaggttgcaactatggtttagcaagtaggtgagtttgtgaacactccatctgcaaatcatgaggatcggctgtatataactataaattcaaaataattgattgtattgaatataaataggtttcctccccaaaggcaatttgactatcatttgggttcgtctctcacgttttgactgtcctgtcattttttccatctgtccactcattttcctcattgcgttcgtttttttatcctgtaaggtacgatgaagaaagatcttataagagaagtgtgaggtaaacgtctcctgttcttcagttcacgctggatcctttgtgtgtgtgtacaccagtgtcttacttgtgggtgacctcaacaggctaccagaggaagaggtcctggtatcagtcccttgtagtatatcatttccagtctttgtcgtgtgtctaaagctgttgaggtcaacctaatttgcaactgaaacctactaaaccagatacatcccagacttggcccaggctgcaagctaattttaactagccctgacaactgctgtggctgttttcagctttatttcagccagcatgcttccagtctccttgcaagttttgtatctccctttatgaaggactttgcaaaggaaacgtacataaacacagacttgggagttcctaaaacaccatatgtaattgaaggcatgtgtcttaggctccaaaggttggtttttaaaagcacatacgctccactttcatttggctctgctttgacttcttttttgtgactctctcacgctctgcttgcttcttgtttcttttctacactgataatttttgctcatgcagactggatgaagatctgagggaagcatctgaagcagctaagtaagacttggtttccattcagcagctggcagtgatgttggcttgcatttcaggaatgaattgggagaacctgcatgcctggtgttttattcttgcatcctgataatagtgctgccctttaaaagtttcctttgttccatgatagatgtaatttctcttatttgtactacaatctgtttgtccccctaatgatcgtggttatcttgttaaacatttttttaaaatatatatgcaattttaggcaccacagcaaaagaaacacatcacaggcagtgccatgaatagtgtaacagccagatgatcacttgcatcatctgactgaggcaataaaacctcactaactcatactaatggagaaaaatggtagcaacgtgaaatacttctatagaaccaaattcctgaatttccaatattttttaaaaaactactattcagtgactgggaaatatagcttaactaacagcttctgacttatttgcatgagtacaaaaaatattgctcactattattatagttttcaaaatagcaaaatcataactttaatgcaaatataaaatgaatacatgccaataattttattcaactaattacttaaggaaccagtaagctgttaaaaaccagttcaaagagtatttgaaaagctagatatctataagcaatttataaaggaatattaggataaaaatgttggtttagatacaaaattgattaatgttcaacagggcaataaactgta

SEQ ID NO: 36637 - DNA, 1715 bp, Bovine  19866880915444
  misc_feature (1)..(1): n is a, c, g, or t
natgaaatgatgggaccagatgccatgatcttagtttcctgactgttgagttttaagccaactttttccactctcctctttcactttcatcaagaggctttttagttcctcttccactttcttccataagagtagtatcatctgcatatctgaggttattgatatttctcccaggaatcttgattccagcttgtgcttcatccaggcccagcatttcacatgatgctctctgtatataagttaaaaaagcagggtgacaatatacagccttgacgtactcctttcccaatgtggaaccagtccattattccatgtccagttctaactgttgcttcctgacctgcatacagatttctcaggaggcaggtaaggtggtttggtattcccatctctttcagaattttccagtttgttgtgatccacacagtcaaaggctttggcagagtcaataaagcagaaatagatgtttttctggaactctcttgcttttactatgatccaaaagatgttggaaattttatctctggtccctctgccttttctaaatccagctgaacatctggaagttctcagttcacatactgttgaagcctggcttgaattttgagcattactttgatagcatgtgagatgagggcaattgtgcggtggtttgaacattctttggcatttcctttctttgggattggaatgaaaacttccaatcctgtggccatgtcgagttttgcaaatttgctggcatattgagtgcagcactttcacaacatcatcttttaggatttgaaatagctcaactggaattccatcacctccactaactttgttcatggtgatgcttcctaaggcccacttgactttgcattccagggtgtctggctctcggtgagtgatcacaccgttgtgattatctgggtcattaagatcttttttgtatagttcttctgtgtactcttgccacctcttcttaacatcttctgcttctgttaggcaaactcttcagttggtaaactgtttctggttcagtttcctagaaaaatggcaccatctgctggctgggcaaaggcaaaattaatagatctgagcttgtctctttcataggtctaggacctaagttccacactacaaaactttcagtgttcttctttgtgactgggaagaggtcaaagtacatgctatgaatatctatcccttggacaaaggggagagataacttcttccttaaaattccacatgagttgcccagaagggttcttctcatttttagcaaagactgtcaatgttgaccaaccattatgggtaatatgaccagagtagacctctcttttaccaccctacctcatgatatcccactccccatcatttattgaataagattcttatataccacttttctcaaatttgcttttccttgcagaaaccatccaataatttggtgataagttgaacctaatgatatattagttatgtctccaaggaagagataaccaagatttcaaatcctcaagcagccttgtatagttacagttttaagaggattatgtgcccagaatagatactctagacaaatgcagatttgggcttaaattattcaaatccctctctgatgtcttaacctggtgagccgtaataaatccaggaaattcaagcagcattttttttccctttccttgactcgatgagcacagacctagtccagaaagaaaaaaaaatttgaa

SEQ ID NO: 36638 - DNA, 755 bp, Bovine  19866881003685
  misc_feature (1)..(1): n is a, c, g, or t
ntttagatctttggggagagggtctatggaggtagataagtaaacaaatgaagaatttgagagaaaaaagaaagctacacaactaagccaaaagtgataaacattctcttatggtagctaagcaggaagagtagaaatatagagggaaggtatctattgaaggaggcaagattttagggtaataatgagagcacatgactatgactccatagtgggtttggctggaaaattactgatgttccctccctatatttttgtcttgaaaacagcttcttaatttaataaatctgttatcctaaaaaaaaaaaaagaatttgaaagggaaactaattgctcgctatctctttggggaatctcatgacagtgcaatttgagcacagataaatgctaacagggtacactgtaccactatataggcacatttaacagtaatctacactaatgctaagctttctacgcaaaaacctttccttgaatttttaaccccaaagatccatgctttaggtaaataattctacagattacctgctacaaaaatgtagggaaaactattttaatggattgttttcatgacgaactggcatttatatctatataggaaaagcttcactaacttagatcttacttattcagaatttgtagttgtttagacattgtccaggctttctgcttttgcaatatctattaaaatagggaacaagttataaaaattaacagtgtaagcaacttttgcaatggagaagcttgatgcagca

SEQ ID NO: 36639 - DNA, 974 bp, Bovine  19866881020023
  misc_feature (1)..(1): n is a, c, g, or t
ntgcttaccagtgtcacgacagcgatttcttgggaactcctacagagctcacttttgccatttttaatttaaaaaatcctaattcctctttctttacttttttaaagaaagctaaaataaactttaagtctctaaagaatctgtttataatcaatgactgttaagaaggtgagagaaatagaaagactaatttttaggaaggagagttaaagggcaaatttcaaataaatgaaggtgttgtcatctgttttaaatttcataaagatataattgcaacttgatgtaactgcaaaaagaatcacaggcttgtgatgtcactgtgagccatctttatctgaccatttaggtaatcagaaagtaaaattctataatcttaaggtttccagtgggctagaacgtttcagattttaacatcgtacagtttatttttaaaccaaattttttaattttttttatttttaaccaaatgactttttatttttaaccaaattttaccaaccttttctagaatgaagactgaacagatcctagacctgcttacaatggtccaatcctgctctctttatctcagttttacctatattttctgcacaaaacacctgctgagttacaccaggtcctagtttcttgcatttttctattcggagttcctgcagattattataagataatgaaacatttgcagaaagttttgcatattttttcctttaacagcattgtagtttgcattcagaaagattttcagccaagaaattctaatgtaaatctaaccgcttgtccattaatgatcattagtgtcacatctaagagacagttctggttggtgttatttattaaaagcaatcaaaacgagccattatggtcctaattacaatatttactcagatggccttatttatccacaagaaaaaataatgccagacagctgctagaacttctacactaggaatttaagaaacagaaatctccataca

SEQ ID NO: 36640 - DNA, 1241 bp, Bovine  19866881116165
  misc_feature (1)..(1): n is a, c, g, or t
nccttcccacggggagtcggagaaattccataaaggcaaatcaagcctccgtgcacaaatccaagtagtgatggagcgaacacctgtgcccccggcgcctgctgggctagggccccggctggatgggtcggaaacgtccgggtcgggcggccacgctagagactaaggcttcccaggaccacgcgagcggaggaaggacgatgccgctgccccatagggtcccgggctgctctgatgctggggtccctgcgcgggtgtgcccaggccttctacacacccacgtcgcggattgggagcacaacctcaaaactcagctcctgagagcgcggggcctttgaaagctccgttgtgactcctgcttatttccgggagtgggggcgaataaagtccggagcgaggaaactacgccaccagggtcaaccagcaggtggtgccagggttaggactggaaatcacgtgagcgagatcccgagccggccttctcccacccgcctcaagcccttgttagggctaggggttgggaaatgaatgggcgttggagtccgctgggggccgggcgagaggctggatggggtgacagtgaacgtgcctgggagaatcccaaatgtcgctaactcaggcaaccatccgcacgtcaaaggtcagtgggtaaacaaagaacctatgaaaatcgagatgagcgcatgaacttttacctttttcctagtcctgcacatcgatctagccccatgggtcacctacactcctcctcacgctgggcacagctgtccacggaagcttcgggatcgtctggcctagacccaggctgagggggtgcgtgggaccttccgcggagctgggggagggggcataaaggagaaagaatgaataaatagccgcttctaaagttccacatcgttttctggcaaatttttactcccctctatagagccaattaaacgcaataaaaacttgcaaggaagccctctttctagccgagcgtcgccaacaattgcctaaggggtaaaccaaatacgcctgagataattacactaagcccggggcgatgatttgcctgccagcatcctcagcgccagccaatatttgtatagcgtagtggttgttttaaaaaataaaaaattacacgcggaaacttgaaaccgactggttggtgccagggtggttacttgatctgtttttcttgaacgggggtctgtctgcaggcagctggagcgcgcgcgtaccggcccccgccggtgctg

SEQ ID NO: 36641 - DNA, 1066 bp, Bovine  19866881144679
  misc_feature (1)..(1): n is a, c, g, or t
ncctcccctcttgcatatccagaagactttttggtttttcagttcttcgctttttacttgttagtatggagtggcaacttaaaactcctttcatagggaaccagaaaccccaaacccttcaaaacttcttaatctagaaattaaaatgtgaatagaattctttgtgaattaatctatgtcagtttagatcaaatacctgtgtattttctttgttgtgcatgaaacagagtagcaagaaatgcagagtgaaatttttttattttactatttttaatttgaaaaatactttaagattacattgattgctaatttttttcctgtctttttttcatgcagatttgaaaccaaaatagattcatttcatgttactggcttaccagataactcaacaaaaccccgcctcctgtcttcattagatgatgctgcatcactcttgaaaattatgtttgagataaatcctttagatgaaactgttgctcagaggtgtatcatagaagctgaacctttagaaatgttatatgatgcagtaagcattttttgcaattcctaagttttaatatatttctatttgccttgagtttgtcctcatgttatttatacttattttaacagagaacagtgaatagtatagtagaattcttcagacctccaaaagaggtaaatctagcacagctgacttcagtaactttgacaaaacttgaagaatttcgtgataagacagcaacaggtaaatgccagtattattgttggtttatcatttatacagtttgagtcatgttatactgattttagtattctttgagtttatatttgtagactagatacagttttaattgaaacttagtgtggtgcttttatatatttaaattcaaatataatgataattatgtcttacacttagcaaggtctgacctttgaaccacattcatgttaattgcaaaattttgttaggatttttgaaattctgtttatgacagaaactggcctgtattttcctttcttgtaatgacttccagattttagtctattggtgtcagaacctagaagttccacccttttttattat

SEQ ID NO: 36642 - DNA, 1108 bp, Bovine  19866881144896
  misc_feature (1)..(1): n is a, c, g, or t
nttaaatgttttaatataagttgaaaccattattttagttaaaattcattgggatagattcatctgtttttacagaaagctctggtggcttattttggtttacatatggttttattgaagacaatttagtaattgaaaatttttcattgtctcaagtaatataaaggttgagttcattgtttggtatagcagatgtagctgtgttaatttcaaaaattggggagaattatagagattctaatatcacagatatgaataactatttcatggaacttaatttttttagatgtgtatcttccaagttttacccaattgagttcatggatcaaaaattctttttgattgttacagttttatacttggctaatatttaatgaggagcatacacattgactttatattgaaaatatcttgctgaaggttatttaaaaattaatactaacttcacattattttaaaattgtgttattaattcatgtgtttagtgattctctgtttcttgattaatttgtgaacattattcattgtaaagatttaaattttctgcaggtctggtatatattattgaaacacagaaagttcttgatctcaaaattaacttgaatgcttcatatatcattatcccacaagatggtatctttagccctacatcaaatctccttcttttggatcttggacatctaaaggtatatactactattaagtattttatatgtcatttatgatattactttgtttaagatgtcttttggtttatagatgtttgatttgataaattaatttttagcttagtagcagaaactaagatttgagaaagcctccctttgtaacgaataaagtggtttcatttagttaggtagttttctacatttcttacatgaaaatgaccgattgaacactgaaggtcagaggcaaacctaagaattatatttgtaaagtttgagagtagtgcttgaggagtttatttccttttcaatttaaatttattgcttgatcaattaaaatgtatagagtaggaggaagttctagaagtcatcaaatgtattttcacccttctgaaattttttgtgtatatactataaatattgacattttagtatttctatta

SEQ ID NO: 36643 - DNA, 1006 bp, Bovine  19866881146690
  misc_feature (1)..(1): n is a, c, g, or t
ntgtgtgtgtaccctagggaattgctgccctctgtcagtgaagaatatctagcattcttgcaatgaacagctgtttgtatccatccagactgcttagcagagtgtacgagaagaggcaatttatgaggcaaaggcgagttcaacttcttttgcattatgtgtatgttaacggttcagatttaggtgggctcatgtgtggagccaaagagcttggcaaattgatatagcagggaccttctgttgaacattaatcatttcttttcttaaactttatacttgtctcctagtacagctcagtaaataacaatgcatttctatgccgtttgcattttgcagcagagacccaatatcagtccacattcccaccaactatcctttggttatacgttagcaacttccaaattctgactttagacatggccttcaattcatttgtagagagggaaacatctctcaagagatatcatatagctctcttggttttcatacaagtacctcaaactcacaaggcaaatgtgaacttgtttcctagtttctaatcccaatgctactaccttcattcaaggcttcatcgtgtttcacccagaatatagcgaccaagacagcaatgagcccatgggcgcctttgtgcaaattagggcaagatccttttcttctattgacagtgccccagtccccaaaaatggctttgtgagtggatcatggcctggatagtggaggttatttcagccccactctcccctcttattggatacttgagctcagagcacagcctacaagtggcagccctgccagtgagactcttacaggccccatctcttttaatggctttcctatcttgaatacaaatcatagtgcagtctgcccttcacaatgaaatgtaaatctaaccatatcctgctcccttcttacaatgttcatggctctccagacattctgactcaagtggaactgccctgcatgggagataaagactttgagcttctgatccttgtaccaacctgca

SEQ ID NO: 36644 - DNA, 949 bp, Bovine  19866881203411
  misc_feature (1)..(1): n is a, c, g, or t
naaaacacctgcacgcaattcagacaccagacttctgactttcgtcacgattggggaaatatatcaactttctccctaatgttgagcactttttattaaaattatcgactgtaggtttaaaacaaaaatataaagcttttttttttatcctcgaaggtgtttcaaagacaaatcccctggaaaattacttccactgtacacttcgccctatactatgttgacccagccaacagattttttatcaatggcttttgctttgttttattatttgattaagtctcatgtaactcttcttactggcagtcaggggaatcatccatcttggatggagcatttaaatttgctactttttaactcaaggattagctttgcacttgggaatgtttgggcagcatcaaacccaccctacagaattctgtgatttaatttcatttatggatttaaagggcttacagctgtcttcatagttaaatgagaatttactgaaatgttgccctccccagtggcagagagagccccacaatcggcaggacttcagtactcccagaagtagaccatttgaccaaggaggatgaaattagcacacacatacacacaaaacataccatctgagacttttagaaaatgtagatccaggtggaaatcttagagcataaattacttggagctttcattgttgctagatcttagttggaaagatttgtgttctttcacatgcacagctgtggaatctctgggggaatttcttgctatttttcatttttgcatatcagccaaaaaccaagatctcagcattaactgtagtatcataagcctcctgtataggatggtggattttccaaaggatgctagacaggaactgattaaaatccaagatggcattctgacagctaagtgacaccatgggtagcacaatgaggggaaagacggcgaacaggtagatccaggg

SEQ ID NO: 36645 - DNA, 2278 bp, Bovine  19866881296432
  misc_feature (1)..(1): n is a, c, g, or t
ncccaccagcctcctccatccatggaattttccaggtgagaatactggagcgggttgccatttccttctccaggggatcttcccgacccagggactgaacccccatctcttctgtctcctgcactggtgagcgggttctttaccactgtgccacctagaaggctgatacatttctatatgtgtacctgaaaagaaccaataaagataaaatatgctgtcagaattgattgttttaatacatcttaagcaatctgaatattttcttcctcaaaaatttcattcaacaccatggaatctgagaaagtagcacctggtcggtataaagcaactctatttaactaagtttatgttccagtcttactagagcccaaacattgtaaagggttaaaatatatgtataccatctgtatatgcatagtttaatatgtgaaattttacaatttttctcttcagtactatttaagaaactgggtacttaatcactatgaactcaactatagtttcctcctcgatctttaaatttctattttcccagatgacctactctaaaggtttcttttcagtattacagaaaccaccaaacaaatctatgcaagcaattaaagcgcattgtgtgagatctgaggaaatcattgatatatgcacttgccttcattttaaatcaatgaactaatatggatctgtatacaatatctatttggtgggcaagctcaccttgtttaaaaaacaagctacttctgttagctcttatctcaaaactagtgaaagttaatggtgatttttatcccgaaaccagattcattagggcagcaggatggcagagcagctgagagcattccaaggaaagccagaggggtgccatgccaggcaccactgatgggaggttagggacgtgtcagtgattaggaaggtctgatggcaagtgcaggaggcaatacgagggcacttgccttgaggaaagacctgtttcttagtccctggttgcttcgtatcattggtatctgtgtgccctgaatacctgcccctcccaataccgtacaaagaatgatctttgtactatagccattattctcttggcctcaaaggacagaacacgttgagtttattaccctgcttggctgtgcacagcctctaatcctagtcatggtggaaacctgcccaatcttttatccaagagcacacaacgaagggccagaaatatttttagttctgactcattgagacatgaaaataaatataataggaataatatgtaaaacttaaaacacatgaatcatagcctgatatggatatagcttggaaaaggaaatggcaacccactgcattattcttgctgggaaaatcccatggacagagaagccaggagggctacagtcagtggggccacaaagaatgggacacgactgagcacaacgcagcagcagcttgcacataactaggagatgtagggcaaatgtccccaggggggggggctacggacccgtacttcctgtcacatcagcagcagctttaattagaaataaagtgcgcgagaaactcaatgtgcttgaatcgtgctgaaaccatcctccctaaccctggtccgtggaaaaattatctttcacgaaatcggtcccagggatcaaacagttggggactgctgtataataagggcacagtcctgcttcctttcagaaccaagattcactccctcaacttctgagagctgcagatgatttacagctgagtccctctctgagcatggcgctgggcaggagagaactccctcctgaaagtttgtgcttcctcttcaggagctgccagcatccagtgactggttgataaaagggagcaatgactcacctcctggtcctgatacaggataacctctggaaaaccagctcagcttcagaaactctggtaaaatcagctgagctctctcccacagctgctttgcatctcagcttctctctctgcccaatcctagttcctttgcttccttgtgggggatcgttctcaagagccttcctataaaaattctgagtgcaaatctccatctcaaacattgttttctaagaactgacctaaaacagtacctgttccaaagcgaagaaaagtgttcactgaagagaattttattgaactaattctcatactcccagttttattaaaagtatggtatgtttagtagaaatggcttgaacaaggtaaagtttgatttttctctcataaaagaagtctacaggagacagtctagagctgagataatagcaccatgaaatctctcatcagaaattta

SEQ ID NO: 36646 - DNA, 2232 bp, Bovine  19866881314325
  misc_feature (1)..(1): n is a, c, g, or t
nctgttttgttcctcttcactttctgcctaagggtggtgccatctgcatatttgatatttttcccggcaatcttgattccagcttgtgcttcatccagcctggcattttgtatgatgtactcttcatagaagttaaataagcagggtgacaatgtacagccttgacatactcctttcttgatttggaagtagtctgttgttccatttctggttctcctgttgcttcttgacctgcacacagatatctcaggaaacaggtaaggtggtctggtattctcatctcttgaagaagtttccacaatttgtttagagtcctacttggatacaaacatcacagcttcccctgcctctactcattagtcacctcccatgctggggaccaaggctcttgtcccaaaagccttgtcttccccctctggtctcttctattcagctaaagacattcagtaatgtatcctggtttgtcaccagtttcctcccaggttttaccatcatgggctgagctagtgagatctcataacattctttgaactacatttttcacaaatctttttttcccagtcacttcctgtctttcctattatttataggtttcatagtttttccttttccatacgacccctgctccttttcagaaaccctgatccattcttcactgccacttctcctacctacatattaccacactttcttccagtaacttcttaattatttgtaattaaaaagccaataaaaaaatctttctatatatcatcaaaatgtctaaggctcttcatttaatgtgatatttctggtactcctgtcaccttatttgggaatctctcttgtaagttcatgatcactttgggaaatgggcatattacaagaaggcattttgaataaattaatgtatcactgcaacttatgataaataaaaattatacattcttagaccttcaaaagtaataagcaggcaattctgttttactgaaatccttcagtaggagcagtaagctgaaccttgccttgtgaaggaaatggagcatccatgcccaccttcctgagaaatgagctccatgatatgctagaattcggcacctctcttcttaagaccatttaataaatgttggtgtttggagagctaataggtgtgctttggttctagtccttgtaacttcccataaaatgacaaagaatccagaacatagcctgttaaattaattcattctcaacttcagcactgctgagggaattaagaaatagcatttcacaaaatatattggtgacaatttgaactttgtatagaataatatctaattctcttttgcatgtttctttacaagaagggaaaccctcaggacatagcaatatgctaggatgactgctccttcactctgtaaatacatttttaaagtgtactgtaatgtcattttgatggtttagtttctggaaggatttggctaattacatttctaggaatgtactcagaccagttttagctgcccagcattacttttaatagcagctgttacttaccttttctctcacttattttcctccctcacctgcttttgaagttattttgctgatttggagccctgaccttggtttaaattagtttgtctgtaacactcctgtgaatcatctgcaatattttaatggttaattactgccttgtatcaacttgtcagagaaaagcaggcaggaaaattgttcctttttttgtgtgacaaaagaaacttgttcaaaagagaagcagtgaagtgggctggtggatgcccctttcccatccgtgtaggtaaatgctgaattgattctttaagttataagacttggtacatactgagctgaaataataaatttacaccaaatagccagtggcaatttaaataaataagaagactcaaacaaaagaataatataggattctttccagaatagacaccttgttccttaatcaagagtgattgcaaagattggttgtgtggaatttgtggggaaagagtgggttatggtaggttgggtgggtgtcacctagtggcagaaaaggtaaaacagaataaggtgctagaactaggatttggtaattgtcttcttttagtctttaatggcaccccactccagtactcttgcctggaaaatcccatggatggaggagcctagtaggctacagtccatggggtcgctaagagttggacacgactgagtgacttcactttcacttttcactttcatgcattggagaaggaaatg

SEQ ID NO: 36647 - DNA, 1255 bp, Bovine  19866881318546
  misc_feature (1)..(1): n is a, c, g, or t
nattctcctctcctgccccattagcatcctccttgtggcaggaaacgtgggtggtagcggctccagggtagacctttcaaatttttaggactcactctctcttgatcttgagtttgaaaaccctggaagaatcctggttgttcccacttgggctggatacctagcaattgaggtggattagaaaaaccacataatacaggtatggtacctgtcagagcaagagtgataagataaaattcttttccttggcaggggggtgtggggtgtggggggctgttgggtggtgagcagataaacctttaggtgggcaccctagatatcaggcacaaagagctacccaatctctcgctgtcacacacacacatctgtacaaacctacagatacacattattccccaaatccctgttttatttccagccaaccaagcacaagttataggaagacacatgatgctgggagagataaccttagttaactttcatttcatgcaagtttatatctcagttaagagaggtattataaagagtgatcaaaaaaatctatgtaactgttacatataaaatgtaacatattacatgtaactgttacttataaaatgaaaattatgcttaatcaatcaaaaatacataatactacgtatgcaatccaggataaagaggccaagcctcctcaatctctattctttcaggtcatggtgagggatactctttttgctcagtctcccctttaactgtcaaacttccattgctatttgcactatatgtgcagggcatcaaaatgctttaaatacaagtcagaaattatcttcaggccctacccaagaggcagagagtatttgggctaaatctggtgggacaagagttgtatttctatgttatcattttatattatataagagctatttatagaaaggctcaaagcaggccaaataccccaagggcaggggtgggagatctaaattcgtaacaggtagaaagtagtaactttagagcagggtttctcgcttgacctcactgactttgcggatcattctttgctgtgggggttgttctgtgaattgttggatgtttagccacatcactggcctccactcactagatgccagtagctaaactctgtcttctggatgtgacaatcaaatacgtttccagacattgtcaaatgtcacctgcaggaccaaaacaccctacctaagaaaaacagagaataatagaagaatcttgcaaacttaaataattcaaatccccttgaact

SEQ ID NO: 36648 - DNA, 1276 bp, Bovine  19866881328528
  misc_feature (1)..(1): n is a, c, g, or t
nccatgagacgttatcataaagtaccatcgataatgctgctatttttcacaaagcactccattattcttgtcatctggaaatgaaagctacatttttgtctgacacacagaacaaattgcagcagacaaataaaggcacctgggcaactatgccttcagctgggttcctgccacttctcatgactttgtattcatgtcctgttcttgttcttttttctaatttaaattttttgcaccttaagggaattaactagatgttaaaaggcaacgaggatcatttgagatgctaagtggccttggtcatggtgaagtttttaagtgatacaagtttgtgttgtttttcccatggagtatagtttacaacacagagagcaaagccactagttttaatgcaatataaataatccaaattcaccaactgctttaaaaagcagcagtatgctttcaaaaaagtatctaaaaccattaaagttttgaaaatacctgttgacttgaacggaagaaacacctgaagccttgaggcagagtagctttctgaagaaaaaacacataaatatttcatgtgggaggaatttttcatggtacatatcagttcttgaaaccagtgagatagctcacattcactgccagcaataggcagtctgagttctgtctgggggaaaggtatcaggaagggtataaattgtaaatattacatacttccttggtcagcacaaactcagtattctgaaagacagtgagatctccatgtctgtaagataaaagaaataataataatagctgtcaatgtgtcttaaatggttattgtgtaatgagctctatgttaaacactttatctggattatacatttttttttttttggccatgccttgaaccttgagggatcttagttctgaccagggattgaacctttgccctcggcagtgaacctgcagagtcctaaccactagacagccagggaattaccgcgaattatttttgtttaacatccatcccttgagatggatgcttttgctttatatttctgatgaagaaatggaggctgagagaagttgttaatgttgtacagctatttgttggtaaagatctgaacacgacttttcagatgaatagacatttttggtttgttccctgccaccctgctgtggcagggtggactactgtgggtatgcataggtagtggagttggctcctgcccaggtgactgcaaggccagccttgcgcatggttgcagccccttatgagtgaggctggatgccaggacagctggctgca

SEQ ID NO: 36649 - DNA, 1352 bp, Bovine  19866881349430
  misc_feature (1)..(1): n is a, c, g, or t
nacctttctgacatctagacacctgaatttaaaaaccaagcttgagtgttgcctgaccagaactggaaaaggcatacagagaggtggcacccctaccctagggttaggagtgaggaagcagcacagaggcagtgagggagcaagatctggatccacagagagagtggggagcattccgtggactcctgaaggccttgggcttctcaacagtgccactcctcccctccccccacccccaaccaaggctggagcaactaagaaacagctccttggagttggatttttgctgtatatgtatgctatgaagtatttccttatacactttccggcttgcacaatggttgcattctcttttggatcactacctcaggacatttagtagcatgagtgacagggacattttaaattcatgggaaatacaaaaccccctttgtgggcattggtttcagctgccacctcaggtaacaaaggttgagctaagatttccttcgttttctttccttatacactgattccctagccaagatgctatcaagtagcctgctgacccacagaccaggggagaggaggagatggaaagcaagttaattcaccagatggagagctagatatctggatcaggagacaactgcacttccaaagccagatcaaagtcaagtttaaatagttaagtcctgcttcaaaagctgtaggcagagaaatatgagtggatctgagctggactcagaagtgaggaactctcattttccgtcctccatttttccaggatctggagctagcaggttctaggatggaagtccccaccatctgcagtgcaggccctccagtgagtcagaccttggttcaaatcttgtaattgctcttgggcaagttaacttctctgaacttcatccataagatagggacaatacgatcatatatctccttgactttctgggaggaaccaatgaaaaaatagatgcagctgctgaacagactacatagagcttagtaacaaacaaacaactagaggtagttgttgtttttaaagggaagctactgcccagaatcacagcctcccctgtttacaaagaacacagtgaaaggctcatcaggagctggtgaggccctgagttactcattttccacgtaactaacccaaggtctggcggcaagctacaggcccaggtcataagcaggtggatccacaccactgacttcatgagcaacagcttctcttcctttttgcatgatttcctgctccctcttctacccatgtctatctcttttttcttccccaaaggctccatcagtcccctctttcctgacagagtagttgatggtgctgagcccacctgctttctcagaaacaa

SEQ ID NO: 36650 - DNA, 723 bp, Bovine  19866881361436
  misc_feature (1)..(1): n is a, c, g, or t
nctcggccactgcctcgttatcctgatgactcacagagccagagtactttccctctcctctgctgtccttttaaattaaattcattgttctacaagatgtctgcggttcccagaaatgacgcaagctgtatgtgccctattcgaagtccggacatttgactctcaggacgttctcccaagagacctggatcctgccactcaccactccagctgctgacatttccagtaactgctcttcttccttcacagaagcttagagaggattatgaatagatggatttctttttaaaaagtcttgcaaagcctacctttaaatttttggatatctttgctaaaatagaaagaaaaaggtcaattcctttgatattagttgcccaaatgggtaatatttgacagcctagagagtgcaaagcaggcattttacagtagtttaaaagctaaaggagaggtaataattaacacattaattaaccagttaatgcacattggttcttgttcagcctctcgtccttgaaacaggctcaaaaagcttttaagtcttgtaaaaatgggaggcacactttcttgagcatcttttgtaacatggaataatttaaaaacagcaagcataacacatccgctctgagaccacacttatcggaagtgtggttggtcagtagggaagctgtcctggaaatgtgcccaaatagtgagtcagcagctgccattccaaccacatcccat

SEQ ID NO: 36651 - DNA, 826 bp, Bovine  19866881373039
  misc_feature (1)..(1): n is a, c, g, or t
natttcttggatgagatatccttgggatgtttgtgtaaagtttggaagtcttaaagggatttgaaattttcttttctcagttagttgcaggcaaaataaactgactagctaattgaaacaaaaaggtaatttactgaaacaatatggtgtagctcagaaaatccaagagaaactgggaaagtagatttaaaactgatgagtcagctaaaaggagccttgaagtgtgaaaaagtgaaagtgttagtcactcagtcatgtctgactctttgtaaccccatggactttagcccaccaggcttccgctgtccatggaattctccaggcaagaatactggagtaagttgccatttcctcctccaggggatcttctatacccagggatcaagcctgggtttccttcattgctggatgattctttaccatctgagccaccagggaagcccctggtgggagacttagaagcaggaatttcacatcagcaggaattttaaatcagacgtgcctaattgctagaaaactttgtttcttttatattgaaatatttagcttaacatttcaaagttctgtagaaagtttgaattggatgaccttggttctgtctgctctttcacgatacaagagaggaaagaggaaggatatggggccaagatccttcagcggcccattgacttcctcaattgaagagtcaccaaccagttgagtaaactagattatgactacaaaaagctcttatgaagagaaggttctcagactcaaaagaaggcatcaagattgttgggctgaaaggcccgccccttgtttaactgctgtggatttttcaacttta

SEQ ID NO: 36652 - DNA, 1593 bp, Bovine  19866881469880
  misc_feature (1)..(1): n is a, c, g, or t
nctgggaaacaatgctaactcattctgtgatgctaaggtgacccttgtgctaaaatttaacaagatttgtgcacacagaagagaaaccacaggcaaaatcactaataaagttgacatgcaggactcctatataaaagctaacaatcaaaatcatacctacattaaaatgatagtatattgtgatcaagtagacctaacctgacagtagaaacacaaggaagtttcaatgttaaactactaatctaaatcactagttaaaagttcagagaaaaaaatcgtattatgtcaatagatgttgaaaatatatttgacaaaattcaacaccaattcaagtttccctggtggctcagtggcaaagaatccacttcccaatgtggaaaacacaggttcgatccctggtcattgaagatcccacatgccgaggagcaactaagcctgtgtgccacaattactgagcctgtactctagagcccaggaactgcagctgctgagcccgagcactctacagcctgtgctctgcaacaagagaagccactgcagtgagaagcctgtgcaccactagagaatgtcccccactctctgcaactagagaaaagcttgcaaagcaatgaagacccagcatagccaaaaataatacataaacaaacattaaaaagaaattcaacaccagttcaagttaaaaacaaggaatgaaaggaaaccttcttataaggagtttctcttagaaacctacagcaaaagtcatatataatgatgaagcattggaagcattcttttcatctatggataaagcacaaggatactaatcactagtgcttgtattggaggttttgacccatgcaataacacacaaaaataaataggcaaatgtttgaaaggaagaaaacatttatttcatttgctgataacattgttatcgttgacccaaggcaataaaatggcatgctgatagaactgtacactgctacagaccaactaccatagcaacaatagaaaaaagtgtcgaagaattaatcctactcaaagcatttgttttcaccactgctccatctacaccaagagctcagatttatggtctttattgctccacctggcacaaggagagaattccttggcttctattttgtattaccaactcctgacctgggtgcattctgagtgacagagcccaggtcacatgcttgtgccctcgctgcaagagaagctggcaaagtcagtatctagcattttcaccttctttacaaaagataagttctgccttccatgattcataaggtggatagttccctcaacctagaaaaggatttagatgctctgcactggaaacaatgacacgtgtccactagaagcatccctactctcactaataatgattcttcagttattctggaattaccagtaagcaaaatgaaaaaagaagaaaaaaacaggcaaaaatagacatagaaataaagttggagattaaattattgctattatatatggagctggtttgattattctcctagaaaatacatgagaaacaactaaaatgttttcacaaacaatagaattcatccagttgtctggcacaaaattaataaatagatatat

SEQ ID NO: 36653 - DNA, 802 bp, Bovine  19866881553792
  misc_feature (1)..(1): n is a, c, g, or t
nccgcacattgatttttagaaaattcgcaagaaccagaaaatgggaaaaccaaacctaaatgtcattctggctgaagagtagatcagagaatctgctaatgcattctgcttttattttcaagcatttcccaaggaagaagtcaccataatctttgtactgcccatgaagaccacagaccagtcaagtgtgttttgcagacagtatgctgagtgaggcaggaaaaaccactccagcttactccatcaaatgacaacataaatgctcctttgtgataaggccaacatgaacagcatgccactcagtgggttcattaagatgcttccacattactgatgccagatacaaagcaacattgcagcaaactggccacacaagtcagagaacagcatacttgttcccatacaaagctgcctttcaattcacaaatccctgaactcaatgccaggcttttagactatggagtcaactgcaaaaggtctccaaagacaaaggaaaacaagaaaacctctgctccctaggctgctaaaggaaaaaagatttctgtgtttgttgcttggtttttgtttttaacctattctagtttcaaaatctgcatatctgaggttattgatatttctcccagcaatcttattccagcttgtgcttcttccagcccagcctttctcatgctgtactctgatagaagttaaataagcagcgtgacaatatacagccttgacatactccttttcctatttggaaccagtctgttgttccatgtccagttctaactggtgcttcctgacctgcatataggtttct

SEQ ID NO: 36654 - DNA, 803 bp, Bovine  19866881556045
  misc_feature (1)..(1): n is a, c, g, or t
nttgactagctatgtataattctttatccagaggatgaaagaaaaagaaagaaaaaagaggaaggaagagaggagggagagagtggaggagggaggaaggaggcaaatctttaaaaagaggtgaaattttataatgaggtaagagaaaactgaattggaatgagggaggtgtccgaaaatcggtcctgctgatttttaatgccttttctagcagtgtcaccttaggagagtcagctcacttttctgaaaaaatggtttactccactgaaaacaggaatgataatacccgttttacaggaaatgaactgagatttacaggaaatgaactgagatttagctttgggaatcacaaaccacataggtcaattcagtgttaattcaacttctatttctgttacactcccccaggtgagacacgagaagcttagttttctcaccttagttgaattctatttatgatatgatgcttcttaagtcctaaagaattggtgctttaggcactattcggatcttctatagatcagcatttctcaggctcctgtgtccagacagattaacagagacttcaaaaaggcaggtctggggcagggcttgagatggctcttctcaccagctcccaagtaaggctggtcagtgtgtgctcaccctacttggttttgataacattaggggctgcgccaacactttcacacactgagcacacattatttattggatcagagcacagagttttaagtgctgctgctgatgcattttgggttttttccatggtgataaagtacgtcctctgggaatgactgcag

SEQ ID NO: 36655 - DNA, 1036 bp, Bovine  19866881565697
  misc_feature (1)..(1): n is a, c, g, or t
nttgggttctcaatagaaggaaagcaatgaaaaccaggatgatgctgagtacttactgaaatacatgcccctcaagagccatagttttgaggctaaagttatgtcttagaaacctgccatcttcagagtgccagtgagcttgcagacccgcagtggttaaatcaatagttaatgatgttcgtcatgtaatttgagcctctagtttgtttatgctagaccaactttatccatactccaaacaaattatctcttataattaccagcccgaagataaatctctaaatgtttttctgatgatagtgctgtggttggcaggtgttaaaagtgcctcccagggacaaagattgaagatgagcttgtttccgcaaatccttcaggcgaggatgttgcgctttctagcctgccatgtgcaaaggcgccttgtatggtgccctgttaatgaaatctaataggcaaaggtcgtatatctttacaaagaaaaatgcaaagctgggatgtgataaatgggctccgtggggctcagtggatgaggtttggtgagaaaacccatgtttgaacagtcggcatggtttctctgtaatgtttatgccttaaatatcaccctgtagtgattcttctcacctggtagaatgattaaaataaatacaaaaataagaaatctctgtgtctttagtgctttgaaccacagagactggtcatccaatgttaacattaaacattatccaccagaacagtttgccttagagaaaagctggagatctttaaagaaatccttttgtaaacctacctattagtaatgtatcaatgtttcttaaatgcagaagtcttataatctatatatgttgatgagcattatcaaaatagtaagtaatgcatgcagatgcgcagggctatatccaacaatttacgctgtttggaagtagattgaaaatcaacatgcttgattttcatcatgctacaatgcaagaataagttgaatttggaattataaagagttaaataaatcagatatcattgaattgaatcactgctggtt

SEQ ID NO: 36656 - DNA, 956 bp, Bovine  19866881568719
  misc_feature (1)..(1): n is a, c, g, or t
nggcataaataggtacactttttttccaaaagtttgggaatcaacatcgtaatttattataaacttaatttaaatgtttaaatgagatttccaaaatagttcatatgtagcattatttcttatataatctggaaaaatactatatatgcttacttctagctcaagctgacagtggagatttattaaggaactccagtttttgccttcccctgagaaacgtgattttgccagtagcataggtactgttctatgaccaattccagcctcaagaaccagaaaaatagaatcaatgttcatttttattatctctcctttgggtaccaattcaggcatgggagctctttttacagcttcatttggttcttcaagaaaccacatatttaaatcttttgtatccttcttttcccataaatgtgctgtagaagaagcagtttcttttgggatggtttccttagcagtataaagtgctgaagttatggtaatcacagtatttatgataactggtgaaacctaaggagaaaaattcaaagcaataaaaaaaaaatacaaaaatcactttccaaactacatacttcaaagaacatgaaatatatttgctgacagatcaagagaaattaatactgaagtaatattactaccaagaaacagatacaatttgctgcctacaaaatctttttttattatgatagctaatttcaaaagttaaaatatttacatgttgatattaaactgaccaatttcaactacatatactataaggaagctacctacagaagcagtcaactgccaataataaaatacatgaaaacattcatcataaaatgtaaattaagtatcattttacaattatgtgtcaagaatatttttaaacagcttccttttgcttaatgattaatattattgttataattgtttatttctaagttttattgttttttccaaaagggcactaaaga

SEQ ID NO: 36657 - DNA, 1693 bp, Bovine  19866881587142
  misc_feature (1)..(1): n is a, c, g, or t
ngacaccaaaagactgccggcaaaccaccagaagctagatcagattctctcagctttcaggaggaacttattctgccaatagcagatcttggacttctagcctccagaccgtgacataataaggttatattgtttaagtcacacagtttgtggtgctctgttatggcagtagactgatacagtatatttatgggataattcataatgtgatcagtcatagcaaaagtgatcaagtcagtgcctggttattgttcttcctgaagaaacatggtaatgactcacagccttttgggagatgcttaatggagatgtaataatacttggtgttggcaagggaactattcatgtggtattgccatgagcaatctcatttgctgcagtggcactggactggactggaaaattttgttcccttcccttaacatctagatatactgctttactaggagtaaagtaggtccaagatttataatcactccattctgctgacaacagcataaaggccaagtttctcccagttaagcacactctttaatatccataaattcccttcttttttcccctaaggtttattatttaaagttttcaacatagatttttgtttttgataaccttcatttctctctactggttcctccattaaaatgaaggattggaacaaaatcaaaaccatccatgtctcttttctgataatctagttgacaaacaatgaaaaggtcacaaaagatcaggcacaaccataatgaatgaaatagattccaatatgtggagtatacaccccacaagatgtgtgttgtattcagactcataatgaactggaaaccatgtgaaatgggacaacagtatcttttccactgtcctagcttccaacactctttgcaagaaccagcactctggccatgcttctgatgagaccattttatctactgcttttcaaagtcatactcattctgacctcatatattgaacaaagcactgaaagagtattattgtaattatttactttgaagggtagatttttctgtaacctgtgctgtgctgtgcttagtcattcagtcgcatctgatgctttgtgatcccatggattgtgacacaccaggctcctccgtccatggggattcaccaggcaagaatactggagtgggttgccatgccctccttcaggggatcttcccaacccaggggttgaacccaggtctctcgcattgcaggcagattctttaccgtctgagtcaccaggaaagcccaagaacactgaagtgggtagcctatcccttctctagtggatcttcccaacccaggaaccaaactggggtcttctgcatttcaggcagattctttaccagctaagctaccagggaagccccttcagtaacctatataaccttaattagaacaactatcatttgtgagatgtactacaatacaaatgagaggcaaaaggtttagcagctttctctttatgtggtagaattaacccatctgttaaaggcagtggtttctaaagcccaaaccagtgctgcctccaacgaacatgctatgtgtgtcgcaaggagacaaattcttctcattttctcaatatttccacccaaaaaaattaactgggtcaccaggcagataaaggtcatgacacatacaactgtggagctgcagcattgcaaagggccattaaaatgtaaggaatcctcttttt

SEQ ID NO: 36658 - DNA, 1776 bp, Bovine  19866881705076
  misc_feature (1)..(1): n is a, c, g, or t
ntaaagtgggatataaaatataatttaaaagaaaataaagccccaggatggtaatttatcacttactaagaagaatgaagaagtgtttgctgcttaggctggtcattgcattgaaatgatcattgtctttagttcgcatataatccatacttaaactctcctcatttttcaatacatatgattttgccataggtacgttgagtacactaaaagattcacttggtgaaacagaaatactaagtccaagagaatttaaaatcataaaaggtgccagatcccttatgaaggtagctgaagatccagtggcagcttctgtaaatgcctaacaaggaagagtcatcataaatacaagaaaatgtagaaaactaaatgacaagcagagtactaacagacatatgacaaataactaaattaacaaaaacttctttgttaaccaaaaggttaactcagactggtaccccaaaattaaagtttcaagtaactttccttacctcagctaaattatttaacattataaggccacatttagataatgtaatgtttagctggtctttcgaatagaaagtgatgacagttttgtattctggtactctgtaattttcttcttcagtacctgactcaacaatggcctttttggctttctttttcatctaaaataatataaattacagaaatgtgagaccaatttgtttctaggagcatggtataactcattttacaaaggaaaaacaaacatcagacaaatttcaaccaaaacattagagaaagcaatacattttatcagttccactgccttactggaataactgggacataaaccaacgaatgccgcctggacagaggcaatactggaagaaaagttcttctcctcctcagttacactaaaatggcagacataatttagaaggggaaaataaaaccctaataagtaaacgcatgtagcatctgaatgaaaatcagaagcacatacatcatagcatgtggaaattcagggcaagaaaagttagcctactgatgttataaatgctatatataaagaacagaaacctagggacttaataagtccaacaatagttgcagaacagtgccactaggacctaggctcctgtgaatcaaactacctacctctttttaagattcgcaagtctactacctgtaagtatcctgacctaacaaccaccaaagaaattcctttatccaaatcctctatctaaaatgagcacaatcaaatgtactggtctaatataaaaagctggaaataccatgctagtcaccttcactgttcctttaactggctttaagccactgaaaatttgtccattatttcacagaatcattattagggaggagatacgctaataatcctacaatctcttgcttcagaagcacaatttcatccatctaaaggttctgatttatatgattacataaattcacattatatttgaagtaaataataatgtattttcttttatatacacacccttcagataccaaggaaaacctgggatagacaacaacctaaaaaaatgctagaaatattttaagatgatagtttataagtggggactttgcagccagtattgcattccacctcttccaatttaaaggtattattactttatgaaagtcctttaacttcaacagttttagttctatcatatattaaaatgaagtttaaaactgaatcttcttcagaagtttgttttaaggtttaaagcaaaagtagattatttaagacagtatctagtacataataaatgttacacagtattt

SEQ ID NO: 36659 - DNA, 1543 bp, Bovine  19866881726566
  misc_feature (1)..(1): n is a, c, g, or t
ngtatgcactgtgagtacttttgtgctttttcccttagtatattttattttacattaagacaaagcagatgaagagagtatcctctgatttacaaaagaaaaagaaaaaaggcaattagacaaattgtttcaaaatgccttcaatcctaaataataaaaatcttattataaatatgttagtatttgcttcaaaactctatggaaagaattaggccctcaagcttttacagctctatgaagaccttctaaatataggaaagtaaaactgaaatttatgtcagtttattaatggcatcacttaaaactataacagttaattaactaattaacaacttaattaactcagcacttaatttacttacttgagttcacttaaattccctagatgtgatttaatgaactttcagtgtaattcctgactaaccatggaaactgtgtgatgtatatttatgagtttaaaagatatttcttgaaattaaattatttaagacaaaacactaagcctagaagtgtttttttcttcaatagggaatatctctgaacatctgatatatagcaatttaaccactctgcctttttctctcagaaagaaactcatacttgtgtttgtttgtttaaacataccaatataacattcagaagtaagccagtgtgagcaaatttcatcatagtttattaacaattaattatcctatattctcaaagaataaacctgagacaataattgaaaattacaggagaaaatttgctataaaacattctctgttccatggatttacttatacaatagacctgtttacagaccagttctatacagtcatgcttctcagtgtgtggtctgtggacccgtgccagtctgagttggaaaaattaagtttttctcctatgtttttcctttactttcgtatatctaccacactcacaacacttctgacaccgtgggtactttcccctacccaagaattctctgcaacactagcgggcgtcctacaatttaaaccaggtctgactctgtctacctggagacggcatgggattccccaggttaagtgcccagtcctataaaactgggaacatttcaagcttctaaccaaggcttggtctttccagtgaccagcccccatccaggaactattcaggagttcacccagagtcacttcattagaataaaagacgctcctaactcccaggaaattataagggtttttggagccttgtatcaggaaccagggtcaaagaccaaatattagaataggagatgctcctagcgcttgttacttaggaaatcacaagggctttaggagctctgtgccagggaagaaacgaatatacttttttctattatctgacagagttgatgaattcttactagtagcagatgagacaagtacagaaactgagtgtttagatacatttatagcacttcgagaagataattatatgtctattgattctaataataacatatttaggcttgcattttgtaagtctgttttttattttcttttctctaagtaattcatttttattagttacttaaaaa

SEQ ID NO: 36660 - DNA, 1103 bp, Bovine  19866881901896
  misc_feature (1)..(1): n is a, c, g, or t
nttcagtgttaaagagaattacattttccattctcttctctcccttttttcttcttttaaagattttctggaaggttattactatttctctgacttttgatcatgaggaaatctcaagcaaaagtaaaaagagaagtatagtaaatcctcatacactctaggaaaatttaaaaatagcaaaagtagggaaataaatggaatgaaatagcaaacatgggagaaaacaggattttcacttttgaattctcaataataaagacatctcaattacacactgagatataaattaataagacttttcatcttttgggagagtgccacttcggctcagcccctgaaatatgattttgtggtttctttcttgcctcagggattcatgaatgtacacaggtcttagatgaaggcagatgaaacctgggatttcagcagagcctcatacataagttttcagaagagctagcagaccatcaggttgataacatcctgggggagctgcaggttggcccaaaggggagaagacagaaggatggggcagaccagagaaaacatttccacttaccatgaggtcagcatgcagccagagagacagagtcttctagactagatttgcacacacccacagaccacctgaggatcttactgaagtgcaggtggagtcagtaagtttgggggaagcctgagaacctgcatttctagcaagctcccagccaaagccagcatcaagggctgaaacctgtgtagtttcacaaggccctgtgctcagaagggagctgagcttggtttcatggtctgctgtcaccctcttgaaattgttaataatcttcaatttgaacttgtgttttgaaggtaaagctggatggtccagtgtggcctgtgtgagaatggagcagatgcgtgcagtgcagtatgaatatgcttgtccagcttcttgctatgacaccatcattgggtactgcaatggggaaatgacccatgagtatgaattctggtgggagttccgcaggtctcaaagcaagtagaggggaatgtgttatgtaaagacaggaaggttaggagcactgacaggcttggaaccagagtatgctgtaaccaattagaaggaa

SEQ ID NO: 36661 - DNA, 901 bp, Bovine  19866880410962
  misc_feature (1)..(1): n is a, c, g, or t
nacagatctctctctctctctctctctttttcttttttggtgaaattaaaatagtggtgtccatttatattcaaaccagaaccttaccagcttgctgaatattcagatctcttagagaaaataatgaaaatatgctgtaaaagtctacctgaattccccatccggtgttcctactcagctttctgccttcagtttctcctttttagctggaaaagtgtaccagccaaaagacagccaggttctttgtgaagcaaagcatatcaaaccatctgtagataaaaaagtaacattttggcttaaaagccaccttctgatgtaagacagaatgaaaattataatgattgatagagtatacagtattgttattaagaatttgaaaataagattttcctataaataactcaagatattccacgtaagtcaagacttatgtgatacaatatgtgcattttctcaaaaatcaagagaaattaaactagtacccaagaagttgggttatgaagtaagaatgtcagtgaagatcctgaaagtaatttaaacattggcattgtacatatttcacttatatctgtcacagaagattaattttaccctgcacttttgccatgtgacatcaaccccattaatttatttctgtcatttctggctggcaaaattaaaataattcagtcctatgaagaagccttttttgccattgttaaaattcagtggcacaaatgaaagctacgtctaaagttattgccaggatttagggaaaaaaccaaacaaacaacattttggctcaaacagaaggtctttcgggcaaacagtcatggatgaaagttgcaagaaaaaaattaaaaaactccgtaagttcagcatgcaccaaacattttcagacaaccatttagtgtctaaaaat

SEQ ID NO: 36662 - DNA, 1616 bp, Bovine  19866880438862
  misc_feature (1)..(1): n is a, c, g, or t
ntgtactgagtataaggctaacacacaaagatagattaaaaattttccaaagatcacctaccaataagtgttagagccaagactgaaacccagcactacccccagaaatatggaaaggcattccaggcacaaggaatggtgagagcaaacgtagagcagtgaaactcaatacgtgcagagatccactaagaaggtcgaattttctgctgcaggagatcagaaatcactgaattgttcaatcaaataaatgacatggttagatttatgttttagctgaggcgttccagttgctgggtggaggttagttgtaaaccttgggctaagattgaaggggtgttgaagggtaaagaatagttcaccacgtgaaagatgtgagaaaacagaagggtttggggcattgggcccaccgtgtggagaggctgcatggtcaaagagtacggcacttgctgggaacctaaagcaccgtcctctggttgcagtgtaaatcgcaagggtaataagagatgagggcggtgaaagtggaggttaaaaatgggaaatggggacaatactgagcttgaacttgtttctttaaaaataaaatccaagaccactgaagagttttgctgaaatgtatatttcagaaagatccctctgttaggtagaatatggactggaaactgcaaaactgagagcaagagataaaggcaacaaaaacggggtcagtggagtctgagagatctttaggagatggaactgacaagacttgatgattgattgatgggtcatcaagtggtgagagaaataagcaggagagtcaccacggatcctggttgcgtcagagtagttacttactagtgcctcctttcactctcaagagcacagcacttcaagtgatcaatgttacagttactcctgttagaagtgaaagatgtcttgtggggtcttggtttgagccacagaatggatgccattcaccgaaacagagaatgaaggagaaagagcaggggtaaggatgaagacatactggacattccggacacattgagtttaggactgaggttagaggacaatgggaatcttgaagatgtcgtgacgtgtcggggccagagacgtagctttaaggatcatttgcataaaagaaatggtatcagatccaatcaataccttagagctgctgtcacatacgaggcaaggctctgagacattttgtcttcaggaccagatggttgggaaattttggagaaaagcaatgaatcgaatattttctgtgtaccttcagttgagtggatggatgtttccagtacagggctggttcatgggattttctgagtagggccatcaagtaatcattataactgggactgctacaggtgccctgcagtgcagggtcatgttcctgatagaagaacatgagagttggttcttgtcctgaaggaccttatggtcaagttaggtagataacagttgactatacaaccaactattgtctacttagtgacacacaagaaacaattaaaatgatgaatttatttttaaaatgaagcatttatatattctaaattggcagtacaaactaagagcgttttagaatttctgagcagagaagacaccttgagctggaatagtgacagcca

SEQ ID NO: 36663 - DNA, 615 bp, Bovine  19866880506139
  misc_feature (1)..(1): n is a, c, g, or t
naaaaatctaaaaaaatatcactgatgtagttctcatttaatctaaagagataatcataatccttgataccgcttggcctctagaggcatgagtcttccgtttcttgctaactcaagcaagtacattattccaaagaatgtctgtatatcgcatatttctaaatctcctaatgataatggttcttttaacaatcaatgaacaatcaatgactcaatatttgacccttggtgaaatgaagcactaatgagttttgagggggtcctgagttagcgggggaaggggtctaaatgattttcatgttcccttccatctctaagggcttcccttgtggctcagctggtaaagaatccgcctgcactgagggagacctgggttcgatccccgggattgagaagatcccctggataagggaaaggctacccactccagtatcctggcctggagaattccatagactgcatagcccatggggtcgcaaagagtcggacacaactgaatgactttcactttcaaatttcactttccacctctacatactctaacaccaaaggctatagtaggtaatagtctagaatttagaaaacatatttaaatgcttcatctcatttgataaa

SEQ ID NO: 36664 - DNA, 2571 bp, Bovine  19866880660439
  misc_feature (1)..(1): n is a, c, g, or t
nttgcaaattcagaaacctggatctcatcagagtataacagtgggctagattcaggaaaaccaaaatactatttattaattcacagtaaaaaaaaaaaagtccacctgaatagagcaaaaatttctgttgtaaaccataaaaccaatactaaccagctgaagcaaaatcattagcaacattatgaaactttacagaatttctagaaactcagagactgaattaagttcagagtctctgcagctaagtgcgtgacgagttgcttcagtcgtgtccgatgcacgactatggactgtagtccacgatatggtagcccaccatagtgcacgactatgaaccctatggactgtagcccaccaggctcctctgtccatgggattctccaggcaagaatactggggtgagttgccatgccctcctccaggggatctttccaacccagggattgaacccacgtatcttagtgtcctgaattagcaggcaggttaccactaacaccacctgggaagctcctacagccatgaagaaaacccaagtgccaacactggaccactcataggtcagtcccattggcagtggaagcagcaccacagctcccctggtggacacagagaatgagacacagtgtggtatgtcaaccacaagattttactcttaggaggtttgccactatttcgtgtttgtagttaagttactaagtcatttctgattcttgtgaccccatggactatagcctgctgggctcctctctccatgggatttcccaggcaagaatactggagtgggttgccatttccttctccaggggatcttcctgacccagggatcgaacccacatttcctgcattggcaggtgggttctttacctctgagccacctgggaagccccaaattagctattcgtatacaaatatccccacttttggatttccttcccatttaggtctccacagagctttgagcatggctccctgtgctgttcagtaagttctcattagttacctattcgacatagtatcaatagtgtatatatgtctatattttttgttctgctttttaattccagaaagctttgtgttcatgtatttttttcccctataagtttcaccttatataaagcttttttttcctttaagatagttaacaatttaaattgtaattgtgcagtaaagagatttcatttactatacaaagacatttaattttatttttagtaagatacttgaagttattctttattttgaaaagtttatttcctttttagtctgttgctgcccctgcattgatgatctcagtggtttttcattcatctggggagtcaggaagaagagtattcaacatttaatatgccagaagccctagtaagcacaaaaacacttaagtacccatgtgatttacggtcagtgggtctgtttcccctttctactgtgtcaggaattagttggaaggaccagaattcataggagaaagtaaaataggactgtggggattaataatcaaaggagggctttttagtccgtggtacccagagctgcacattgatgcaggaggtggtgctgttggtttagtcgctcagtcacgtctgactctttgtgaccccatgaactgcagcacgccagacttccctgtccttcactgtctcctggagtttgctcaaactcatcattgagtcagtgatgccatccaaccatttcatcctctgtcaccgcttgtcctcctgccctctgtttttcccagactcagggtctttttgaaggagatcaaaccagtcaatcctaaaggaaatcaaccttgactgttcattggaaggtcaagctgaagctgaagctgaagctccaaaactttggccacctgatgtgaagagccaacgcattggaaaagaccctgactctttggaaaaggagtttgtgaggtcttagtaaaccaaatgtggacaggtctccttagcccacatctccctggccaatctcttgcagttatggcctcatttaagttgcactgttgtgaaaaggacagagggctgagatgctacagtctcaggtggaattctggagtgtgtaaatgtaagcctccagctctgagtttagagaaaacatttaaaagaaagccagaggaaaaatcttacagattaaactccgtatccatgactcactttctctttgctctctcgttccagctgttactcattttaccgcgaaccccacaggaaggcttcttgtgatgttttccctttgactgctttgccaaaaatataaatatacaccttgggagaaaaagggtgagagagaaaacagacacaggtcacagtttttttttaaatcttggttctgccgataacaaactctatgaccagatactctgtacaggaagagaggatgttataaaatttgttctcggtggccaggcagccatctctctgtagaagggcttgtctcagatgtccacccgtgtctggattgctgaggtcccttttggatcagctctcctgggcttttggaagtagccccgcaggtgtgactacagcctggagattccttagcaatgaggacgaattatcagagaacaggcaggaa

SEQ ID NO: 36665 - DNA, 1153 bp, Bovine  19866880766533
  misc_feature (1)..(1): n is a, c, g, or t
ntctgttttgttcctgaagtctagcctctaccctggacttgacttaagttctaattcattctggcttctgccctgatctgtgttctgctggacttcactgattccagtagcaacctcttgcaagcaccaagcttagtctggaactgataaccaattgtacccaatgctactttcactgtggttttaataagggatagcctgttccctggatggtttccaacaacagtggacacacttgtgcatgtgcgcgcgcacacacacacacacacacacacacacatcatattagactgtgcagccataaggtttgtatttttagatggatatttgcataagcacgtttgaacttatgttcaaaatgtcagatcttgctttatgatgatctaaccaaaaaaaaaaaaaatcagatctacagatttctctaatttagacacatgcaagtatatacagaagcttatagcaatcagtacaaaagaatacatcatcagaaaagacttgaagaaatagagaacgaactcaggagatgctgtctaatgcctagtctggccatgggggaatatacaaagagaaaatgatggtagcttctaggacaggctgatgatttgagcttaggaatcttattccctgcgtgttaattttgttggaaatgagcaattgaacgtcaagagagggggtgtcagattgaaaaggctttcactggataggtctgggaaaatctgaatgtgaaaaaaaattaagtatagtaatgaaatgtaaaccattgaaaaaaccagaaatcctgcatccatacttataacaaataaataaataattcagggagaagagaaagctcttgcttacagttgagtgccagagaccaagtagtaaaatttggaaaaccatcattttgaaagcatcatggtaaagatagaatcagacaagaaaagttactgaatgataaatctcataggaaaatttgaggaacagaatattttcatggtctcaaagtttgcatgtggtggggcaggggggagagatgggggtcttctgaaataagaactcttccctgaaatttcagctggcagcaatggaaaggaggttggtcaaaggaaaattgggttggccccagactacttctccactaccttaaaatatagtagatatggaaaaaaca

SEQ ID NO: 36666 - DNA, 1833 bp, Bovine  19866880821943
  misc_feature (1)..(1): n is a, c, g, or t
nacggggagaaggcaatggcaacccactccagtactcttgcctggaaaatcccatggatggaggagcctggtaggctgcagtccatggggtcactaagtcagacacgactgaagcgacttagcagcagcagcaggaaagaggacagggaagatgtctctctctttttttttccctcctgtgccaacgctggaacattctttgccttttccctaatagaatgtgaaataaaagaatttttaagtggttgcaaaactgaattcatctgaagctaaatgtagaagaagataacaagctgaatatttccctctagcagtttggagggataacatatctgctctgaacaactgaaagcacaatttactacattgtgtggtgtcctttgaaagtaagattctccctgctaggtgaacatcactgctaatatcactgcgaatatctatcactgtcaccctttcgccacttagctggtaaatagcaatctaattaatagtcagttgggattcactctggaggaggaataagaataaactcagcaggaaagttgtaggcttgcccactgtggacagttcttcaattacttcttttaattcttcagaggatgtactgaaagagactgatggagccattagtgataaaccctgtcaggagagaacgtgctccctcttccagtgcttctggggtacaccactgtctaggtatcatcttggggtccccatcactactaacaccacctgtttgaaaagtaaaaacacatttggagaaaaatggaggattggtgtcatgaaatatactatgatcctctgctgagggccagaaaaactgctaagggaagaagagtttcgtgtaggattcatgcaagctacatagacttaggataattgggtataattgtacatggccccataggttgacaaataagcccctttctgatcctcagacaccttatgtggcacgtataataatacatgacctctccaagatcaagaacgagatgataccacttctcctggggtcccattccagtcctttaaaccatgatgctgatacgagctgcctcactgacctggactctatattctcccaattcccaggcagccacactggactccacgctctcccttgcacggtctaagcatgctctgaagcagggcatccttgctcactgttctctcttctgagaagctgccacctccctccagccacaagggtcatttcctctccacctcccttgacccccccaatctaaaattatgcaccctccagttactctctatcctcttctgagctttattttcctgcacagcactttttaccacctcccagagtatccatctattctatcgtttatcccattgctgattgactttaagctcccagaaggcagggactttgttttggtctctcctgcacccacagcacccggactgtgcctagcgaacagaaggagctcaataaacatttgttgagtgaataaataagcaagcatgtagaacaatggaaagctacatgtgcgtgtcttgtgtgtgtgtgtgtgtatagatgataagaaaactggcttgcctaggtgaaagtaacaaatgatgcctggccataaattaaattttaatacaccaggaaaactggagatgtagagatatgaggagcctacaggtatggggtcagctggggtgcctgaggaataatccaagaaggtgatgaaggattcatgagaaaaatgagcagattaggtctgagacacttccccaagaaagaattagtaagaagagagtctgaaaggagaggggctgcaattcatcccatagctgactgacataccctccattaagaatgga

SEQ ID NO: 36667 - DNA, 1699 bp, Bovine  19866880843352
  misc_feature (1)..(1): n is a, c, g, or t
ntgtggaccttttaaaagtacaatattgtgtctgtcttatgctttggtgttttgcaaggcatgtggtatcttagctccctgactaggaattgaactcgtacccactgcactggaagatgaattaaccactggaccctaaggaagtcctgacctattccaggttctaatacctgattgtagattttttcctccttgagaatgactgtatttggctgctgtgaaggtgccaaggctcacctagatcaggactcggcaaaggctcccgaggtatctggaaccctggacggctaccaggtttcctgtccgccgagagccccagtatgacacgcctgagacagaggcgtgttttctgagtcccaggacgagccggggcgggtgtcggcgaggggagaagacgaaggcgcggcacatcccttgctgtgatggtttctttcccctgacggaggcaagagtgctctccgctatttgaagagagcaatttagatttatattaaggaatgaataaataggattcagtgatgaaatctcatctggagtgaatgcaaatcagatatgctaatgatcgtgggggccgtttctcacattggagcagaaaaagggagcccagcggaagcctgggtgcttctcctgtctcccccgttaaccaactagatgttccagaacaactgaggctgtgggaaagggttatcttttacttgacagtgggcttccctgatggcccagtggtaaagaatctgcttgcagtgcaggagacaaaggttcgatccctgggtcgggaagatcccctggaaaaggaaatggcaactcactccagtattcttgcctggagaatcccatggacagaggagcctggtgggctacagtccatgggtcacaaacagtcagctacaacttagcaactaggcaacaacaaagcacttgacaagtcctcaagtatttctgggcagagtattttaaacatttcccagaaggtctcaagagatgatttatgcagacccctacgtgaactggggcttcccaagtggtgctagtggtaaagaacccacctgccaatgcaggagatgcctgagacaagaagatccccctagaggagggcatggcaaaccactccagtattcttgcctggagaatcctatggacagaggagactggcaggctacagtccatagggttgcaaagagtaagacatgactgaaataacttcgtacacatactcaatgtaattacaagttagactaaactgcttagaaaatgtcttgtagcccacagtgataaggaaagtaaaattcaatcattataatggaaagaaaagacatatatgtctaccatcttacatatttcaatttttccattatgaatatccctttcaaatgtttttaaagagtatattgttcaagaaattattttgcatggatatttaaatattactgattaaggtttatgatagtgagtcattctggttcctgaatttattgcttttacttaggtcctactaaatgcaaacttacagaagttcccagttttgaatatcctgtgagaatgccatatatatatatatatatatatatatatatatatatatatatatataagagatgattaatgttcacttcagacttttaaaaaaatcagatagtgctttttaaattgtgaggacaacactaaaagaatagaaacaaaataatattttcaaatcaga

SEQ ID NO: 36668 - DNA, 1099 bp, Bovine  19866880846855
  misc_feature (1)..(1): n is a, c, g, or t
nacgtgtggatctgcagctcagcagatctataaaggagagctttgtcagcctagagacggggtagtaccaaaggacactcctctccaggaagagggttgtcatggactggagaccacgattcagtccattcgcatgaagatcaccaaactgataatcaccagtttcaatctctcaaccctggcatttatgtcaatgtcttccctggtctctcagatggtaaagaatctgcctgtaattcgggagacctgggttcaatccctgggttgggaagatcccctggagaagggaatggctacccactccagtattcttgcctggagaatttcatgggcagaggagcctggcgggctacagtccatggggtcgcaaagagtcggacacaactgagcagataacactgagggagggaagcaagccatcaagagaacctggctcagttatccttggctgtcacaaaggccattgtgtggttaatttttatttcattgctatctttattttttttttgaattgtttcattctaagctcgacaagcctgattggcagattcactgtctgattttttctagttttaaatgatatgctttttcttccaggcatcttcatctattaacctacattcatttttaattttaatgctccaatcaataattatttcacttgacagtttttgacagtctgctgctccatttagctgtttagcgtgaatttcaaaggtgatttctcagtctgtacaagggaagtaaacttgctctttcatcctctactttgcgggggcataggaaaatagacatgttttgctctttcctaaggagtttttaatatagaagaacttcatagttttccatgtaggaagatagaggactatagaacagtcacattttctgtgatgtagcattttgttcctgtcatttttcacttgaaaggctggatttctgttaattggaattgatattgtgaggtcagcccgtcgccaaatatttattgaatactcattgtgtgcaaggcactatgttaaatgtggtaagaaattaatacacgagttggacatgacgacggaacacatgtgtgtgctcgcgcgcgcgcgcgcgcacacac

SEQ ID NO: 36669 - DNA, 1157 bp, Bovine  19866880920253
  misc_feature (1)..(1): n is a, c, g, or t
ngatgtccccagcctagggatcgagcccaggtctcccgcattgcaggtggattctttaccgtctgaggcaccagggaagccctcattaaagtgaaccttttgttcctcattacagtgatattgttccagaacttggatccatttttcagtccatcttgtttaatgcttctctcttgttggattctttccctacacttagaagctaccagtttattgaaattttatgccgtgctctttttagaatgcttattttcaggcatgtatcatatttgtggatcagaccttgacaattacaaggcatttaaatgattagattctgattgtcaaaattcaagcccttgaaatagaatgcctaagctaatgcattccacacgccagcatctcatttgctgatcaatgtgttcatcagaatcaatgatgagcacgtactatatacttgtcaaagtaaacttattaaaaatacattagttctaaataaaatcttgtattgatttgtcatttgttttattgatagcaaactttacacctgccctcaaatattcacatcaaaaaatatctgttttttcagatagattgaagttcaatgatgaatacaattcctcattgagaggatactggctcatcagcatgcaccaatggcatgcctcacgttcagaaaaacaaagatgagggcagctatggaaagcaattgatattcctgcccaggttggagttgatgtgcaaatggataaacacagtgtttccattccgaagaagctatatggaatcacaccagcaggggtttgatcctgaatttccttctgtttttagctctgttgtcatttcagaagctgagaaaccaagaatctcctagagatgtattaagggattccaacccccaagagagaacgatgcaacaattagcaatcacataaaaagtaaacaataaagcatgtaacaatacaagggggggtattacaaaatggatttataaatgtggggtggtattagtttagtatgactttgttactcactattattaacatagtgcttactgacctttttagatagtatataaaatgaactggtctagagctaaatagctaatagtttctgtttttaattaagctctgtcttaatatctccccaggggtctaataccctggaatccatttttg

SEQ ID NO: 36670 - DNA, 951 bp, Bovine  19866881074882
  misc_feature (1)..(1): n is a, c, g, or t
nccttggtgaaacgcttccccatatactgtatttgtcctaccatgtaatgaatgatctgtgtccctctctagactctgagatgcttagagtcactgatcagggctcgaatttttcataacagcctgcacagtcctctgcacataaaaattctcagaaaagactggttcaatgtgtcaatgaacacacacatccggatactcttaagactatggtgaaaatgtccttaaattgtgatctgaagttagaggttaaagtaaaaagaaaaaaaattcacttttagtgaaatgaaactcttaagcattttcacttccagatgcatcagcatcacataaaagatgttggaactattttagaaaatagacattctgcacattttcccgtctgagaatcggtctgaaaaataccaagctacacagggggcctctgggtgttctcaggacaaacgttcagctgggtattgattccacacactcgcttaatggaaatccagaggaagactcaacatctaccacgcctgcccgtcacgcactattcccctatgcagccgctggagagtaaggcgggggcgggggcggggagagagaggttccccggagacgtctgtcctcccctcccaagaccagccagtacttcagcgatgatgcatccgagcaggagagaacttaggcgctcagagaagcaccacacccggcctgatggacattttccactttcatggtcattcttctcccgcatggatcaatttcttacatatccccttataatttttcaagactgagcctttgcaaatatctgcctggctgcattacctaagccatcatcgtacatatgccaaagccccacctcactcaaggctagttctgctctgaaaagcacagtgggcagcaaaagaacaagttcctcctaacaaggatccgggctgatcgtccacattcggaaccattcgtcac

SEQ ID NO: 36671 - DNA, 1172 bp, Bovine  19866881189502
  misc_feature (1)..(1): n is a, c, g, or t
ntgcattattaagtctggggaatttgtaagcttacttaagtctttcaattgagttagactgtggataagtgtatcagatgagaaacacataaatggtgtttatttactctgaggtagtaaatggagaagttgaacgaaataaaatgcatctattatgaccactggcgtccagcaaggccactgcccccgtgcccctgttctgcctgcactttcttcgtatgtgggtcattaacattgtgtttaggtcagatgagagtctgttccatctgctgtgatagctgaagtaaaatgctgatggagatcatttgagatcgtctctgtgctgctgattgcatgcttgtggctcataatcagaatgatgcgaagtaattgttcaagcgacttgccacggctacgttttgtgtcgttgcaactgtcagcagtttggtcctgctcctctgcctgaagcgtgtttgcccagcgcctgttggatggcgcgagttgcccttcactgttgtgggtgacatcggttctagcatcctcacttgctgccccccatctattttataacctgaaaaagaaatgtctgcttatttagtgggagcaagtgctggcttttgtgttcaacagaatgctacgtaccagggcttccatacagaaatccacatgcttgttgccacagtgctcctctctttttctctttggccagaaaagccaggcagacctggcttagaattcttgctttgtcacctactggttatgtaaccttgggtaggccacgtgtcttgaaccttgttttccttatctgcacattgggtctaagagaacctgttttacagagattttgtgagaattaaagatagtggataaaacttgttggcataagtgttgttgttcagtcatgaaatcgtgtcccactcttttgcaacctcatggactatagcttgccaggcttctctgtccatgggatttcccgggcaagaacactgggagtggttcccttttccttcttcaggggatcttcctgacccagggattgaacctgtatctcctgcattgaaggcatattctttactgctgagccaccagggaagcccttgttggcataattagccacccagtaaatggggaatagttaataataaggaatccagtgcttactcaggatgacattatacaatggcaacacagaa

SEQ ID NO: 36672 - DNA, 928 bp, Bovine  19866881349721
  misc_feature (1)..(1): n is a, c, g, or t
ntcaatccacttgcacgttcccatagtctttttatagcctttacgcttgcattcatgtccacactgacatctcctctgtgtctttagaatctgtaaacacatactagctatctaactcaacataaccgaaatcacaaaagtgattacaattttatggttaccactgcaaataatgcctctgaaataattacaagaaagataactgatctataaaatagtgaatattttagttttaataaccagttcccaccactttagttataactcctaccttattctatcagagatttttaaaagttatttattcaaagatctcttaaaaatgaataatgtcaagggaatgttagctgtcatacattggctattccacagaagccaaatcgcagaaagatgcattaatagtatatttaacatgccttacacacagggaagaagcttccaggtggtgttagtagtaaagaacctgcctgccaatgcaagagatataagagaagcgtttcgatccctgggtccagaagattcccttcgaggaaggcacagtaacccactccagtattcttgcttggagaatcccatggccagaggagcctggagggttacagtccatggggtcacaactagttgggcatgactgaagtgacttagcacacatgcatgcatacacaggaaatgcccagtaatacccaaggaagatgagatttcagtgtttctatcattgtaacagaaaaggaaagtggaacactgtcaagacaaaaaagaatacgaatgattctgaaaaataattatgactttagtgtttcaattgtaatttatagaatccactggctgtttgacctgtcttccctggagttatgaagtactgagttgataatatttggaactttaggatctcaaatatgatatcaattcatcatttagagttatagag

SEQ ID NO: 36673 - DNA, 1744 bp, Bovine  19866881377427
  misc_feature (1)..(1): n is a, c, g, or t
naaaatatccagaacacacactctccctagaataatataatcaggcatttggctctaaatatctattcgctgatgactcccaggtttacttccccaggcctggccattttcctggaccccaaacttgtgtacataaatgccgatttgacatctccatttggatatctgatgttcacattaaacggaacatgtgcaaaaccaaaccttcttctcctagcccgggttgcctcttgcactgtcttctgctgcttctcttgtaaatgccaacatccacgcatccgagcatgtcaaaagcaactagaaataaagactaatttctccctttccctcaacttccactgtcagactatcagccattctgtgttttaactcaaaaatctatctaaaatccatccacttcaccccatctctgctgctcactgactcaatggacatgagtttgagcaaactccgggagatactgaaggacagagacacctggcgggctgcagttcatggggtcacagagtcagacacaactgagcgactgaaaaacaactgctgctgctgctgtccccttggtttaagccaccaccgcctctcatttccttactgggctcaatgctttctctcttactgccatactttaaaacaaaaattagatcatgtctctattctgtttaggtatgttctgtagcttctcatcagaataaaatcaacacccttttatcgagggaacaaagctttacatgatgtagccactgcccagctctccaaactcactctgtcccattctcacttcctgctccagccccaggtctttcttgtgctccctgatttcccaagccttttacgatgtctttgcacttgcttatcttatcatactgtatacaaaggtctgtacagtcaaagcaatggttttttccagtagttgtgtacagatgtgagagcagcacaataaaaaaggctgagcactgatgccttctagctgtagtgctggagaagactcttggagagtcccttggaccaaacaaggagatcaaacccagtcaatcccaaaggaaatcaaccctgaatattcactggaagggctaatgctgaagctgaaattccaatactttggccccctgatgcaaaagaactgactcattggaaaagatcctgatgctgggaaagactgaaggcaggaggagaagaggatgacagaggatgaaatagttggatggcgtcaccaactcaatggacatgagtttgggtaaactctgggagttggtaatggactgggaggcctggcgtgctgcagtccatgggagtcgcaaagaattggacatgactgagcggctgaactgaactgactgaactgaagacatacaattttcactatggaacagaaactgctctaagtgctttacatactttatacactgtaacttactgatgagatcactcaggcacagagagagtaagtaacttgccctaggctacacagctagtaagaaataaaagggtcagttatggaagatgaacaaaactaggcctggtccttaaaggctattcagtaaaggaagcagacaattaaacaactcactacagtatggtttagtgctctgagaggggcaagcatgggggcctttggggaagtaaaagtgtgccaccaaaggctgtgtctggagcatggagtggagggtgcaggtgggggggggggacagggcgggggctagtgaggccagagctgcaggagaggctggtcagagagtttcggaag

SEQ ID NO: 36674 - DNA, 740 bp, Bovine  19866881563561
  misc_feature (1)..(1): n is a, c, g, or t
nttgggtcatcgaaagagtaagctggaattttgccctttgttcctcaaggctttgcaactgatttgtatgcgatcgggtttataccaggagggcataagaataaattattatttagcttattattctctggttctaatagatctataaaccaagattcttaagaatcttcttcacatttctttaaaacacacacacacacacacacagtaatgtctatttggggcccctttctgaggatctcaggggaagtttgctggtgataaatgctggaaccctggaacagaacaaattggtctcacaagcagtcggtgacagcctttctgaatacagctgctttcttcattagaaaactaaaaatagccccgatcattgcaggctgatttcactttaagccttctgccgcatccatttgtctgtttcattcagggtttctgagtgtctatgacacggtgatactatttcagatgaaaagtgcattgaagaaatgtttgcttccctcccccacgttcactccagatgtccccaactgtccattgctgtttcctattaggagaactcacgggaatcttccggcatccttgccatccccatctgcttcactcatttttgggaaaagtaaacaccatccacattgcaaacaagagtctacaattattaagggatttttttttcaagggaaatgtttattacatgtgtgatttttctatggatagctcatgaaatattgagtacaactacc

SEQ ID NO: 36675 - DNA, 854 bp, Bovine  19866881852406
  misc_feature (1)..(1): n is a, c, g, or t
nacaagtcaaagtaggatttacgttcctttatgcattttcttttcagggtcccactctgatgctgcgggactgagaccccaggcagctcagtagtgacttataagggcgggggtaccttgacagggcacggaggtgggcccagaggaagaggcagttgctaggtgaggaagaggagacccaattggtcctgaaatcaaaaagatatgagggtcagatacccacagtaccgaagtccccaccatgggtggtctcaaggcaaacaggaagagctgccctttaaccttttcatatttatatctcaagaagcaatactctgtgggttttttttcctcttcaagattgcttttgacattcattccagttataaatgtcacagttgttgccaaagagtgattaagtaaccccttactcagaagttctcaggatagcactggagactaaaacctcctaagggcagtcttgctatatattctctttctgctattttccaccatctcatttgctagtaatttctttggctgtgtgtgggggaggcggggctggggggcgggaagataaacccatttcaactaaaagaaagcttcctttttaagtttttacaatgttaaaataaattctgaatttgagagtcgtatctttaagaatgttctgggctattcttcaaaggtagttcttctgatttattgaaaataatgtggtcaagttaaaagaaaagtactaaagttttacttttaaaataagcattggggtattgatccactgcttagtttccctataaaattgtggaacagctaactccaaaaatattctgtgcctttaaatttttctctgcctaaaattgttttttttgtaa

SEQ ID NO: 36676 - DNA, 1791 bp, Bovine  19866880507210
  misc_feature (1)..(1): n is a, c, g, or t
ntataaaatgctcccaattctagtaatatatgtgtatcaattataaaggaaaaaggaaaaatacatggtttctttatattattctgtatgtgcaaggtgggtttttggagctatattactatcatatctttctagtgacaaactgaatgagtaaggtatcttatcagatattacttgagaaaatagaattagttgtgccaaaagactaatgcttaagagattcatttctttagcttacttcttaaaccaaatctacttttctaacatagatactgttacatgtaagtggccaagtttttgaacaaataattaaaaaaaactcaatacatacatttctaaaatagtcatttagctacaattatttcatttttctatatacaataaaccatttttttctatgcacaatagatttgagggctatgatacaccttgccacttactatgttcatttttttcaaacctctgttctatctttctcaaggtgagtttctaccttaaaaagtcatggtaaggtctgtatgagattacatatgctatattcttagaagcatagtaaaacacacatggtaaaaatatcagtaatgtggattttgtgctgttcattttttaaattaactaaagttttaatttacagaaaatagagtagtgtttcatttctttgaaacaatgaacctgttagcgtctgtttagtaaaatgactctgatttgtatttcaaagtttttcagttatccatatcaaacttgatcaatttaaacgaatcttttatgactatccttttcaaattatgcagaataaagttatctattagattaaaaatattcacatgagcttgtcatgattctttaggctgatcttatttgctatcagttattttaatcaatgaattctgcatgaaaaaatctgttgaaaataagtatacatatatattttatttaaattaaaatttgacttactaataaatgtgaaaatgaaaggcctagattgattttgttcaaagaaagttttgaaagcaagtccttttgtaaaaaaaaaaaaaaataagaggacatagagttatatttttgtttaattattttcttccttcttttcattctgttaccaaagataaagctgatggcaaaaatctgaggaccctttggaatgcttctctccatctatcccagtgcccccactttttcctgccacattcccagaaaattctctacatatttataggttaagaggggaaaataactctccaagagctactttcaatgttactttggtgggcagtaactttataagtgctaatcagaagtatatgtcaaaaatttcaccttctgccttgtaaaagctgacttagcagaaacaaagatgaaattcagggcaagtcaaaattcttgtttcattgtcccatttttaaataagagatgaaatttaggacacctcaaaattctcttctgccctattttattgtatctatgtttattcatattcagcagaaggagtaccaattttagcctttggtttcttcattaaaaaaaaaatttttcctaaattaattactgtaatcttaaaattactatatctgtttaaagaaaataggaagattatataaactagtacagatatttaaaatggctcagagctccattggcaaaggaataaattctgtttttcaaaaactcttaaaatgttcctttgtgatatgctttatgttcatttaatttgttgtgatcataatacatgtttgcctttttatcatttaattttataccacaaacattttgatatttattataaccttcttg

SEQ ID NO: 36677 - DNA, 1880 bp, Bovine  19866880538158
  misc_feature (1)..(1): n is a, c, g, or t
ngatgagatggttggatggcatactgactcatggacatgagtttgagtaagctccaggagttggtgatggacagggaggcctggtgtgctgcagtccatggggttgcaaagagttggagataactgagcaacgaactgaactgagatactcttagctaggaaaaaaaggtcatttagaaatcttaagaatgtttatctgagatgcttaaatgcttgtggcatgttttgaaatctttagtgatcatcatttcggcaacttgagttgaacgggatgcatagaagtctcacaaaattttaagagttttatacgggagaaagagaacacagtttggattacaaggggccaagatgactgaagtatcctgaggtcctctgagatttcaaatttgtgtggaaaagtataaacctgttcagttgtcactgcaagtatttcttcagaaggatccaaggagggtaaggaaagtggtgagatgtagcgccaagaaaaaaaatgagcagagccaggagccatggggaatagtatgaggagattaagtcttagggagaagaccccagagaatattctccactctgagcatgtgtgtttgggggtgtgcctaatgatcgacaatattttaccaataagtgttcaaaagtggtatggattagtgatgtgtgtagagattcttcctctcactttaagaagtggactgtgctttgtgtgacccttctacaaaacatataaccagacattttagtaatattaattcttaggtctctgaatcaaaatgagccacctccaggaaactacatccagatcagctgtatgtatcataagatcttgtacttgtagcctggtattgtaattacaagacacattggggtgtttatggaggggtaaacatattttgtgtgtcaaagagatacaaataatttggaccttgatcagatcacagtaaattgattgcagtaatgggctataaataaatgacagtatgcctatttcagcatccttttccctgaaactttctgggttttgctcactctgcctctcgctggccttacatatgtaacactgtggagactaagcccacagaagtttgcatactctgcttgttctcagtcaatgggttgactggcttttggcgtcttgcctccacgataggaacaaggccaagtcactcttggaggatgagtgaccacatggaggcagctgggggtttccagaccccagccagtcagccattgggcagttttgcctaattaaccaagagctgaacaccaatctatgaggcaacttagtcaagattgggaaaccatatttctggacacataaattgtttatgcatggaatttgaccttaatggattgttatgattttaatactctatgttgtagggtggtttatttcacagcagtagtaactaactcaactctgcaactgtggatttcttattcaaaactcacatgacttcagtcttttaatctgtaatttgtgtatgttaaatcaactttagatggtaatcatgttactaaattaactcaaactatatagaacatagtaggagttcagtaaacattttaattgaacaaataaatggttattatttaataaacattttacaaaaattgcactgcaaatgctatgtagttagggtcattgagatatattgtttcctccattcccctacattgagggtaagaaaatgcctttgggttctctcaaaatagatgattctgcctctgtaatgggtacctgtaggactcattaaagaatgatgccatattaggagtcaccgtggtttgggaaaatccaggaaacattttctattgtgataaagataaaagagccttttctggcaaaaggtagcagctaagtgcttgtaaaaataacaaagcag

SEQ ID NO: 36678 - DNA, 997 bp, Bovine  19866880581352
  misc_feature (1)..(1): n is a, c, g, or t
ntaaaaaatctgttcaatttaaattgcaatacatggcatcttgcttactaactcaatttcttgtaaacccatgtgaaaaataaatttgacagactgttttgtattgagtcagatttccttagcgttaagccagtctcctgggaatgtataaaaatgcaaaataaatggactgtggcaccacagatcttgccaatatgattgccacagctatcagaatatcagcatgcagtgtggctcaggaactccacaggacgatctggacatcagttgttcagcaccctccccccacccacaagcagagcagacaagccctgttggatggtgattttttataatgacttcatttatcctaacccccttttcccactttctacagtgttgtcagaatgatcttccaaaacatggacaagtacaatgtatctgtttaaagctattctattaatacaaccttccaagagtttgggaaaaaaacacagttccttacttcttcataatttggtccctgcctacctttcatcggcttcccaggtggctcagtgggtaaagaatccacctgcaatgcaggagacacaagagatgcgggttcaattcctgggtcaggaagatcccctggaagaggacacagcaacccacgccagttcttacctggagaatcccatggacaagaggagcctgacgagctacagtcacagagtcgcaaagagtcagatgctactgaggcgactggacacgcacacactacttttcatctcatttcttggtatgcgtcctggaattatccatgagttgtgctcttaccctaaggaacactttttaatttctaaagtttactctttctcttgcacctctctttccttgtacaaatctctcagctgcaaaaatccttctgtattgtaaatttagtcaaatgtcagatttttttttttgatgcctcaacctccccacaaacaatctgtgagcatcatggccaggagaccaggtgcaccagtttgataag

SEQ ID NO: 36679 - DNA, 2252 bp, Bovine  19866880665289
  misc_feature (1)..(1): n is a, c, g, or t
ngttaatttgaggaatttttaactcctccatccctatgaccttgactatggccttgaatgccttctttaaaacagctatggaatatgtctgattttcttttaagtaggttaataaccttgagcattcccagactcagtagcagagagaagatcattctaaattttaaattcttatgctaaataatttttaaggataaaaacttatagttccttaaaattgtgaactattttcataatagcaatagacaaagtcatgaatattagttgatatagttgaaataaagacaacttcagagatatccaagaaagttataggcaactctttacttaaatttcacaaaattaacctttgcccatattgactaaatgattagcctgacttttgtaaactatagagatcccaattctcagatacttatatcagaagaacaagatttattttttttgtttttaatttgtattttgattgaggatcatacagtggattttacagttaattcaataactctgattccagtttcaatcagtaccactgccatgaatatctcatattcaagttttattctaagcattcctagtattggcaacttctagaattatagctggtggttaagttttaaaacttcacctgacagtcccaagaatcagttattattactacaatacagagcaggtgatatcaagtgtgtggtttcttcacaacccatacaccgtcatatcaaaatctagggataccatcagagaacagcaaataatgataggtgcattacagcaactgaagattgataaggtctaaaaagtaaagctagagatagagactttctataggtcagaactgagggaagaaccagaaaacaggaactctagaaatagcttaagtcaagttgaggacaaagcacagtaagtagtagaagttattagattagaaatcaatgtagtttgtcaaaagtgaagtgaaccataaaaagataaacagaaaaacattgaaaacaataggaccttaaaacagtcaagttccaggactttcttgatagtccagtggttaagacttcagctttcaatgcagaggatccatggctgggaagctaagatctcatatactttgtggccaagaaccaaaaaaaaaaaaaaaaaaaatcaaacagaagaaatattgacttaaaaaaattggtccacatcaaaaacaaacaaacaaacaaacaaaaaccagtcaagttctgcctttgccagacttttatatggattctagttgatgaaagccagtgtcagagcttgtacataaggatagttaaactctactggaaaggtggtaagttcattgataagattagatagggaagtatgagcctagagctaaagttaagttctgatgaaaagactgacaaatttttctttgatgagtctttttttgaaaactactagtaagtaccagcagtattttgggcatagaagcattaaaattagttttaaaataggtcctaaaacataagagttaatagtctacttgaggagaagtcatggcagtaatttgcttttagagagagacttttgtgatcctatttttattttggaatactcaagacctatgataggggatgagtttgtcatgcatctgggtaaagaatgaagtaataatagtgttggctagaactaataaggggagaaggcaagggcaccccattccagtactcttgcctggaaaatcccatggatggaggagcctggaaggctgcagtgcaaggggtcacgaagagtcggacacaactgagagacttcactttcacttttcactttcatgcactggagaaggaaatggcaacccactccagtgttcttgcctggagaatcccagggactgcagagcctggtgggctgccatctatggggttgcacagagtcagaaacaactgaagtgagttagcagcagcagcagaactaataagcctttaaatgaaggcatgtcagatttgtgtgtgtgtgtgtgtgtgtgcatatgtgtatgtgtgtgtgagagtgatttgagaattattacggggttaaattcataaaatagagaggaaaaaaagaattacatcatgtttaaactatctaaaaacagctgagagtatacctaaaataaggggcaaaagaagaaggtgactaactttcttttatgtcagagggggaagaggaagagttccaagcagctgaagttttaatgactaaattacctgtcatcttttttaagtgtcagaaagaggacaagccaatca

SEQ ID NO: 36680 - DNA, 1905 bp, Bovine  19866880740932
  misc_feature (1)..(1): n is a, c, g, or t
ngaaaagttatgaccaacctagatagcatattgaaaagcagagatattactttgccaacaaaggtccatctagtcaaggctatggtttttccaatagtcatgtatggatgtgagagttggactataaagaaagctgagcaccaaagacttgatgccttttgaactgtggtgttggagaagactcttgagagtcccttggactgcaagaagatccaactagtccatcctaaaggagatcagtcccgagtgttcattggaaggactaatgttgaagctgaaactccaatactttggccacctgataagaagagctgactcattcaaaagaccctgatgctgggaaagattgaaggtgggagaaggggacaacagaggatgagatggttggatggcatcactgactcaatggacatgggcttgggtggattccaggagttggtgatggacagggaggccttgcatgctgcagtccatggggtcacaaagagtcggacacgactgagtgactgaactgaactgaatggttaaaaattcccaaacttgggaaagatataaatcttttatagattgaagaagctgggaaaatatcccaactaggacaaatctaaagaaatacacatcaagacacctaatagttacatttcttaaagctaaagacaaagaatatgtcttcaaagcagtgagagaaaaacaatgccttacttaacaagggaaaagcaatttgaatgactgcagatttctcatcagaaatcatgggaggatgtttctgtcacacaatcagttagctcattcactgttaacacaaagcattgtgtttgaacccacccggggatacccccttgacagaaaccatggaggccagaagaaagtggcacagtttttcaagtactgaaagaaaaggactctcaacccagaattctatatgcagtgaaaatattcattaggaataaagtggaaatcagaacagtttcagatgaaggaaaactaagagaatttgttgctggtatcacctgaaaagaatggctccagaaagttctcaaaacggaaatgaaactttaaaaggagacattttagaacatcaggaaaggcaggaagaacaacagaaagaatgaaaatatggttaaatacaattttccttctcctcttaggtcttctaaagtctgttcgacagttaaaggaattaaggtaggaatactgtctaatgtgattctaaacatatacacatgaaaatattaagacaattataaataagggagggtaaacagacataaaaggagataaagtttctatacttcacttaaactggtaaaacatgataagttctacctatataatgtaataactagagcaaccattaagaaagctatacagagacatacagtggaaaatattatagataaattaaaatggaattcttgaaaaattataggaaagcagaaaaaaataaaacagaaaaataaaaagcagaagacaaaaaacagaaaagcagactcaagccctaatacagttgacccttgaacaatatgggtttgaactgcatagttccacttgtatgtggatcttttccaagagtaaatactagagtactgcatcacctgtactggtttaatccatgtatatagaacctcataaacacagaactacaaatgcgaagggccaactgcaaggtacatgtggattttcagctgcatggagcgtcagtgctccgaccctcatgttgtccaaagggtcaacctatatcagtgattagatttaatgtaaatggcctaaatatattaaaagattggtagagactgttatagtagatcaagggaagatcactacactgtatacctataatacacaaataaatttaaaaaaatgatgacccacctatatatgctattagaaactcacttctacatg

SEQ ID NO: 36681 - DNA, 3396 bp, Bovine  19866880743909
  misc_feature (1)..(1): n is a, c, g, or t
nttctgaatcccgggatccagtccatgcattgaaacttaacaactgtaggctttttaaccataagaatattagtttcttgtttatccagtgaactcatacccatgttttgattgttatcttattctcccatccccatttttcctagttcttttctatttatgtgaagaaacaaaagaaatagtaacagaaaatcactaggggaaagtagaatgtttttgaatagaccaaggaggagccctggtttaaggataatctagtccttttcagttcatgtcatactgacagttctcttgttcagtgtcttgcagggacacagataatatcacagcatgccatggagacaaagaactgaagggccaaaacagccctcggaaagaggttgagttattgattttttttttttaagtcacatttctgtgaaaatggagaagttgggcttctaagaggaaagatgctttccgttttatccctccttgatttccaaacactaagaaagaactcagccatgtgatatgtatttcaaacaaattttatgcagacatgcaacctagtggtagcaataagactagaacccacttcttcttacttgaagtctgatgttctttatgattttgcttatttgttcttaagagtgcattaaataggattccaataagttgtgggaaaaatggtttccgtgggaaaatgttattcttcaatgtcacaccttcatttggggcaatctccgagagctgctgtggaatagagtggtacttgacaagacattagaaggggaagtaggaagcagaagaggacaattttccaagctagaacaccttcctttcctgccaaccagaagggaagtgattatagctgcttcaacaggaagtgccctgaataatcagaaagggttgggctgggatccctgctcactccagatgtccttctcctctccatagcactctcagaatgaacaacctttaaaaagattggaacaatgctcttatccaatcactacttgaagacaagctaaacactgcatgtttttcattcatgcctatatatggtaaccagtttcaatcaggtaactatatgatcgacagaaaacacacgcacataaacacacacacacacatttcctaagctcttatctaaagataatcatgactgtatttttatatttcctctaggatttatgactaaattatgaagtaggtaggaaatggatacccactccagtattcttgcctggagaatccaatggacagaggagcctggtaggatacaatctattgggatgcaaagagtcagaccggactgagtgactcagcatgtacaattatactttatacatatacacatacaaacacacacacacatgcacaaacatatagatgtgtgtatacataaagctaagattatttcatacagttaattaggacaggaccagaattccaactcaaatttttctgcctcccattctgtttttgtcttctctacaccatgatgttttctcttcagaaacagattgtatattgctatttcaaaattgcagtatacctgtattctgtgctatattagagtaaaatggaaaaaggatcatgatttaaatataggcttgaacactggctatgccagaaagttataatgtaaacatattaatgagaactgaaatcacccaatacatatcaggaatatatatcaggaatccctcatctagtttttcattttccatatttctacttctacacccctagagtcacttcaccttgttagtttttcactggtctgtacaattgtacaatttcttatatgcagataatcatatcatgcatgaggtatgagatatcatgcaagtcctcttcttatccttcctccttcatgtttgacttgatagagttaattgtattttatttgcaattctgttgtgatttctgttttattttaaaagtaagcatgctaacttgaatttattagactaaatgaagaaaatattggctccactttagtcattgctatcacaagattgtgaatgacagatcttagacaccagaatcaataatttcctgctcttatgtaattttccttccattagctccctcagtgggtatcagaggcctgataataattgttaaatcaaatccttcacataggacagaacaagagaagaaacattgaaaacagatgaggaagaaagatgtctccccattagaagtgcacttatattttattgacagagaaggaacctgctaattggatgtaaagatgggtcttgttccaggtaattttatttttaagaagtattgtggagtcataagagaagatggtgtgtttgagaaatagtgctcagtgacattggaacatatgtcaggaggaaagaggtggagcttgtggcagcatttggggtagatacaaaacagatattaagaaactcagatagtctggaaaccatagctcactaatgttggttcatctttggaatgtgtgcatgctcagtcattcagtcatgtccgactctttgcgatcccatggactgtagccctccaggcttctctgtccatgggatttccctccaggggatcttcctaacccaggggtggaacctgcatctgctacatctcctacattggcagactgattttttacccactgagccacctgggaagccccatcattggaataatctgcaacatcttgaaaaaaaatagatttctagcatttgctctttgaatttatgtttttgcagatgcgactgaggccaaacatacacacacacacacacacacacgtaaacacatacatgtaagtatatttgtgtggatatgtacagcacatgtaacacatgggcttcccaggtggagccagtggtaaagaacctgcctgccaatgcaagagatgtaagagatgcaggttcaatccctgggttgaaaagatcccctagaggagagcatggaaacccactccagtattcttgcttggaaaatcccatggatagatgagcctggcaggctacagtccaataaggcttcagatttggacacgactggagcgacttagcacatataacacatatatatcaaataatatatacaaatatatacacacacttttcttcgaatgtgttagtcgctcagtcgtgcctgactctttgtgaccccatggactgtagccaaccaggctcctctgtccatggaattctccaggcaagaactgcagtgggttgccatccccttctccaggggatcttcccaacccagagatcaaacccgggtctcctgcattgcaggcatattctttaccgactgagccaccagggaagtttcttcaagtacccagggatcactgttaccagccaggtttctatactgctaatgtacatatttagagaacctcaaagaatcctgtgtcagagggag

SEQ ID NO: 36682 - DNA, 721 bp, Bovine  19866880760741
  misc_feature (1)..(1): n is a, c, g, or t
ngttctctatgattgcaatctacttcctgattttgatttgctagccagactcatcttattcacaaatatttggaggtatgaatgtgtcacctcagcttccctggtgtgtcagacagtaaaaaatccacccagaacgggggacctggatttgatccttgggttgggaagatcccctagaggaaagtatggcaacccactccagtattcttgcctggaaactccccatggacagaggagcccggcaggctacagttcattgggtagcaaagagtcggacatgactaagcaactaagcatagcatagtgcatctagaagaagaaattctccttgataagatatttctattccttttatgtattctttccacaaacagttcaaaacaaattaaacattgaagtaaagtgcaggcatttaatcaatcttaacacccatttatcgctgcttaagctacaaagcaatagagattatccctttaatatttaatacattcataaatctgctacagaaaatctgtccctttctgtgtctgtacttcttcccctatggtttattgcttttcagaagtttcttgtagtaaagttccacaagactaaatcatttttgagcaaaagaacagccatgttataattgcaagtaagccagattacaacatattattgaactttggtcaacatgaaccactattattagcacatatctattgcatatctatatttcttg

SEQ ID NO: 36683 - DNA, 1083 bp, Bovine  19866880766774
  misc_feature (1)..(1): n is a, c, g, or t
ncaaagaaatctacaactggcaaagaattcttttctcctgggataagggactcccttccatgttggctctaatatctgccctaaggatcagaattgctcttctgagggaagtggaaattagttgttgcttttcaagactgagatttataaaatacattctggctggtcaccagaaaatgaaaattttgcaaatcttggaaagtttgaagctgctaaaggaggcataagcaatctgttccttcagcaggattttattcagatcagttccacaggaaacctacaggatataataagaaaaaggacagagaggagcagattcacgggaatacaaactcacaaagcacccaacatggaagtcttacatgatagatgtgctttttaagtcaaagggccatggccccatctaatctattcaactaattgctgatctatttttgcttcctctggcattgtgaaatataagctagtagtctttcctgcctcatctccactcaccccttccatatgtctactctctgatcaaaacaggtgacattttcccaaaggcccctctgatttacccttctgtttcctcactccagtatctctgtttagattcccggttatatgcttgttggttaagtacaacccagaacttactgcttagatgccatttcttttgtagctaccctcgactatctgtcaatcagtcttctcaaaagaactgcctgtacacgctgtctccgtttgcttatgtccttgtcacttcaatccacttggatatggctttgccatactgtaccactaaatgtgtccttacaaagtcagtaaagtgtccatgctgcccaatgaatggctttctctgtcctcatcatactagacttttcagtagttttcaaaagagtgaaccatagcttcattttaaaaaaataaaaaattatttatgtatttatttgactgcaccagttcttagttgtggcatgcaggatcttccgtctttagttgcagtgcatgggatctagttccctgaccaggacagaacctgggccccctgcattaggagcacagagtcttagctactgggcccccagagaagtccttaaa

SEQ ID NO: 36684 - DNA, 1997 bp, Bovine  19866880767643
  misc_feature (1)..(1): n is a, c, g, or t
ncatggactttacagtccatgaaattctccaggccagaatactggagtgggtagcctttcccttctccaaaggatcttcccaacccagggatagaacccaggtctcctgcattgcaggcagattctttaccaactgagtgacaagggaagccccattttgttgttattaacaacaacaataaattctgaaatggtttctatctgctccttcaatttctgactctgaattccaaactcttgatttgagccaaatcaagggccagaataagcaagcatgcctcaggaattttcaaacaccaactatttgaaatataattttatttgccataaggaaaggataccacactgtaaagcagtagtggtattccagatgagcaaagacactagtgatgagagatttaatcttgtgtttcaggaaaagatatttatgttttcacagacagcttttaaataatttaataaacaactaatgccttaaaacacagagtctgggatctgccaaatgaagtttggctctattctcagacttgccttttgttacctacgtgatcacagaaaaattacttaatctctaggctccagttgcatcatttaagcaataggtatgatcatagcatctacttgaatatggctgtaagaattaaagaagcaaaagcatacaaaagatttagtatagtgtgttaacaaaatgaccccttatagatattactatttatattatcatcatcattgttgctgttaaggcattcagatttggctaaagttggatttatatgggattgtatcacctgattgtattccatttgtatgaattacacttttttgtccatggcattgttgagggtcactttttgactttttattatagaaggaactttttacagatgtcttgattattttgattgattcaagatcatgacacaaaggagagttcctgtagttgtcagtcattgaacaatgccagtcagtcatccttctagtatcttaaatcttaaaagaaaaaaaaatgaacttttctctttcagggttctgtgaaattcacttgacatctcaaaagctgagaaaatttgtcttttcttccctctccatttcaaacataaaattaatgactttgcagccaaactgataagagcactatcatttaatgtctcagatgaaataagggatgagggggtgggagtggggacaggggcacttgtggattctcaggctcctaaatcgcaaagctcttaatacatggctttaccttgtcaagaatttcagtgcctcaagctggaatactgacacacctcaaggtagatctcacttgttctcacataatcaaaagcatttggtgccataatgtgtaaatgagattggcacccaggagttgcccctgtgaaaatgtcctccagacagactgttccagcagcctggtgatcccgtccctgctaatgatgtggttgtccccagcctgccgctgaaggcagtcctctccaaggtcactcagcagtgtattttgtttcttgtgtgtttactatttactgtagcttttaagcacagaccaattatagttactggaatgcccatgtctttctaaggttacctaacagaagctgctaaatatccttttgcaaagccaagggaaggtgggtgaatcttaccacaagtaaggaatctattggagaccagattcagggttgtctttgtttttctgcctcaaggtactgtaaaagcgggaaaattgtggattgtcctccttattcttctctcctctttctttctccccttcccttatctctcctcttttcttctttgttgaaattatcaatggcattaagtgagattctgtatgcgataacacctagcatgcaaaatatactgaatgaataattaataaactgtcctaaagaaaagctcaactcacatatcactatgtactctgatcaattagttctcaccatagaaattcttctctgttttacacatacatattttttccttctttattttctttt

SEQ ID NO: 36685 - DNA, 1024 bp, Bovine  19866880767644
  misc_feature (1)..(1): n is a, c, g, or t
nttggtaaagaatctgcctgcaatgcaggagacctgggttctatccctgggttgggaagatcctttggagaagggaaaggctacccactccagtattctggcctggagaatttcatggactgtaaaagtccatggggttgcaaagagttaatatactagttacatttttaaaagtgagtacagttacctcagttacagatgacagaccaaatatttctgattccagtatttctactgtacccattctgtgcttaaaaaacagaagtgggagctagagattgcatgtcggttttcaataactgattccaatagaaatttagcagctgataaaagggaggaaaggggtttttaccacagattttaaatcccaaactactactttatatctttcaggtaatttgggaatgagtctgtggatatattgaatgttcagcatcttacaaatgattcatatacagtaaaccactagggaaactcaataattgctgaatagaatgagaactatgtttccaatttaggagaacaggaaaactacagtagaaaaggcatgtaaaataataaaagaaaatcttcatagggttatattcctgcattaaaaaacaaaaggcaaacaaaccaaaaaacaaaccccaaaaaataggctcagctccctctaggccatccatgtgtgtattgcttcggtcggcagactttgctaggaattcccagttctgacggggatgcaatgagtgattgcctctgtccacaaacacttttagactgccatccagggtccagatgtcaaaaagggcttgatcaggggagaaatccactgttttagtgtaacttctgcctcctgttactgaaaatgaaaacattctctttttgtgcatgagataggggattttaaaaagtaaatgaggttgtaacataaatattactattttctttcttaaaaacaagagcaattctcagtgaggaaaactcagccagacatatcctaaagctaattaaaattatgtcaggaaataaactaattaggaca

SEQ ID NO: 36686 - DNA, 1190 bp, Bovine  19866880835257
  misc_feature (1)..(1): n is a, c, g, or t
ntacttactggatacgtagaaaagtttcccaaactactctgtcttagtcttatcagctcagacgcattgggcaccagagaggatgaattgtcagcctctgtgctgtgtgctttatgtgctaggtttccaaatataatagttggtagtttcaatatgtatgtcttatagcactgggataaactagagaaaggttagaatccttgtcccactctacctacctcagcctggataggatcataggatacaccaatctgtgaatacaactgagttgatattatttactccaatttatgggaaacttacttttatataaatcttttcttttaaaagaggggcttaatcctttgggttcttcttagatggcacatcttaaatgcatttcctttctgcatttcctaaacgcattgaatcaggtttgcgtcctggtacttctcatgcaagtgaacatttccggtgactcaaacaagacatctcagtgtcagttaggaccaattatggtctaacagcagttaagtgtaggtttcttaatgaagtggaactgtttctcctgtgcattaagtgccaagtgaaatggctgttggctaacctcaagttaatgaagtagttccacagtatcacctatgtgctaataatgtaggcatgtcagggaaaaacagagaggtcttaaatgaacatagaatgccatcaataagttaggttgaatggatgccttcctgagaatttagtttcacataaagcaggaggtcataagctcacgtggtcctatagtctggaaagatgtttgtgatgggagcttgcattagaaggtgctttcagaagcttattttctgcaaaccacaagtttgacaggacttttacatcatctattaagggtcattgggaagaaaaaagaagacatcaaagagtagttaaatcaactaaatttctgcaattgcccttgaataaaaacatagactattgtgccaactcttctaaaaatggttatgttcagtatttatcaatgacctctgggtatgtctatgagctaatagagctttccttcagaatacacttgacacttgcaaagtctaaatgatgtcaaagaagcaatacaaatatatcataaaaggctatcatcctatcgggtgaaataacctctacaggaaagaaaaactactcaaatgcaaccattcatcacgagctctctcctc

SEQ ID NO: 36687 - DNA, 1571 bp, Bovine  19866880839294
  misc_feature (1)..(1): n is a, c, g, or t
ntcttttgaagtttgagtcaatctttgtctttacttgagaaaagcataaggccaactaaatgggaaacatattttggatagatagattacttacttttggtttattatgtatcaatttaaaataatataacattattatgagtcaaaaggaaaccaatgcaaaattattcaaaccttgtacatttctagctagccaagtgttacatggacaacattttatcaactcagcttatgttaaaatctcttcccctttcttttttgattcctcttacattgtttctctcagaggtgggagtctagagacatttcatctggttttctgtattaatcttactctggcagaacctccacacaggtattgcaacgtacctacagtatgctttcacaaaggtgtacctattgcaaaaaaaaaaactaccaaggaagacttcatgtaaaacactgcctgtagagcatgaccagtggttccttttccttggatggttgtctatcctctcataattgtttatgtgcagacagttttatgtcaatcctctgattggattatgtcaattcaccatacaggtcagagagcacaagaaacctcctgccacaatctttatataatagagtctgtacctcttcacagactgctgaaataggataaaaggatttgcttttcatcataggaaaaattaaattttaattgcctgttaaaacacaaatgtcaaaagcaaatcataaaggcaaggttgcagtcctctcatacatcatgcttgagacctatttgcatgcaaatgaattcctttcttaattttaagtgtgccttttcacagacaatattaaccatttattttaaaacattatacagtgataaacctgactctgtgtatgtgtgtgtgcagcaaagacaatcaacattttttaaaatataaaacttctttcatatatgtatttcatatatgtattgagcaacagcagataattacttcagatgaatgtgactcttttcagctgaagagtaaaatcatacactatgggtaaatcagatctcaaagttatttcagccttaagttattgccctgcccaaacattattatgtttctgatataccttatctcccttgctattcctattagagtatcgtttttttggaaatgacaaggtgattttgtaggcagaagttgtggtctgctaggttctgtttggaaacacatgagagtgaagaataagagatgtattcttaagaccttagcaatgctgatgtgaacataattatttagtttcatttaattatcattcaaatatggcatgtaattgtgaaacttatggaactatgaaagtggaaatttataatgatgcaggcttaatttcattaatttaatgcataaagcacatattacacagagacagacgtcaaattaaaaactctcagactctaattagctttagaaatctcttatgtctaattgattggctgtcataattaatttaaatagtgatttcaacctggctatgatgcagacaagtcattcattaataatctttaagggaaaaatataagatacagacatatctatatatatatatgt

SEQ ID NO: 36688 - DNA, 936 bp, Bovine  19866880846209
  misc_feature (1)..(1): n is a, c, g, or t
nagttctacacagatgataatctttgagcacttaaagcacaaactagcagctgactcatgttgaatgaattcaagctaattcaagtaagtaaatttttaaataaaattaaatatttattgacattttataaatttattgacattttataaatctgcttaactatttaaaaaaatttttttttgtaagaagacatgcatgtccagttagcactttagaaacgataacagatgccttacgtcagaatcaattttagcaatttgatttgggaaagagtatctttctttgtctatagatagatagatacagatatccatgatacactgataagttcatgtatatgtacacacacacacacacacatatgttttcaaagttttaaaagaaaaaaatgtggagcactatgttggaaaaaagttgttaatgttctaagactttattttcaggctacaaagttcaaagaaaacttgtaatgaaccctggtcagggctcctctatgaacaccttgtgtcattttgggtttattcctgctttaggtatttgatagagagatacatcactcagaagttgactcaagaatcatacccattccttcgattagtttatgagttattcaggaccttggaacagaattattaattatttcattaaatattaaaacttgatttttacttatgagttttatcagccttcaagttaatgtttacgttgaagccatgaagatttttaaaaatctcatggtttcctgacttactgaagaggaactcaggcaggaatcatttgaagattcgcagagattgtctctggaaaaactgctttcctgctactaacattttcaagctttgttttttccatgccttctctgactttggcttaaaaatcttttttttttttttttcctccctttggagattcttcttggttacctctgctttttt

SEQ ID NO: 36689 - DNA, 1139 bp, Bovine  19866880906331
  misc_feature (1)..(1): n is a, c, g, or t
ncttccggatctgcctccagcttccccacaagtaaacatatgcatataccaaagtgctaatgagatagtgagcttggccctccggagagtacttcaggttttaacccacttgacatggtaatgggatcaagcttactgtcttaattgaatgtactttcactttgcaataattagcccttcacatattccagtaaacttaaaaagcttcagtaaagatatctcaaatactcatataagtagagtgttcttttcattggatttcatcaagactcttgtgtttatagatgcatttggcaaagcatagattttatttttggacttgttttccaatgctctttctcctaatatttactgtgtgatcttgagtaaggcagcactgttctaattacaagatggtaataatcttatctataatgagtttctctataggagattcactggcatagagttgacactcaatccatcgtggcttttttggttttgttttgttctttctatattctcctgagttctaacatatcacgcttcagtaagatataaaatatatgcatagctggtagaaagacactttcaagatacagtttcattgatacatatcatttccacatgtacaagaaaatagttttaaccaagcagttgcaaagggcatgtgggtggtgcttatcagtggcggttcatctagtgggaatatggtttttatagcatgtctagtagtgattgctgtagcccaccaacataatctgcttcactggtgtttacctgagacagcagaattttttatgtctctcagtatcctgaatattgcaaaagaaatcttccatattttgcatttttgttttactaccatgattcagaaattccatgtttagggtttcattggaaagagctcagtgtatttcacctggttaaggttcttgaaatcgcctcaaactgatgaaccctatggattccctgtgttcaacagaaacaccatttggccagtcacacacaaaaatatcttcatattttttccaaagacaaaaataataatgaataggtgaataatttatttctagtttacttcattaccccttgcaaacctgtccttaacatttcatcactatgattaccaagggggtgctctgggcctcttttcttat

SEQ ID NO: 36690 - DNA, 2117 bp, Bovine  19866880917915
  misc_feature (1)..(1): n is a, c, g, or t
ntggagaatgactctaactgagtggtatttcagtgtaatttatagctctctattgtaaacacaaatatgggttatatcttagcactggaaagaatgctaatggccagtcttgggtcactattattttggatgaaattagtaccagaacacttaaggaatttagatgggtacactgaatggagatgaaaggaagaacaaaaaaacaagcaaacacacacccagaaggaaaaaccggaagattaagttccagttttctttgggcattaattagttttgtattcataaacttcacagggagctagaaggaatgtataaagtaagctataattcaaacttattagcaaagttgtagaaaacagcggccagaattgtgatacttttaaaaatacaataaaccctaaaatatccctgattcctttgaacgacccaaaactactaaatatttcaattattgcacttccctagtgaaccagtggttaagaatctgcctgtagcggatgctggatccatccctggaatgggaagattccacgtgcctcagggaactaagcccgtgggtgctacaactgctgaccccacggcagcaacaatagaagccacagcaatgagaagcccacacagggcaacgagagaaagcccactggcatcagtggaagacccacccagtgcagccaaaaaaataaataaatgaactaaaataacattaaaaaaattccaattcgccccaaattcagctataatttgaacagccaaacaagaacagccaaaacaatcatgaaaaacaaattcaagggcttctagtacctgattttaagacctttcctaacagcatggtaattcagaaagcatgggcggcagaggtagacccctgctccactccagcatgcttatctttctgtggtttctcttcgctcctggagtagcttggctcccgacactgggacccgtatctctgccgctagccttgggtccacttgccctacccctccccacagtgcttagtacgcagatggggcaccctgcccatctctgcaaaataagcatggtacctgtttaggaatacaccatcaggatcacttgatttgcaacaaagtcaccaacttagtacgaagtggaaagcaaagtcttaccaataaatgataccaaactgctgttgagtataaaactaagtgcaacatttctggctcataaaatatgattaactcaacatactatcaatttaaccaactgttaataccaggagtatccgtaatgcctcccccatcattgccaacatttggtattgtcagcctcagtcctctggccttttgggtagggggcaggtgtatcacgctgtgatttccataaacttttcctaatgaggctgatcacctttcccgggctcattagccctttggatctccacttgtgtgaagtgctgtcaagtattatacccatttttctattgggtcgttcatcatttccttagggattcatcagaattattttatgtattctgaatgtgaaatatttaatgtgaccattgtccctcactctatcgaaatgtttggtcattctgacaatggaaatacagaaaagaggccagggttagcatgagaaacacgacaatgactgataatagtctgcagagcaatggcgggggggaatagattgagaaaaacaaacggctatctggttttctcgctttgcagaaatacctgcctacagttttgttgtcagagctgcttcaggtctttgctcacagccctccaaaccccacctttagctagagttaacacaaatctttaaagggtaaagaggtaagaaaggaagcaacaaacaacaaaaaccagctggcatcaagatggcaatggagctgacctccaacagaccctgagtctcattgtaagttctttctaccatattagcatattggatgtcacctaccagctgctgttactagatactaaggaccaaaacacagaaagtgggtggcaccctactccctggaaaaagccctgtcccttccccaaagaccagtgcgtaagcctacccattattgctcggtcactcagttgtgtccagctctttgagacccccatggactgaagccaaccagactcctttgtccatggaat

SEQ ID NO: 36691 - DNA, 1453 bp, Bovine  19866881096338
  misc_feature (1)..(1): n is a, c, g, or t
naaaaaatcaaggtcttggagagatgacgttccctaagttattttaaaggcaagaagttgaactacaatccagacagtgagtaaaatcttgttgacagaatttctgctgacccgttcttgccctggcacctggcgggtgagagagcacttgaaaatagcaatcagcgacccatttcctcacttctcagtggactcgagatactaattgcctgctagtcccacccaccctgcctagatcctctctccaaaggctcttttcattatacgtgttgtttatgaccaagccaaggtgtcatatttagaaatagaaaaagaagaatcaccccactcccagcactgcctgaagctttgttgagtggttaaacaatgaacaagagaaattgttgctgttaaaaattaaaaaaaaaaaacaaacagtggcttggaatttcaagacagcatttccatttgaatccatgaataatgtagttatggtaatatagctgctattcataattatgaacacttcattcctccacatgttctcatgtcacacagagcaggctggtgagatctggtctgcttctgattgtttttgctgtgttttgcattataaattatactctgctccaccctgactaccccaactatatggcggccgttggtgacattatagtcaacagcagcatgtctcctaacctcccctgtaggactgaatatgtcttgtaagttggaggttagaatttaatttcaatcaagaattagatctagtgtgccatcaaccatttgaaagataaaaagaaattttactgtgaaattatacatcatggttatttccttatatggatttttccaaagccctgagagaaattctagctatttagtagtcacatagtttgtataattttgtaacataataggaaagatcatggagcttgatatcagtcacattttgctataaatcttctacttagtagaacttgatacaatactgttgattttttttgtgagaattaaatgtcacgactcttaaatgttcttagcacataacaagcactaagtaatcaatgagtaatagtgtttgtaaccaacttaaaaatttatgattagaaataataactatcttacagcaactttgtgagtttgagtttaatgttttcttaaatctaaaactcaagaatttgcattttaatttttctacaattactctttgttttaaagtcagttcacacatttgacatcattgttcctttctgcccctgaaaactgggtaaattgatgatatgtattttctttaaatgctgtatttgaatttccagactcttcttttttttttttttttttttaattttattttatttttaaactttacataattgtattagttttgccaaacatcaaaatgaatccaccacaggtatacattgtgttccccatcctgaacccttctccctcctccctccccataccatcc

SEQ ID NO: 36692 - DNA, 848 bp, Bovine  19866881218073
  misc_feature (1)..(1): n is a, c, g, or t
naatgtttctgtacttccttcattgctctgttattttccataatgagacagagtttcagagtgtagcctctatgccctgcagatgacattcacttaccccaggtctcaagcttaacattttataaattaccacttcaaaagcaagagtcaccatctatatgcaatgggacagaggtgagtgtcatgtgacatcaaaccctatcattttcttattgtcccatttcagattttattaacaagtctgattttctttgcagggtcaagggctttattcaatcagaaaagcaaagtcatccaaaaataatgttttactatttcttttatctgctcaagaattttctttgactgtctagaacctagtacgttaattctgaatgcaacttcattgcatccaatactcataccagcttgtcacccactgcatttcaaccttgcgcactattttaatcatatcttcacacatttctgtacaaaagatcatcctgtccccatgcttccctgttgcactctccatctcctatcctcaagtgtctttcaatcaatgtcattcattcattcattcatccatttattcattcattaaaaccttataatttcattcatactttttcccaagctatacatgaatcatggaaataaataaaatattaatcatggaataaataaatatagaaagaagaataaataaagtaaagtaaaatcatgggaataaattatgactcattctcaagttcactgggaggcaggcctctacttcaataaaaaaacatcaacactggtttttagagttgaacaggaatatgcctaataagtaactgagagtgtaaatttagtagagagagggacaa

SEQ ID NO: 36693 - DNA, 1564 bp, Bovine  19866881219196
  misc_feature (1)..(1): n is a, c, g, or t
natttccaaatgattctttgatctctagagttacgtcttagaccccagtttctgtttagtgtatctgcttctgaattgatatgtaggcaacaagcccctcagacacaaaaggcagctgcaattctcagctggatgccctgcttcttactcaggctgcaggtggtgaaggttctcacctggagcacactcaggtgaacatctgccatggcatgtcagaactaagggggacacatctcctgctgttctcatctcaacatgatagcatgagatgaagcagcctattttacacctaaatgaggtggatacttacaatcttgagccaccagagtattactttgttttttcctttttccattttacctgatgagattttataaatatagttagtcttcattagtgggttggtggtggtatcttatattaaccatacagcatggtgtacttttagtgaggctttcactcagagaaaaataccatgggttcaagttctagtaggttgttgttgttgtttagttgtgactgactcttttgtgaccccatgggctgcagcccattaggctcctctgtccatgggattttccaagtaagaacactggagtgggttgcaattctcttctccaggggatcttccagacccagagatcgaaccagcgtctactgcactggcaggcagattctttaccactgagccaccaaagaattgcatgctggaaacagaggcaacttgttaaaattgatttccttactaacagaagaagactcaagttcctaccagtctcaaagagttattttgtgcaactgatgagatctcctcattcattcacttaatagttacttgctgagaatgtctgtcaggaaattcactaggttgaggtaaaaatactgggttggccaaaaatgttgttcaggttttttatacgatgttctggaaaaacctcaatgaactttttgaccaacctaaatttattttcttgggctccaaaatcactgcagccatgaaattaaaaggcatttgttccttggaagaaaagctatgaccaacctagacagcatattaaaaaacagagacattatttgctgaaaaaggtccatctactcaaagctatgatttccagtagtcatatacggatgtgagagttggactatcaagaaagctgagtgccaaagaactgtggtgttggagaagattcttgagagtcccttggattgcaaggaggtccaaccagtcagtcctaaaggaaatcagtcctgaatattcattggaaggactgatgctgaagctgaagctctaatactttggctacctgatccaaagaactgactcactggcaaacaccctgattctgggaaagactgaagtcaaaaggagaagaggatgacagaggatgagatggttggatggcatcaccgacttgatggacatgagtttgagcaagctctgggagttggtgatggacagggaagcctctcatgcttcagtccatggcgttgcagagtcaaatatgactgagcgactgaactgaactgagctgaataataactaatacctctgtagtactgggta

SEQ ID NO: 36694 - DNA, 845 bp, Bovine  19866881287362
  misc_feature (1)..(1): n is a, c, g, or t
ntttaaaaaaaaaaaaaacacagtttactgtatcttttcttaggacctccacattagagtttaattatatgtaaactaggattttccaaacttattttggtccttttaatatcccctcaaactggggttccaaagagcataatcttttaagtgcttgactgcaaagtgcattatttggtttttgcatctcataaaagtatgtaaagtagaaaaatgagaggaaataactaaattttcccatgcctcatttcccccatctcctaaattaaattaatataatctgtcatatttctttctgtctgtgaccttggagagtttccagtagaaaagacctgtgaaaagttttttatattttatatattcagttactctttcagataggcaaatgaggtaaagaaatgctataccttatctgtaaagcttccatttaggtcttcttaaatcatgaatgattgttcagacagctttctatcagcatgattttgtcagggaaactgaggcagagttatttgtatgcttctagtcactagagaatgaattgatacaagaaatatcatctccagagactattggtgaactccaagtatcactgtaatttgaagtgtgtccaaaaaaatgaaaacaaatgtgataccaaactgatttgtcaaagaaatctttaaaaaatcctgttgcttatctggttttatgtcctttaagtagcagaattatgaccaacaaattactttatcaagatgataccctaccttgttgaaactgaatcttgaaatcactctccttttacttcaagactgaaacctcacattacaggtctctgtcttgtttgaggggggaaaaaaaatcta

SEQ ID NO: 36695 - DNA, 1076 bp, Bovine  19866881608431
  misc_feature (1)..(1): n is a, c, g, or t
ngcttttttttttttttttgagaaacagagcatgctgctgctaagtaacttcagttgtgtccaactctgtgcaaccccagagacggcagcccaccaggctcccccatccctgggattctccaggcaagaacactggagtgggttgccatttccttctccaatgcatgaaagtgaagttgctcagtcgtgtctgactcttagcgaccccatggactgcagtgaaccaggctcctccatccatgggattttccaggcaagagtactgaagtgggttgccattaccttctccaaatacagcatagaatacggaaataaagacataggagaaagttcactattaattattcattcattaaattagtttaagagtgtttttgaaatgttgttttgatccccgggtaacccttgaagtctgcatcactaacctagaatatggtatgtgcatcaaggaatctgctagtgagcttagaagtatgtttgaattctcaaggcaaggaatttgagaaaggaaaactaaggccaggggctagggtgtttagtagggttagtgaatttatttagtactaagcactttatgattattttccctcatttaattctcacagtaaagtacagagataagcatcattagcaccccttttacatttaagtaaaccaaagctcaaagaggttaagaaacttgctctgagtgacatagatagtaaccaggtagcaagttaagattcaaggctcttttttttccactgaaaatttagaaaaagtttaatttttcatataagactgatatactctttatattctctagtcttagcttactacattgtgtctcaaactctttaaacattaattcacctggaaagccaagcatagcgtcttgtactcagttgacaatcaataatcatgactgatagtaatgtttctgaatgtggttgagtagaattttcctttgtcattcatccttttcgttagagagatccagtgcttctgttttaatggtttacatgcatgaagacaaaaaactctgcttagggcaggaggaggaagggaaatggaaggaagaaagcagaggagaaaga

SEQ ID NO: 36696 - DNA, 964 bp, Bovine  19866881620955
  misc_feature (1)..(1): n is a, c, g, or t
nactgagttctaattgacatcctttctagttggatggttggaactattccctcagaaaataaggctcgggttaatctaagtcactcgaatgttcttttctccaataatctagatggcttttttctgtattcctctggtaaaatggagatttttctaactggctatggagggacagcaatattaagataaactcattttgagttttataggttttatgtgataattttgttcctatctattagcatttctaaccaaccagatctgtctctccgtagttataaactcagttaaccacagtaccacattctatcacattaatctggcaaacctatccttttgcccattgtttagtcaagtgagctttgaaagaggctttaactgatggtattgtatcatttatccacactgagatccattcagagctgcacaaaagtcaagactttattaaagaatcatcagaaaacttaaagtttttatatgcagctttaattttgaatgaattctgtataaaactaaaaacaaaaagggatgccttcctttccaagatcaaaataaattagtttagaagaataggtgatttaatgattaaagcatggatttttttaactggtaatctcagaaaactaaactccaaattaattataaaatgtttcagttcaattcagttcagtcattcaatcagtctgactctttgcgaccccatggactgcagtatgccaggcctccctgtccatcagcaactcccagagtttactcaaactcacgtccattgagtcggtgatgccatccaagcatctcatcctctgttgtccccttttcctccctccttcaatctttcccagcatcagggtcttttcaaatgagtaataagaatcagagagtttactaaaatactttcttttcagtctcttctgtagacttgatgcatatagggatagatgttaagaaaaaaatcacacagaga

SEQ ID NO: 36697 - DNA, 672 bp, Bovine  19866881947190
  misc_feature (1)..(1): n is a, c, g, or t
ntaaatcaaatttcttcctggagtgcaaactaataataatcatcactataaaggagtctgttgtgtttgggacctaaagtgctatctggttgttatggcaacccagatttgaaaagggatgcctggttgtgaggggcaggcaccaacatccccaaaccaattcttcatccaagcttctcccaacagaataatttctagtcattcccaaaatgtatgcagagtgacggattgtcagctctataaactagtctcactcggtaaagggaccaccttttcatcatagaaggtgatgttttcacttgactaatgttgacaaacagaaagaggctaagtgtatggtactcattaaggccatatatatcagcagtgcaaattgatattaaagagactatggatgaatctggttgggttcctcttcaaatatgttctgatctctctccatccttcaaacagaaatcatgactctcttatctggacagtattggtccatcataaataattgtatcaaagctggtatgacattatttcagttatccttatcaagatatttctttttttttctttttttttttaatttaaaaaaccaaatatcaaaatgaatccaccacaggtatacatggtgttccccatcctgaaccctcctccctcctccctccccataccatccctctg

SEQ ID NO: 36698 - DNA, 1590 bp, Bovine  19866882034958
  misc_feature (1)..(1): n is a, c, g, or t
ncattggagaaggaaatggcaacccactccatgttcttgcctggagaatcccagggacgggggagcctggtgggctgccgtctgtggggtcacacagagtcggacacgactgaagtgacttagcagcagcagcagcagcacatgtgaagggttctaaaaatatacgttctttccctgccttctacagtctcagcagagcatacataccttgcagtctcccatcctatggagactcagtagtgatcttcatgtcctcctggaatccaagttctctgccttcttccctagaatgtgaccttaacagcaacagtaactattgtttactggatgaactctatgtgcacaaatgtgtgtatatgtgtgtcatggtactaaaccttttttgtgttactttatttaaaattttcaatatccctcacagtaggtactgttaacatttccaggtgtggaaactgtgggttcaggggttacacaatgcagctcaagtcatgcagtagtgaggggagtagccaaaacttggatcatgcaatataatcccagtacccatctctcaacccctacattgctctttacactgggtggatgtagttcatttttgacaaccaaagttacaaagaggcatgataaaaatggaggtcacggggtggtcccaggaaacaaataatgctacatgagtattcctgctaacttactttgagagtgattctgctagagttggcacagaaaaaaaattttttttgcatgtgcagaactctgaatgaaactaacctaagattacctgattgatggtggagagagttttatgtgcagcaagaaagaatatggaagcttgtggcatctcatcagctctctaatttcctacattaagcagcacaaagtgattagactgaaaaggcactttaccattcaatggagagaaagctgcttgattttatttccagagaaattagccccttcttactccctttttgtctttagaaaatagaaggtgaagtaagcactatgttgataggctttgcaaaaagtctgtggcacagagacaacaagaactaaatttaaatcctatataatatgacagatcttgtatctgttttaacaaaaacaacaactatcattcaacaatgttacatgtgctgtgacaagcttcatatcaacacttaccagcaccatctcagttatgtgtcactacttcctactgagatgtgtgtgattatctttattttcataggaggggatggaggcactataattaaacaaatacctgaagtcaagtttgagttttgaagatgagatttgtacccagacaacttaatcctagtgtctaggccattaacccctacatcccaccaacagaagtgtgaccagcagatgggagagagggtggaagcagagattgggagaggagcattgtcattctcagagcagtggtaacattggagattggggttggaacaaaagatcattatctgatggtttatagaccttccatgtggattacgggcctttgactgatttttgttctatataaggaagcctttcataacatatggtggtatttcaatcattaagtcatgtctgacacttctgcta

SEQ ID NO: 36699 - DNA, 688 bp, Bovine  19866882039190
  misc_feature (1)..(1): n is a, c, g, or t
natttggcagcttctcttatatagaataatgatagaagagctccatctcttctctgtcatttatgttaaaaaatggtaatccaagcgaatctatattcctaatgtttgttgtaaccccattagttctcagacaaattcttagcaaaattcttgcctaattattaccactttacctgattttaatctcatattttaaataataaagaagtctcaatctgttatattttaagatgacctagtaatgccgtttttttcctcctttaagcatttcttaagcacataacttgtcacttctgtgctaatttgctgtaacactcgttgataagtggacattaattaatgctaaattacaatggaatttttatggaattacaggtgacatccgcatcagcaccaaatgagttcatcatgattaaacttattaccatttctaattaaccttgagagcccctggatgttaactgcacacaaggcaagtgtatatgcagcctgcagctcccattgaaaacaaactttacacattatataacctttaaaataacctaagaatagcataggacacatttgtactcattgcaaaggatcataaaataaaataccaggaataatctgaagactttgagcaactaagtttttgcccttaaaacagaagtcagaaaagtgtcttccacaaattgaatttgtttga

SEQ ID NO: 36700 - DNA, 1282 bp, Bovine  19866880357907
  misc_feature (1)..(1): n is a, c, g, or t
ntgagtcattggtaagagcttggaaatcattgtcatattaatttttggtttaattgggtttgaaatgtggtacaaaatgtcaagaatttatttttaatagagagtataatctcttctgtagagatcaatgatggtggctacacattaacattttatttcctactgtcctttctttcagaactaaaaatgagtttatcatctaaggataaagaaagaactttgaaggtattgaaagtctctctgaaatagaattttcaaaaggacagcattttattcttgtttactgaatcatgaaatatgttcctttgtttataagattagagacaatttgggaaggagacagggcaagcatagtgattgcagatgtgtgcttagttgtataaaaataaatctccaattagtgtttttaatcccattccttcatagagaatattggttatgtgagttattagggaaagtgaaagtgttagtctctcagtcatatatgactgtttgcaaccccatgaactgtagcccaccaggctcctctgtccatggaattcttcaggtaagaatactggaaaaggtagccattcccttctccagggactcttttcaacaccggaattgaacccaggtctcctgcacttaggcagattctttaccatttgagccaacaaggaaacacaggagttactaaaaaaccctcatttaactaaaaaccagttctgattttattatcaatacaaagaaccctatgaaatgtctacatttatttatgctttagagaaactagtagtttacaacattaagtagtagtgttaattctgaggtcccataacagcagtttctacatgtttgaaagagttaactgcaaataagctgttagcatttgaagggcctttattcagtgaaagtagatgacaattgtcctgagtgtaggttgaagtcatatggagatgtttgtatgtgttatttatagccatgatggtaacaaaatccatgaagaactcaaaagaaaatcccactataacattgaagtgttttattttatttatgttactgatgcctgagggctcatgaaaacaaagtgagaactaactgaagttacttgaaaatttctttacctttggaatgcagtctttttaagtcaagaatgttcagttcaactctggaagcattctgttaataacacacacttgttaagcatgtgatatatcctagacagcgctcttctcattgggcaaacaagtggtatacaccactgcggttgcatgggactcagcttatggggagaaaaaca

SEQ ID NO: 36701 - DNA, 1588 bp, Bovine  19866880390675
  misc_feature (1)..(1): n is a, c, g, or t
ngtgacaatatacagccttgataagtgctattgtgcattagtgtgaacattctttggcattgccttactttggagttggaatgaaaactgacattttccagtcctgtggccactgctgagttttccaaatttgctgtcatattgagtgcagcactttcatggcatcattttttaggatttgaaatagctcaactggaattccatcacctccactagcattgtttgtagtgaggcttcctaaggccctattgactccactttccaggatgtctggctctaggtgagtgatcacacgatcatggttatctgggtcatgaagatcttttttgtacagttcttctggttattcttgctaccttttcttagtatcttctgcttctttaggtccatacaatttctgtcctttattgtgcccatctttgcatgaaatgttcccttggtatctcaaattttcttgaagagatgaagcaaagttagaaaaaaaatgtgcaccatttgagacacactagcaaattgaactccagaatgtactcacagagattaattaacacaccagattgtcttcattatagccaacattgctttttttttgttttttaagtttgctgatttagtagttaaagtaaaaactgacctcacaatgacgagcattctctcttacacctgctgctttttgatatgatgttctgtacttttcccaaattattttgtcaaaaagtaagtggaagcctcctattgtttgtgtacatttctcatttgaaacaagaattattgttcaattatatcatcatccattgagaatagtcctctgagcaatttataaccagggagtcctcattatctgtaaaagccgtttgtaatcaatttagttaaatgcttcagtgaagctgaaagaattgcctcctaaatatttatcatgattacacgccaagagtataatgtatacatagctaaagcatgagtttcagaataacaactctgagcagacctgtctctctaaatcttagcatcaatcagtcagtgatgaccacaaatttaattagtatcagttgatattgactaaataatataaacagtaaattacaatgattcaattttgagtaatgagtagcggaagttttctctccttccaaatcataaagtgcaaagttaagcccatgtgatttacagctgaaaccactttcctattagttcaacatttaaatagtttttcatgactgctcctgtttatctctgtatgcctatgatacaagtatatgttgggagacaggcaaagtgtgtctcagaatttttctaccctatgcctatagaaaatctgaataatcttgatctctcttttgaattctatattcaattacctagtggctgttcttaagagaattaaattccaaatattcaaagttgaattttcatctttccactcacaactttgcttatgcctagtattccctatctcactgagtggcttcaccatcttcctaactgcttaattcagaacccagaagaatgatacaaaaaagatcttcatgacccagataaccatgatgggggagatccctcacctagagccagacatcctgggagtttg

SEQ ID NO: 36702 - DNA, 1867 bp, Bovine  19866880400474
  misc_feature (1)..(1): n is a, c, g, or t
naataaggaaacacttgttgagaacctgctgtaaacttctaaaacttatacacgctcattataaaaagtgaaagtgccaaattcccttcctcattagcacttcagtgtgtatgcatacataagcacgttatgtttctcgtgtttaagaaggaatcatattgtacatagtattctgtgacttgtttcttcctccctttgtcttactaatatagtatagacatttctccttgttcatcttcccatttttgttggaggccatatatacacatggggcttcccttgtggctcagctggtaaaaaatccacctgcaatgtgggagacctgggttcgatccctgggttgggaagatcccctggagaagggaaaggctacccactccagtattctggcctggagaattccatggactgtatagtccatgggatcacaaagagtcgaactcaactgagtgactttcacatcacacatatatacatacacatgtgtatacatacacatgcgtatataatgtgtatgtgtacatgtgtgagcatgtgtatatatagtagctcatttcttattaaagactgttaattctgtgttctaaataagtcctctattaaaagacatattttctagtttttcgctgccaaaaacatggttaataattagcatatcttgttttcagtttcactaatatgaatttcaggtaccagagtgaatagatgatgtttacatacatgtctattaaattttgttatgaaaagtagaaatgcacattggatatacattatggttatattgaataatattttaaataaataaaattgaacatttaaattattgatatttgaggtactttgcttaagatgtatgttatatgctcacttataattgtctacactaattttttatgcctttgtagcttaatatcttgtcttattacttcaggatactttatccttatgaactttttagtgtgtaaaaataacgggtaaacatctggttttcccctaaaaagataatagaaggagatagttcataagaaattatgttaaggctacagatagcttttgctatctttctatatggtattttcttcttaatgacttttttaagagtagtcagtgaattttaaataatatttctctctttatgcttcatctgaaaagttatagaatgctttaatggagtgttttcatgtaacagtttaagaacagtgtcataaagttttacccattcttgaaatccaataagtaaacccttgcatttacaaaattgactgaagtgctaaaatatttcccataaggtttatttaattgaactttctttgtgttgttgagcctcattatttgtacattctggtgagtgaatgtgtgctgtctcaaatttacttgtaaattcaaaatcacttcttacaacagttgcatagccatttagagacatgcacggagctgcaaaaaactggagtttgctgatgcgagcattcaacctgtggttgattaggtggttcttgtcttcttgttttctgctctcataaacaaatgtcctcttggcactctacttaatgccacattttttgcatttcggtgctttttgttggtgataatattgtttaaaatggcccccaaacatagtgctgaagttttgtctataatgttctgaaatgcaaaaaagctgtgatgtgcattatggagaaaatatacatagtatttttgctcaggcatgaattacagtgcttttggcagtgaacttagtgttaatgaattatcaatatatatcaaataatgtgtctttaaatagaaacacacagaaaacaaggttagatattgatcagttgttgaaaatgttgtgatcagaggcttataggaacttaaccctttgttt

SEQ ID NO: 36703 - DNA, 1423 bp, Bovine  19866880744203
  misc_feature (1)..(1): n is a, c, g, or t
nggggttcccgtgttctccgtgggtttcattctaggaccagcaggtatccaaggcatatgcttcttagagagctaataagggcattagaaagcaagcagaagtgcacaatatttgttaagacctggtaagacctggagaagggaatggccatgcactccagtattcttgcctggagaattccatggacagaagagcctggttggctatagatcatggggttgcaaagagtcggatacgactggagtgaagtagcatgcatggcaagacaaaccatactgcacttgctgaaacaagtcaaaactaacatgcatgggagagggcactgtatttcacagactcaaggtccctgcaaggtcatatgcagaggagagaactaaagaatagcaaacagtattcccatgtactcacagcaggacaaatcccatagattgaccaaatctgtggacacacgtggagtggcatatatagtacgtaatgagttaaagatagatgatcttgaatcatctagaaaacattgcataatgttcaataattttagttctttagcaaatcaaaatgtttttaaaacattttaacaccaaaaacgattgtctctaatttcaccaaacaattattttttttgttatgatgccatataattgatactattgtatttaattaaaaactccttctagtatcctatttaagactataattcctatactccataatcatattgttcagagttttctctatattcacactaaaactgtagtagagctgaactttaaaaaaagagatactttcttaattttaattttatctaaggaaattctagaaatatattctaaaataaggaaagcataagcattcaaaactgcccatacttctactccaccatactgaaacaacatttaatatgcttttaacatgtttcttttcctttgaacttgtaactattggagaaaatcatcaagaagacctgactgccttctgatgcttgactgtgacctggggaattgagtctcctcacctgctccttgtccttggattgtaagttctgtccgcattcctgtcttggagttgcttttgggacatagccatgaaagagcaatatgttgttgaagccatctggatggtttatgtgaccgaatccagtatttagacctctgtataaacttttatatacagattctgattggcaagtgccaagatatactcgtcttgcaccggcccaaaacaaacctcttctgttcgtcagttcccttgcttattaaacctgacacctacaagtctaaaatgatctgcctgtttcttctgtctctacttgcctcccgtgtgtaggggccagttcccacctggggaactcccaaggttgtcaaccaggagtaacagaacaacattttcaaagattgtagccataactttcactctaataataat

SEQ ID NO: 36704 - DNA, 753 bp, Bovine  19866880767100
  misc_feature (1)..(1): n is a, c, g, or t
nggtgcccattgccttctccagcaagctatacatagatatgataaaattatttttctgtgtattctttagcaggtattgggaactgatatccaggttattaattattcactcctcatcaaaaaactataaatttttacatgtatcttattcctggtttggaaaaataaaatgaaagtaaatttacatattctccctcttagcaatttcatttctcaataaatggttataatctggatcttgacatagaagccattaataaatactttgaaaagaataggaaataaaatagcaaaattgagattatcagattagctctatcatggattttctttgtgacagaagtcaaggaatttaatctttctgattctcagattttccaccttaaaatggagataatttttctatcatatattaggaattattattaatataaaactaaaaagacatataaaaacattttgaatataactattgtttatacattatgtttcaagatttggagtaggtaaaattttcatttgcttctctttatgaaaatgtctcaggagtctagataaagaagaaaaacaaagaacaagaggctcatcactcccataagaagtcaccccttcatcagaagagggggaaatacctcctgaaacacaacgtgatgaaagactctttctaaagctctgtttagaataccatctggtcccaacatgcttcataaaacacagagaggatgatggggtttggcacatctataactctct

SEQ ID NO: 36705 - DNA, 971 bp, Bovine  19866880829927
  misc_feature (1)..(1): n is a, c, g, or t
ntagcactggcagaaagcattcagagactgagtaggccatctggtgttctctagcattgtcccaaagtagagaaaataaaagatttacaacagtttctctttcccattttaatttcttttttttttcttctaaaagtaatctcatttttatttttcaattggccactacattgttttttattttattttatttttaaactttacaatattgtattagttttgcaacacaggtgacatttaaaccactcttctagtatacacatcttttggaagacattcaattcatcacgactataaatcacttactcatcacaccacctcccagtgtttctctccccccacctctcttttttggtgtcagtgctattaacctatatcttatctgtaccacattttatgaactgttagaaatttttaaaaattatcaatgtctcaaaatcattctaaggaatttttttaaatgatgagtgagtgagtgaaagtcaccaagtcgtgtccaactctttgtgaccccatggactatacagtccatgaaattctccaggccagaatactggaataggcagccattcccctctccaggggaatcttcctaatccagggatcaaacccaggtctcccacattacagggagattctttatcagctgagccacaagagaagcccttaaaatgatgaatgttcattaaataaaactctttttatctataagcacaatatgatatattcactcacttaatctggaaaataacaggcaatttgaagatgatagttgaaaactacaaaaagaagaaaacacatactggaatttaattccatttctcctataagctgaatttgttattaagttgataaaattcaaagatgtattttgtatggtagggaaatcagtgccaacagtcaaaaaatgttttaacagtaaagggtaggaaatgacattgtgaagtacctctctgtgctagagaaacaaa

SEQ ID NO: 36706 - DNA, 2276 bp, Bovine  19866881063654
  misc_feature (1)..(1): n is a, c, g, or t
ntgtccgattctgtgtgacccatagatggcaggcagcccaccaggctcccccgtccctggaatcctccaggcaagaacactggagtgcgttgccatttccttctccaatgcatttaaggaggttctcaaacatgagaatctcagtgttggtggaaataaacctctgaatgcttagtgaaaatcaccgagaagacaactgccctctccctgggaatccaaacaggctgacacatgatactttgcttctccattcattcgaagtggtcttatcacagctatgagaggaaagcaaagtggctttctatccctggggctgtgcagacatcaggaaaattttgatacttaacatcaattcaatgtgtgcatctttttagtttcaagatgtgaattctcaaaagcagaagggtggagaacactttctaggaaattttctcaaggcagcatagacttatcacctaccagcctagagaatgaattaacatcagtaacagtattcacaggacattcacactcttggtccctgaggatatttccctgcccaaatggccatgatgacaaattttatgatctcagaaacttctaacaatataggtataatagtttttattttaagaattaggcagtctttgaaataaattttctcctgtagacaacatgaaagaagtccattaatatgatattctctcttatatataggaaaatattgttctgttgttatactagcgttcatcacatatattggcatccactgcacagaacattttattgctatatgctgtcagaaaggcaaaaagattaaatcattctctcccattatttcaattttgagcagagctctcataaggaatgttctttgagatactgacccttctttgagagtcagtcaggtatgttgagatagttctttcacatgtttggatcacatgagcactaattagtttactaaaagcaattctatgaatggaattactctgatttggatgattaattgaagctcccacaagtaattgactcctggtgaacagctcacatgcttggaagaactggatcctctacttagggtaaggattataaaacaatccagagacatatagcactattacaccatcaaaaagttgagaccaatgcaaaagtacaatttaaccctttattttctttgataaaccatattcactattgataaagtaaaaagcacaggtaaaggatgaactttaccaaaaaaaacccaaatatatatatatatatatatatatatatatatatatatctttgtaatattcataattggttgaatagcttttatatgaaagcttctttagttatccccaaactgaaagatattcaaccagtcatgaagattgcagttggaatattcttccataagtacaatattgtgaattaagtgaagcaggtatcaagagagaaataaaaaaaaagattatttcaccaccatacctggacatcttcctaggattttcagattaccttcctagtcaagtgtaggatttttataagccttcttgaagtttgtatataaaaataccataagactcaataaatttatgttgctgctgctgctgctaagtcgcttcagtcgtgtccgactctgtgcgaccccatagtctgaactaatttatcctcttaaataatttgataaaaccaaaaagtcaagtggtaacaacttaaataaagatgaaatatgagttatattttctttttgctataaagtggaaaatggcacgcaaaatccatgttaaatagaaatagttcattatttgtatgcaaactaaaatagctgtattaacattaagtgtgaatttctatattcattttttatatagctgaagtattatgtatgatgaatagttgtcacatgcacacatttcattcttctacaattctagaatttatgaccaataaaaattaataaagaattagatttatttttggaaataattaaatatgtgattgcataggttctaggcttcagtggtcattcacctatttgaaaaataagaatctcaataacaatttattataaaaataagaatagctgtgtaggagaagtttcaatgtattctaaagtaactaacattgctagaatattctagtacatgattcttactgaatcatgtcaagtatacatgattcttctccctaggcttcatattgtatttgtttatattttggctattgtcatcatatgtcagtttgtactgagttagcaggattcccctcagaaagtcaaacctgaatattatttttcttatcagaga

SEQ ID NO: 36707 - DNA, 1557 bp, Bovine  19866881079697
  misc_feature (1)..(1): n is a, c, g, or t
nttgtaattccttttctgtgagcgatctgttcatagcctttgctcactttctagggtgaagtgtttttaatgtaaataatcataataattaccccttgatttaaatgcatgaaatatatttttaatggattgaactgatagtacaaacttctgcatttgtggactgagccattggtaacttttaatgatatcaattgatgggcatcatatgtaatcattttatgcatacaggtatatagccttgggccctgaattaatatgtagttactgtttgtcataaacacagcagtaggcatctttatgacattcattttcaatttactttttatatgactgtgaatgtttcaaattctacattgatgacatttgtcaacttatattctgagaatgtttgagacaatctatgaaaactttttgcctggagatagaagcattaccaaatgatataataaatgcttggtgatatacataaaatgttgtgtgaccaaagtctcataataagcatgcttttagggaaagtaaacacagttcttagttttatttgttaacttcaacatgttgaatttttcactcttacagctgagataaaaatatttgtgatatatcaccatatagtttacatattatattttaatatctatagattttgagcatatttcaacagatgcctaataataatgattagagagaatttttaaatgtcttctaaagtgtgtattaaggattccccggtagaacagctggtaaagaatccacctgcaatgcaggacaccccagttcaattcctgggtcaggaagatcagttggagaagggataggctacccattccagtattcttcggcttcccagtggctcagctgttaaagaatctgcctgctatgagggagatctggattcagtccctgggttgggaagatcccctggagatgggaacagctacccactccagtattctggcctggagaattccatgtactgtatagtccatggggttgcaaagaatagtctgactacacttatattaggttataaaaatgattcatgtataattactacagtatatagcacagtggcaaaaaaataaatctggatacattaaaaagaatcatttcactactttatacctatgctacattgtctagaaacttttcttatatatttttgcaaagtgtgtttaacacatttatccagtttggctaaatatgaatggcagatgttcctatctgaattcttttggcttctaaaatattaacttattaactagaaggaattttttaaaatactagacaattctacactgcataaccttactgttattctaaattgctaacaaatttatcgttaaaagcaatatttaatagttgacaaaaatactacacaaatttatacaatagtggacccaaatcagtgtttcttgcaaaactgaagctcatggcctttgttattctttcacaggatacacccagacaaatgttggggaagctctggcagctgtgcatggctctgaattcagtcaaacaactatctgccgattgaaaacctgcagctcagcttca

SEQ ID NO: 36708 - DNA, 809 bp, Bovine  19866881112552
  misc_feature (1)..(1): n is a, c, g, or t
naaacactcaccacatgaagacatagagagtctctctctcttactctctccctctaccctcttaaaaggagagactagggaattatttgacaagatcacacaatggaaaaagcatcagcatacagtcatacttgttccttgcctcagagtgttggccattcacttgtggactataaagattgaaatagtggacatcacacccctcctggatgtgttgaggttgactctttgtgcaggttgggctccttagctcaggagtgttgctattccctctgaagttccatgatgagacaaaaaagtaacgagcagccctttaaaatccctgctggtttgttaaatgaggatagcagagcaaaggcaacactctgggatacaagacaaatcctgaagcctgcgtctatggtaaaatccctactaaatcccaaatgatgagagaaactatgcttaaaaatatcagaggaaaggttaagaaaccagacaatgagtgcatttgttgttgccacagatatctcctcaaatattccatacttgtatgttattatttcatcattttatgctattccaggagaatctgccagggtggtagcacctaggtgtctttgttttactactgcacacagcaaactctcatttccttttaaaatagagctaagtcccagctgtggcacaacagctcccttgaaaaatagtcctataaaaggacttttacaaatcatgggaagaaatatatttattttctgtaaataaactagcaaaacaacatagccacacactggagaaatgcaggtaagaagaataaaagatttcag

SEQ ID NO: 36709 - DNA, 1239 bp, Bovine  19866881148533
  misc_feature (1)..(1): n is a, c, g, or t
nacaccttaattcaatgatacttgtagctatttataaatgaagttaagttatatgctggactcaccctttataaacctctaggtactcagtgatcaatgaatttattttttgaccagcttcatcattagaattgttcaattaattgtgtgcatgcagaaaatctacaagctcatggtttcaataccagcctaaatacattgcacattgtcacagagtttttgtaagcctctgaatttaatggagttttatgatcatacccaataaaaggctagtggctctgccacttcctctttgatggaagaaatttgttaggtgaatgagcagaagtaaaagtaaagacccatgaagagttgatttctgtattcattgctccagcaaaagacaattttatagtaccatgttatacgagaattttaagagactattctctggtcagttctttgcaaagtctacattgggtgaaacctgcaagaaaactgcagcttccagttgtgtgcgtgtgctcagtcactcagtcatgtctgacacttggcaacctcatggactgtagcccaccaaggttaaaactggtcagtcacaccaacccagaacactggatataattaatgaaggctctagtccactgtgatgattcatgaacttgggaaaaatgtcaacccctagttttagcatactcatcagagaactgcccccaaatgagaacaaattattagcatataactttaagaatagcataaatgtgtacatttgaaatgaaacgaatgtgtcttgaatcctcatacattttcttaccagtcccgtctattttgtctttgatccaaactcctaaatgtttgtgcacatgttttgtggtgacaatgctgggaaacacagcaacaggacttcattattctgttccttcctgtcattatggaaaccagtcatcgacctatggcgtgatggcaggtaagaaaaattgtctttacatgtaagattgagtttggggacgcttggatgcattttctgggtcgaagggaatcttgaccagagtgtatcatgaaattcagatctcctaaccttagaaattgctgctaaatccaccacttactataatggtccctgatctgtaacgccttcagagatcataatagttatacctgatcactgctgttctccacatgcctgaaatgaactgctatgcttcttaacgcctgtgtttgctttgtatatttttattctaattctctgttgccaaactg

SEQ ID NO: 36710 - DNA, 956 bp, Bovine  19866881297319
  misc_feature (1)..(1): n is a, c, g, or t
naacataattcgaaatttatttttcttaatcaatgtgctttttaaaaagattcttagagtatattcttatatactcttatgtatatcaaagtttaaaaaaggatattctatacagttggcaaacagtaaatggtagagctgaaaattcctaatttgtattcacataatccactagaaggagaggcaggagagcagatattaatgatgctacacacataacaaaggtaaccacgaaggttacacgaaatagtctggtttatagttctcccaggttagttattcctggaccctcatacactcttgcaattgtcacgggatggaaaacaaaccatatggtcaaactccagattgtgaactatgatcattcatgaacaatcagaattagccctcattcttagtgagtttgggaaattcaaaaagagtggactccatccagtttactcagggtacttcagtcaagtaggtggctacaagacacttaagtcagaaagacaaacagggatatatttggatgacttgacccaaccatatacaaatacaatctctaagaataacgggatcctacagctagatcctcaaggcagggattctctctgctgacatcagtttagaaataagcattatttattacactatataaatgatactaataatgttgctgatgatatcttccaattaaaggttgcactcactgctgtgtaagcctactcctgctgagaaatggcccacaggttaagtcaagtacaaatactacagtgtgccaaccaagaagaatgaaagcacaacttcaaaataattatggcaaaaagccatttcctattgtcactcagtgttttaaaggtttttataatacaataaaaacataccctagtgatttgttgtttcacaatatatatcctctttcacaactgaaaaacttattagatatacagtctatcatcttaatggtaagaaag

SEQ ID NO: 36711 - DNA, 1459 bp, Bovine  19866881317939
  misc_feature (1)..(1): n is a, c, g, or t
naacccaagttgtaataggtagaggagtaatgttgagatgatagatagaaaatgactagcatagaaagaaaatgactaacgaaaaaccaaagcatgaaatgtgggcatctttctctaaaaacaaaccgaaaatacaaggaaaagaaccataatcaagtactgaaaagacaaatcaccagttgccttccagaaagattttctggcataaaatatgcttttcccactattccaagaggacatttagtactcatcattcctatctgtctcattgaattttaaagatacaggttgtgcagtatcctgccagagtcaaaataacactgaccttgatcattttcatcacagtgaactcactgtcttctgtggacagccctttcaatggtctgatatttctacaccggtcccagtttcactctctggaggtattatcacaaaggtagagtcagtgtagagcaggagaaaacaaatttggtttagaagaatcttagatttaacctgatatatttaaaatggatattttagtgcaagaagctattactattgtttagttctgtttggcaattttttaaaaatattcaactgaattctcaagcttaaggggaaatggctttctttaaatagtaaaaacaaatattacaaggaatatgtgcatttaaaatatttaaatatcctttatatggattaaacttgaaaaaaagagaccttcaaaatgttggtaaacgctagcatcagctatggtagcaattaaatattacttatattttgcaaactttaaatactgttattttacaaagagcacagttttgcatagaaataatataaaattaaaacaatagctcattgttaaacttccattctaaggataccacacataattgagttacattaactctcaggaaataggacccagtggtgacatcctgattaccattctcaattaacactgctacattttgtaatgcctatgtttaatgtcaaagcattaagaggcttccaggataagaaatctattagtgtttcaaaaatatgttccaaaccagagagactagaaacagaatgaaaccatatgtcatttgcactaaggtgataatttcagcaatatgaattaatcaagtttctcaagggaagactataatttaaaaagtagtaaagaaattcagtgttgaatactaggctgaatcagcttatttaagatgcaaaacaacaaatctgagaagatttgagaagtattacacatgggagagagaacatttccatatttctaactgccacacatgtctattcaaatcaaacaatgacctttcccggcgttcttgtttattaatcatgaccctcacagggccaggcaaaaagtgtgctctcaataaatggtttttgaaaagaacagcttaaagaaaaaaaaagtgggggggggggaccttcaaaatttaggcttataatggaaagaagactgaagcaa

SEQ ID NO: 36712 - DNA, 864 bp, Bovine  19866881457249
  misc_feature (1)..(1): n is a, c, g, or t
ncagaaatttaaaccagagttaccagatatcccgtatatatatatatacaccacatgtatatatatataaagtcctggctcaggaatcttccttaactccttctacaaatgtcctcatattatgaacattgtaagactcaataaggtgcctgggtgggaaagaacatttttgtttagattcatttgcatcagtcacttaaagattattttaaagtctttgggtaaattataataagtagtgctttcctaagactaaatccaagactattataacaacttttctgagaaacattagagaaatatgagagagactaaatgggtgatgtatactgaagcttaaaaattgacggtaatttttaaagcctatttatttttaaagggccataagaaaaattcatcaatggaaaataaaataaaaagcaactgagttgtgcagtaaactctgaaagaaaaggatgaagaggtagctaattagttttctagttgactcatataaactagagtttactcatggctttataatacaagaagcatctccagtaatattcttctttagcccctgaattaggaaatcacaagacccatggttcataaatccagtcagatcatcatggttactgtgtgtcttgtgtccttctgtggcattgtaaacttcttatcctgtatgataatgatggaaccatgcatatttcatggtcacagtgctacttactgagcatgagtcacccggagctcactgccaaaagtaacttgaaactatgacagcaatataatttttcatttaatcttgatttgtaggatattataaaatggcaaaaaaaaataaagaatagaaatcgttctagaactgtcacttctcaaggg

SEQ ID NO: 36713 - DNA, 1474 bp, Bovine  19866881525562
  misc_feature (1)..(1): n is a, c, g, or t
nctatggtttttcctgtggtcatgtatgaatgtgaaagttggactatgaagaaagctgagcactgaagaattgatgcttttgaactgtggtgttggagaagactcttgagagtcccttggactgcaaggagatccaacagtccattctgaagattagccctgggtgctctttggaaggaatgatgctaaagctgaaactccagtactttggccacctcgtgtgaagagttgactcattggaaaagactctgatgctgagagggattaggggcaggaggagaaggggacgacagaggatgagatggctggagggcatcaccgactcgatggacaagagtttgggtgaactccgggacttagtgatggacagggaggcctggcatgctgcaattcatggggtcacaaagagtcggacacgactgagcaactgaactgaactgaactgaatgtttaatgtttgtttggaaacatcatctctgctctgaaggttaattaagaagatagataaattaaatgtatacctataataaattcagttgtgttaaaagcctttgcttaggaaaatgaataaatgtgctgcctgcttaataaggttttgaatgaaaaacattctgatcatcaattaccttttgaagtagatgaactgacttttgtgttactcattaaaatggcactttacctgccctaaaatcttattccttatactttctatactctcttcttcctgtctattttaataatcatttttgatgtgacttcttattctaacaagaaaaaataaccttagaaacaaatggaagatttttcacttgttagttgagaatcagaaattccttttctaattcttactcctttcttcttttattcttggaataggtcaatgaattgtatctgctctttcctgtgagaaagagttatagatttgtaatgctttgtaggtacactttaattttctatttttaagtatttccttttgataaagtgacaaaatgagagcagaaatggtataaaattaatatttcttaagatacagtttagaccataaccacatgattcttcttggttttggtttgaagttaattacttttatggtaatttctctttgcagtgtggagaaatgttgccctgtaatttttttgtaatttgttttgatcataagaaaaactgatctccacactgtaagtcaagggctgatgtcagcatctccagtaataattgaataattctttagttttaaaaattggtaatgcctgagtgagatctgaacctagctagagtaaattagaagcttcattgttaaaaaaacattattttcagtatgtgtatgatttctggttgaaggtatatatatcttgagagaaaattaaagaaaatgccaaatatgatgcaaattcccctcacagccagtatgaatgcaagatgtattaaattaagataaaaaatattggcatgaaatgcagacatgagcttagaa

SEQ ID NO: 36714 - DNA, 1073 bp, Bovine  19866881613093
  misc_feature (1)..(1): n is a, c, g, or t
nagctcagactctgctgaggaaaatgaaggcccaactccccctttgtcatcaaccactgactgttgttgggagagagaagcctctaagcacgtaaaagtgcatgcctggtcctggtccctctggctctgggatacagcagagcctgcaaaggcagtagaataatctggggggtatccactctcactctgctgaatcctgtctggagactgggaatctggaacctatccttgttgactttctgaatcacttattagttctcccaggctgtgaaacatcagaaaatctagtcgtaaaagatggggattcagccacacttgtctcaaacacatgcaaatgacccctgaatacagcccctgaaatctcctctcccttggaaagaactgagtaatgaattcatatgctatattttgtagtaaaacagttttgaaataatgttggattggaagtcagaagatcccttcccttatagtagataacagaaaacattcaaactccttcctttctactgccctcatatcaggtctcttttgaatttgtggttgaccacaccctcatttgtaccttattacctagtcaaactaacttatttgtggctcaatgaaaacacagtgctatcatattaatatttcatgcctctcttctgattctcttctgtccacctaaaggtttttttctctcttgtttttatgaatctttacttttaatctaagatgttactctgaagtccctctcttgtgaaaattatttcaataacttatccttatttcttttaatttcaagatcctacctaactcaaaactggcacaaagaagctgttcaatacatacatatctttgttgctgttgttgtccagttgttaagtcatgtctgactctttgtgacccatgatctgcagtacgccaggcttccctgtccttcacaacctccaagggtttgctcaaactcatgtccattgaatcagtgatgccatacaacaatctcatgctctgtcatccccttctcctcctgtcctcagtctttcccagcatcagggtcttttccaagagtcagttcttcacatcaggggccaaag

SEQ ID NO: 36715 - DNA, 824 bp, Bovine  19866881888992
  misc_feature (1)..(1): n is a, c, g, or t
nttaccatatgggtgttatttagccatttcaattgcccaagaccaaactgaatggcacccacacagacacaaatgtccacacatttttgtaatttgaaatattgaataatagttaatactattccggatgaaagacaaatgctttaccttttcatttaatattctaatagtatttgccaaatacttctaaagactttttcttaaactattcaaaatctttggcttttcatcttaccagatttttttttagttttcaagaaacaaattttcatccattctgaaatttttcctcataatgaatggcttcacattttaagttaatattgctccttgctttgttatttgtgttattgcaaaacactgctataaatgactagcagaatgatctaaagtcaatttcctaaggaataagatttgttgttttaatgatatatgatcatgccactggctgcaaccccctctataatagagaaactgtcctacctatatagcccatcaattcatgtttagtaaacaataaatttattaaataaatattaatttactgtaaacaacagtaaacaataatttatactctaaattgtcaacaaggtaataatagtataaagtaaaaaagtaataggaataagataatgaaagaaaatatggttatttcaaatgaattagttttgactggagaggagtcagagggtttcaactcatcagccaacattttatcaaattttaaagtagaacatctttaaaactccatggactgttagactaggataggaccatataatgcttatatttaatatctctcccaatgcccaaaattatctttt

SEQ ID NO: 36716 - DNA, 711 bp, Bovine  19866882043152
  misc_feature (1)..(1): n is a, c, g, or t
ngagccttgcaggctacagttcatgggcccacaaagaatgggacatgactgagcagttaagcaaatagcccatgtaagtcttagcagagtgccaccaatatatgtttgtcaaacacatttggaaataagcatgatggaacaagaaggaagagaatgaaaaacaggatgaagattttagtttaaattgcattaacctttcatcagcatggaccaatgaatggataaatagaaactgacccaccactctaattttagctaatgccatatttctttaagaataacttccagatgctggcttgggtgtccattttgttatttctggcaaagaaaattcttttggatattgccagcttaagagagcagaatctattaatcagtgccagccataatttgttcttccagcataaaagcacagaccttttctttggaatgcttttagttataaccatctttttctccatttctgcctgcaaggatgcacattcatattcctaccgtgaactgtggcagggtttagtgttcatctgttaatttaatgaattaattatcatgaattaataaatggcatactccttagggaacataatagtccttgtacggcaatggttctcaaactttggtatctattagaattacctggagcattaaaatgaagcatacagaggttaggcttattgaagtaacataggatgctgggtctttgcactttta

SEQ ID NO: 36717 - DNA, 1766 bp, Bovine  19866880257495
  misc_feature (1)..(1): n is a, c, g, or t
ntggcaccccactccagtactcttgcctggaaattcccatggacggaggagcctggtaggctgcagtccatggggtcgctcagagtcggacacgactgagtgacttcactttcacttttcactttcatgcattggagaaggaaatggcaacccactccagtgttcttgcctggataatcccagggacgggggaccctggtaggctaccatctatggggtcacacagagtcggacacgactgaagtgacttagcatagctagcataaggcaccatttctcttaggtaaatgaatacctaagagtgagattgctgggttcccatggtaagtgtatgttcgtaaaaaacctgcaaatgaaccactgaagagaagctgcggtcagaggctctgcaaaagtcagggaggctggggttacctcccccagccactgtcagcttctagacccatctgctgaagctctgtgcctcctctctgagggaggcttggagcccacctttctcaccagcaaatgtgcaacctcccaaacaccaccctccggggtcaggctttgttgccagataatgtgactttgtaaagaagcccttctcctccccccaaaaaggaggctaagaaaggctctcagatcaatcctcagcagatacgcggagtcacaaagctccagcaaatcctttattctccctttggagcagctgctgcagcaccccgccctgcagagccggcccccagtggaaacctgaaaactattcatatcatttaatcctgttgaaaatcctctctgctctttcactgaggtgcggtcggccgaggtaaacctgggcttaattcatatgttggaagggagatgaaaggtgtcatcacatgatctgacatcctatccaggaggctgactcttccctaatgtggaagagtcataacccctgactgagaggagctaaagtcaagtcttcaaggaacagtcccatttggactttgttttactgtgcactcactttagaagacagcaaaactgcagaagcaaagtaggcggtgtgaggggatttgagaagcccttcactatggctcattcatgttaagaatctaccagattttttacacttcataccagacatggggaaagaagactcttaagaccatttttaccctattgccagtcatagccatgaggcttgggtttctcctctggcaccaaaaagtgtgagatcttagaaccaagttctttaattttaagaaactgatcctaagatactgatatatccagaatgatcatcaaacctactcttttttcttctagaactcattgatacttaacagtaccaacaggcccccagaccttctctgttctttccaggctgggaaaagacttcttatgagttccatgggtcatacagttagagagaaagcaaaagaacataagaaactggatgcataatttcacagaatacattctttctggcttgctttgagacccaagtaggatttggagaataagtggtcccaggtgggctagtttagggtgacttccttatgaggaaaactattataaggcccccatgaaaatgccagtctcctggcagatgacatttaaatgccttccactgggtgagggatggcccaggaagcacgctggagaaacacagatggaaggaccatcctggagagtttgtcatcctacggtccttgaaatgtgaggacagcagcaggcagatgaaacctgtgatcagtgttccccatctctggtacctgttggggtcacctggggaactttga

SEQ ID NO: 36718 - DNA, 1845 bp, Bovine  19866880385445
  misc_feature (1)..(1): n is a, c, g, or t
ngggtggtcttataagtctctattcctagaatacttttcctccagatctgggcagttcttgttccctcgctccatttgggcctctgcatgagtcactcattcaaagtgatttcctgacttccctttccctcccctatctgaaatagcatctactcccactcttctacttatgttgatttattttctctccagttcttgtcaatttttggaattatagtagatcatgttatgaaggcactatgttatataattaacatttaatttaatataatttaatgtaaattatattagcatagagagtagcaaataatagaagctcgaatggtttctgtggaatgaatgagtaattctactctaattcccatattagccatctgtttagcttcgaggcatatatgacaataactcacactggctatagtattttgttctaaatatcttttgttctaatgtatggacagtttttctgtccaatttttaagcagtttggagattctgtgaacagatatcttttccttttgaactctcacagaatctcattagctaacagaattgtaataatattttcataagggatcatattttatttttaaaaaatagtcttttctcacatttttaaaagattcaattgggatgtggcagaattaacttctaagataatctataatgggtaatagatataatttagattgccaaatggaaacataaaacaatgttcagaagtcagggttacagacccaggatttctgagcaccaaagaattgatgcttttgaactgcggtgttggagaagactcttgagagtctcttggactgcaagaagatccaaccagttcatcctaaaggaaatcagtcctgaatattcattagaaggactgatgctgaagctgaaactccaatactttggccacctgatgtgaagaactgactcactggaaaagacactgatgctgggaaagatcaaaggaaggaggagaagggaacgacaaaggatgagatggttggatggcatcaccaactcaatggacacgagtttgagcaaactctgggagatagtgaaggacagggaagcctggcgtgctgcagtgcatggggtcacaaagaatcagacacgactgagcaactgaactgactgactgaggtactttaccaatgaggtctttccaccatgctatcaaattcatccagctcgacaactagattatagtgatatggttcacctaaaagaccagtcagttggacgatgtgctcccaacttacacagaaagcagttcatggaaatcatttcagaatcttcatcaatatttggtccaaattaggagatcaagaacaagaatctgggtcatcgtgataaaccttaggagatgaaacactgagaatcttcttgatatctatgtgtactaaaagataagaagaatgcacaagagggacttccctggtggcccagtggttaagaatctgccttccaatgtaggagacacaagttcaatccctggtcggggaagagcccacattccatggggcaactaaacctgagcactgcaactatgaagcccatgtgccacaactgaagagaagcctgcacatcgcaatgaagggcctgtgcactgcgataaaaggtgtcagtgccaccactgagacccgacgcagccaattaaataaatcactgttaaaaatgcacaagtatttttgtcacaccactgtttgtaaaacggtccattactgtccattaacagtagcctgggtaaataaatcacagtgtattcatgcaatagatgactataacaaaaaagaagaataatttaacaatcacatgcaataatattaatacatcctacacacgtaa

SEQ ID NO: 36719 - DNA, 1443 bp, Bovine  19866880397758
  misc_feature (1)..(1): n is a, c, g, or t
naatcttgattccagcttgtgcttcatccagcccagcattttctcgtgatgtactctgcatataagttaaataagcagggtgacaatatatagccttgacgtactccttatccgatttggaaccagtgtgttgttccacgtccagtcctaactgttacttctatggtgctttagtcccttttgaaaaaataaaaagaagtgaaggcattttaagcaaaaatttggaatattttgttgaatttgaagcttattttattacagtaacatttcgttttgccagatgtgatggtcacaagtatggtgcatggttgtaggctatgttgatgaagagaccatggcttcccactgaaggactgacctcctggattggaaacttagaaatgccctttcctctgaaaaactctccaccaagaaatcagcaaagctcccagaagtgtctgcttagaagggttgaataaaagtccttgtatggttttgctcattatttatgtcaaaatgaaaaatacgttctttacccatgattagaagtatctttttcatggctatagcactagcacttgagatgatgtcctccatttggcagtgagataagtggagaagggaatatcatgccaactttggacaacatatgattgtgtatttttagttatgatccaaagtcacaatttggcctgtgaagctggttctacctctttgccaagttgggcaaggaatcttggctgaaagatgctttttaaagacctggagtattggactagatgtcaagacatttgtatttggacttctttggtgccactgtttgaaaaagcaaaggtgtcctggctttgctgtttctttccattttaatgtaccaggaatgatcccggagccctcttacagaacattgtatggctatatcagaacttcatttagaaatatttagaatcgcctaagttggagtgtctagaataattattgtttaataatgctactattataatatataatagtgtctactattattattgctgctttgttattacagttttggtcatggttatagtaccaatgtctctgtttattataaagtgagatgatgactggtattctttccagacagccccaaactgtcccagagaaattaaaagtgaaaataatttatgtcacagtgctgaggaaatgaaatacccagtggtcaagaaataaatatgtcaaagcttctagcaaaatatgaagtgggaatgtagctccagactgtgtggacctactcactgcctttcactgtggaaccagctttaatatttttgacctcaccatatggcatgtgggatcctacttccctgaccagagattgaacaagtgcccactgtgctggaaacactgagtctaaaccactggaccaccaggcaagtccccagaaccagctttagatctcaatattctgctttgtattaactttcttta

SEQ ID NO: 36720 - DNA, 716 bp, Bovine  19866880427711
  misc_feature (1)..(1): n is a, c, g, or t
natctggcatttacacaaggtttggcctcgcattcatttgcatctgaaagaaagaggatgaacagtgagaaatggggttctacccccaccccaaccctcccacacccacaaaagaaaccaccaatagtttgtctgaagtgagacatttcagtaagctcgctaaataagagatactatctggaacatctgaatcctcctagccatgatccaataaggcacgctgactgatcacttcccagctgctgtgaacagccagcccccaaccagagggcagaaagcaccaggcacttctgtgcagaacccagcgcagcctagttgctgggatttaaaactggcagaaagaatgcagacagctcattcttcatgagatcatccccgtttggaacccagctgaacacttctcggacagacgattgacatggttcgaggaatcccacgactttcccacagggcctccaaaagccaagccatttgcatatgagggatttctcccaggctcgctgggcgcgaccctcgataataaatgacttctcgggagggacggcacgtgaactggcacagccggtcacatgcgtcttccccaacagctcggaggactcacgctaaccctggtgcgggggctctcttacctaactggcacgttttgccagtccactggggcgggcccccgcactgaaatccgttaaccaagtccggcaggtgcccccggggcacag

SEQ ID NO: 36721 - DNA, 1395 bp, Bovine  19866880473752
  misc_feature (1)..(1): n is a, c, g, or t
ncaagaatactggaatggttagccattcccttctccaggtgatcttcccaacccagggattgaacccaggtctccggcattgcaggcagattccttaccatttgagccaccagggaagccttaggttcttggcctcggctactgttagaaccatctgaggagctttacaaaatattctcagactgtccctatcccaggttaattaaatcagatcctaaggagagaaatggacaagtggactgtttgaaagcaccccagagtaataaagtacagcaaggtgaggaccatttctgggtgttgtgtagacgcaatgtaaatttgctattcacttggtgttagaatgtatagggaagtagagattcttcagtacccatgagtaagggctgtagaccacaagatatcaaatgctaaaaggggaatgacaggaagagcttccagtgtctgaaccctcaacggaagtacaaattttgtaaattcctcaaggcttgaatgataatttctcttccaaaccctactcataagaagtgaaatactattgaggacaggagctaaaatggaggcaaagtatgatactcgtctcctagaaggaaagattttctttgacagatgcatttacagatccaggaggcaccatcaatgtaggatactatgttaggagagccccctgcagttgtgcacgcatcagccatgtctataattcatcttcatgaaaaatgcacaccattgaggcaagttggattgaaagtacttcctcttcttgaaggttatttggcttcacattgttaacattttccaaatgattgaaagtcacatttttttatcttcaataaattatcctgagaactccaagggctataacaatttcataaggaactcagctctggtaccaaaaaggcaatatttttaatctctggcttttgaggtaggcagctagaaatacaggcaaaggatttcaggttcacaaaagtgaaaccaaggagcatctgctaatccctgttcactctctaatatctaggtgacatagaattgacagacttagaatttgccataaaaatattgttcacatcatgcttgattctttaataatagcatcttagctctttcacttactagctatgtgacttggcaagctgcttgacttccttctgcttccttgtgtaaaataggggcatgcacttactatcctagtgattattgttatcttctttgtgcttgttctctgacctgtcctactctttgcagccctttgaactgtagagcgcctggctcctctgcctatcagatgctttcaggcaagaatactgcaatgggttgccatttccttctccagggaatcttccccacccagggactggaccctgtcatctcctgtgtcttctgcactgcaggcagatt

SEQ ID NO: 36722 - DNA, 757 bp, Bovine  19866880479733
  misc_feature (1)..(1): n is a, c, g, or t
ncaatgaaattaaatcccagaatcccagctcatcagcaaacatacaaggtaataagttcaaattgtaaagggaagttagtgagcagccagagatagcctttaaggaaacagtcactttcttatattaaatagtataattaaaaagtgagatgacaaaatgaccagaatatttctcagttaacaaagtaaatgaaaggtaataagataatccaagaagtacataaagttgaatagtatagccatggtactcaaatgaagcaaattaaactgaagcatgattccaaataagtcatgggatataaaaaaccagaccccgtggactgtagtctaccaggcccttctgtccatggaattctccaggcaagaatactggagtgggtagcctttcccttctccaggggatcctcccaccacagggattgaacccaggtctcctgcagcacaggcagattctttatcatttgagctatctgggaatccctatttgtctttaatatttggaaagtcctgctttaagtagcattgattcagagtgtagaatttcatttccaaaaggttcaaccacagtccttgattttataatgaatattttcaaactcaatacttcacttctttccatctctctcagtatgcttcctaacttttttcagcttttaaattgtcaaaaaactcagactatacaaagggcagaggtattgattttcacatcttgcatatggaactcaaaggatactgtccaatagttgtgtaagaaata

SEQ ID NO: 36723 - DNA, 1928 bp, Bovine  19866880507609
  misc_feature (1)..(1): n is a, c, g, or t
ntttcacttattcagtcaattgagaataacagttcgtgcatttggcagtcaaatgggaaatggccttgcatgttacaacatgaacctgattacatgaagtgatttattttcttgtttagacacagtgtaccaagaaccttcttcaagtggaaagctgttaaaaacgtgagaaccagcagtgctcactaacttacaggaatgataaatgcaaacagcccagaatccagaaactgtcttgagaataacagtttatactgtcttttctttgagcatctaaaccctagactctggagtaagtatgcaactttagtccatcagatgtaggtcatttttctttctgtgaggtctatttcacttatatcttgtctggacagggtggagcccctgcttaaattctatttctagcttgcagaaagactgaattatcgtagaccaaagccagtgctacttggaaaatgggaaaggcgaaggagacaggacatgtcttcctgtctggcccaactgtgaacttggctgggaccctgtctctggtgggcgctcctgggaggttgcacaggcctgggtcaagcttctgggccgggcctgttaatgcctctcatctcgtgtgaaggccggtccttggggactctttcctggctctttctgccgcttgactctgtggtcagcatatttgtatgtgaccttcactagaaatctttagcccagagacctggtatgctgctcctgtcctctttctcaaccgttttctatctattacatatatatatatatataattctgtactgtatatatgcacatataattcagttatatcaaattataatttttcttcaaaaacatactgcagtaagatttcctgaagccctcctgcccctccctgctgcctttaacccgtccctctgtcccttagcccccacatgtcacatctcagttcccgctctggctggggagctgcatccaatgggcccgttgtatgcagctcctctctgtgttcatggctatgatactgaaatatgattcaggaccacacacagatagcaaagtctctggccacttaagcatgtaaacagtctagctttttataaagtggaaaaatatttcttgtgcactattttaacatgatcagcatgttgaaacttggtgagcaactgtgtcaacatttctttggctggaaagagccaacctggagagcctggtggtaacatataaaaagcgaagctgctttgtttactactgggatttgggcagcaattacagcctgcagttgacttgcagacttgagacataagtgaataagtgaaatcattattttttgcatcatgattaggctagttgaaataatgattccttgtcagatagctaagattccttcagagaatcagaggaaaatggatagctgagttcccatgaagtccttttatagaaaaactcacatcgtacctggtctgccagtgtcttcttttgtttcaaatatttactgaacacctcaaacatgtcagattcttttttacacgctgggcgtgcggattaagtgggatagacgggctattggctcatggtgcttgctgctgctgtctcaggggaaacagtaaataagaaatcaggtacacaaaaaagacaatatttgtgattgctctgagatgggtttgctcaacgtcagatatttatggagggcacttttgagtctattagggtagctcagagtctccaaactaatgcatttcttctcttacaggtctcccatgctagcacaggaggcagacagtaagcagtaaacaaaataagtacatacattagggctttcctggtggctcagtggtaaagaatccacctgccggtgcaggagacccgggttcaatccctgatccggaaagatcccacatgcagccaagcaactaagcctgtgtgccacagctattgagcctgtg

SEQ ID NO: 36724 - DNA, 1140 bp, Bovine  19866880514824
  misc_feature (1)..(1): n is a, c, g, or t
nttctctacttggaaattgttacaaaaacgtttttcaaaatattccttacaaaggaaatagcttaggatgtaatacagacatgtttttcaagccaaatggaaacatttttatcttgggggaagagcagtgtagggattaatataaaagcagaaataaggcagaaagaataagcttttactaaatgagttaccccaagttttatctccctggagatgaatttttgccattctttctactttacaaggtctcctccatcttccttggatatctgaaccacatttctctctctctatccctcagcctctgtctgtctaggtttccaaaatgtttgctcggctttgtcctgctaacaccactcaataaaatgcgctcactaccttgggagtatatgtggtcatgtaatcccataatcatattcctagatgatatgtcaaaattcatttaagttggacttagctctcagcatgatctcacaaagatgtccacgagaggggtcaatgatgacttcatcgtctaaggatgaatgcactagcagagcggaggcccatttcaatgacaaacagaacctcaaggtcaaaataaaaatctaagaaatcaagtacctctaaaatccgaaaataactcatttcatggatgagcacagaacgagagacttggaaatgcttctttggctgacactgtcatggaaaaacaagaactggagcatcactttcctgaagttatggtgaaatccttagggcaatgcaccaaagtgaaagcgttgagtacagagttgtgtgtgggtgactgagaaaatttccaagttctgaattttattaaatatgatcagatctattaaacatactaatctctctgtgtatatgtttccaattctgtggtcacttttatctctacttcaaccatgcccaactgctctccttttatgtcatttctaagaaagtttcattaatttgttcttggatactaccatttcattgtctactagtacactgtttttatttttagatttatgacaacatttggaggataattgcattttgctaagctgcagttttcactgcaaagtttttctgtctgtaatttgtcttgcaaaaactttcaaaatcattcttgggccacagtcataaaatcatagcagt

SEQ ID NO: 36725 - DNA, 958 bp, Bovine  19866880533036
  misc_feature (1)..(1): n is a, c, g, or t
ncttcagtttcagccccagtccttccaatgaatattaagggttgacttcctttaggattgactggtttgatctccttgcagtccaagggactctcaagagtcttctccagcaccacagttctatgggtgacaatctggaactttgctcaaaactctacagtaagtcccctatttttgttctgagagcatgttcctaagtccaatttgttcttaagtccaacagagttagcctaaggaacccagctaacacaattgactatatagtactgtactgtactgtgataggtttataattcttttcacacaaataatatgtagaaaataaacagatacaaaaaataaagaaaacatttttaatctcatagtaccttgaaaagtacagcagtacagtacaacagctggcatacagaggttggcatgcatgttcacatctttgaaagtttgcaaaacttgaagaccttactgtatttgcctagcaaacatgctgtttttattttgattttaagtttattggggcagcacatagaaataatggggtatgacggcccacaacttccaagcttgtccttgataccaccccctgagcccttttcagttacagactcattagaagtcctacacccttatctgtactttcacaccaaggacaagtggcttgcattcagaaaaaatacagtaaatacattgtttaattatctagcgtccctacggacctggatacttcctttcggtgagcacctgcctaaaaggttttaaggaacccactttcccccagacacccgactcagatcagaccttttcagcttctggggcctcttttggaaataggagctttcctgaatcattgacgccctctagtggctatctcaggctgaattcttgcctaaactcagcagtccttccatcccctactaaaattaaaacaagccctaaattaaaaacaaaaaaagaaaaagca

SEQ ID NO: 36726 - DNA, 1273 bp, Bovine  19866880546897
  misc_feature (1)..(1): n is a, c, g, or t
ngtaatatttttaaaaattttaaatagcaatattagccaattaagtttaaatatttttactaattttgtgttaattacatgccttaaggaaatcagtcttgaatattcattggaaggactgatgttgaagctgaaactccaatactttggtcacctgattaaaagaactgactcatttgaaaagaccctgatgctggaaaagattgaaggcgggaggagaagggtgttgacagagaatgagatggttggaaggcatcaccgactcaatggacatgagtttgagtaacctccgggagttgtttgatggccagggggaggcctggcacgatgcagtccatggggtcacaagagttggacacgactgagcgactgaactgaactgaactgaattaaacggacattcaaagttattaactctttgttagagagggaactgcatgctgctgaatgttatggtagtgagttatttttttccagtttatgagaaatagaaacttaaagttcagcagctctataatagagcagaaaaagtactttcattttcctgtcttctaagcaggcatagaaattttgaagtcactaacattataaataagactaacatgcctgcataactaatggtgtagtaactgattcactttgatatttttttttaccttataacaaagctcacattctttccccatccccctaaaataaagagataatggaaaatgtaccacatgcaatttttgccctcatcaactgtctctgaagagacagttttcaaatcttgtttccaaatctctcacccccagcagattattctgatacttcatttttcacattgtgtatttctaaaaactagagatctgcccagattgagacaagcttcttcaactttaacatgctgactcttttcttattgggacaaacatccctcaatatatgctgctgctgctaagtcacctcagtcgtgtctgactctgtacaaccccatagacagcagcccaccaggctcccccgtccctgggattctccaggcaagaacactggagtgggttgccatttccttctccaatgcatgaaagtgaaaagtgaaagtgaagttgctcagtcgtatccgactcttagcgacccatggactgcagcctaccaggctcctctgtccatgggattctccaggcaagagtactggagtggagtgccattgcctttctccgtccctcaatatatagtctaccatttatgtcctcctgggataaagtcagagaaagcaaattgagatgtacag

SEQ ID NO: 36727 - DNA, 811 bp, Bovine  19866880563717
  misc_feature (1)..(1): n is a, c, g, or t
ntcacttcagtcgtgtccgactctgtgtgaccccatagatggcagcccaccaggctcccccgtccctgggattctccaggcaagaacactggagtgggttggcatttccttctccaatgcatgaaagtgaaaagtgaaagtgaagtcgctcagtcgtgtccaactcttggcgaccccatggactacagcctatcaggctcctccatccatgggattttccaggcaagagtactggagtggggtgccattgccttctccactgggagtggtatgaacccaagcatctatcccctgggggaggctagtcttgaatcaatgatcttccagatatagccacagataagaagagggcaagagaagggagatattaagaagtggtgtaaacaaggtttggcaacagattttgtgagggagtgagtggtacctggcttcagtcccaaggagaaaactttgtaagggggagtggtaagcatttcattgtgggtcatgatgaatttgaaatgtctgtgggtgagctgggaggaggtgtttagtaggcaggcagatatgatttggggcttcagaagagaagccccagttttaaacatctgcctggaggctgtagctgaagcttttacagggaatgttggctttatgttgagtgagaagtgaaccaaatttagtaccttagggaaacatcaactcctaaaagatgggcagaggaagagaacattcagagactgagaaaagagaaaggaaactgagaagtttcagaagaaagtggtttcttaaaacatgaagattgagttttgaagtcagaggtcaaaagtat

SEQ ID NO: 36728 - DNA, 2030 bp, Bovine  19866880572289
  misc_feature (1)..(1): n is a, c, g, or t
natggggaaacagtggaaacagtgtcagactttatttttggggggctccaaaatcactgcagatggtgactgcagccatgaaattaaaagatgcttgctccttggaaggaaagttatgaccaccctaaatagcatattgaaaagcagagacattactttgccaacaaagttccgtctaatcaaggctatggtttttccagtggtcatgtatggatgtgaaagttggactgtgaagaaagctgagcaccaaagaatgatgcttttgaactgtggtgttggagaagactcttgagagtcccttggactgcaaggagatccacccagtccattctaaaggagatcagtcctgggtgttctttggaaggaatgatgctaaaggtgaaactccagtactttggccacctcatgcgaagagttgactcattggaaaagactctgatgctgggagggattgggggcaggaggagagggggacaacagaggatgagaaggctggatggcatcaccgactcaatggacgtgagtttgagtgaactccgggagttggtgatggacagcgaggccttcgtgctacatggggtcacagaatcagacactactgagcgactgaactgaactgaataggaatatgcatcagatgtaatgctagaccagataaatacctcctttatcctctttaaagaaaagagttttataaaaaggatttaagaggaagagggtgggagaaatcaattgatgcataaatatcttcagtttgaaatgcctttgattcttcagatgaaagagtattcagtaagaagctaggaatatgtttctgaagatcatgagagaaggtgggacttggaatataaagtgaaagtgttagttgtgtctgactctttgtgaccccatgaacggtagctcaccaggttcctctggccatggaattctccaggcaagaatactggaattggttgccatctcctcttccaggggatcttcccaacccaggaatcaaaacagtgtcctgcattgcaggtggatcctttatcacctgagcaatcagggaagcccatactttagagaattgtggaaataaaaagagatcacatgtgtgacagtgctttacaatttgtacaaatgtgaacagttcaatattcttctctttggcttagagtattaaagttttcatgatggagagtcaggacatgttccatggggatatggagctcctagagggcttgtccagggctcagggaaatgtccagcttaacgtgcagggcaccacaattttactacttcaaaccaaacgctgtggagaatgagcagtcaacagagaaggtagagacaggagagagtgcatggtagagcactttaagaaatggaatgagttgcacaaaccgtcaagtgaagtcagaggttaaaaagaagggcagtccactggatatgagcaagaggtcactgatgctatctgctgagatattagagtgccttgcccagcctggtacctgttagctagcagaactgcactgctgttcatggccaacactaacagaatgaccccagatagccttgctccatcccagccatatcctgaattattcaaaccaatccatccccacctgattttcactgccagagtccctggctcttggaatcaattcttattgaagatctcacatcatcccctcaaaaacagtagctgacattgatattgatattctgttctgacttctggctgactctctcgaatatattttgagtgtttcttctgacctaatttttatttatgctccttattaggtattgatctctgaattccctccttgattgaacttggcattcttttatttggactgtatttcttctgcttatcgaaagtaatcatcttgccagcctagatattgtcttgaaattcagcccaaccaaacttagggtcagtgatccatagactcatcccattagcagcatgcttgcatgctaagtcgcttcagtcatgtccaactactttgtgacactaggactgtagtcctctaggctcctatgtccgt

SEQ ID NO: 36729 - DNA, 3821 bp, Bovine  19866880596739
  misc_feature (1)..(1): n is a, c, g, or t
ntgattgcttagggagtcagagtaggaggatctgtagaggcctcttccagaggaagaggtgcacatgcctgagtaactcctaggaggcctggccacggcacctggaacggcctccaatcactgaaacggctcagttactctatctggaaaatggcctaactgaggaggtcggaccaaacaggcctaacaatcaggccctcaggtaagatgcttaattcaggctgagcggttgtaccactggccactttctgatgctcacgcttatcagctcacataacgaagagtttaaagtatttgaagaggagtgtgttttgcctataagttattctaattcaaataaagtctttatataggatgtgatgaaacgaaatatgacataagtccccctccctccccccaaaaaagaggcagaaaaaactctccaaccaccagaatggccaaactggaaaaggccatgaacaccaactgttggcaagaatgtgggctaacaggaattctcatgcactgacagctgctttcagaatctaaagctgaactcaagcataaacacagggtgcatgaatagcacttttcacagaagtcccaaaccggaactgatgcaaatatccatcaaaagtagaatttttcattgaaaacaaagtggggtgtgggggaggtaacagtcacacagtgcaaatcctactctgcccctaaaagtaaatgaacttcagctagaggccatatcaggactaaatctcacaagcataaagttaagctaaagaaacctggtctgaaggagtgcactccaccatctgtaacgatggagacatcaccattcctcttaccatcatcaaattctgcagcaacaaaacttccgtagtcacggcaagtaccaacatagttccctcctctctccatccctcccttctttcctcccttccagctctgctccaagtataaagcactctgtcaacgagcctccagaaatgatcaagtaaaaatgtctagtaaacacagttgggtacccggtggaagaatcagaagtgaaaggcccaccgaagaagggtgagggttcccaggtcctcaaacaacttcagcaaatcgcttatcctcagagtcagggttttagtcataaaactggaaggtccaggacttaaaagaggtggtctccaggtccactggactctccaaagaccaatacgatccttgttttgaaataatttatatataaaaaatacaattaaagaagtttccagttctacactcaagtatccttctgttatcctcagaaagatatccagcagaaagatccagaacatcagtgaccacagaccctgatgttctgtctacacaattgctttagccgtggggatttcgcaacaacagtgacatctatgacaggataatctccaggtttacagagatgaaatatgttttttcctaacacacttgaagtggattgcattttggtcatgtggctttcttctgcttaaaatgtcaaatgaaatatgcacaccactggcattattctgagtgctttaaaacaaatacttcggaccttaggtcaccgcgagagtggaagtgacatccacatctgtttatttgtcttgcaggtgggggaggggatggtagtcagggacatagaaacacacaaagagaagtgattttcaaagtaatggtttattatgtgaattttgcaaaggattgaacaacaacaagaatatgttatcaaagtcactctgcctttgctgcggatcacactttaacgcttatagttccacgtgattaggggtcagagaacatgctccaattctccaaactcttttcgctgtacaaaatctccagaaataaagtgttattggtaggaaggggctaaatctgaagttgactaggaaagttccagtatgagttcaggaagcctggtatctggagataccacttgagtgataactaaatcctgcttggtcagctgtctcaatacaccgcctccccctctaggaaaataaagcagcataagtcaaactctgactgttttactactgacattattaggagagtggagtttactgaaatctttcctcctctgtcccactcccctcaaggcccccaggacaggattatcttgaagggaatccttcctaaccctgtatcttcttatggttttagtggaaaaccctgctgaacacacctataagagaaatggtaagtttaccatgtaaaagagatttgcacttgcttagtccaaattatactggctgtgggaaaccttactgtttaaagagaaagcagaagagagagaaaacacaaaaagtgtttgtgtctgttcttacagcaacctaactctgatacgtaagaaactcacagctgttgaaatacactgaattgacatacttagggagctgtatttcatttgtccacagataacaggcagtgataaagactgcattatctttgctctttaatgacattgatttcactgagttgagcaggcctctgagactgtgtactaatccggggctcaagcaaagctccactatgcttgaaagctaaatggcagcttggcaaagaatccaggggaccctctgcttcccccttcttgggcaccagctacaggcttgcaatattgatgctctaaaagcccagaactggggtcagggctgggaggaagaagcaaaatggaaatcataaagtgatttcatctttaccttttcataaatcatacaccttttcatctgaaaattacatggcaatggtattccaaaatctagaggcacttgtaaatcacaattaaggatgcctattttcttgagagctactgtggtcctccttagcctgaaaaatctatctttagccacaaatagagactaggattagagagagaactgctttatcatggaagcatcttaccaccagtagtcttcaggtaggtctatttcaaaaaataattgggttcccatggtagctcagacagtaaagaatctgcctgcaattcaggagacccaggttcaatccctgggctgggaagataccctggagaagggaacggcaatccaatttagcattcttgtctggagaactccaaggacagagaagcctggcgggcctcagtctacggggtcacaaagagccagacacgactgacagactgacagacacacactgcactgcttgatgtacgaggcgtccagtcccagccagaggccagcgtctccccagcagcccccaaagtctatccctgcgcctcccaagcaccatgctttataaggagctaccatactgcccaccacctcccaacagacaacctcccaatgccccagtgacgttctagatgccgacctgttgccacatgcacttccttctactcttctccaaagaacatcaagaacccgagaaaaaaaggagatggggtcattttgtgagataaagaaagggtggtctctgctttaaggacagagttctgctactatttcatttcgcattctgtctaaaataaactgctccaactggctttattagaaatttagagactttatgaaatagaaaggaaaaacaaaaaaacaaaaaaaatcaaatgtgagttgaacaagttccaccctgacttagggaggcagcagattagtcttaagtagtactgtgctccaatgagtaatagtacttttgaaggaagtggtcgtttatttgggtcgttatattgatatttcacaatcccaagatgctaagagcaaatctacaacatggagtttttactgtaaagccatccagcttcgcttgttttccagggattcctggccaatgtgacctgagcttccgcaagactgccaaggggaagctgcggtccagct

SEQ ID NO: 36730 - DNA, 1460 bp, Bovine  19866880645040
  misc_feature (1)..(1): n is a, c, g, or t
nggaacaggggcacagcaggaaagtgaatcaattttggacagaggttaatctaaactcagcagaggagctcaggtttagggggacttggttccagaagcattaaatggaattctacattgtcaactaatttattttccatttcaaagctatttgacatgttttcatttcccttttggaaagaaacaactaaatacctgttatcgatccatcatttacttgtataacacaaaaattttaaatctgcagtgtaaaatagtaaataacctcccccacaacacagaggtaccctgagaggtttagtatttttagaggggaaaaatattaacacacagatgtgataaaagatgaaagttgtaaatatttgtgaaaatataagaataacaacaaactctactttgttttcatcttatgaaaagatccacaatgattcaataagttttatttccaattaaatgttctatcaccctctgacatgccatacagattactaattcatatttcaatatttttcacatttaatttaattgatataattgcatctatggaacaactactctatggtctgctttaataaagatgtgtgagatacatccatcgagtcagtgatgccatccagccatctcatcctctgtcgtccccttctcctcctgcccccaatccctcccagcatcagagtcttttccaatcagtcaactcttcgcatgaggtggccaaagtactggagtttcagctctagcatcattccttccaaagaaatcccagggctgatctccttcagaatggagtgattggatctccttgcagtccaagggactctcaagcatcttctccaacaccacagctcaaaagcatcaattcttcagtgctcagccttcttcacagtccaactctcacatccatacatgaccacaggaaaaaccatagccttgactagacgaacctttgtgtacgagacagcaaaagagacactgatgtataaaacagtcttttggactctgtgggaaagagagagggtgggatgatttgggagaatggcattgaaatacgtataatatcatatatggaacaagtcgccagtccaggttcgatgcacgatactggatgcttggggctggtgcactgggacgacccagagggatggtatggggagggaggaggaaggagggttcaggatggggaacacatgtatacctgtggtggattcattttgatatttggcaaaaccaatacaatattgtaaagtttaaaaaaaaataaaattaaaaaaaaaagatgtgtgagataattcagtagaatcacttttatttatcaagcattttgcagaaagcctgggactatgtaagaagtactaaattacatagttgtaatttaatgacaaagttttatttaatatcagataaagagtgaagcacgagttagattatggacagagaatttagccaatgtacccatctgtctc

SEQ ID NO: 36731 - DNA, 1162 bp, Bovine  19866880657834
  misc_feature (1)..(1): n is a, c, g, or t
nttcctctcccttacacacctgtggattttaaaatatcattctagggtctcaccacggagcatatttgcagcgaactgcgaaatttgaatattttgaagaatgtttctgccgaatattcgatttacatagcttgcgagccttccccttctgcaaacaatgaaatacacgtggccattgtgagtatgagacccattcacaccgagtcgtttcactggaagtagcccagaaagctcacttagctggtatccagatgaacagatacatggaaggagagcttgacgtacatgtgtgttaggagctcagtcgtatgcaactctttgcaaccccatggaccatagcgcaccaggctcctctgtccataggatttcctaggcagtaatagtggagtgggttgccattcccttctctaggagatcttcgcagcccagaaattcccagctgggtcctccagcactgtagacagattctttaccgtctgagccgccagggaatagcatacatgtatggtcaaataattttgagtaaaagtgactggtgagtgtccctgaccccctgggtctgatgcttccttttccagtctgctgaagacatccgggatgatggaaaccctatcaaggagatcaccgacaaaatcataaatcttgtcagtaaacgtgacgggaacagctcgctgattgctgccgttgcggaagtaagagttcagaggcgtcctctgaagagcagaacaggtaggtggtggggtcggggtccctttctgtggggaccgtcctgtccagctcatcaataagaccagcacaacctacatccaggaaaacccccaggcgggaagttacctgccggttccctgttcaaggacccccatttttaactagcaagaagacagaggctggctgacatgactggatcccatgactgtgggcagaggtggcctgacttgtcccctgcctgcgggctgtctctggctgtcaggcaccgccctggcagagtgttgccgtaccctgagtatgtgtcttcgtggagcctgcttgtgctctggggttgggaaacagtccatcctaagcacagctttgatgaatggctcagtggccctgcagggcagccggagtcccccggggatccctggagcatcactgtgctatagcggcaagggacccccggggg

SEQ ID NO: 36732 - DNA, 4713 bp, Bovine  19866880674040
  misc_feature (1)..(1): n is a, c, g, or t
naaaatgagaaagcacatactacaaaaaccgtgaaaatgcttctgatagtatttaaatgaaatataaagcattctttaaatgaagtgagcaaaatccacatgtttccactggaagctttcattggggtcagtggcttttgaattctattccatggtgaatcactgacattttcatggaaaccagtacttttccccaatgtgctgtttcttagctgataggatttgttttccctctcttttcttgtgctcaattttgagctccgtcaatcttatttctgtttcagcagagctctttatgcagacaggtagattctgaaaattcactcctaatgttatagcttacagccttgtcttttaagcttagcacatacatttgagagtctccgtggggtgtgtgtgtgtgtcttgctgcagtcacagcccaatctgtctgagcttacctctgtaccaatttttgtttttcatatttttggacttgtgacttgaaactttaacaaaaaggaaaaagcgtctagcagaccttgaacctggacatgatatatgtcatgattattatgcttctaaaataatttgtggggatattagattaccccttatgtttgttatcttttaatccatttgaaatttggccctcatggtccaaaaccagcttcttatctcatcttaaataaatacataagaaaagtgttttagagactagaaggctgaacagagacccaagaagagtcttctgaggattcatatttaaatttagataccttttccagaacaggtgagcccttcagaaaatgcaatgaggcacttattccatctagcagctaaactcttaagtatacacattaagtgcaataaatgaagcacatctagtgacaagtgttaaaagtttatttcagaagcatttctagaatgttgaattatcttagtaaattaacaaatactaaagtaataatgctgctggcaaacaactgtaatgtaatatagcttaactgattctcagaccaatgaaaacagtgatttgtggttcgagaagacaattgtaccacaaagtattactgttttcagatagaatacagaaaaaattagatcttgtatgacatgtaatattaatacttaatattttaaattattaaggatgagttacaacatctccatacaaatgaaatatcatcctccttaggggcactggtatttgtacagatgtaagctttctatagctgctgtcatataaatcttataatctggaggacttcctaaatgtgaagaattttcattatgaaaagttgactggtctgagcgttttgcacaagccagttccgttttcttatcttcgaaatgttctgatatccagggataacactggtagctcaccaagtcagcttatgagaaaagtgccatttccatcttgaggctctttcactgttttgcatgcttccctttagctgtggtcagccttcagcttcccttgtccccacctctgaccatccttcacatgcacacttccctcggtcagctaatgctgggcactgacggggcagcttcaatccctggcacctccgagcccctctctgtgtgtccagcccacctgtgcagcccctcctcgtggtcctgtcccccatttcctttcagcgcctgctccaggaataatagcacacccaagtcaagcagggggccctgtcacccacaaatgccccatccagccaagaccctagtccttccgtcccaggtgcctccgagtcagtcctccctgacgcttggcctctgcagagccctccccgtcccggctacgtgaagatcaaagaacacctttccctgccaggatggcctcctgctggtagacgcccgtggggtctggccctcctctgactagcccttgaacttcctttgtcccttaaagctttggatcattttatccgttcacagggacactcgccccagggccagatccatctcgtttctctcagtagttactttccaggaactaggggaggcctgggagtgggcttcctgactggcgtattggagccgttttggggaagaacatcaatcatttgtccggtaactgttgacttcgctccctcttccccagctgcagaagtggcgggggagagtgggcaccgggcagagcctggccgccttacttgtgctgtggccccaagtagaggttgcttcctcctacccctttcctcttttcctatcgaatcttcagtgttgaagtgatgactggctggaaaacctgggagcgtctgttcagagctgctccgcctggatgcagggcagcccaagagagcagccgtgccagacgaaaggagcgcccagggagcacccccacccttgggggccgagtgagtgcagccacgccgctgcccagcactgggaaggtctgtctcccgccctgcacgagggccccatgcggggaggcgctccgtgttgcaatagctctgtccctcatgccctcatgccagggatgtgggaatcgtgctgtgtactttgggaagaaagggcatgattacgggatgagtcactgtatttttcttactacagtttctcataagaaatctcgaagcccttatagtctcagttttggaactattgctagaagtgggtccttttgcagtttttacctttagtttcaaagttttgcttttcccccaccttctttttcttaaaaatatgaacagcaggaagctcagcaatgttgtcttgcatatttacaaacccaagtccctgtgtcaagactgctttctctgatgtaaagcctgggaacctttgggaaagtcaaaattatttctcatttttattattcctttattaagggaaataaccaataataactgaagccataactttactttccaaagtaataagtttattgtgtaaataatcacagacccatctggatctgggacatttcagagtcagcacaaagctgctgtctcacagagcgttggttacagccactcctagtctctggtggcccttcccatctgttcttaccatcacattctaacataatttgctgagtgctgactctgtgccaggaactctggcaggcactgcggaaacaaagaaaaagaaagaaatcattcttgccctcaaggagcttacagtcttgcagatcaagggctgtgaaggtgacctggcgacccaaaaattttaatttaggtagagcctcccttttttttaaggcgtatccattctgtaccttaatggttcatttggcccctctctacaattcagaaggaaagttcaaaagtcttattttcttttaaacctaagctgtaaaaacctgtgattctttgggaaatttaaaaatggtgtttattaatactagtgctgcagaaaagtagatgtgggcgctaagatgtttaggctgtcttcctcaccttcctttgacatgtgaccaagctgtgaaagcatctgccaggagtcttcagaaagcactacccctcgccagagcatcctctcagtggaagggttgctggcatgcccgacaagggacaatagttaagcactaaactatcgttcaatcttaaagaacactccatctagtttatgagtataaaattgaagtgaaaatgagtctaaagaagcaataaactgcccttgcctgggttatttttagcctggctgtcctatttctcagttgtgagtaactgaacctcggtgggccttagtcctcctgtcagtcaagggagagagtatcagagtatatcaaaaatcctttctcacactgtttctaccagaaaaagtggatgaaaatacatctaaataaaaatcacaaaataattttacacaaaagagcacttgtagctttaaaagttgagattggaaaaaaaattcaggggaggattatattttaatcttaggaaagataaatagaaattgaaacattttagtcctgaattttttgttgttgatgttcaatcactaagtcatgtccaactctttgtgaccccgtagactgcagcatgccaggcttccctgtccttcactatctcctggaatttgctcaaactcatgtccatcgagtcagtgatgccatccatgtcgtccccttcttctgccttcaatctttcccagcatcagggtcttttccagtgaatcagctcttcgcatcaggtggccaaagtattggagcttcagcttcagcatcagtccttccaaatgaatattcaggattgatttcctttaggattgattagtttgatctccttatagaagaaataaaagaatttgtgtactaacttcataacccaacaacagaattctttaactttcatgagcaaacttccaatataagtttaaaacagatcattcaagaaaagaactctttcttaataccaaaaaaattaataagtagtggatgatttttctatgtttttcttactgtatcatagactttaaaaatccattattcttattgtatttcctaaacagtgctagtggtaaattatatggaagccattaacaagagattcatgtagcactaggaaattttccttgagtgggaagaggtaatttccatatttcacatttcccacagtgttttgaagttggttttttacttaataacagcttaccaaaattgtacatgttcactgtacaaaaaatttcagaatcaaaacatatacaaagaaagtaaaaattacccataactcccaacccaaagatagcttctgttaagacctagtctgcactcctctatacttcata

SEQ ID NO: 36733 - DNA, 1460 bp, Bovine  19866880692913
  misc_feature (1)..(1): n is a, c, g, or t
ntgttcttgcctggagaattccagggacgagggagtctggtgggctgccgtctatggggtcacacagagttggacacgactgaagcgacttagcagcagcacggctaaagggtattcttgtctcagaaatcccatggacagaggagcctggtgggctacagtccaagggagtcacaagagatgggcacaacttagcaactaaaccaccacattggctaaagagggaccttgaacaacacatggaattttctttcagttcagttttcttcactggtaaaattatggggttggcctcaatcaggccccaggggatatgcatcaggggtagtgaccttttaactttaatatttatgaattaatgaaatctatggtagatatttattaaagattctacaagtagccaatttctattccattccaatgataattttgttgttggaatcatttcagttcctctctatattatgcatatagaagcctaaatagtacacagagctttctaatatgctcatgactcaagcagcagagtatataaagaagatggaacaaaatatagactctatacctctgtcataggctgttggctgttgtcaagctgaaaatggtttatttagtattctaattacaaaaaagcagggctaaaccacttatattattcttaagattccttttaaatataattaacacaaattaagacaatatttgcaagggtcctgaaaacaaaacacaatgacaaaacgactagactattgatttaatagatttcttaaatgtaactaagaaaaatttttgctatttaagctgtgttttctcaaagtttcaccaacatgataaaaataccagtgaacctctccctctctgtctcttaaagaaatggagagagtgaggactgaagaatcatggtgatgctgaaaatgtggtttttgaattcatatgttaattgtattagattattattcagcttatctccactccttcctctcaacttccaaggaaattgtgtacttttctgcctaacacatacaaggccttgatcacgtgtccttgatcttagactgttgggaaagcctagagaccttttcaagaaaattggagaaactgagggaacatttcatcatgcaaggatgggcacaaatacaggacagaaatagtaaggacctaacacaagtagaagagattaggaagaggtggcaagaataaatagaagtgtataagaaaggtcttaatgacccagaaaaccacgatggtgtggtcactcacctagacccagacatcctggagcagtcaagtgggccttaggaagcattaccacaaacaaaggtggtggaggtgatggtattcagctgagctattttaaatcctaaaagatgatgctgtgaaagtgctgcacttgatatgccagcaaatttggaaaactcagcagggccacagggcggaaaaggtcagtttccattccaatc

SEQ ID NO: 36734 - DNA, 2085 bp, Bovine  19866880705248
  misc_feature (1)..(1): n is a, c, g, or t
ntatttccagttaaacatctagctttgtctgaaagataatactgaagttgtgggcccggacaggaagaatgaagttgggaaaataaaatgtgatactctctgcagcaactccgttaccatttatttccctatctgataagtgaagaaaacgaggaacaggaagattacataacttccgccagatctgaggctggaacacccgccatttaacccttacgttagacggcagccacatgccaggacagtgcctaggatgtggcagatggtcagtaaatgctgtgtggcgctgatcacgtgagccctgataggatgttgcacttgggcctggtgagcagcttctggagaatgaatatttgtgatgggtattgatcgatttgcctcttttatccccacctttctctttatagggacacttttagcatatgcattctttatgggtttcaaagagcccatgaaattctttatggcttaaaaagtggtgatttggtaggaagttcaggagacttgtctggaaagtgagttttcctagcacacgtacttttcactcgggttcagtgagtgctgtggatgccagctggggaactggtggagattctgggcatggtgggtgggaaaagcatccccctagacacacctgccattgtcaaggtggtttacctcttttctctcttctctatggttcagccaaacattaaaatttcctgggtccagttgatcatacaatcttcactaaaaaccttgcaagtatgaactgatttgcctctcaataaatcggtcagtcattttcatctcttttcttccacctcctgtgcccaccccacaaacacggacagatgtgcacagaacacacgtcacatgcccaccacccatgtttttctgttcgtttgttttttgctctcaatcaggaaaattcaagtaagactctatttgtgaaatataactgctcagaatcagttcagaatcaacatgaccctagtgaaagccctagaattctgtgttttcccagcaggcttcagaaagaagtggaatcaacacagtcaaatataagatgaattccaatgagctccactaaataatgccaaacctcgaggatactcattacctgggctgaagggcatgaagctttgaagtctcagatgtaggtaaagacatgtttaaaatttcagtcatgatgtgaattaatatacttctattccttgccaaatttggaagcagaaagatgattttacatggggacaaaaaaggataagagaaaagacagcttataatttacatgtgcttctgaggtttcaaataggctgcagtggtaagtaagcaaatagacttattcatgagtctatttaattataaattcatttaaaaatatgtaccaagcaccaactgagagggaattagtgccatgtgtgtgaatgataaacaggatagtatttctggcaccaagaagtttgtagccgagtccaggtgcaagaacatggatctggagacatactcagggtgaggccctggcagtactcagaaacccaccctatccaggaaataatactttctttagactcacaaatttaagagaaaatccattctcctgaaacacagctaacctaggttttcacaatcagaagcttcctttgtgttaaccaaactcttgacataaatatgaaagacagattgactttcttaagtgtgtaagacagagcacaagtgtgtgttgaatggtccagagtcttttatactgaccaccagtttgagttattgaaagcagtgtcctcccctctcctaacatctccctaacatcaaagacctgctgaattttcccaagtgcatcttcaagaattgagaaagcagtaagaaagagacttcctgtgtaaaggatacttaacatcacatggccttggagagaaccaaatcttatcatacatctctgctctccttcccctatctcactcccaacttactttcctggtataagtttacccaagatttcacaggtacacttcctgatggagtccccttccccgaccaggccatgccccattttaaacagtctcataacactccatacctttgacagtaccatttacaatactg

SEQ ID NO: 36735 - DNA, 1792 bp, Bovine  19866880714683
  misc_feature (1)..(1): n is a, c, g, or t
naaaaataattaactaaaaatataaaatgtatgatactaaattttagtgacagtgaattcctcacatagtcatgtcctaggatgtagagtgtgtagtagtgtgtagcgctagttgtatatgtacagtgtgaaatgatagcatatggtacaagctctgtgttttttcagtttggtcctttaagactcatggaagccttttggatactgctctgcactttcacaatccctgcactagagctcatagcgggaaaatggcctattatcacaagcaaatgcccactgctttcttggtgccctggccaggggacagaacatactttgagttgctagtccttgaaagagcaaacatacctccaggaggaaaaaaaaaagagcacacaatagtctcaccaacattccatttaatatttactcttctctttcttgggtcaaggttgtggaatataaactgggttcctgccaggttcttaccacttccaacagtcatttttcagaaagttctgttttgggggaagaaattttaagaagtagtacctggaaggaaatcagccatgtttatgttgttgagtgattctgctatgtttgaggcgggaactgcactgcccgtagatgttaaatcattcactgtttggagagaacttcctttgggtgcagattttcttattctccaccagcagcagctatttttccagctgcctatatatgtttgtgggtttccctggtggctcagatggtaaagaatctgcctgtaatgtaggagacctaggttcagtctttgggcagggaagatcccctggagaagggaaaggctacccactccagtatcctggcctggagaattgcatggacagaggagactggcaagctacagtccatggtgtcatggagagtaaacacgactgagcaactaacacacacacacacacacacacacacacacacactccatatgtgcttgcaagtttttctcccccatctagactgttaataagtggagattgatgaccacacctaatctatcacccctgcctagaacagcccaggtcagtaaggcaagagaggaagccccgcccccttgccaaggcgggacttccactgcagcgccccccgacagtcttcacctacaggtcggaattcaccaccactggtttggctttcttctcttcctgaacaggtttcccccattccttagggtctcccagaagctcttcctaaataaatcaattaagcatgattctcatctcaaggtcttcttctaggaatctccaaatgactataacccagaggactgagaatcagagccctagaaatatgcaaattagcatattgtcttagttagaggtccttgatttccaaagaggagaaacccactcaaattaacttggatggagagtttatagaagacttgaatcccagaggtacaccattgcaggaattagaaagtcattttaaacctgttgaggccacatggtctctcttctccaattctctcagcacttgtactcaagctttattgctgcaattaatattctacaggatgctacagtctaatgtgttatgtctgtgcatgtctgcaacttacgaagacgacagaactctcgctctggctttacagagaacaaacttatacagtctcttagtaccctaggtccaactgccaggggagaaaactcaaaattctgtaggccacctagggtaggtgtctgctccatgacagtcagatatggcctcagaaacagggtcacctgctccaacatagccacttcttcaacagtactggggacatgggtgg

SEQ ID NO: 36736 - DNA, 1671 bp, Bovine  19866880754838
  misc_feature (1)..(1): n is a, c, g, or t
ntccctacttggcaggacattgctggcaaaaatgccccatttggcccaagagaaacattttttatttgtagaatcgtttccattatgattaatctttctttctttttccaaatactcaaagacttgctttattatagtacacatgggatggaactgacgggagggggtggatgttgtgtgcaaccactgccctgattagcattggatgcccatccgatggccatgaatttgccaaaggtgccactgctctgcatcgtggtttttccaatgccgcccatcagctcccgaccccgcattcccatcctgagacaggaaaaggtgccgaagagcgcccctgccgctgtgcccacggtgcaacgcatcacgaagcccatcttcacgcggtcaaagcagcttggctaggactgtccatagggacccacggccaccggcatctcgcttgtgggctttgatggtggcttgcttcccggccctggtctgaccaagaaccattctcacagccccctgcccacccctcccagggcctcttcctgtgtatgagtgtcccatggtgactgcagcagtgtgatatgggcctggttccaactgagcaggggtcttaagctcctgctggcgttaatgacagccttatcatttgggtatcgtggaaatcacgggtgttttcacttagggctaagaaggcttctctgttaagtttttaaatttttttttttttactttgcagacaccaacgactgcagtcctcatccctggtaagcatggtgccctattatgcaggcacttgttggctgtgacaggtgtgggcctcctttataaaatccagcttctgattcaggagagctgggggttgctgcagattccttctttccaacaagctcccaggcagtgcccatcactccagtccgtgggccacacttcagtcagatggtgtccacgtttagagcagtgatgctcagacttggagggtttagtgcctgggacgcaaccggagctcctgcaacgaggaactgtgaattggacgctctgggggtgggacccaggcactggtgcgtgtgggcagggctgagagctgcccatcataaccggtgtggggccacctttggcgggggagtggcagacagggaggtggtaaccaagtggcctttgctctcgtagttacaacagcggcacgtgcgtggatggtgagaactggtaccgctgtgaatgcgcccctggcttcgctgggcccgactgcagaataagtaaggaccacctctgactgctgtctccccaccccttagtctaaaagttctcatctctaaaacagttatggccatggttctgagtagccttgacaattagtctcctgcttccagctgggagtaagatgcccctggctggactctccatggggtgcacagccaccctcactcctggggagagctcggccacagcaactgatggttaatctactctgaggctataagaaaagtgtgcttatcctgtggtagcatgaagcgatgggcaaggatgcatagcttcagacttcagccacaggaagggctgaggctgtggtttccaaggcttgatcaggccccactgaaatgattcagacaaaatgaggtcaggaaatccagttttttaggaagtttacagtttattctgagccttttccctacttttttacatgcc

SEQ ID NO: 36737 - DNA, 1379 bp, Bovine  19866880767105
  misc_feature (1)..(1): n is a, c, g, or t
ntggcaggctactatccgtggggtcacaaatagtcgggacaggactaagccactaagacacatggtccactcagttaatcaaggattgacagtaatttttttgttgtctgtgttttgacaagacaaagttcagcaaagctgttattttaggtgatgtagttagaaaagggggaaaagaaaaagaaattattgttctgtttggcataccagtcagttcaataggcctgaagacaccatgcagtccattctaacgtgtacacaaaattgccaaaatgtgaactgttgtattaaaattgaggataaaaagaactactttcagggtcagtaattagatttcaggaatgaggaattcacagatacttaaaatcaacatttgtcacgccagaagaaaaggcattatacaattccaataaatttaatgaaatatcacagccacaagagctgggttaattaactgttcaactttccatttagtgttctcttcatgtttaaattacattcaataatttttaaaaatgttttaaactttttttttttttcaaatttaaacggagccaaatgaagacgtaagaatctgccttacactgtgttcaagaggccagcagatggcgccccgcaagcccaataggcagaatgagagccttccccgcattgcctgcatccgggttattgtaggcctaatggatagggttttaactgtgtgcatacaagagtaatctgatagccagggccaggttgtttacaattaagtgctctttttgcccttcacgttactgatcagttctatgcagtcaaaaagattatgatattttagtggggcagagatgtaaccagtttttctccattctgctcattaatttctcactatttattcagcactaagaactgagctaaaaaaaaaaaaaaaaaaaatagcggctaaaattagctccactcatccattactagatcatgggtgtgtgtttagaggatatgggcttgtttgccctctcattttggaccaagtggcacaagacctgttaacctctaatgtatcccgctgtgagaataaagacatgccaggtgtaatacactggggaacctgacctcagcgacccgcacagctattcagcagtgcccagaatgttcttggcacacatcattatgcactggcaattctgattgactcttgccaaagctgagatactaatactcaacttttgaaaattgccattaagaataccagcctagactttaggactccaaactccaagacgtgtgccatattaactgacaataattttagaatcatttagtgtttcctcatatataaactggtctcataaaattgctatggaaacaaatagaaaaaataggaaactttttgaataatacaaagt

SEQ ID NO: 36738 - DNA, 952 bp, Bovine  19866880806199
  misc_feature (1)..(1): n is a, c, g, or t
natgctgatgcccgtcgccctctgccctgtgacaacgcagctgctcccagcaggcaggcattcttggccaccccccagcgggccctgcacctggccacgcgaccagctatggtcagtgcagcgtccagggacaggagtgagcggagtctccccctgggagtgagctcggcccctcgagagcctgccatgtgccaggaaaaggacacaccctgggtagtgctggtccaaaaagggtggggtggcacacagaacagaactgggtgcccagcgtgaggcatccagcactctgcttgccctgtgtgcccacgagcatcacaactgcctgctgtaggcacagaggatggggagggttgttacagagcataatggtgacaaaagctggctaaaactaagtgactctactttcaaaggaccctcaggtttcccggtcctgagggtctccagcagatgtgccctctgtgttctctccctgagcatgatgtcctcacacaaacagtcaaaaaggtggctgcaatgcctgctcagcccaggggacccacggcagcgggacctggcccacataccttcctggcatttggcaccactgtgccctggggggcagatacagcggtaaccattgatctcatccacgcaggtcgccccgaaagcacaaggtgaagactggcactcgttgatgtctaggagaaatggtcaaatttaggctccaatgggaggcaccaatgcttttctgataaaatacacagacaggatctgcaggcctaagtataggctgagtgcattttcatcatgtgaccagcacccaaatgaagaaatgatcatcatactgccaaagtctccggtcactgccacccaagggttaccactagcctgacttctaacagcttagaatttctcattcggggaaacagcaatttttaattaaatgctccttttctctgatagtgtaatttag

SEQ ID NO: 36739 - DNA, 1877 bp, Bovine  19866880820922
  misc_feature (1)..(1): n is a, c, g, or t
nttagcatttacattatggctaagcttcaggggaaaaaaatcaagatatttcctatcttaagttttaaatttaaaaaatccagggcaacacagtgagaagaggcagaagcagatggatgtaaagacttgccaggaaacatcaacacagaccttctgatggtacctgcctgtttgctcgctggaattttctgctttaccaccttggcattcagaacgtgaaacagtttgcaatcttattaaccgctccatggtaaaatctgccaagaattcactgtcttattttcactttgttaaacatgcatgaccacacatgcacaaacacagtaccaactgcccctgaattagattatataaagacacttctaaagtcttaagtcttgaccatcaaccagaagactgaggtgtctgccagtagcacctcttcttgtagcaggcagccttcagcagatcatgtaggtgtcagtgattaggagaaatgagagataatttgagagagaagttgggaaagaagatatgaaggattaaaaatagatgaatctgctttttatatgatgcactatgaataaactttttctcacgtcatggaactgatttacagctctataaagggaagaaaattggttttttcagcctcagtgctagatacatttctgcaatgtcatcccttgtcagcagagacaaacctgattgaaagatattgatcaatcagtgagcaccagatacataaatgaaccccactgaagatataaaatctcatgcttatatggtttttgacctcaataagtttaacatctagtattcttaatgaaaacaataaacaacaaacatttgtaaataataccagaaagaaaatacaataaaacagtagaaggaaaatcatgagggagtatataattatttgctaagtcaatgtgaccaaaagtaaggaatgaaaattcttagggcaatatttcagtggactagaatggtctgagagaagaaacagaacctaagctggcttttggaggttggagagaggtggggggaagtctgccaagtaaaagttacagcacaggtagaactacaagttaaacaaactcaagttatgctcagcagaccctaaaaatgcccatctatttgggtggagtgggaggcttgtaaaggggaatatgctagaacagtgagttagagctgtctatgaaaggccttgaatgctacactgaggaattagtgctttatcctttgaagatgatttctgagcagaagctgatgtacaaagtagccatgtctttttttagcattttggaattgctgttgaccgaatggaattaaatttgcattctctcataaatagacagtggcaaagtgttatcataaaggatgataaattaaaaaaataataaccagtcctcatttagtcatctgttaagatcaccctgcatggagggaacggagactcagatatagagaatggacttgtaggagaagcagagagtgggacaaatggagagaggagcattggcatatatacactaccatgtgtaaaatggatagcccggaagtggctgtgtcacgcagggagcctgcctggtgctctgggatggcctagagtggtgggatgggaggaggggaggggaaatatgtgtaatgatggccgatttgcactgttgtacagcagaagccaacataatactgtaaagcagttttcctccaataaaaaaaataaaagaagccagatatctcaaaaaataataaattttaagaaagatcatcctgcagtatacacatgggcttctaagtcctacccagaagttaattgtaagtttcaaattttaattattgactggaacaaattattcaagatgagtgtctaccaagaaggtcgagaatcgggtcag

SEQ ID NO: 36740 - DNA, 1349 bp, Bovine  19866880869275
  misc_feature (1)..(1): n is a, c, g, or t
ncctgcaaaaaaaaaaaaaaaaaggaaaaagaaaaggatgaattcattatctccaaatagtggaaaatattataaatggcagtaaatgaagtaaatgggagtttccactgtaatgtacaattctttaagccagccacccagaaagaacacagcttggtttgctgggtggggagtctgagttaaaatacaggagactgttcttgggctccaagtgccatttgggagtaaggcttttcccctgctgctgtggatcttctgctttattgctgatctggactgtgtgggtcttgcagcctgctgaattgaacccaaatggagctctcacctcttcaacttagatctgaccttagggtgttgctttcctgcctgactcagtctccagaggaaaagcaaataagacattaacttctttttgtgcatgaggaaatggtctctctttgcttttggatggctctcccgctctggctgcctttgctggcccatggaacaaagccgtggctgtgtctccttgtcaggaggatgcattgctgagcacgtctgctcaggcctgggcgatgatgctcccctgtggaaccccctcctatcctgggagctgaatctgtgggttgacagctttcccacagagaaccaggacacttccgtccctgccaccacaactacctcctctcctgctgccagaatctatgaagggaaccccagccttcacctaaatgaatgagttaacactggacccgagtggagatgaggtccatctgatggtgtctcttctgttctggctaataaagcaagtcatccacagcataacctcttctcaatattttcttaactaattttcatgatttgggggaaattatgaaatatatatatgaaattattagactcttgttacctgatacttgccatggaatgcagaaaatgaagtaactgtgtctctataaactctaaaataaactcatctctagggtcctattttctactttttatcctgactacaaactgtcttgtactaagcaaaaaaaatctctgaagtttggtctatgaaaatttgctggcctgtggaaattgaggggtgctggtgccaaattcaattctgcaagtattgttgagaactcactatttgtgaatccaaaataaatatgagtcatagcttcagaccttaatatgcataaaatctacatgaaaagacagaaaagcatatatggtacacctgatctgtattccatcccatttgttgggtgtggatgcttcagttcatacacacatacccacacaacacacaaatacacacatatgcatgcattcacacagtacttatatacatgtacttacagatacatatatacccacca

SEQ ID NO: 36741 - DNA, 2547 bp, Bovine  19866880923983
  misc_feature (1)..(1): n is a, c, g, or t
naaattatagaagcgaagaccacattcgtggttgtcaggggttaggaatagggaagctgcagaaggaagctctggcaatggaattctacactgtgcttatggtgctggttacaggaatagaaacacatgataaaaacagctacacaaatgcatgtaaactggttccatctcataagctctggaggttgtaccgatgttagctttctggttttaatagctgcactctagtcacaaaagatgtcaccactggaggaagctgggtgatgggtacaggggactccatgtacttttatgccaatttggggcaaatctataattatttcaaaacaaaaaggttaaaaaaattaaaacttcagttggggaggggggtgaggtggaaccacaaactgagagaaggtgtgtgtaagacgtgcagacgcatattcataacagaacagaccaacagaagggaggggcagcagaagcgccagagagcaccagcctccctgctgagtctccccacatctggtgaggtggcggcggtgcccgtaggcatctctgactgaccccttgcgttaatgctgccttgacgaccaccctggggcggtgaggggcaaggccttcactgtccttttatgaaaccccgggaggctgaagtctaaacacaggaaggccatttgccaggggcctggggcagcacacagggcgctctctcctctcagcgcctgttgtccgggacaggacagaggaagccgcagacagccgtctgcctcccccaaggagggaaaaccacaggcgggggtgccaggcggtctcaggccccaaagagctggtcgtcctgaagggcccgggcctctccaagaagctccagtctccatcctggcactctccagcctcgaaaccgtcaggcgaggaactggagcaggtatgagccccaccacccccagctcagggaccgtcacagctccgaggcctccacagccaacttgggcatgtgaccttgaacacacagggccagcacatatgtgtgcatatgcgtgtcacactggaagaaggtcctctcttcctaagatcgagttatcattggaaacccaactgagctgccgcctgctcctcgggagccctctagggatccccagggtgaagggtcccttctctgggccagcccagcccttccaacaccccctccactcacttaactctgctcctcagtccctcccctccctgtgaccagagctttctgagaacaggggccattcttattccctctgataacctggagcagggcaaaggtaagtgtcaagcctgctaattggaatctgctgatgttactgaaatcagtggctacagactgtgttactgttttagacttatacctattaatctaatacatctttactgtctccaaatcccaaattccttattaaaccctctaaacaggaggtcaaggtactctggtcctatttcaatacacaaataacacgtaagttacatatatcatgcagccgaagttgagagagctaagatgcatataaatgtaaagaaaatatggaagtgttttgtattgaacataaggggcaagagatacctggttgaagttttaggtcatcagttcagttcagttcagttcagtcgctcagtagtatctgactctttgcgaccccatgaatcgcagcatgccaggcctccctgtccaccaccaactcccggagttcactcagactcacgtccatcgagtcggtgatgccatccagccatctcatcctcctgtcgtccccttctcctcctgccctcaatccctagcagcatcagagtcttttccattgagtcaactcttcgcatgaggtggccagagtactggagtttcagccttattaggtcataaatgtgaggttttcagtgacttgtttttgtccttaaaatactgacatccttacattcatctgaatgaaaaaggtattattagcctctacatactgatcattaaaagataaatgtgcacacacacagttaaaaagcaaacatgcaccttaaaaaattaccttcctaggctcctagcattactttaaggagggaacagcaagctcagggcctggggttcaaagcataaatgttaaaaaagctttatcagagctgccgattcgagtctacatgcagtagaatttttactttacaccctgtttttaagaagttcagaacaagctccaaaaagatcaattttccaaatatctcaaagcatataatcttcataaacatactgagaagttaaagtatatgtcttacaaacagtatctcatcctctaccctgcattcttgagcccattttctctgacctgtaaacaggcattctttcacaaaaagtcttcaatagcgtctgacctcaccaaaaatatgtgtttttagtggagagggaaagatcctaaaatccttaagaaaattaatttggggagggaatggaagtagatgaaacaatatcatgattgtcctgtcatttaaatacaaagcagagataaactctattaaagtttgtgaccttctagattattctgtgggaaaattcaaggcact

SEQ ID NO: 36742 - DNA, 1588 bp, Bovine  19866880957310
  misc_feature (1)..(1): n is a, c, g, or t
nagtgaaggctgtcgcagcacctgcaaagctagaactcgcatgactgtggaaggacagggttctctactggggaacacagccccccatggactcagtacagccccaccatacactgggtacaacccctgtgcactcagtagagccctttccttttggtgtgaaggtaggttttggacagacagagcagtaggtgttgctgtcaaggccagaccaaaacccaggttagctcagagaaaaggcactgcccttgactatgtgtctaacacaaactcatgcaatgcctgatttcaatgaaaagttcagtaatccccctttacatgtaagaaaatagaaagccaaagaggtttacataatttacccacaggcctcagtggcaatttgatagtgaaactgggaatcctatccaattctgtctagttctctacaccgtgtgttagtatcatgaatctgggtggaggcaaggatttccattgtacaaatggttgctactatggttttccaatcagaaagatgaggagcctggggctcaggtgccttgggaagcatggtctaagcagcagagggtgtctggaaagtgagccttctttactgtgaggtgcaatcagctttccttccatgtaggatcccactcactttcagatgtcaaatcttctgtccttggatcacactcccattttaaggagagtgaattcacaccatttagtgtccttatatctcctggttcatggcattctacaatgttttggttacttttctaattataaaatggatgtgtttgtttcatattaaggacctcagccaactgacatcatatagggtcatatggcaaaagagaggggaatcttctttctggggtttaggatttatttttagtcattttcaactatttttaatccaatatccctccccatttcccccaaaagcctcactgggttaggtttcctcagaaaaagctgatagaaattatctcaaactctggaagacttataacatgttgagatgaaaatgcccatgatcataccaactgacatgtcagccattcacactggccatgagaatcatataagagcacagctcagaggctgcagggtgagacagttgtccaggggagaggactactgcgagctgtttgcaggtgacacttgcaacagaagatggtgagtttggcaaaggggaccggggcacagaccccccacagcatcctgattccccttcacagcacaaacaccagcttgattcagtggctctctcagtctctgcttctctctgatggtctttctcatctgctcccacttccaaaatatttgagttcatttttgttatttgaccttttaattttagaaatgaaaggatatccaatatgacttaaaactaggaaagcacctatatgatcatcattcaaaattagtgacagttaatatttccttgtatttgccttcagaaccaaataaaacattacatcagttcagttcagttgctcagtcatgtccgactctttgcgaccccatgaattgcagcacgccaggcctccctgctacatagtccctttcaattaaaaaccccctgggtcccattccctaagctcct

SEQ ID NO: 36743 - DNA, 651 bp, Bovine  19866880975905
  misc_feature (1)..(1): n is a, c, g, or t
ncatggagaacgtgaacggggagcttcagaacgggaactgctgcggcggctcccggaacccgggggaccgcaagtgctcccgcgacgagtgtgacacgtacttcaaagtgtgcctcaaggagtaccagtcgcgcgtcacggccggggggccgtgcagcttcggctcggggtccacgcctgtcatcgggggcaacaccttcgacctcaaagccagtcgcggcaacgaacgcaaccgcatcgtgctgcctttcagtttcgcctggccggtgagtggcggaccgggccggggtcggaccgggccgagctctgctttctcttgcgagaggagagggatttaaagggccttggctggaaactcggcgcaggcccggggcgtctatgggggtggtggtcagggagccggggctctgtgctagatcttggcaagccccagtccggatgctttttgctccgcgcaaaaaaaaaaaaaaaaaaaaagtggaaagtggggctcgagagggtattgtcaggcaaggctcccgggagggccggttgaaacttgcaacttggaggccccagagtaaccgcccgagccaggaggtcattatggatgatctttgctcaaccaattaaacctgatgcgctgtggaaggcggctgggcacaattctgg

SEQ ID NO: 36744 - DNA, 1780 bp, Bovine  19866881002130
  misc_feature (1)..(1): n is a, c, g, or t
naatctttagtagaaaacactggaaattaaaaaaaaaaaaaacaacaacaacagtacaaggaaatcatcattcaacctcagatggtaaaatatgagatgcaaattcttgaagaaaataatttcaaaggagctcatcttgtcagaaataacaacaataaaatatcaactgagttaagctttgggcattgtttgctgataaagtaggatgaagtctaaccattgtatcgcatttcctcggggaacagaacaggaagccctgatagctacagaaaaaaagggaaaggagcatcatacagaggagaatgaagcccgtgaacatggctcagcatgtctgtgggactcacagaacatgtctcgtgttctgtcattattatttattagtgaagtttactgaaccgtagggattagcatcttattaatctaaagaagttaggattttggcagcacagaaaaaaaagtggagaactaatacaagttaagacattttacatcaaaatattcatttggtctagtaaatatccaatttcttaattcttccacttatactattagagaatttttatatgttaaacatttaaatcaactgttaagagtgaagtattttccacagtatatttaaattattagtagtattattttttattatcataggtattctcagactcagtttgatgatcaaaactacttaggcattcatatgattgaaaagaacttataagcacttttataagacctatcgtattctgtattcttatattgttgaacagctttttggataagtttaaaataaaacaatattgtttataatgacataaattatataggttactatttaagaatatcatgtaaaaaaaaatcactctcaaaatcaatgtgggccctgtcaaaatatctgattagtcaggttattcatttctgataatctttggagaatagtcaaggagactaaacatatgttatagggtcctgtttcagctgtataaataaatctatcttttaatctgaagtaagagggaagtttgaacatctgatagctttataattttttttcaagtagctaagtatttccacttagtaactctgtgcttagttgcccagtcatgtctgacttgtagtctgccaggcttctctgtccatggctattctccaggccagaatactggagtgggttgccatgctctcctgcaggggatcttcccaacccacaaattgaacccaggtctcccgcattgcaggcagattctttaccatctgagccactaaccagacagcaaatctgccagtgctatgatcttagacttcccagcctccaaaatgatgagaaatgtttgttagtcaaaagccaaccagcttatggtatttttgttatagcaatccaaacggaccaagggaatttggcataatcagatttctgctttaaaaaagtcaccctgatgacaatgtggaggacagactagaagggaaagacagtggactttgtgatattacatggaagattcaggagataggctgagtggataggggtacccgctgagaaactgaactaagacaatgcctctgaggatagaaagggggaaatagattcaagactagtcctcagatcttgctctttctctctctgatgtcagtatctctaccaggttagtcaaatgtctcaatcatgtcctttagagcgttttgctttcctccagcccaggaaccagtccaggatcacctattgtatttggttactgtctctttagtctcctttaatccgccaacatttatcacctttccttac

SEQ ID NO: 36745 - DNA, 1398 bp, Bovine  19866881011435
  misc_feature (1)..(1): n is a, c, g, or t
nacttagttagctctatggtaggaaaaaaaaatgatctatagactatgagaatctagtaaaaaccatgtagagtgtataatttagtcagaggacaatttcatgctcccataaagttaataacaatgtaagatagtatacaagtgtttctcaagggcctgtcactgagaaatcttcagcaagacaaaagtcaaccctttcgctggttacatggatgcttttgctttgtgaaaaattcattgaaccatactctattacttgtataatcttccctatgtgcattatattgcataaaaagattaagaaaaaaatagtttatccctctgagctattgatactgataatgatttagtttgatttaaaatactgtcttttcacaagaatttccttttattatactagctttcatgcatctgatatattcttacatagttcaggactaaaatttagaaaaagaggcttgacaataaaaaaatactttttccttataagcaatttaatcatgattaatttttaaaccttttttcaatagttttgaaaaaatatattatctttgtcttctacctcagcttaaatgaactcccattatgaaaagcaatctagttctctgcttcagtatgcactatacttttaacatatgagcaaaataaaattcaaacagaggagaaattgctttttgttacaagtttttgctaacagaaggtaagaagtccttttgaaaaagacaattgaaggaaaagaaattggaacagttagaaagaaaagaagaccttgtagaaataaaatagagaccaaatcagataggagcttacttggaaaactggaatagggacaaattggctgggtcaaaaaaggaaaacggcttttagaaaaatggctatagaaataatcatagaatttaaagttggtttggatgatttaagaatgcaggtgaggaggggtgacaagacagctcatgtttcaggagatttgcatcatgttttatgcaaagttgagctagaagttgtttttataatcaaagcaaccaaaactgattattaactgtatattcatgacatgtgagcattggtagtgattgaactcagatagctgtttgagtgatgagatacaaggaccctcaaatctgacgaggaagccaagacccaaagagattaagtaatttggtgaaggccatctgaagagccaagaataaagaggtataggactagtctgagtttgttgttgctgttgtttggtcactaagtcatatgtgactctttgcgactccatgaactgcagcatgccatgcttccctatccttcagtatctccctgagtttgctcaaacccatgtccattggagtcagtgatgccatacaaccgtctcatcctctgttgcccccttctcctcttgccctcact

SEQ ID NO: 36746 - DNA, 1524 bp, Bovine  19866881013304
  misc_feature (1)..(1): n is a, c, g, or t
natgtctgcagggacagcgaggaaagcggaccgtgctcagagccagctctgtgggtgacctatgacccatcatcgtggctgcttatgctctctattctatagcagttatttctcactttgcaaaaaccgagtcaactcagtttatccagtattggggaagggaggtgcgtttccttgataaataagcgcatggctaatcggactctttagaggccagagagtgcctttgatcctcaaacaaaaccagaagcacacaccttcacctgggacagggctcagctactcttccctcaggtttcaagccctctgcaactgtgtcttctcagaaatccagcttcagcaaacaggttggagcagaggggagggggcccccatggcagagtgaagggggagtaagcaagggagagcagtaggcaagcatttccacggcgggcccacgaaagctgtgtcagaaccgtctcccccttcccactcagctgaacttgggaaaacaagcaccccaagacgcaaaggctttctgcttccagagagctgaaggcaagttaaaaatcttcgtcatgggaaaattatagggatccagctaatggctaatcacccatggccgcgagtcaacttagcccctgagaattctgactaaccacttcctaacttctaaaagcaagccatccacgccccagtacaaagaaccaccaggatgtgcggtttaaaaatcagacacaggattccggttgatctgaaatgaaacttcagtctaaatgacaaatgactatttaatggagtaaaagaagaacaaagtcaatgctttggtagcaatttctttaaaagtggaccctcaagttggtgggagttcacggtgatgctcttgatactcttagcctagaaggtagatattaagagggagttgcttttgaaatagcattcttgtcactgtctttcccctattccctcccaaatgagggcttgctacacctcttcaatttgcttaacaaaatgcaagaagagacagctgaggacctgccctcagctcttaattaatgagagctggatccccaagcataaaaaaggaaccacaagaggccacggatgacttcaaaagaaaacaaataaaaatactgaccctaaaacaggcatccacaaagttgtcccagtttaataatatatgattaaggttctcatgagaaattgaagcgactttcctcacaggatgattcacaattaagtttgatattattggcaggcttgcaatgaagcaagaccgtgcatccaggaaaaggaacccaggtcgactggggagcaagagaggcaggcaggttctctcatgtggaggaaacagaacaaaaacacacccttgtcggccaccatccagagggctgcttacaggtcgcgggccatccagctacggagcagcagaccaaccagaacttcctctggccgcaagagggttctgttatcatttttctttcaagggaaggggaaggagccgggggaaggctatgcaaatgccgtggggaaagtcacaccttc

SEQ ID NO: 36747 - DNA, 1092 bp, Bovine  19866881016161
  misc_feature (1)..(1): n is a, c, g, or t
nttgactttaacagtgagattcattcattaactcatgaaacattttcagtggtttttcctctccctggagcccactttgacagaaagaggcatatatgaactcacttgagaagtcaatgaatcttcttttctaatacaaatagataatatcacattgttgcagatttatttagtggactattttttagaacttatctgccagactctattcatgaattgtcttatatttcacatatattagcttatttaatttttattatgaatgtacaaggaaggtcctattattgttcccacaatactttgaagcacaatgaggttaaacaacttcctcaagattaagtagcttggaaaaagtgtggattcccacaagacaaatgcaaaaaggagatgaaacacttggcagatgatatagtatttctcatgaagctgcataaactctgaatgtgtgttagtcgctcagtcatgtctcactctttgtgaccccatgaactgtagcctgccaggctcctctatctatggaattctccaagaaagaatattggagtgggtagccattcccttctccatgggatcttcccgacccagggatcgaaccccagtcttctgtattgcaggcagattctttactgtctgagccaccaatcattttgggggaaccaagtagcctcctcggggcttccctggtggctcagatggtaaatcaagtgaccaagtgacccaaggagaggacaatgaccagaaaccctagaatcctgctgggtcttttgggaagaagcacaccctctctgatagggacatgaagacaggacatggactggcaaccatcttgccactgttggggaaactctgagattgaaagcaaggtactgatatcaagagattgagataaatcaattcctgatgatattatttgaacccctgggttcagccatgcccacgtttctcattacagagcctgcagacgttttagttcctcaagtccatcgaaaaccttcattgtcaaagccagtttgaatcaagtttctgtcattaatgacaaagagccctgtctgaaagtgaacaagttcatttcccaagcctgttgttctgctc

SEQ ID NO: 36748 - DNA, 1947 bp, Bovine  19866881020907
  misc_feature (1)..(1): n is a, c, g, or t
natctgagacccaccaggggcttcctgctctgaagctggagaaaggtcatcaggcctggccaggagcagcagaaaccctcatcccagggtgcggttgcagaccgggcttctaagcaggagccttgtctgtggctgtgagtcagcattccctggtccaaagcagagtcctcgaggggccagaacaccgcaagaaatgcaggaagcgcaaccctgcgggagatgccgaccaccacaagagagtttctcttagaagtgatcgattagccccgagggaaataatagtgggaaaagcaaagttgccagggtcctgccaacttgagagctgtcagatccggggttacttttgaaacaagatttggcagaaactgcatctaatgaagagttgcatgttttggaaaactctctcctccagacatcttacgaaaaataagccagggcaggcacaactcagccacaaacactgaaagcttagctctgactcagggcagcccaaccaagaaaagaaaagggtggaagcagctacttgctcacagaagaggattgcaaccccgtcatggaggatgtcgtgaccagacctgggacaaatgagcagtgtgcctagaagccagacttacaggaattcaaatgatcattttcagtagaagatatgtacctgcattgggcttaactttcaaatcagcagcctccaggagcttgttctgacaacaccgctcctttctggttcacactttaacatcagaaatttactttagtgctaaagagccattagctttgtcggcagtgacagcatccatagaggaagcacatgaagaaaccagtggtgtgcctcgtcacatccttgcatgaagcacagtgaccgtgatgctgtctttgctggccagtcctcctgccctgcagcctgagtcgggcagcagtggtgaacaggcttacgggtcaccccatctgcttgcggccccagcgtcatatctgaaagtatgtgagaaaggcagagcctgggccccacccagacctacagaatgagaaactgggtgattctgaaacctgctcaagtttggcaacccccgggctaattgcagaccccttgggattggtttcctgcagcctgactgtcctggcccccagcgcatcagcagggcccatgtgtggacatgcagccgtcacgacccctcagacttacgaagcacctggctcagggtgtgaagcactgttcccaggtccttaagcatggtggccacagcaccccgggagctgtgactgcgctaagagttgcaggacatttacatatagtttggcctgacatttgggggagacgtcagagaggcttgttctttcttgtagttcaggcatgtccctaccccttgcccctgcccccacctttaagactctggtgaagttcagaacagatccaagcccaagaggaattcagtgggcagagtttgcagttccccacttggaaggctgacttggaaatctaagggccacttagatttcacaccaggagacttccatttgcaggatcacccactgttgtctccaatgggcttgctgaaatgtcatgtagtgaatcatagcaatgacttattttggatggacaactacagtagattttcttaaccaagttttattctgaaataaggaaggaaactatattcaaaggccacccatcaaatgtgtctttttttcctgctcaacattgggtggtcctttgaagtaatacctcctccctggtaacacggaaaatcaagatattccccaaagtgtaggagttagcaaaaaaaaagaaaaaacagaaaaagcccaacaaaatgaaagaatatggaaatggacacagtggtaagttcattcttaagattagtggtttctcccagctcattctgtccatcccccactcgcctttccttagattgtagggcaggactcatgaagaggcagccgaatttcatggca

SEQ ID NO: 36749 - DNA, 815 bp, Bovine  19866881073518
  misc_feature (1)..(1): n is a, c, g, or t
naagtgcagactgcccagggcagaaccctcctgaggaggtgatagaacatggtctgtcctgagccccctctcagagtcacccattttctgggtgtgcttgtcactgaagtgttgttgagtcttaaacagaaacagttgttgcagtagtttaagcagagagggcacaaaataacaacccaggtgataggccaagaaacagtgagctccctggaagagtctggaataaggaagagccatcccaatagctgctgcctgccccagaactagggggagctgtttgaactagaggcaccagagaaagtttttatcaggtttttatttcattagttaatctgggcctggtggttaaagccagtacttgtatgtttaatgattatctttcaagaaaattcttggctttagagtttggtgtatttgtggatataatgatgactgagtttcagacttcccatctcccagtgcagagcacatggttcagtccctggtcggggaactaagatcccacatgatgaggggcaactagagaaggccgtgtgccgcagctagagaaaagcctgtgcaatgcagtgaaaagccagtgcagccgaaatttaaaaacagaaaagttgtttaacagctgtgtcattgcacagctgtagatcagtagggtctttctcacagccttcatgtacatgggttttaagagtattagcaaagggaccaactttctgcttctgcacaggggcatgtgtttgaggaatttcgcctttaagcattttccttccacatgtctgaaacacccctggttctcttgtttcttgagtggttgtttgatt

SEQ ID NO: 36750 - DNA, 2993 bp, Bovine  19866881076207
  misc_feature (1)..(1): n is a, c, g, or t
nccaatctctcaggggctgctcaagtagatctggttgcaaggctcacaacgggagttgtgtttcgcctgattttaaggcctcctcaaagtactgtttccaataggctcggaggatttctgatttggaggggcacctttgagctggaaaatatgattttctggcttgaagaaaaaaatttaaagacttataaaaattcccagaagactctttggacatcagctagctgttactaaagaacattgtgcaaatgaatcagaaacatatggattaagttccccctgaattaaacatgggtttcacacatgaagcgggtgagagcaggggctggtgaagggaagagcatgacaaaaagacttcgcatctttgttaaatcaaaaccatttgaaaaatccatttttagaaagaataaaaacactacttatacttaattcctcttgatttgaaatgttgtttatttcagtttggagagctgttccttgaccttggtcttcaacaatgacctagtagatcagacagaaagcattgttttcctgggcttcttttatacaatgtcattgggtcccattcaacagctttggtggtgagtgttctataactattatgtttctccagaaataaagtacaggaaacattttccataatcatgatccagtggtattttctaactgaggtaccttccccagtggaccctgaaaaaattaagaaaaatgcatactggcaattgggaaatagatctacatgtaagactcatggtctcagcatggagcagaatattgagcaaaaagagatggtctctacttacttcttgattcattttaatagcaattacagtaaaaacaaacaaacaaaaaagtgaccttgataactttccttgcatatagccaaggtcaagactaacttacattcttttctaaaaatgttgctttgtcacactgccaaggacaaaggaatgttgagtccagctatatatcttttaaaattttgggaatgttttaagaaggagagaaaattttctcataattactgtatgagatgtctgaattcaatgcctgctatgctcctggagtttgaaaagagtgaactgtcctttaatcacaactttttccttatttattccatgaatctgcttagcaaactcttctaacaatgttaaggcaaatcaatgtcaaagtcagacaaattgccatttttaccattttaacgcaggcaaaggaactcatttctacaactggaatgcaaagtcaccacattccttacaatggcttcccccaccctctaccctatccattatgcccacttctctacccttttcttataactttcttaattccaccacaggcccagtggcctccttcctgttctgaaaacacgtgagctactcagccataaaagataatgaaataatgccattttgcaacaacaaggatggacctcgaaattatcataataagtaagccaaatgaagacaaatatgatatcacttatatgtggaatctaaaaaaaaaaaacaaacaaacgacacaaatgaacttatgtacaaaacagacatagaaaacaaacttatgattaccacaggggaaagggaagaaagggataaattaggagtttgagattaacaggtacacactacttatagaaaatagataaccaacaaagttctactgtataaaacagaaacctataaaggaaaagaatctgaaaataacaaatataaatacatgtaaaactgaatcactttgctataatctgaaactaatacaatgtacatcattatacttcaattaaaacattaaacacacacacacacacgagctgttttatcttagaccttgaccaaggccatttcctctgcctaaacatcaggccctcacatctttgcatggcttgttcttctcaccattcccatttctgttcaagtgcccaccccttgtcccagtcattccacaatctagttaactgtttatttttgcccttagaaaattctcactctcagaagttatctcatggctacatttatctactagtttatttctgtctcccctacatgctgtgggcttcatgaaagtgaggaccttatctggcttgttcactacttcacccttagctcctaggacaggaacttgtccagaataggcactcaataaatatttgttaaatgaatggatgaatgaacaaatgaatgagccatggaagactgccattagtgtcctatctggacccctttaccagttctgctcatccccagccaccatgtgctcatgcctgcatcttccctggaggactgcccttgggcatctggaacttctcacctatagggagtttacagtccccctgaggcatcccataaacaatgactgactgtgtgtgagggcaaaagcccagctctcatatagaacaaatgctcagtggtgccattcacacttcagagctcctttctggttcagactgaagctagacttaacctaaaatcttgtctttgctttttcccatctcctatcctgcttcttggggcttccccgatattcagcggtaaagaatccacctgcaaagcagaagtcacaggagacatggattccatcttgggttggggaaaataccctggaggcgggtatggaaagccactctagtatttttacctggagaatcccatggacagaggagcctggagggctagacagagtgcatagggtcaaaaagagtcagacacaactgaaacaacttatcagacatatgcacatcctgcttctttcactctctttctccattaaaatggtatcatctgcatatctgaggttgttgatatttctccctgcaatcttgattccagcttgtgagtcacacagcctggcattttgcatgatgttctctgcatataaagcctttgactctggatcacaacaaactgtggaaaattcttaaagagatgggaatattagaccaccttaccttccttttgagaaacctctatgcaggtcaagaagcaacagttaga

SEQ ID NO: 36751 - DNA, 1199 bp, Bovine  19866881088106
  misc_feature (1)..(1): n is a, c, g, or t
nttcatggtggccacttggtgattaaagtttccactggagacccaagcactgttaatggctgacatttagtaaagcaaagaaaaccagagatttgtaagaatcctagaaaaattccctcccacggattcccatgccctggattccatttaagaatgtattgaaatcatattctcacttaaaggcttgactccaatgaccccagttttcagtgatgtattctcatttcttacaactcctctgttatctattttctatttatctcccatatacatgtcatgtcatactgctttacggtattatagtctacaccctttataattttgtgagtgtagttttgtctttttgtcttagcttgggaaaagcagcaaaatcggagacaaggatgcaaccacctcctggaattgtccagctgcaaagtaggaagctggagtatttacccaccagattccatcccccactgtggttattgattccgtagctcttctgcatgactctgaaacagccaaacaagctccagctcccagagtttggcaggaggctcaggggcaaagcagagaaagctgtgtagtgcaccctcaaagtaagatgctgacagctgtcgttgagtcttgagtttcatggaattgtctcccacgtgggctaaaaacagaagtgggccatgagtctgtggtctcagtatcagaggcgctgttgcatatcatggcaacttgggctgtgagtttctcagaacagaggttgtcttccctgacctggtactattctgtgcacttcgtacagcaccagatgtttggaaggaggtgcagtcagtattcctgatgggaacaagttccgaataaaacaatcgtatattatccaatgcttcttttttcttcttctatctttcttattcttaatttcacttgcgattctgctaataaacagttgagccatggtagaaagagcattgcaagttacgtggaaattccctggttccagtctaatcttagactgagtggcattgggcaggtcaaaagtatctccaagttttgattttgaaatctgtgagctgctttcctctcaatattaatatcaaaatgagcatatgtctgtgtgaaaagtagttggaaaccatggaaatatgtaagggaccttcctcctcttcattcccatggacagctgcttcctaaatattcacttttccagtctgaaagtctgagca

SEQ ID NO: 36752 - DNA, 782 bp, Bovine  19866881111581
  misc_feature (1)..(1): n is a, c, g, or t
naaggacaaagaaaaaaaagacaaaacttcagacattcactttgacattaaaaaaaaaaagaaagaaagaaagaaaactggacgccacagattagagctggtacccagtacctacttgttacaaggacatatgaaaaggccacagcatttccctaaatcttttaaatttttctcagcttccttcatgtcttggttgatatggttcatgccttcttcaacacgatcgagttgttctggttaggacaaagggatgacagtgtggaatgaattttttgggggttttcaacagaacatgagaaatgaaatggaatttgaaaaagagggagagctattacaatgcattgtctgaggagatgcattgctagaattggctgtcgatgccctatgcagccagggatggaagaaaatgaaaagtgatgctcatatagtttacagttcagacatgatggggtggggtaggtaagcctgcttgattctgaatgtccaggaaaacagcacagcgtattcacttactcagacaccagtgaaacccaagagaaagaaaacagggtgttagtttatgttttaggcattcaaatgcaatggtactagagaaagtgtctgcttcaactttaaaacacctctttcttttggtttttagcatccccaaccagctaaggatagaaaataatccactttctcctttgggaaaaataacaactatagtgataattagcagtaggtaccatatctttttttccccctaggaatggctgtcagccaaaggcaggccataggcaggt

SEQ ID NO: 36753 - DNA, 1801 bp, Bovine  19866881175777
  misc_feature (1)..(1): n is a, c, g, or t
ngtctttaaaaacaggactatggaaatctcctcagagtgcatctgatttctaccacttttgatagaatcattctacagttattttttgcaaaataaattagaatgaaatacttatttaatttcccaaagtaaaatgaagacaattttcaataaaacgaaatttggaataatttttaaaaggtgcattggccatgctaaaggaaaggggagcaatatgtataaagagcaaagaatcttgaaagtattgttttgtacacagagtatggatttttttttctttatcattttagcgtgcactttgtgaaatcagtcttcatggtttgaagagattcaggtgtggaaagaaagtcaccttgggatgaaattttgacaaaaataatcaaccaaattgtggaaattttacaacatttgacatacattttaaggctgatttgtggagacaaattgtttctgactccaatagtctcatacaaaaatttgttcttatcgaatgaatccatgaagcagcctaaattactgctacccctcaaagactcacaatcaaagaaaagtaagttgtgttgtacaaccaagtgagaaataagagataagaaaagtaatacttcatcaagtttgcaaagttctttctaggcatctgataatcttggaaatcttctgagataggcaagatagccaattacgattatgttaatcgagtacctaaggcactttcccgtctttttacctctgttgcttcatttgcaatacttatatgaagtcggtactattattgccctcctgtcccaacagaaagcactgaagtacagaaaagttaattaacttcccaaggacctacagccaggaagtggcttacttgcaatgaaaacccaggtaggttaaaagactcatgcagtcatttttagagattaaaaaaaaagggcattaaaatttatatcataagctattaaaggtagagttaaattcagaccaaaggtcttaatgatttgtgacttgatagttttccctgaatgacattctgttttgatttgtatcatcccagacttggtagaatgacagtccccttgactctaaatgccatgtagacttcatcagtctagttggcctcctacagataattctctttactaggctcatatgctgtttggaattttttacccatgctcatctctccaggctccaccataaactgaggcagtctactcttcagacttaccctcttccctgagaagtcttttgtggatttcttagtgctgttatcagtgatgaaacagaaagagagagacctccagactttaggactccagacctgcccacaacctggtaagaaagagggagattaccagatcccttcaagtatcggcattttgcattcctgaacacagtgtgcctggtgttttccaaaggatacataagggggctaggcttcccaggtggctcaatggtaaagtatccacctgtaaatacagaagctgaaggagatgcaagttcaatacttgagtcaggaagatcccctggaggaggaaatggcaacccattccagtatccttgtctgggaaatcctatggacagaagaacctggtgggctacagtccatggggtcacacagactctgacacagttgagcatgcacacacacaaggaggagtgcagagattttgagaaatgagattatcactctcatcagccaaagaaagtgactttcctgatttttttttagtttattcatgctcagacggtactttcagtttctataaaggatgctgattgtgtcagcaagcataggctaagttatgctacagta

SEQ ID NO: 36754 - DNA, 1425 bp, Bovine  19866881186776
  misc_feature (1)..(1): n is a, c, g, or t
ntcagggcaaagaatcctctcggaggcccctattagggggcactctcatcccccactccgtccccacactatagatcagcaatcgagatcatttggcaatgattattagttgccagggagctttaacttttcccaggcccatgcttgacctctgtgcatcccagaaggtacatccagactccagggtccagaccacgcatgctcaccttatgctgtcaaggccaggtaccaggtcccaaatcggcattccactacaatcacatcacatccaagtggccactgccaacctaaccccaagggaggccgaatcccaaggccctcctcacagcgtggcatggggggcaggtgagatgactggcaggtgttccaacttactaataagttcatacaaacacccccacccccaaagaaacacaaaagaaaactgcacacacctggatttttcttggtttcaagctataagaataggattcttatataaagctacctggcattcacctatttttcctttttatccccagaaaaacagccagggggcaaagcaggagggatgggcaggatcaggccttcagtttgggctcacagagtgaatggctctgcccctccccagctccagggaacctggcaacccgggaggtgggtctccattccgtgcagcaggaaggggtaatggtcagctttcagaaggccctttggagaggatgccctgggattctacttcgaggagggtcctggcctcaaagcgcccccgtgcctgcccccgtccctggcacctgggctgcgggaggcctgagttccgcacccatcctgcctgcgggggttaccttggcaccgggcagagtggccagcacttaattgccacattaagaaggggggatgtgagaaacaaggtgattgtgctgagagctgggagcttccttttcctggcaacagtggcagccaaaccaagccctgagaagtggcggcttcccctcctgcaaagctgacagacacagacagcccaccctgcaaacagcacgcgtgcagcgtccagaggccctggtgggtggcgggggcacgccctggagcgcccagcgtgcccggggggccactgtatgcagtcatcgccccggtcaggctggggccctgggctctgctgactcgacggtcgcgtcctgtggctggccctgtatctgcactatttgtgaggcggcggcattattccctgtaatccttgtttcagtcaatccggccacactattgtcctgcctgcgtctgggtggccagagtagaatatattccaggcacaaacatattacataaaggctccagaaatgccatgtgtgggcacacacgtgctcaccccgacaactcacgtgtgtggcagggtttgggcaaagtgaggcacacagcagggacggccaccccaggcggcccagctaaacc

SEQ ID NO: 36755 - DNA, 1088 bp, Bovine  19866881198958
  misc_feature (1)..(1): n is a, c, g, or t
ngcttgggaggggccctgaggactactgtgtttctatgagctgggtaccctacagcctgcttgatgctgggttcggctggcttcgtgctcaaactgcttattaaagtctagacgcaacataaaagcacataaattggttccagccatctctagtaaaaacttcagctggagctgggaagtgactggagcatctttcagtgtaattaaaattgactcttaaagtttctttagcttaattggtcacactttctttggaagttggtgaaagcctcttgctgggaaggttaaatgcatttctgtgtataagatcagaattcaaatatagttttatggacacatttacagttatgttctacccgggtggtcttttttttcctgtatcttttctatttaagatttatgctgtcattgaccacagtctaaatgtgttttgataaaaaggaaaaaaatgaaccgttgctgatgcatttcaaacagagttggtaatattttgaagctttcagtaaatgaaacggcagtttggcttagtccaagctccttctttccctcaagcccttcactttggaatcagtgcttgaactttgttctccagaaactgaaagtaactactactgggtccaaaggtaggaagctggcactttctaagatggtcatgtccttgctgtggtcaaatgcactcgaccccattatctgagaccatgtatgtttatacacgtgaatgtgtttatatgcactgagactttctgcccctcagttttgcttcttgagggatctaccagtgtaataggttctgatagtcaagaagctcatgttttaacatttttggagtgtaattagggatgaagctccctgaatgattccctaaatcatccttaattcagacttgggggaagacctgcttggttttatatttgtgagtatttactccacacgatttccagggccatgacttgattcttcccttgacatctatttctacccatcccagtggagcagaggggccagccatcttcaaatcaacataagcgttgtctcttcatgagtatacatggggcagggtttgtaaacaatgctgtgaataccataat

SEQ ID NO: 36756 - DNA, 1140 bp, Bovine  19866881282780
  misc_feature (1)..(1): n is a, c, g, or t
nacatgtatcattttcaccttaatgtttaaaaaataagtattcttcactttaattaatgacaaggttatataattttgaattgcttttcttccaccgttctaaaaagtttattctagaaatttcatgagagaaaaagtaacacattaacaaactcatcactgaatgatcgttaaaaatctgtatcttaattactcaaaaacaatgaccattttttccttttgcccaggagactggaaccagatatcatgtctactgcacattccctccccacattttcagtgctatattgtttcctcaaaaatcctattcactgtccttctccaaaagactttttccagtctactcagttccatttgcagactatattattgtctcttcagcatcaatagattggcaatggttttgtttttcataatgtacattctgataacttttcatgaagaagctttatattcatacagattttaagttatttggggaagcaagttatttgggcatgtctgtggaaaacattcacacactcaccaatcccaggcattccagagactctgcactcctgactgatcaaagaaccaactgcaagcacttggaaaacacatacctttttgtagctactttcaaagaaagtaggtcagtgttaatgaaataataagaaatatgatgtgtgacatttatctactattaggatatggagtctcatagattaataaaaacaattctatttaatagaattaacatgtatcataaatgaataccatttaaaattataacagaatctaataattagatgctttaataaatgaaactttttctggaatattcagaaggtactgaagtttttttgtagaatctcaacactttcatcatgaatatcaattattactgtatcttagcagtagagatctctaggacgacaactcccatcaacagaatactcattcagtacaaatgaacttacttagaaaacagaaacagactcactgattttgagaacgagcttacagttgctggtggtagtggtgggaagggatagttagggagcttgagatggacatatacacactgctatgttttaaatggataaccaaccaacaaggacctgctgtgtagcacactgaactctgataaatgttatgtgg

SEQ ID NO: 36757 - DNA, 1127 bp, Bovine  19866881359039
  misc_feature (1)..(1): n is a, c, g, or t
ntttgctctcatgaactctcctgaggtttagacctggaccaattgtcactcagggtctagttataacccaagtcagttttaagagttagtgaacagaatagaattggttttattggattatactgcattttggggcttcccttatggctcagctggtaaagaatccaactgcaatgtgggacacttgggtttgatccctcggttagaaagatcccttggagaagggaaaggctacccactccagtattctggcctggagaattccacagactgtatagtccatggggtcacaaagagtcagacttacaactcagagactttcacttacactgcattttaatgctagtcccttttctttcccttaagacttcctgttgttcagtcgctaagtcctgttccattctttgcaaccccaaggactgcagtatgccaggcttccttgtccttcactatctcctggagtttgctcaaactcacatccactgagtcagtgatgccacccaaccttctcatcctctgtggtccccttctcctcctgccttcaatctttcccaggatcaggatcttctcaatgagttcttcgtatcaggtgaccacagcactggagcttcagcttcagcatcagtccttccaatgaatattcaggattgatttcctttaggactgactggttgatatccttgctgtccaaggggctctcaagagtcttctccagcacaattcaaaggcatcaattctttggcactcagccttctttatggtccaaccctcacattcgtacaagaatatcaaaaaaaatcatagttttgactatacggaccttaatgggcagagtgatgtctctgctttttaatacactgtctaggtttgttgacccaaaagtgttagtttaaaagttaaatgacagagagagagagaggaagagagggagagagagagattgagatttatgtgtgaaacgcttctaaacatgccctgtaagtacagtagattttccccttacaaccacaccctgtaaagtgctgtattttcagagctgcacaattaacataaggagcatgagtcaggctttgaacaactctgtgggaaccagaaagccttttgctattaggaatgatgtaaattcc

SEQ ID NO: 36758 - DNA, 773 bp, Bovine  19866881364837
  misc_feature (1)..(1): n is a, c, g, or t
ncctttggggaaggcttttgagagccattccttcctccctacataggctgaaacaatattttatcacggttttcttccttgaaatcacctactcacaatgtcacaaaaaaccacatagcatcgaaacctgagcaagtaaaaatcgtcttgaaaaagtagttccctttggagttcttgggagcaaataggattaaggggcagactgttattctcattactcttcccattaatgtttgtcccaagtggagaagtagatgagtggagaaactctctcacttagtacaatagcttttctttccttataaatttgagtcttggagattttgattgacatttcacaaagaaaagtacagtttctaactggttccaccttcattctctaacctggaatcctcccaactaaaatgattttagcctcaaaacatgaaaattgggatagtcataaagggaggaaatgaggtgttggtagaattgagagaagtgatatattaatctgctcaatatgccgtctttaaaagtagaaatttaagtgttcaataatgcatttacaaattattttcctatctacacaagctaaaatgttctcatagagaacagagatttaaaaaggatcggattgatacctggagatcaatagattttccctaagctttgggtcctgggcatttgagtttttcttaccttctaaaacctcttctttgatgcccagggtaacaaatgatgcccgagaaaatgaaatggatgaaaacctggagcaggtgagcggcatcatt

SEQ ID NO: 36759 - DNA, 783 bp, Bovine  19866881381979
  misc_feature (1)..(1): n is a, c, g, or t
ncttggctgagagctctgcttttcgatctgagaattttttccttccagcaccctgggctgggttttccagagaactaagggaacctaggaaaagtagcttttttctgtttccaacttggggcaaaaagagggaaggtttgtaacttgaagttagttgtggtgcctttcatatatttttgtttgtaactctggtagagacatttagtcactcaccttccatgtggggagtcgctgaaagaagatgctcaaggaattccacgtcctaatagggtcattgctgaaattggtggggaaaaaagactgtatttttgctggctaatacagcatttctagatgctcattaagctgttaaaaaatgtgaaatgatgactcatcctgagcctctcccaacccccctccctactccaatttgcctgcgggttgaaggaatgtatactgacttgagttaaagaagaaacttgtggtttccattatagtctgtaaacatcggtcgctgaaagcctcaagcaagctatcatctgctgccacacacatgctctatatacagttcatcttggaaagcagactgggagagcgccgtgtttacagctccagagtaacccaaccaatggcaggctggtcttccccgggggtctccagagcggcactgcgcacagctaagtggaggtcccctctgatgttctctaaggcaaagcatcaagagagaaaccaaggccagctctcctgaaagcaagctcttcctgctgcttgcagtgtccctttgccaccttttcagcaacaatt

SEQ ID NO: 36760 - DNA, 1060 bp, Bovine  19866881412220
  misc_feature (1)..(1): n is a, c, g, or t
naaatcaagcaaagtcactcctttgcttagtgggaactttcaattgctttagattgcactaatgataaaattccaacttcttactatgccctcggccccacaaaatctggactctgccgtgttccagtttcaacacatttcttttgctctatagtccagaccacagcagggcttccctcatagctgtcggtaaagaatctgcctgccatgcaggagacctgggttcaattcctcggtcagaaatattccctggagacggaaatggcaacccactccagtattctttttttttttttttttaatttgtgaagaaagtttttattttgttaaccagagttttctattcattgtattgtcgtgggttttaacatttaacaagattatctttcaggaatcaagagttaggatttacagcattgtggctctaaaattaaatactgagctccatgcttatgaagcgaattggcacataaggatcgatataatgacattttagtaattccaaatatttattttacttcattattcaaattcttttgtttgccttcaggctgagactttacagattgttttgcagccctctgtataaaatacgttccaagatggacacctatgaaggaaaccacagctacaagaagccagttctttctgatccaactgctatttttcatctcttctttctagctcaagctctgactcagagctgcttctttctgaaacttgcaagcctgctacttccctgggaggtggttcttcttaggacttgtaagtgccagactgtctggttcagagaggttgtccttactaggaatttggaaaacagggctgcttttgatcctgtgccaccccaaatgtatgaacccaatcagaggtaccataacaaccagaactttgtagtctttccagaagttctgaaagctcatagtacttcagcatcagtgtacctgcctgccggccgccacccgcagcccccaaggccgcacctcgagccgccgcagctcccagagttccactccagtattcttgccggagaatcccaggacataggtccttggggtca

SEQ ID NO: 36761 - DNA, 1488 bp, Bovine  19866881435735
  misc_feature (1)..(1): n is a, c, g, or t
ntgggatacacctcagacgtcccgtcaattgtcagccctgactgctagaattcagggagttggcaccagttcacagatgtgcacagaattgtctgtgggcttcacctttacaaagcttctcattcagagcaaattggtgggtaattctagttaaccatataataggcccttaagaacattaacacactctgcttggttcatataatttggtaaattcctttaagataaactcaagttaaaaaatgaatttttgaactgtggctgaagggcagagcaaagaagaatttgctggtctctcaggcaaaaatgctttcttaaataattagagacaggaatttgaaaaggtagcctttctgggatccaaataaaaggactgataaacatattttaaatagttgatgtcctaaaaatcagtaacagttacttaaaagtatctgcccactattttttaatgtctgctcaaaaattttttttctgtaaaagaagcagaattgctttgtaggaatactttgcaaaaaaaagtaccactagatccggctagtggattagcctgccaagcaaggtcggcctggttggctttgtgagtcccgtggggtttctgagacccaggtgtttcgtcggagggttctaggaaggctggaggatggaggaaggaagatgaccaggggaggattaggccttctttttgttttggcgagggtgggagcagggcaggcatccttcagaggcaccccttcccctacccacttgcctgcattttgtccacacatagcgtcgcgtttgaggatctgctcgtgtggccttgaagtttaaagctggattcgttcttggggcacctcccatcttcctctccttatagtgtacttgaaatgagatctcttaaaacagtggattttgtcggatgaggccattcccgtgactgtggccctgcgagagactggcagcactgacgcacccttctttgtttcccttttttatcttttttacagctatttgccgacagggctgtagccccaagcatgggtcttgcaaactcccaggcgattgcaggtaaacaactagacttttttttccccctaataattatccctttaatgcaaaaagaggactgactctactgtgaatatgcctatctttcattggaggacaagaaaacttgaccaaaaaaaaattcaaataagcacatccgaagcttattaaattataccagctgtccactggaatgtacatgcttctctcttggaaaaaaaaaaaacttctgggcatagcgagtgacttcatgtattaacggttctgtaaattgataacacgttgttataatcttccccttcaagtgctaatggactgtccaggactgggttggtgctgggggctctctcctccccccaccgccgcggtgttcggtctcccggccctcccccacttttcccatcagtagggaaagtggagcattctttagaatgggattagcacgagctcctggccccc

SEQ ID NO: 36762 - DNA, 984 bp, Bovine  19866881625048
  misc_feature (1)..(1): n is a, c, g, or t
nacatatatagggaatttagaaagatggtaatgataaccctgtaagtgagacagcaaaagagacacagatgtatagaacagtcttttggactctgtgggagagggcaagggtaggatgatttgggagaatggcattgaaacatgtataatatcatatatgaaacgaatcagcagtccaagttcgatgcatgatactgattgcttggggctggtgcactgtgacgacctagagggatggtatggggagggaggagggaggagggttcaggatggggaacacatgtatacatgtggcggattcatgttgatgtattgcaaaaccaatacaatattttaaagtaattaacttccaattaaaataaataaatttatattaaaaaaaaaaaaaacttgcctctgcagtcaagtcaggagccgagctaaaatactcagtggctacagcaggcccagatcttgcccatagtcagcaccctctccctaaggccctgctgtcaaggttccaggaccgcacaggccttttctttgaaacctccctgtacaatgtcaccaagccggcctgataggaggccccgaggtcaaggcagtatcaggggtaaggtttcttaagtgccatgtgtgagacaccatctgacactgtttatacattgacttagcccccttattgaccacaagacagaagttaaaagcattgcttttggaactcaaatgtgttaacttctaaagtgatgtttgaattagggttaagaagggcccaacgttttgatctactgatgggagggaaagaagaggagaaaaaaacaagtaacttaagggaaactttttttttccccagaaaggaaattgaattattttgactaaaaccaaaagacttgtttgtaatgagtctgtcatctttggggctgacatgagatgactacagatgtgtctgaattctgccgctgcccaaatgaggaagctgatctattaaactggactgctggtttt

SEQ ID NO: 36763 - DNA, 2318 bp, Bovine  19866881666456
  misc_feature (1)..(1): n is a, c, g, or t
ncttggggcgtgggatatctcctcccggccgccgcccatgacctcggacgtgggttaactcctctcctcgctgcacctggcctccggtgtgggttgctcctccctgctgccgcccctggcctcaggcatggggtgtgtggtagctcctcctggccgctgcccctgacctcggacgcggggtaactcctctcgtcgccacccctgacctccgacgctgggaatcttctctcggctgcacccccgacctcggatgtggggtagctcctctcggcagttcctgcgccgtggcagtctggtattcttggccgctgcccctgatctcggaggtggggtaactccacttggccgctgcccttcgggcatggggtcctcccagcttctgcccctgacctcagacgtggggtggctcctctcggccgcgctacggcgcgccatgtcgcagccgcctgcgctagtgacctgaataaagtaaagggtaagcaatctgggtatttgggagtgtccgttcaagcaaaaagaataattaatagaatggtcctgatctgggagagtgcctagtatgttggaggaacaggaaggagaccactgtggttgcaatgaagtcaacaaaggagtgaaactgggaatgaagtcagagaagacatagaaccaggtcacgtggagcctgtaggttttactaagaattttggcttttactctgactggaatagggtgccattgaagggtttgggaggagaagtgacctgatctaatatttattttctctctacttatttttaacattatctcttcatcctctgagttgagaatagaatatgaagttgggtagaagtgaggaggctactgtaataatttaatcaagaaataatgatggcaggaatcagtggtggcagtgaggtagacagaagtagttgaatttggactatattttaaaagagctgttaggatttgctaatggatcagaggtgggatgtgaaagaaagaaaacaaaagatcacacttgcgcagctagaagcagcccttgactaagaatggaaagattgtttggagtgtatatccagtttggagtacacagatggtattgaaagccaggatactgggtgaaaccagctaaggagagcatgtaagtagaaaagagaaaatatccgaggactgagctctagagatgttgctgtaattatctccatcagagcagaacactctgtcctgccagaaaggagtgttgcccaagtcttcatgatccttaaatcttaagacaggttaggaaatcctctggagtggaaattataaatgctcactgggcatctttggcattaaggagaaaacagaaaagagagaactttggagataaaaattgtgctacaattcacggggtcgcaaagagtcagacacgactgagtgactgatctgatctgatctggtctgatgagcactctgtgatacctgtaagctgtctatagcatgtgaagtggacacaatctatataagagagaataagacaaaaaataagaaatgatttggtaactgaagaagaatcaatgtcacaagtgtgaccatctgacaccaattctgtactaccaactggatgtccaacaaataaattctgatgctaactccccagcattagtgcagaccccacagacaaggcctgagcaagactgaccccacctcagacactagccacaaatcagattccaggacatctgcactgctaaacagttggttacaaattcaggagctgcatgaacctctcactgtttataatttgctagaataatttgtggaatgcaggaaagtactattcttaacaattacagttttctattaagagtatggatctgacagatggagcaaggcacagggcaagcttggaagataaggcagaacttcatgctgtcttctcatggaattcaggtacgtcaatttcccggcacatcgagttattcactcaccaaccaggaacctcccatgagcttctgtgtgatggtaaaccggatgtatcaacttgattgggtcactagctgcctagatatttggttaaccattatttctgggtatgtgtgtgaggtggttctggatgaggttaccatttgaatcagtagactgagtaaaacagatcatccgccaccaacggaggtgggcctcacccaatccattgaagacctgaaaaagcatgagtaagaaaaaattccttctctcagcttggctgtctttgagctaagacattgctcttctccttcccttggactagggtttggatgggaactatattattgactctcctgggtctccagtttgccagctgcagaccttggaat

SEQ ID NO: 36764 - DNA, 4831 bp, Bovine  19866880149270
  misc_feature (1)..(1): n is a, c, g, or t
ncccttgtggctagctggtaaagaattcgcctgcaatgagagagacctgggttcgatccctggattgggaagatcccctggagaagggaaaggccacccacttcagtattctggcctggagaatcacattgactctatagtccatagcgtcgtaaagagtcggacacaactgagcaactttcactttcactttcatatatacatattgctgtgtgtgcttcatgcaacacacaaattgcttcagtcatgtccaactctgtgcaaccctatgactgtagcccaccaggctcttccgtccatgggattctccaggcaagaatactggagtgggctgccatgccctcctccaggggatcttccccacccagggatcggatccaggtatctcatgtctcctgctctggcaggcgggttctttaccactagcgccaccgggaaaccgggccaactctgcagagcccccaggccggccatctgatggcgtggcttcggcctgtgtccctgccaaggccccagagggcagttccaacacctgcacggccctgggtccttggtccctccttccctgagaagactcacgtgacgactctggtgtggccagcgccgtgtctcctcagaagggggaggagggagaaggacagggtggtccagcctccggctgcaggcagctccacttacccctgagaccgctgggtagcctgggccccgggtgagggtcattttactgtggaaggctgcggcggagatgatctgggcggacgacatggcagccatgctctgcagggccttgtccttagctgcctgatcctggggagacattggggggaggcctcagcgcgagcaccgtggcaggccaggagaggccccgggaccaggctcccgctcctgcagggctgtgaaccttccctgtgactctgaggaagtcattgggtggctctgatccctttcctcatctgtcaaaggggacacttgtccttcctgtcgcactagcatttaaagagactttgacccactcccgggcatatagcccgagaaaaacatgatccaaaaggatacatgcaccccagtgttcattgcagcactgtttacaatcaccaggacgtgaaagcaacctaaatgtccatcaacagaggaatggataaagaaaatgtacatatatgcaatggaatattacttggccattaaaaagaatgaaatcatgccatttgcagcaacaatggatggacctagagagtgtcatactgagtgaagtaagtcagacagagaaggagaaatgttgtatgacatcccttatgtgtggactctaaaaagaaataatacaaatgaacctacttacataacagaaagagactcgcagaaaacaaacttatagttgccaggggggagagatagttagggagtttgggatggacaagtacacactgctgtattcaaaagggataaccaccaaggacctactgcctaacgtagggaactctgctcaatgttctatgccagcctggatgggagggggctttgaatgagaatggatacatacatatgtaaggctgagtcccctcccggtctacctaaaactactgctgctgctgctgcggctaagttgcttcagttgtgtccgactctgtgcgaccccatagacagcagcccaccaggctcccccgttccctgggattctccaggcaagaacactggagtgggttgccatttccttctccaatgcatgaaagtgaaaagtgaaagtgaagtcgctcagttgtgtccgactcttagcatggactgcagcccaccaggctcctccatccatgggattttccaggcaagagtactggagtggggtgccatcgccttctccgacctaaaactactagaacattgttaatcagttataccccaatgcaaaataaaaagtttaaagttcgaagaaaaataaaaagactttgaaggtcacctgccagaccacagctctcctgttaccaacctaagggacacctgtaaacagagaccacccaggcctcgctcacctccacaccaaggggtgtctggggccccacctggctcatgggagaggaagcaggaatacgctcagcagaggtcatctccggtcacatggacagtgacaagggccagtctcctgtggtccctgtctcagacctggcctatgggtgtcaactgtaccatgggcacccaaggctcctgagccttttatgtgtcagaatgtgactatctgtcctctgtggtccaaagaccctcccaaaaaaatgggctcacctggcacaggctctgaatgaatcagcagttatcatctgcttataataaatccttgttaatacttgtctaagccaatggtcccatcctgagctccccaaccccaaagggcctctcaagcaataagacaacatcctgtattccaaaaagtccatatggattggaaataagaccatacagacagacgggctggtgcagggagcattactggggctaaaacgctgggttatgtcaactcgggagctgtgattagaaatcctgtatctttatgatggattattttaaatgggaaaaatacgtgggccctttatttaatcaccaacttggtgacccaaatctgtcctgaatgataagcaagcggattgctgagggagggcctcacagctcacagctgggtttgctgtgacttcactcgcccggtgggtggcattacagcaaaggtctgagtggtgagcccggcatcctgcgggacacggcgtggggccaggcccttctacccagactctcagggacccgtacagtcacagggcactagacagcccccggaaagtaaagaacactgtctcactttggctctgaacatcataggatccctgtgaggctggcaggacttgtcacacccctattctaagataaactgaggctcagagaatttaggggacctgggtgttgacaggggtcacaggagggtctgccctgcgaagtgggtccaggacaggccatccacgacctctgacctctgcaggcccaggggctgagcagaccgaggagggggcaggtcaggacctgagggcaaccccatcttcagcacagagggtgcaagaggccacgctgagcggtgggcaccccagcccattgtccttttggggccaatcttgaatcctgctctgaggtgatccctattaaccaaagtatcaggctgcctctctgcaaggattctgtgggtctcaggagcatcactcaggcttgctccctccaggacatgggtggggcagcaccccaggaacagggtctgttaacagacccctgttaacaacggcagtgggaggctggatggctccaaccagagatcagagacctgtactcctttctcatagctggcctagtgaacagccggggaccagcaagtggaacaggaatcggggggagttggggggtgacatcaatgacctggtactgaattttgaggttggaggggacctcagacagcaccttgattaaccctgtcatttataggtggggaagctggctggagcttgaggtggatgacccagccaagtgcccatgggcaaagccaggccagtgacccaaagatttccacctgaccttgctgcccacggggtagcttaactgcactgggccccagaccccttggagaatatggtaaaatcctcagaccaaattctcccctaagtgcatatgcaggaaaatgtgtatattacttaaaggacccgtggctccccttgaagcctgtctggcggcccactgaggctgttcctggcccctcatcagagtctattgacagggacaagttcagtccctccagcacacgtgggccatacagccgggcccctcgggaatcaacagctcccctctacagctcttaacagaagcctggacacccgactctccatcaggtcccccgctgggccccagggagtcacagggcagccagagagtggagtggggagcaagtgggcgccagggctgagggtgtctgggtacatgtgccagcctgagagggagggcccagcagctgcggccagccagctgtcctgggggcaaaggagcgagggctgggccgcagctgtggggggcagggacagctgggctgatgcaggaggaatggagctgggtgggcagcgggggcagcctcctgtggcctccgacccacgccttccaggctccagtgtcagggtcatgggccgcagtcccagaggggtcctctgtggtcctctagcccaggggctttgaaactgggttctcgtatgctttcgggttcgagagtcgtggggcctgagagggatgtagaggaggggtccctagcccactcctcaccaacttaactttgaccacagtcagctcctctgacatcatatcggtgataattcagttaggaaaaaaaacagaaaggcttccactgctttagaaaatgtctgtggggagttccctggtgacccagtggttgggactctgcgctttcactgttgaggacccaggttcaattgctggtcggggagctaagaccctacaagtcacacagtacagtcaaaaaaattaaaattaaaaaaaattttttttaatgtccatggatttactggtctggtctaaggcccaaatgctggctcctccacgggaggagtagtcacccaaggggccctggctctggggtccagaaggcctgagtcccatgcagagggggttcccaccagggctggccccctcaaacagtcacctgtccaggcctgcaaggtggggctgatccagggaggggcaggaacgtccagtgccagagagtggggtgggaagaattccaccagcccctcctccagcatggaaccccgct

SEQ ID NO: 36765 - DNA, 720 bp, Bovine  19866880411525
  misc_feature (1)..(1): n is a, c, g, or t
naactccccctgggtgcacggcggaagatgaagccactactgccacgggtcagctcatacctggtgcccatccagttccccgcgaacccatcactggtgctgcagccctcggtcaaggtgcccttgcccctggtggcctcgctctcagagcttgcccgccacagcaagcgagtctgcatcgcccccaaggtgctgctagcggatgagggggtggcctctctgcccacggcaggacaggtgacagaggagaagctactcctcgtggaaggactctctcctctgcttcctgtcccatccatcaaggaggaagacgtccagcctggggaggagacaccacatctagggaggcccatcaaagtcgagagcccacccctggaagcgtggccttcaccctgcccatcggtcaaggaagagtcatcccactcctgggaggactcgccctgctccccaacccccaggcccaagaagtcctccagcactgggtccaggtcccccacccgccgtgtctccgacctgctggtgatcaaacacagggaggggcgggagatgagccagtctcggaggaaacagcacctcgtgccgctccgcctggacgagcccgagctactcctctctgagggcccgggggctccccagccagccctggcagggcccccacagcctacctgccagctcggctccccgccagaagatggaggcccctttaagacacccattaag

SEQ ID NO: 36766 - DNA, 2830 bp, Bovine  19866880493469
  misc_feature (1)..(1): n is a, c, g, or t
ncgtcaccctgccgttgtcatgaactgcagacgctcagcctcggggatcccagggtcgctgggaccctcggagtcctggtgtcggggccagcagccaggctctgcggcatctcctgcatcaccaggactttgctccctcaacaacatattctttgagtcatgataccaatgaataataagttcattagatactttcccttcccacttgatccctagctaggagcaaggttgttgagttgtgttttgcttagttttctaaaatggatgagagttgaaagggacaggcgaatcctgagggcctcacaggtgggggggttagaatggccttgtgcagagtggggaggggaacttgggtacccaggtgacagcgcagacgcacagggacaggatgtagtgacggggcacacgccagtcttccccagttctctggaggtcagcctggtttccacacccttgtctcctttctgatcagcatttcaccccaaaaaatcaagttgaagcagacacaagtccaggccaaacagacgtctggtgttatgaacctctggtcctgccctacagctacccagctgggtaggttttgtttactgctctgtcgggggcggggaggggctgcagacagaggtgtccctgagccccagcaggcagggatggaaaccttggtgacggaacagcagctcctcagctggcatcgcctcaaagctccgcagggcccggaatagccgttccaaggctgctctcctttcccttcccttttttttccccctttaattaatttaagcttttttgattaagtgacagctttcatcactcctggcagctgctgagagacaagataatttatagatgcactgacactatatgattaggacaagcaccaccaataacagacgagagatatgctgagcaagctgatggccttagctcatcggtgcctcccccacctgccaggcgagtcccaggtagacgtcccgcgtcagcctggggtaccccccccccgaagactgtaggtaaacacgactccaccccggtgcccgggggctttctcagagctgcctggttctgctggggaaacacgtaactcctaaagtcctctggtcagaacttcctggccagttaccagggcatccctgggggcttggtccaggcaggacctgggacacagcgggtcctgggcctatcacttctggctgaccttgagcacgccctcctcctcccactggacgccacggaaatgccaccattgtctctggggctcacaatggaaaggctgagagtcactcctagtcccccagcaaggacagtaattaaatcacccaggaaatacaggctccgtcctccatccatggcccttcgtaaccgtcctgggtggccacagcccatggggtcacaaagagtcggacacaacttagcgactgagcgctgcacagcatagaaaatcctagttgtaaatacagagcacccactgtcttaaaccctcaagaacacaccgtgttaccccttcctcatgtcaagcagaggtgctcatgggtgagcctcctcctcctcctgggtggagcatgtgtcctctttgcacgccctcagtccggccttctaagtgttccttgtctcagggtgaagggcaccctccctgggtgagaaaggggccacttagcaggtgcttctcatgcaacgggtgctgtgtattcacacctagtattttctgtcctgtgttgtgccacgctcagtagcatccaactctttgcaactgcgtggactgtagccccactaggctcctctgtccgtggaattctccaggcaagaatactggagcaggttgtcatttcctactccaggggatcttcctgacccagggatcgaacctgcacctcctacactggcaggcagttctttaccactgagctacctgggaagcccagtattttctaggcaggattaaatgggagacagtcagccctgtgtagccccgaggattagcagctcaatcggaagccaagattccccttcacctgagggtctggcctgccgtgcgtggcctctacccacgtggctgaagggaaggaggagggtaccctgcgttccagaaggttaagtggacaaaccacactgagacaaacgggcaccttgtcagcttctgggggctggctgcttggggagcggagaagcaaagccacgggggttcctgtgaaagaatgcgtgtttgtggctggttctttggtggctgttcttggcaaagagctgagtgtgaaagattgaggagagcctgggaggagtcgagctccgggactagggggaaggatccgtcatgccatctgcgttcctagcgcctcctgcagctggtgcagagctaagctgaccacaggcatccagcatcacacggtcaactgcccaggggacctgccttgtcggggcacccctgcctccctgtgcccacctgacagccagaccgcctggtccgggttccttggaggaggacttctgctccctgagagatattgggaaaactgggggcaggacatggttctactgagccaagtcactttatgcttttaagatttttttattttaaatatccatagattcacaggagctttcagcggcaggacagagaggtctgctatgacagggatgtttgatttcttgttatggtccaacgggactctgagactctgcatttttaaagactattgtctgtctgttgttcacattgggtcatttctgttctatcttcaaattcactgagtcttttctctgttgtttccattctgctattgagcccattcattgagtttttaaatttcctccattactgttttcaagtctaaatttt

SEQ ID NO: 36767 - DNA, 994 bp, Bovine  19866880507628
  misc_feature (1)..(1): n is a, c, g, or t
naatcgctggcccagagacggccgcatgcgcctggtccctcctgttcctgcccctcctccacacgggctttcgttgccagggccgtctggagggtgattggcagcccgaggtcaccgaagccctcttggcaacccagctatcccagcggatgggacattgattccttggcagctggtgcttcctcaagaaataactgtcttaaaagtctggtgccttattggctttgctctgaccgaagtgttccccgtctgccagtcgccccgccctgccccaagccatttcccctgctctgtccaaacccacattcatcccttttgttctctgcaaacccctgtcctccgactgtcccagcagacctttttcttgatcacgacttgagcctctggatttctctttcaagatcagctccagcctgcctgactgatgagctgaggtcattcctaccctcagttcagttcagtcgcttagttgtgtccgactctttgcaaccccatgaactgcagcatgccaggcctccctgtccaacaccaactcccggagcccacccaaactcatgtccgttgagtcggtgatgccatcctctgtcgtccccttctcctcctgccttcaatcttccccagcatcagggtcttttcaaatgagtcaggtcacctgtaaactaagcaacagggacagtgagtttgaggatcagggtcccagcagacacactagaggcccttggccctgagtcctggggacctgcctctcctggtgagacgccccggcccgtgcatgggctggcagttcagaacttgcaggtaccgtttcgcttctgtttcctgtgcacagccaggcctggcctctctgagcccataggtgcttaatgtccatcccagccaaggcaggaggagcccctctgtcttgtgccctgtctccccccagctcccttgctgcctgtcaaggagatggaggtcagcagggccaaggatacactctgtcccttctctgcaagga

SEQ ID NO: 36768 - DNA, 1878 bp, Bovine  19866880532175
  misc_feature (1)..(1): n is a, c, g, or t
nggaaatcttgccgcctggcgggcctccagcctgtgtctccgactgttcttttgttcccggggctcccgccaaacatctgactctgctcaggatcgattgcacgtaaagtgcagagagggggaacggggatttttccccatggtcgtccaagacgcagatttttagggctttgattctctcccagaatcacgctgaacagccatgccttttgcaagaggtcacttcattttcaactgacgtcaggcctaacttgctttggaaactttgcgtcaggtggtcctaaaagagagaggaccatgcaggtgaccactgggtcccactgaggacagcccaggctcacagggtctggcaagagcaggcaaggagcccggagaccagggtcactggcaggatcagagtgccgggggcagaggaggcgccactcctcctcgtttgttgattgactacccgggctgggccagctgcttttgttctaggagatttcgtggactcattccctgagcttcagacaattgtttctttttaagaaagggaagtttggaggtggctgagaggaaatgcccccggcaggctgggggctgtggacgtgtcagcgggggcccagatctgtactgtcagtgggaggctgggggctcttgggggactgctggggcccgtgcggggccctgcaaggcctcctccaggaggagctgcgtctggagcgagggcttgggcacctagagcaggagcatctggacgggcgttgggctggaggttgctaggcgctggagtaggtttcccagggagacggggctggaaacaccatctgctgaggatgcttgggtcccggaacaggcgggggaagaacgagaggttctctctgtcccagttaaccttggttccattgcctgggccagcattccttccacaagtggaccaggaggcgctgaagccctgggagagccgagtggtccaagtgggacaaggctgtctccttgtggggccaggtgcccgggactccccactttgcacccccatcctgccccagccttgtggggagggggcatcatgggcagaggattaaatactcatacttagtcaaaacattgtcagttacaaggatcctccacatctactcggaggtggaggccaggagagagtatggaccccagaacgggaacaggcttagtgcttgatctatcatctgcccgaagggaatgctcgggccaagcctgcctgaatcctctccgcgtgcgtgctggaggagacgtacccggtcagcttgcagacgccgtctgttttctgtccacagagagtaaagcccatgactgaggttgggggtagagaatcgggggccctgggttctggatacaaggtcacacacagtcctacggacagtggaaaccagctgacttgtgcgaattcggaaagggagaaaggttgcctgtttggatgggtgtggatccaatcactgttagggacatggactcaacctctagcccctgaagcactactttctccgtaaaccttcttcggctttaaggatcattcatcaccgtggcagatggaaccacaccaatgattctgctgaaaaggcttcattgaggggctgtttacacagggaccagcaacagaggggctattaccacctgggtctaaggggaagtcctgttcccggagccccagggccgctgtggactagacactggccatgcaggggtgtgactaccccaggactgggacctcatcaggtgggcctggaaagaagggcccccacctcactttccttcttcattggccaaactaaccagaagcctacagtcggggagactcggtccacaggcctcagtccaggagcagagcagggaggggagggggtcagcagagagcaagagccc

SEQ ID NO: 36769 - DNA, 1704 bp, Bovine  19866880537169
  misc_feature (1)..(1): n is a, c, g, or t
nccttttctccttcccttccttccggtcatcaagcgagagggcaccggcatggagacacccatgattggggaccgagtctttgtccactacacaggctggctgctcgatggcaccaagttcgactccagcctggaccgcaaggacaggttctccttcgacctggggaaaggtgggcatggttagcaggctcttaggactggggtgtgtgcgctgtcacaaacagaaaccgtattctcagaagcttaaacagggaacagcttattacagttctttttttaatttccactgtcctgaaactattgatttttttaatctctcattgccttgatcaccttcaaaaaccttgcttccttttctggggtggactgccttgttttcttgaacctctttatttcagagttgagtgatttttcttttttttgagaggtctgagacctgataccatttatcgcaaccagattttctaccttcctggtcccatttctaaatagtacccagcttccctttgggcatgggacagtaagtctctcaggccactgtttgaacccagagggagatccctgccaaagaggacctgtttcttttctgtacctacaggggaggtcatcaaggcttgggatattgctgtagcgaccatgaaggtgggtgaagtgtgccatatcacctgcaagccagagtacgcctatggcttagcgggcagccccccgaagatccctcccaacgccacgcttgtgtttgaggtgagtgtccagccacagagggccaggcagagagccaaccttatctcagcccagggtctggctgccctccagcccttcctgctgcttggagacaatgtagccaaggctgagggcctgctctcaggggagggaagacagggagtgcgcatcacctactgctactgccagagaattgtcagtgggcaggtttcagttgtggggaggtgaccgcaagcccctctttcagacttcaagcagcggggtgagggcttgaggcctattcatctcgagaggggtgctcagagggaggtggaccaacacgaaggaattgggaggtcacaggctccatgcagtcatgactgacagtggagaacattggtgccctggagataagatgcaggcagagatgcttctcgcatgggtcgaggcaaggggcaagcctttgctgagaagatggaacttcactgtgttaagactcacagatggttgagccctacgcagtggaggcctggagaatgttggaaagactagtgagagatgtggggtcatttctaatgcctgtcggatggagcttgtctagcagctgaattaggaccatctggaacacgtgcttgttctatagggcagtcattaaggagactgatagcaaggtcgagaccagggccgctcctgagaacttagccacttggtccactcctggtgcggctgcctgtgcagtcagacctgctctggcccttactagggactcttgtgggagagaggggagcatggatccttacatcttgtcccacaggtggagctgttcgagttcaagggtgaggacctgacagaagaggaggacggcggaatcatcaggagaatacggacgcgggggggagggctatgccaagcccaacgaaggtgctctcgtggagggtgaggctcacaatctgggattctcactcgggcttccgctgtgcagggcctgggtggctgtgggcaggt

SEQ ID NO: 36770 - DNA, 1892 bp, Bovine  19866880567631
  misc_feature (1)..(1): n is a, c, g, or t
ngggcaaataatgacattatggaattactagcagccacgagttaggttttaactacattgtgtgttatggtgactaataataatactttcaacctgtgagatattgacagaaaatccagatttctagctggggcttgaaatcttccttggaaaagtcatccccagcaagtgtattatgatacaggagctctggaatgctgatgctttcccagagagaaaggcaagagcagctaagagaactggtccctgtctcctaacccctgagtcccagcttccacatctttgtaggggtgaccctcagtctcaaccacccaccgtcaaccgcaccaaccatccatcattgaatcacctacatgagagctagtttgtggttgagatcaaaccaggcacaggatgctgtaaactatgaagagaatcacaaacaacagctaatttaattcctttcctggcagcattactagtcctctgaagaaacctgtgtgtgtgtgtgtgtatgtgtgtgtatgatacctcggggtgcagctcccctaagaagaggctgaaacaaatcttatcagcagcctacaaagcatctcccccttctccagcactgagggagtgaagggcattctcctccttgggaccaacctttcagagtgtttaactgctggggagtcagatggacatgcactcactagtcctcaggatgactcacacacagatggactggcggcgggcttctgtacagtggcctcgctccctggggctccatccacgcccacctcggcttggatctttctcacgaaggcccacaatgctctgaccactgtgttcaggacgggatgccagctgcctgctcctcagagcagtccctgacttcttgcagggttggggacttggggtgtgtctgagtagcggtggaaagaagagacagtgatgggaacccaaataacaggattctaagcaacaccccccagagagtcatgccctggggtctccctcctgagcaggtcccagtgggccagatgtttggcaaattcatttacagaaaataaggttcctgtaagacttagttccagataggtgagaaagttccaaccatttattggtattttaaaaatatatatatatatttttaacttggactattcttaaagtctttgttgaattaggtacaatatggcttctgttttatggtgtggtttttcggccttgaggcatgtgggatcttagcccctcaaccagagatctaacccataccccttgcattggaggcaaagttctaaccctggacccccagggaagtcttcgcttatctgcgtttttgacgtgcgctccatcttggcgactggacttcctgtcgcgtcagtccttgttcattacttatggtgttcttccgtgtgtcccataacagaaggtaactgctgagcggtggcttcccttagctgcccagtgtctgcctttctaagaaaatgttagaatataatctctcaggcaggcccgggtctttataattctctttgtgccacactatgtaagtgctgaataaatgctttttaatgacgaagcagctgaaaggactccacacattaccgtattcagaccgaagctatcttggcaaagtgacggcagctcccagatggagacagaaaggcagaggggtgaggggactcacaggtgaacagaaggcaaaccagagacgggggctcgacagccctcccggtcctcagttaggagagacactgcttgtttgctcgttctaaaaagccgcagccttcaacacacatgtcctctgggcctgcacatctcgggtgctggaggaaagatagccctcagctggttcaagtacagtcgtctcctttggccaaacatcaggaagccagcttgtaagcacacactaccttattattccc

SEQ ID NO: 36771 - DNA, 1732 bp, Bovine  19866880602241
  misc_feature (1)..(1): n is a, c, g, or t
nccctccctgctctccctgggtcctgcgtgggagcccatttctctgtgtccacgtctctccaattagacccaaactcctcgagcgcaggcctgggggccctgtaaatgctgactaaatgtgtgttcaattgaattactgagtaataagaacttgcctaatgccagtgaaatgaataaaacaaaacctaataaataaacaaattatagctttgagagatgagaattccccttcttaatatgtttataaaccaggagtttattgtttaggtaacagattctctgtttaaagctgcgtgggtgctgagcagtaatgccctacctagggcagactcagggttcagggctgggcgtaccggggaccctgacaccttctctaccttatccctgttagagccaggtgccgtctctgggtgatgaagactcttctccacttttcaccctgagcggctctctggtagagctcagctccccacctctgctcgctggacacctttaaggcagtgagaagaggtggagatggaacgggagaggatagggtcaaacacccaattccacctgcttggagggaaaaggccttcctcataaaccagggatatttcagcagcgccaaggccagagatcagtggccgtggtgcgtacatgtatgtgtgtgcacgtgcactcgtgtgtgtgtatatacatgtgtgtgcgtatgtgtatgcgtgtgcgagtgcatatctatgggtatatgtgtgcatgtgtgtgcatatatgtgtgcatgtgtatgcacgcacatgcatgcatatgtgtgtatgtgtgtgcatatatgtgtgtccgtgcatgtgtgtgaggaatgtcctcccagcatgtccacacgtgtgagtgtggagctgaccactgacttatgcaaagttaaaaccttacgctttcattcctgctggagccaaactgaggcagaagctcgcaaagacacatctttcctttttgtgatttctcatgagggagtccttttgattttagttttaagctgaatctttaattcttaaaaatcagcggaagaattggtcagggagaaaccaactggggaaaacaggaggtgtcaggaagtggaggggggatgagtgctggtggaggaggtgaggccagggcacaggccagatggctgttctgtgtcacacgggaagcagagtctgggggcccgggcagagggcctcatgggcagaggtcaacagagttcccttcatggacagttgctgaggcactgagagtcctcaagtgcaaggtgcccgaaatcctgctcggagccctgcttggggctcaggggacactcatgcctccctgcagatgccctgtaccccgccctccatggacacagggcatggggacctctgggagctcctgcaggtgctggggctgggccctcagtgtctgtcccctggctggtcctccgcatctgtcccccagctggaccctcggagtctgttacctggctggaccctcagcatctgtcccccggccgacccttggcgtctgtcccccggctgcactgggtgggggagggggcccctccctgcttagagggctccatgttttataggaaagcaaagagggctgtgagagtctgtgggttttgggagaaggagcctgaggagaggaaggaggagcaaccagagagagtagagaagcagagagcgagcaggcaggcgctctgggctaggaggggcctccctcaaaatacccaccaggaggttcc

SEQ ID NO: 36772 - DNA, 1391 bp, Bovine  19866880620665
  misc_feature (1)..(1): n is a, c, g, or t
naggggtggggctccctcccagcactcgccctccggggctggccgcccctctgaggagccgtcccttccacagcagccgctgcgtctcaggagtccatgtgcgttgggactgagatgggacggagtggccatgagggacagagtgggcacgcgcaccttcctggggggagctggagcccgtccccaaggcgcaggctgggtgatggcccagttcattcctggggcgcctgggaaggctctgcactaacaaagcacagcgaaggttcttcaggcaagtgggggagagcctcccttttgatgcttatgctggtgaccaacaggcccgaggaccgcacagcgggaccagaggcctccatggggagcagtgtccccaggggcagaacgcctccctgtcctgcggcttcccctcctttaaagaggaataactaagaaagcaaaagtgtcatcatactcagaattaaagacaaaaacagaaagttatcatcagtgtggtaccaagggaccccctccccaaatctggtccctctgccctttagcatctcaaccatcttaaaatgtatctacagaccacatcaaatagactgtttttactgtaatgaaattagagagaatggttgtatttttgtatgctgttgacttttattaaggataaattattcatcttggtcttgcgtcataaactctgttattctgatggataagtatgcgttgagctgcatcttactagatgacacattgttaagttttgtaggcatggagttaaagtttcattctgatttttcaattttcttttatattttggacccagtctggttttgctttgcttttacatttcaagggtttttgtgggtcagcagaaagctcatggggtatagacattgtgtctcttaggtctgatggataaaacctccttctgtccctcccaccctcacccccagagagaggaagaaataagagatggcttccgtggactgatgttcagcctctagttttcctgtctcctttggctcttgcttttatgacgatgaaatgtaagatgtgttctctgggaaacatggaatctaagcatcccaagcaggtgacatgtcatcaattacctgaaactcttgacaccaagggagggatgtggattctgaacatgaaggtcaagtaccagaagggttagggcaagggcctcgagagggctggctcttctgaagactccgacaggcaccttcacgtgactctgctttcacgtggaccctggacttctccctggctccacaaggagccttgcgctgctgcagtcctgacgtgggtgctccggggctgtgtgtgcgaatactgatcgcccggggtctaaccaagcagagagagaactaggtactgtgcaaggagaggaaggctagagg

SEQ ID NO: 36773 - DNA, 1508 bp, Bovine  19866880662834
  misc_feature (1)..(1): n is a, c, g, or t
ntcctttcatcaagcctgggcaagacggccaatttaaataaacagtgtggtatattcaaagcattctgacctgaacagaagaggcactaaaaagatgttatataattgtaacatttagatcccttctgtacttcaaaagttacactttctctgagctctagttttaaattataacttagcagaaataatcaagatttttatacacttataataactctgaactaggatttctggtcaaactgtattatgatcttactaaacttgcattcgttgctttaatattctcttttcttcatttcaaaccaagttgttgaatagcaagcctaaacaagcctggttagcaaatctacacaaaacaaaacgaagttctacagaacagagggagaatcattaactcagagggaaagttaacaccagagaactgttaactcagagggagctatctgttcaaggtcagaaagtggatgagtggacgagctagagttcagcctcagccccacagcacctgcctcagcgtgcagactgcaccttccccacaaatattcaaatggtcagcagagagtctgggatttcattattatggcatttcaacaagtctgccaagaagcttttcagtcagaatgtcagttcatgggtatttttaggcagcagaatttccaagccagtgaatggattttgaagatgcccatgggagcagttgatcacaggttataaatactattggaaaagggtcatcagatttcatcgtgtctgaactgatcatggcgtcaagtacttgggtcaacagctattactaaaagcatttttctctaagtcaactgacaagtagattcaccttgtccaaatcccaaatgtcaatactggaggcgtagtttcacatgcagtgagacccaagagtacatctggctggaacaaaacactgcttctgtgagaaggcacaaagatcaaattagaaaggccagaaaagactccacagaaacctaccctgcctcacgcaggagaactgttaatattccgggctcagcggtttgttacttgagtgactgccacaatctgggactaacttaattgaggcaagggaacgaaaacccatttcctaagaggcccatttagaaaagacaatcagagagaagggagaactgcctggggagagagaggcagtgagaagggaaacttggcagctgatgagaggattcatttggccccagagaacacagtgaagaaaactgcttcagatgaagaagccctctctctcattctgcatgtcacacacgacgaaggctttaaaaagcattctttttagtgagcccaacagaaaagttatttaaaacgaatgactttatgcagaagttaaactatccgtttattcctcacagattttaaaaaggacacaactgagaattcaagttcacttcacctcctgcttgggctgtcctcttctcagggggtttcagtttctctctggtaatgtcatttccttctctctcatgtaaagatcaaagtacatt

SEQ ID NO: 36774 - DNA, 918 bp, Bovine  19866880785228
  misc_feature (1)..(1): n is a, c, g, or t
natctgacttgttaaaagccaactcgagcttgcagcctgagtggtcctgggcgcccgacactgcaggcgcccaatgctctactgaccaggcgaggggcaggacgcccagggtcagtccttccagccacgggcctgggctttgtcagggaatgccaccctgggtcttgcctcatctgctcacttcggggcttggggaatcaacccacactccagtctttctacaaactcacacttgttccacatacgaagtctcactgcagcctcttggagacagctgttccaaggtgatttcaaggtcactcgaagtggctgctctgtcactttagccaaagactcctgcagcaggagtggccccaaccacacggcctgctgcagggacgcgggcgtgtggcccagttctaaggcccctcatagctaaggatcccactgtaacctctcgctggggccttgatcagagctcccaggaggtggtgatcaggagggacacactgcctctccacctccactacattacctctccttcctctctcccaggggccttcgccgtggcgccggcctgtgtcccatgccaaccccacatcagactaaggttggagatgccaacaagcagggtcctcaggatgtttaacaggaactggccctctggtctgattctctcccagtggcttttcagatggtcaaggtcacagtgaactgccacccacaggaaagctcacagacgaaacatcacaccaacagcactgacagctcgcagaccaggcaggcaaggcgcatggcagacacaggtgggtgacatgcatcggggccgggctccgagacgccgggggttgggggaggcagtggggacgttaggggggtcacagaagctgagagcgtggtctggaggctcggtcttaccataaagggagagcattgggt

SEQ ID NO: 36775 - DNA, 1698 bp, Bovine  19866880859337
  misc_feature (1)..(1): n is a, c, g, or t
ntggttctttcctgcagtagtcattattgtggtgtctgcctaatgttcatttcctgtttccctcatttccactacactgttaattggaattctcttggaaagagctggcccttctctttccttacttccttcctttatttatttgctaacttattaagtggtcttttgtcattagaatcacagtattttttaaattacacaatatataacaaatgcatggctatatgttgtgtagcaaggatcacggatgtgtattctatcctacagattgctgttgttcagtcgctcagtcggttgaactcagttgaactcgtgttcaactctgtgaccccgtggactgcagcacaccaggcttccctgtccctcacgatctcctagagtttgctcaaacccgtgtccatcaagtcgatgatgccatccaaccatctcatcctctgttgcccccttctcctcctgcccccaatccctcccagcatcagggtcttttccaatgagtcagttcttcgcatcaggtacccaaagtattggagcttcagcctcagtctttccaatgaatattcagggttgatttcctttaggattgactgggtttgatcccttgcagtccaagggaccatggggtggccttctttatatccaggggtgagggcacccccatctcaatgcatctcactgagttgggggctggagattcccactgcttatggggaaactgagtcctgggaaaagggaagcatgccaaatcccgtttgccaatgccatgtgcatagcgaggtcaggaggggcagggaccaggtgtccttggcatcccagccgtcctctcagccaggatcatcctgtcctgctctctcctcgtgttcgtgtccagatggctgtgggggaggcatggctggcaccggccaaggtgatgtatgaccacatggggctcagagcagcgagggctcggacattaggggtgtcaggctgggagatcggaaattaaaggcccggagccggggccagcatcacctccccctggtgcagtgttctgaagtcacccgcggtgggcttcatccacatgcgtgcacgggaggggaggcctcttggcaggctggagagacagatgggctgcgggcagcgggcctggacccccgggcgagctgcaggccctcggggcttggcgtgagcttctgtgatcaagctcttgctggcgtgggcacgaggaactctctccacttagaagctgtgtgcccaggcagaacagttcccttgctggcctcagtctcctcatccataacttgggaacagtggaccagatgacctttgaggtctctgggccctgacatcgcctagatttatgatctgcggtcactgggagagtggtgactgggttgtggctgatggcaaaggggcagatgtggccccgcgtggcatagtctggctctccccacctgaggtctctgagctgagctggccctgcagtcaggaagacttcttggaggaggtggcctctgaaaaggcaggaaagaggactttcctgtatatatactctctggacattctgtttgtcatggtgtccacctctctgtctttcctacaggtatgttttgagaacttgcttcccaggtggcacagtggtaaagtatccgcctgccaaggcaggcagtaaaagagacgcaggttgatcccctgggtcaggaagatccccggaggaggaaa

SEQ ID NO: 36776 - DNA, 1429 bp, Bovine  19866880902225
  misc_feature (1)..(1): n is a, c, g, or t
ntgaaggaaaacctacgtatcttaatgcttttggatgaaaaggaaggagggaagtctggtctaaattgatgagaaaattccgaatggctgatttttaaagaaaaatggttttagtccttgttgtactgaacatacaataagctaagatttaaatgaacactaataagtaaaattaagttagtcactgcagaattacaatccataataggcctttattgcataatcatgaattacattacatcactgagtcttaattttttttaatcaatgagaaatacagactcagattgatttgctggggtatagtccgaatttaggtttcacagcactcaggatttaactgggcactttcagtggtccagggagcagctttagtggaattctccaggcaagaatactggaatgggttgcctttccccctccaggggatcctcccgaccgagaggtcaaacccgtctcccacattgcaggtggattcaccatctgagccactgaggaagcccctaagacacagggaggcaggacaggggaccccaaagaaagagcagacacactcctgagtctggaatctcagtttacaagcagccaaaggggtgctgggatctacctgtccacctctgctccgacatctatggcccccaccacagaagaatgggacggggcacctggaggatggtgcagctcaggacccaccgctgggcagggactgacttaggaagggccagactgagtcctgctgggcagctcctgtcagtccatcctgagccagaaggcaagctgccaacaggctcagagctctagccactggggtcttccctgccccctatccacctggctcccatcagctctggatgggctggtccacgtggtatctgaaacacccaggaagaaacgtgtacaggaaccatcagggctgcacctaaacccgggcctctctctgctgcctccccggggctgcgctgcagaccccaagagtctcagagtaacctgacatcctcctcagccttcagtgtgggtgtgtctacatcctggctggagtggctgaaggcctgccttccaaagtggttcacggcgcagggagcccataacagcagttccagattactcacccgcacgcatattattttccagtatgattcatagcaactgtaccgtatttcagctacgctacgggttaaacagggcagcctggaaatctaaatgccatttctgatgtctaagtctgaaacaccaacttgacaatgaataaaagagcagttgaaacgttggatattgtctagaaatcactttttcgtgaaaagttcaaaatatcttagcaatgggacctcatccaggctctctcgacccctggaagacttgccaggaagtcatgactgttctgtatcacagtgaatcacctgagaagcgacccagagcccggattcattaa

SEQ ID NO: 36777 - DNA, 1961 bp, Bovine  19866881135134
  misc_feature (1)..(1): n is a, c, g, or t
nccgtgtgctcatgaggggagaagggaactggcttacgtgtttttctctctcgtgtctacgtgggtgattcattggcatgaatgtcacccctctcccaaggctgcacacacattcaggcaggacctgtgtggaattcatttttatgttcactgtagtctctaagccgatccttaaacacagtaggtgctcataatttcatattttcacaaaaacatgaaatcatttctaaagttgatggatgcatttggtaaccagttctcactgaagctattcatttctaaaaacaatgaagaggagaacatttaaatatgtgaatcataagccagggttatggttgaatcaggctttgatggttttcaaattccttccacgcagccgtctcatcttgcttccctgccagccctgtgaggcgcaggacatgttgttttcccaatttaattatgagaaaactgaggtcagagacgggagatctgcccaaggtcacaaacaacatttgtttggggtggggatggggattattttttatttcacttttaaaatcaaaccagagttgagagccaccatctcctggtttcctgtttcatgagcaatcaggccacagacctgctgggttccgagctgggccgcagggcccggtgacgagcgctaggcttgggcagcaggtgttttggttcctgtctttttggtcaataagaccgtctagcacagcactctgaacaacgcagtccccaccaagcagaccagtccagggcgagacaagagctcctgacggagtgcacaccagctacatctgtacacgcggtctagttggcctgatgggtgtttttttttctttttatagttagttggaaataatcttaggcttacattagagttgaaaagtggtagggagagttcccccagacccttcatgcagcttcctctagtgtcagcttctcacgtaattataatataagggttcaaactgagaaattaccactggtacaatgtctgtgtgcatacacagctccttcagtcttgtccaatgcttcaggacaccatggaccctctgtccatgggacaagaatgtccaggcaagaatactggagtgggtagccatttcctcctccagggattcttccgaacccagagattgaacccacgtctcctgtgtctcctgcactgcaggcagattctttacctactgagccatcagggaagcccatcattggtaagatgtgctgagtcgcccagtcgtgtctgactctttgcaaccacatggactgtagccctccaggctcctctgtccaagggcattctccaggcaagaacactggagtggattgccatgccctcctccaggggatcttcccgacccagtaagtattggtgtaatacttacaattaaattctggctccattgatttcaccagttttcccacttgcatggggattccacgtgtctggtcattgtgtccatcgagtcgatgatgccatccaaccgtctcatcctctgtcgcctctgtcctctgtatcctttctttgttcaactcctaatttgcatcatgatcctgcttatcttgctctacatatctcgttgcccacgttgttccagcttcagccagtccaaggtctttcgggactgactctgaccctccaatggttccccgcctctttccagcattttcttcctttcagaccacaaagtgctgcaggtgcatcttgaatcttccctgcccgagccctggaatcaaatgcctcttcctggttcctctgtctggagaagagtgtttaaaagccaagacctgagcagcaacggtgctcattgctgtctgtgacttgtttacgtcggagcttctgtcttaaaggaagcactgtgtctgtccacgcggtgaatgggaatcagccagcatcctgtcttgctgtgaaccagggacaccagcgaccccgccgcgtggaatcttaagaatctgtcaccgtg

SEQ ID NO: 36778 - DNA, 2073 bp, Bovine  19866881196631
  misc_feature (1)..(1): n is a, c, g, or t
ntgtactgggtcaaaaaaggaagcagtcactgagttggtcctcaaacatgtgcactgaattactttgaatgaggtgattaaaagaatgaatagacagtgggtaaaaggaacaattaagaatgaccatttatggggggaggggaggcagtattgctgcattagtgtaggtcagaagcagggttctcttaaaactctgcagccatttatttacagacattctaaacagttatatttaaaatttgttaaacagttaatacactaaaaatatgaagtcaactgtttacgatactaaaaactgtttatgacacaagatattttaaaaagcaaatctgggaattcaattcccttttgactccagcaatcaatttcttgagaccacggatgtctgggaaatcagtcagtctttcacaaggaactggcttctgctcagctttcccctctccctgaggtacgcgaacaggtgtcgtcgcctcctccacgtgacctttatcccgtacttctcctctggggtgtctgtaaccagaacaggcccgggctctgggctcttgggcgtgctcgtgtgaagggaacagctgggaaggctgttttccctcagttcagagggaatgggctctccctgccccggggattctggggtctggatgtccgggggaatgaacacacatgggaagtctggaaatgtgtgtgccgacagctccctgcagctctgggggctgagcatgggcaccaagggccttccggaaatgtccttttctggttgactggggccatccctgcttgccaggatcccaggtgtggctgaactggcagaagactgcggagtctcaaacgttagacatggaaacctggagctggtagattttcggcttgaacgccttgcatggtctcgatgatgatgcttccgcttgcctggaaaccagctttctgctgttgtatcaaactgaggtgatacctaaggattccaaaagaaagaaataaaagtgaagcacgctaactcccagacacaaacctaaggaaactgcatcagaggaccagaatcctaaatgggggcccacaacagcaatggacttaaaacagctgcctgagggacttccctagtggcagggaagaatctgcctgccaacgcaggggacatgggttcgatccctggtacgagaagatcccgcatgctgtagggcaactaaatccatgcaccacaactacagagtccagctctagaacccaggagccacaactgctgaagtttgagcgcctagagcccgtgctccacaacaagagaagccgccgcagtgagaagcctgtgcactacaatggagagcagcccctgcttgctgcaactagagaaagcccaagtgtagtggcaaatacccagcacggccaaaaaaaacaaccgctgtctgtcttactggataaccataggaagggatgcgggctttgggcaagttactcagcctccctggcttcatcacaccctacagctgcaacacacataaccatctccctttcagttctgagggcaggcccagctgtcgtcttcaccactgatgcccagcacctagcagggcgcctgacacctagaggaccccagtgtaggaagaaagggctgaaggcagaccagtgagtgagatcaggcatggagagcagcaagcagggcctggcgcgtgcggagcactctgttcgcatccacgtgctcatgcctcctcccaccaacagcgctctaacatctacgcttcctccccactcctgaagccaggggtccagttctccccagtactcctgcaccacatctgtcaggcgctctggggcagagctcaggcttttgtctggctcttctgctacaccactttctgataccccatagctgtgttctcttcccggggcttataaactgtcaagacagaacacatgccatttctgagagtttttcttcactgtttggtccattaaacagtaaacagagggacttccctggcagtccatcagttggggctctccatttccaacccaggaggtgtgcattccaccccggttggggagttaagatctcacaggccttccagccaaaaaaaacaa

SEQ ID NO: 36779 - DNA, 458 bp, Bovine  19866881305727
  misc_feature (1)..(1): n is a, c, g, or t
nagcccccgtaggcattgattctcaaaagacagaggctgccccttcctgttcaaaatgctccaggtgacacagcagaggaggagccgaaggggccccctgcccaacaagagcctgctcaagcacaagcccccaaggaggtggcagagcccaacccctgcaagtttccagccggaatcaagatcctgaaccacccaaccatgcccaacacccaagtggtggtcatccccaacaatgccaacatccagagcatcatcacagcactgaccgccaaagggaaggagagtggcagcagcgggcccaacaagttcatcctcatcagctgttggggggagcccccactccccctccaggaccccagcgtcaagcccaaaccagcaaggaccccaagaggacagaagtgatcaccgagaccctgggaccaaagtctgcaactggggatgagaatcttctaagacca

SEQ ID NO: 36780 - DNA, 1026 bp, Bovine  19866881593378
  misc_feature (1)..(1): n is a, c, g, or t
ncgcacgcctggtgcgcagtcccacgcagtgaacggtggctgtcaacagcactgacacctactaccaccagcttatttctagaatcgtcgtcatccacgtagacctggtatcaacacaaaacaggctggtcactagcaaaacctactaccaccagcttatttctagaaccgtaaagtcacccacatagacctggtatcaacacaaaacaggctggtcactagcaaatactaattgcctcaaatttaagggtaaatcagaatttctaggatgaaaaacaagacatttcactgacatgtttttgtttttccaattcctcctattccctaaaatgtactctcttttttccacactgatgttctaccatgtaataaaaataaaagtctaagagcacgctggaaaccccggcaccccaaaagagggatggaggtaaaaacaactacatttgaacattctcctccattttatgactcctggataaaactctcttttttctggggcgggggtggattctgactattagactaggacctctgtgaagacagtgagaacacggcactggacacttggaggtacaccctcgttcctgctgactaggtctaaggctggtgccccccgcccctgttcttaagaccaccaccgccccccaccccgacagcacactaccctccatctcaagacaagagccactcgcctaccttgcgattctcatccttttccaagtgcatgtagtaggtggggaagagcccccggtccatccctttcttgtcccgggttatccggcacttcactgtgacacctcgtggggcaggactgtacgcaaagccttccaagtcctctatttctcctggctgaatgtcagagtgcggggatgcggtcccggaggcccctgtgccctgagagagcagccgcagctgggtcaggaaacctcatgttctctttgagaaacacttaaaggacaaattaacttactgatttacccatatgtcttccgtcttctgacaaaataaagaaaaactctgagaagt

SEQ ID NO: 36781 - DNA, 948 bp, Bovine  19866881744311
  misc_feature (1)..(1): n is a, c, g, or t
ntactcccacttcttctgtttcccatctggcttcacagaatctggcattattccagagcttcccacacaggctggttcttagtatttccttgaactttgtgagcccggatgaaccaagaatccccagcatagctcagaaatgggtcctcacaaggaggattctgctggccggatggcacagtcctttcacacaagttgggtgtctggaggcatctttggtctcctttggtttagagagatgaggatgctgaaggttcatgctgagtcctggccgcccttcccgttggtcccctctggtaccaggtgatcacgtgtcttctgtgtcgctggactgatgcaaagtgtacacatgtcggccggctccctgcctgttctcaggaggaggggacccgcgggctgtgggcaggccagttgccatgcattcgggttggaagcctgagggaggcaggctttccgtgtctgcctcggggagtgttgtgggacccaggcatccaagagcatctgccagaggtgcctgagatgggcaactgggcagacgcccctcagccctggagctgtcccccagtcgctctcccagcctcgagcctggcagacgactggggcctgggcatcttagtgcccatgtccatttctgtttggtgcttttcccagaaattttctgtgtgtgtgtgtgtgtgtgtatgtgtgtgaatacaggaaatccagtttagagaacagctttgtgtgctccgtcctgcatgtatgcagtgctctgcccttgagaattttaaatgagctgacctacatagcctatttcaattaaaagtgacggaaagcgtagcctggtgagagatgcggggcagggaggaaaagatccgtcccaggcagaaggcagagcgacagaggggacaggaggttgtgggtggaacgcccggactccccaacaccccggcggggctgaggtcctca

SEQ ID NO: 36782 - DNA, 929 bp, Bovine  19866882118427
  misc_feature (1)..(1): n is a, c, g, or t
nagggagggccgtgtacgggaccagcacggggtgtccctgcagggtacccccaccctcaccttctctgccctgccccgggcggcccctgcagacacggccaacaaggcgctgctggccctgttcacggcggagatgctgctcaagatgtacagcctgggcctgcaggcctacttcgtgtcgctcttcaaccgcttcgactgcttcatcgtgtgcgggggcatcctggagaccatcctggtggagaccaagatcatgtcgccgttgggcatctccgtgctgcgttgcgtgcgcctccttcggatatttaagatcacaaggtgcgtgccgccctcccctcccctccttggaagcttttcttccaaggagcaagcatcttttaatttcgaggctgcagtcgccctccgcagtgattttggagcccaagagaatgaagtctgtccccgtttgtacttttcccccatctatttgccatgaagtgatgggaccagatgccatgatcttagtttttccatgtgtaaagattccaatttctctactttctaaactctcttgtccatctccagagacaggacttaaaggatttttgactgactctgcttgctcctcctggggtttgcccaaagctatttttaatgtggcatttcaggtgccttttaaataattctcaaaaccccacctgcctggggctttgtctctgtttgtttgtttttttaattcctatagaaaagaattcttgctcccaggtattgtcatagtatcttaatattcattctatttttatcaacaatttacctatttctaatctgaaactactgccaagaaaccattttaagtctgtctttatcctcgagcttcccaaagccactccacaagaattttcagatccccagaaagtctgtgaacagaacaatttcatcatctaattaga

SEQ ID NO: 36783 - DNA, 1537 bp, Bovine  19866880295595
  misc_feature (1)..(1): n is a, c, g, or t
nactgatctccttaggatggactggttggatctccttgcagtccaacggattctcaagagtcttctccaccaccacagttcaaaagcatcaattcttctgtgctcagctttctttatagtccaactctcacatccatacatgacttctggaaaaaccatagccttgactagacagacctctgttggcaaagtaatgtctctgctttttaatatgctatgtaggttggtcgtaactttccttccaaggagcaagcgtcttttaatttcatggatgcagtcaccacttgcagtgattttggagcccagaaaaataaagtctggcatttggacgtatttatttcccatagaaatcagctcagaccacctagcagtgggccatagatttcccagaaaagcttcctcctgtgttctcacatggcttaggggatttctcctcattcctcacacatgtatttcctctcttttgcacattttcctgaagtgtgtggatcacatctagccatctgcctctctggactgtacatcctgttccttcagtacacagagtagtctgttaccttcagctctgtgtccagttacactgttagttctagccctgcctctcaaagtcttaccttgtgccagagctttgggctcctacatgcctgggacagtaattgtatcttactctaaacatggggttcaaattgctctatacttttccatagtaaaacattgatttttgtctgtgaccagaggaaagaattcaagaaagaaaaggctatgcaaaagaggagggatagtttgaattcctgtacaaagtgttattgtagtaccaaaataaactaatctgttctgataaatggtatattaataggcatctccaataaggaggtaggtagaataaaatgtcattgctatgggtgattttagtctcaggagaattgaaaataacccaagtgagtgtacagaccagacctttgactgctaaatttatttagtcagaaagctcttggctgtggatgccaggagcaggattttgatatactcaagtccagattacaaaatggagctcagtgggagaaaagggaagcatctgtgggtgaacaatataattttttaaaatattataagtaaacaggacaaacatagaatctgtctgaaaaagacacactttccatttctctttgccaaaatcatgtactgacctccaacggagccagtgcaggtcagtaaaataatatggccattgagtccttgggatcttaactgcaacaacaaattgaatggaaaagctttccagtgacaggcatttatgtttagatttttctgtcctgttttttgttgtacttggtcagagatcaggttgctggaatttttagtagtatttctgacgttgaaaggcacttgaaatttctgtgagccatcaattttctgattaggaagattaagatttgtcaaactacattcctttccaaagccataggctgctagatatgatacttagtctaaaactaaaacaccaacacaaacacacacacatagttcaaaaggaaag

SEQ ID NO: 36784 - DNA, 1679 bp, Bovine  19866880364399
  misc_feature (1)..(1): n is a, c, g, or t
ntgttaattgaattgtattggaaaaaaagcacacatactttgtctcgactgatatttgactagagttctgtggtaaagtaataaccagtagctgcattcatttttccagttcttggactgacatattcacagtactatatggtttttctactattgcatgttgtttagctcttgcatattacaaacagggccaaagaatagattattacaataaaaaaacaagaaaaagtaaagtttatcattttctatgaggcttcacacaaaatgccatgacatacttagtatccacttggttggaaaaatcatgcaagttgacccatgtttttcatcatataaaatgagttggttatgatggatatgttctgtgttttgtgctaagaattctaataaattaagaaatatttattgagcacctattataacagtctaacggtgctgagttggggaaagtgtgcctgtatatgtatgggggtatgtgtgtgtgcagagagtagtggtaaaagtgttaggctaagtcacactgagagttcaccttaatagaaaaaatataaaaatgatttctgacagctaagccctggaaaaactattcaaaatatactatacttagcatattttactaggagatagcatgtatgataagttttagcatttttcacagtatagtcctgttgaagactatatttttgcaatttaagcaacaatagtgaggttatttcatcttactgaatactacattaagttaataaagcaaacttttcccttccaatattaagtttaaatgctgtttgaaaaaatgttaataaaaacttttaaagaaatagttatttttctttgtgtcaagtgactatttaagttactattatcttcttatggctccttaagttttaagataggattttaaaataaatttagtgcttgatgtaagtgagaatctaagttttctactttaacttcagagcaaaaagaatatgaacctaatgcaaagaatgatgttatggattttctgtaattagtttagtagctttcagattctgtggttaataatcaaggcttgagcctcaagtaagattgtatgcttgcttgttatttgaattgtaccttggctagatgtttattagtattttgttgagttccttccaacatgttaatgaagaagtcatcacacttttctaaatcaaaagtagacaaagtgaaagttattttttaaaagttgagaggcttgcttttctcttgagttgttcctcaggggtattatgctaaattaatagtgatatagataaaccatgagtacagaaatcgaatgccatccgtaaatgcagaaatctttccagaagatctgtataatatgctattacatatacaaagaaagcaaaagcatatggttgtaatgaagccactaccctaaggtctgcgtatcagtttgcatgtagatggtctctggatataactgcagtattgcacacatgtcaaattatgactgaatgcttattgatggtgaagaaaaccttgatttatacacaattatattaatacataatagctacataaatatataatatacaattatcttcctttttatttataacttcacataataaaaatgtatttttttgagtatcaggtaccataaggcctatgctagcatctctgcaagaagcagactaatcatacttagaaag

SEQ ID NO: 36785 - DNA, 2721 bp, Bovine  19866880402249
  misc_feature (1)..(1): n is a, c, g, or t
ngcaccccactccgtactctttcctggaaaatcccatggatggaggagcctggaaggctgtagtccatggggtcacgaagagtcggacacgactgagcgacttcactttcactttccactttcatgcattggagaaggaaatggcaacccactccagttttcttgcctggaaaatcccagggatgggggagcctggtgggctgccgtctatggggtcacacagagttggacatgactgaagcgacttagcagcagcagtagcagcatgctagataaggcatgaatggaaattccagtataatatcaaatagtaatcctgtaatcctgggctgctagagagttatcagaaataatttttttatacatttatctaagatgtgaagatatctaaataagactatcacaggtcaaacattttagagtagtttgccctcatttcatttttgacatacatttgttcaagtagcttgttaaatgaggtctcaaaatactataatgagtcttgcttccaaaacatccaaaccacttgactgctctttatcctagggttggatggcagggtgagcataaatgtttattccatgagtgctcttaaaaaatgaaaactttgtgtttaagaaacttacaacatgaaaacaaaaatcgttggtacatttcccttaggaattcttaaaatgcactatacagaaaagaagggccaggagtatacgttcaacatgttagcactgttgacctctgaaaagtgcttcagctggtgtttgatgcaactttttttagtcccagtggggtcaataaaacagaaagtgaggggtccctaaacataagctgggggccagtgagctgtgaaaactgaccctgcctccaatcagcactctactgatccttgggagctatttatactccaaattttctcttgaaatctgatgacacaattccccaagggcttatattttgaactagagagtttgtaggaaaagggaataaagaaagaggcagccacggaaggagaggtcatgggattctgactcttagaattatatcagtgaaaacatttctgtccacagtagactcttggaaaatagttacactcatgtacccaaacagttatttccaggcattcagtgcccacgcatatacctattaagtatcaaaattcaagtgccaaatgcaattaggggaaactgatttaaattatttcttataaaaaggacacacttcaacaaaaaactaactcattcacctcttcccttctaaatatttgctgggcccacagtaggagcacatatctctgaatattttaccactaaatatttaaagctatatatcaagagaacaaacagttacatttgttctattcttttgccttttaataagtttcataaaagtctgacaagttgggttggaaacaagaattctcaactccttgtgtgacagggctgcatccgcctgcccgcagctcaggcccttgctgtatgaacaggtagatactgtggtcccagtacaatctccgtcaatccacccaagcttgaaagcagctgcttcttggccattctttaagggtggagaggtgtacacaccagcagtatcctgggccccctcaggagaaaagacctaaggaggaagcccattaagacttcggagacaggctaatagacatttgggtagagaactctggggtctcagggtcaaaatatggtagaggggcacactgcactgggcagggaattccaagatgtgagtatccagcaggggaaaagtcatgagctcagtttcttcttggccttggagacctactaacccatgggaaggagcagaccaaaagatggccatcactgaacatcgtaatgtgggggacagtgtccagggaagcagttccactggcactgagctaagggtggtactggcctcatatttggtgaacaccctccaagtgactccttctgggataactgggagaattagaagttgatctttctacagtatggttattctttggaggtaagtggttccctcataagcaagtctattagaattatttgtttagttaacacatgcatatgctctgaggtgcctgcagcctctccacacacccgttctccaccaaaaaaccccaagactaattgtcaagcttcacacagacttcagaaccatctgaggatggatttaatgacaatgtcagctaactttattgcttacttactatgaaccaggcaaggagccacgctttacttcatttaattctcaaaacaccaccataaggaagatattactatcagcactttactgatgaataaattgaggtatagacaccttaagtgatttgctcaaatcatacaactagaggcatccatgccattttttgagctcaagtctctctgatttcaggatctgagtttttaactgatgagctattctttacctcaaatgtgtgttttgtttactaagtgtccagactccctttaaattcagacaaaaatatcagcaatcattattctctatcccatctctatgttgaaattccagtttaaaaataattgatcttaaaaaaatcttaaaggactttggttcaccagaattatgattagaggaagcttaaatttgttttccatgactggtgtgttgaataattttcttagagagaaatatatctggatggtataatttcagggtactttgaagcgtgataaataaattgaatatcaggaggaaagacgtaataca

SEQ ID NO: 36786 - DNA, 1113 bp, Bovine  19866880430187
  misc_feature (1)..(1): n is a, c, g, or t
ncacatccatacatgactactggaaaaaaccatagctttgactatttagacctttgttggcaaagtaatgtctctgctttttaatattactgtctgggttggtcatagcttttcttccaaggaacaagcatcctttaatttcacggctgcagtcaccatctgcagtgaatttggagcccccgcaaaataaagtctctcattctttccattgtttccccatctatttgccatgaattgatgggactggatgccatgatcttagttttctgaatgttgagtttttaagccaactttttcacaacaaagaattatccagcccaaaatactggtagtgttaaggctgagaaaccctttccaggactcttcaggatggtgccgtaggtctagggatttatttgtctctatgcatcactattaactggggattttgccttctgcttttaattagaagtttagctgacattggctgccagaatactgctacaattccctcaagtaaatcttttgtgtaaggtgctacttggagttcataacaagtcagagaactgagacatcactatttttgtgcctgcttgctaatatatgtttggatggaaagaacaaatagtcaatatcatggtcaaggtgtctacttgagagaggctggctgattattaggtgttattatcttgctaagtgtgtaatcataaatcttgtgcggttactctgagagtggatgtgctaatcactgatgtgatgaactcccagcaaccagactcatgaggctgatgaacagaatacacgttaatataccaatatttatgagtgttggtatattatatcagggtattcttgaccttcaggcacatctatttggaatcagaatcagggcactgagattcagacacaaatttctttagtgtgatgtatctatctctctgaaaggaagaacatttttcatgagaatgtactgctctaagtgtaattggctaagacgtttcccctcttgaataaagtttgtgtgggcactccttgtttttactccttgaattttcaattttgataatttcatgagagaacactcctacttttccatgtcctctaccaatttatgatggacccattctttcttta

SEQ ID NO: 36787 - DNA, 1556 bp, Bovine  19866880487481
  misc_feature (1)..(1): n is a, c, g, or t
ntccaacaccaactcccggagcttactcaaattcatgtccataaagttggtgatgccatccaaccatctcatcctctgttgtctccttctcctcctgccttcaatctttcccagcatcagggtcttttcaaatgagtcagttcttcgcatcaagaggccaaagtattggattttcagcttcagcatcagtccttccaatgaatatttaggactgatttcctttaggatggactggttggatctccttgcagtccaagggactctcaagagtcttctcttgagtcttgagtcaagactcaagtaagtcttgggcatgacttgagtaagtcatggcttgagtcttaagcatgacttgagtaagtcatgcccaactcaaatcttcttttgagtcttctgtgtacactacagttggagtatacaccacagcacaacaccatagtaccatatatgtatttaaatttaaaaagcattattcttatttttgatttgataacttgtttaaatgtacttatgaatattcatactgtgaatcttgatatgaaaaatctgaggtaagtagattatatgttttaattttcatattatcactgcatagaatgagacaaaagaggagtaataccttaactagtaaaaaagttattggattctagatggaggggttgacttaggtcatatctaaatggcctactggtttccctactttcttcaacagaagtctgaaattttcaataaagagttcatgatccgggccatagtcagctcccagtcttgtttctgctgactgtatagaacttctccatctttggctgcaaagaacataaccaatctgattttggtattgacttggtgatgtccatgtatagagtcatctcatgagttattggaagagggtgtttgctaagaccactgcattctcttggcaaaactctgttcacctttgcactgcttcattttgtactgcaaggccacacttgcccattactccaggtatctcttgacttcctacttagcattcctatcccctgtgatgaaaaggacatcttttattgatattagtcctagaaggtcttgtaggtctgcaaatcccttatgattatacagtgaaagtgttaaatagattcaagagattagatctgatagacagagtcctgaagaactatggatggagggatgtaaaatagtacagaaggcaatgatcaaaaccatccccaagaaaaataaatgccaaaaggcaaaatggttgtctgaaaaagtattacaaattgctgagaaaagaatagaagtgaaaggcaatggagaaaaggaaagatatacccatctgagtgcagtgttccaaagaataccaaggagagataagaatggcttcctcaatgataggtacaaagaaatagaggaaaacaatagaatgggaaagactagagatttcttcaagaaaattagagataccaatggaacatttcaagcaaagataggcacaataaaggacagaaacctaacagaagcagaagctattaagaagaggcggcaagaatacacagaactatacaaaaaaagtt

SEQ ID NO: 36788 - DNA, 1349 bp, Bovine  19866880503706
  misc_feature (1)..(1): n is a, c, g, or t
nttagcttcccctggggagacaaacaacacaaaacaaaaagctattatttttcaggaggaggaagagaagagtaggacagaggctgggagggcaactgcatagataataagctacgattgctcatttttttaggagtcccctgttaactattttagtcaattaagatttgtagtgattaaaaaaaaaggtgggtagatgctccagtagagcacttctgggctaagaacacagcaggcttggcataagctgctgaggcgtgcagaatccttccattggtggctgaggtaagactgtccttagccacatatttcttggaactatccaagaatgggattcactgctatctaatctatatgggaccaaaaagaaataatctgtggtagattagagaaaactagagaaaacgggggcgggagaggggtgacaaggctttatgtagaagttttaatttcacgtatttaactgtgtccaccaagtacaaggcaccatactaggtaacaaacaaaacacacactggctatgaactctgagaataagtctattaataaaagagtagaaaagctaaaaaataattttgtcagaagatgtttttggcataaaaataacaaatcctattattaaacattactaaatactcatatgaagtatatacacacatggaaggatttatagctatataggctataacttaaaatacctctacgaactccaagatctgttcagcagagtgatgtccttcatattcatgaatgttggactggttgaataccactgttgttggataagcctgaatgttatactgttaggaatgaaaatacaaattaaacataagattctacatattttacctatttgcttcaaatttataaccagcttgccttaagtaacagcaacaagattttaaaagactcaatgcctaactgatgactgaaaaattttagcctagccaaattgaacaaaggaaatagatttactgctgtatcctcagcagctgattcttatgtatagttactccatttgccataaaatccataggcaccgaaacactgagaagtgagcacgggcatttatttattttttttttttgataaaaacagtcccacagcatttactgtcatctggtaataacataagggtgagcagaacaatatgaatacatgttttagaactacatctctaacaaaggacacctaaaaaaaccaacggtattgccaaacaatttctcacttcatctgtcacttctagttggagacactttggagcagagtaatgttacctccttttagcatgatccgacccagttgttttcttgactttgttttaaaatgaatctcttctgcgtcatcta

SEQ ID NO: 36789 - DNA, 1149 bp, Bovine  19866880571075
  misc_feature (1)..(1): n is a, c, g, or t
nttaggcctatatttgttcatacttaattaatttaactgataatagagtattaatgcaatgacacataggagaaactctagaagtatttagttagttatgaatatttataggcaaatctgctctgacttaattacctccaaatgttagaaaaggaaatattaattaagttttaaaatcccaaactaactactgtaaatgaagctttatgtgaatagagcaggaaatgactgccttaaggctgtgcctggacattaaaactccttttccaactaataaatctatcaattctaagtccaaagcttcaaaattaaaatcaatttgagggtcatacattgggtatttataaatatttactgaaaatattttaaaacctagtgtaatttatataattataaaatacattgcttttattatataatttttaaattaggtattgtcttttcaaattagtttgtcattttataatatctcaacatataatttcaggaaaacagattaagttaaaaactcaaccttaaatacttcagtatatgttaacatatattctgtgattatttttaactatgatcaatttaacaaaaaatagatacatctttagcctttatttgacagatgtatctatgtatgtgctttaagacaaaattactttataaccctagagaaaatgccaaatttttttaactgctaccaagtaattttatcaagcaaatttggaataaaaaaaatcactaggaatatatgaaaatatttaatatgtataaattaaaattttttgtaaggtcaatgtaagtgctgcatattctatataatatgttagtcattcattctctcaagcagaatcacgttaccatctgcttccagatatttattcttctatacatttttaatgagtaccatgctagtacttcactttcactttgcactttcatgcattggaggaggaaatggcaacccactccagtgttcctgcctggagaatcccagggatggcggaccctggtgggctgccgtctatggggtcgcacagagtcggacacgactgaagcgacttagcagcagcagcatcatgctagttagttgctatatgaaactaatttatgatccaaataataagcctgacataatttggaatcaggaaagaaaaacta

SEQ ID NO: 36790 - DNA, 1090 bp, Bovine  19866880778649
  misc_feature (1)..(1): n is a, c, g, or t
natggactagttttagctatgcctcttccactgtttaattgtatagatgtggacagtttagttaaaactctgagcctcggtgtcctaactttgtaattgagaataattcattaaggttttagtgagaattaaataggttttatgatcttcagatagattttaaatagttttttgaataaacaggactgccaatgctaatttaggactaggagatttattatgaacaagactacttgtagactattcatatattggattaatcatttttaaattacaaaatatttgattaaattcttggtatatgtagggaaatagtgccaattttgaagctcatgtgtgtgtgtaaatacacacacatacacgactaacacaaaacttcagtgttagcgtgtgatatgatatgggtaaaaggggatgtccgtagttggatcccagggtatgctgtgtgcaatggaactgagagttggacttcaatggaagcgatgcttttgtgctgagtttcttgtatggttgagttaaggttgctgcaaatcatgtatcactgtaacagagacacctatgaacctaattagttcaaaggggtgagcttcatccacatagaacgtttttcttagggaaaatgattgataattcaagtcaagcttggagattagaggaaaggtcacaacatgaaaagtatatgcgtattaagtaaacaattaacaatactgtattgtatacttaaaacttgataaaaagatggatcttaaagtgaatctcacccccccatacacaaataactatatacatgtgatggataagttatttagcttaattttgatcttttcacagtgcatattgatatcgaaacaagttgcatactttacatatatacactatttatatgtttaatatatctcagtaatggtgttctttttttaaaaaaaaagaaaaaggatgcagtgacttcccttgacaatgaccattgcctctgagatgagagaatttagctgagcattgataacggaggagacttactatacataacaggaagtgattaaaggagaaagctcaaaagcaagaagataacaaggacaggtgaggtgaagag

SEQ ID NO: 36791 - DNA, 962 bp, Bovine  19866880785400
  misc_feature (1)..(1): n is a, c, g, or t
naaaatgacatatcaaattgtcctaagatctatgcagaacattaacaaagaaggatgtactagaaagtgactgggtgactattttagatgggattgtcagtgaagacttctttgaagaggtgtcatttaagctgaagtcttagtgggaggaagggtgccagccatgtgaagattatagaagagtgttctaggaagaaagaaggattagtatgaacactccaagaaggaatttgtttgtaaagtcaaggaaacaaactaaaatcagtgtgaatatcccctagtgcatgatgaagagatagacatgagacaggttcagaaaggtgaagcaaggaaagattacaaaggactgtgtaagtcaaggtaaggagtctgggttttagtcaatgcactcctggaagacattggaaaatttaaacatgggagtcagatgatcaaatttttgtttaaccaacaaaaattctggctcctgccaggaattgaatggtgggagaaccagttctggaaggacagaggccagcaaggaaagtagggcgatgtatggctggccgtccatcacacccatcacccctctttccttggcacacaactggatagcccttctcagtctcctttaaagtgagatgtgactgatttctgtttggtgtaagacaagtggaagttatgagcaccacttctatctctcaaccctaatgctttctatatgcgacaatctatgcttttttcccactccgttggcttgatacataagagtccagagatcatggaagccagtattgaaaatagtggcacactatgaaggaagggacttaggttctaaatcatttactaactagaaactcatagcttgaattctttatgagaaataaactgtgattgaaataagctactaggctatagttttatcttttataatagtgagaagtttaaaactgggactaatgcaataaaaataagtaaattaa

SEQ ID NO: 36792 - DNA, 950 bp, Bovine  19866880807430
  misc_feature (1)..(1): n is a, c, g, or t
ntatggtgcacaaggtaatactgctactcctaaatcacttcagtcgtgtccgactctgtgcgaccccatagacagcagcccaccaggctcctccatccatgggattttccaggcaagagtactggagtggggtgccattgccttctccaacaaggtaatacagtggttttcaaatttgtttttttaggacgagttttttgttacactcattcttacccagaatttcaaatatgtgaaagagtttcagcagaataactttcattaaagaatgtagtgtgtgagggggaaagtgaagtcctgcctgcttgacccttccacagccccaccagtggctcctgtggctccttggaattctggaggcaccgtgtagaaacagcagaaatcttgtcttggctctgctctcttttctttgttcaggcttgtgcaagtctcctcaaccttaaaagcaatgatcttgatcttcagagaccattcctacgaactgcaaagtctcacaatgccagcagtactcaaaacaaatgaaagattcaagcctagtctattttgtattctattagtgttttcagtcaacatttttagatactttattataaaaaaattggttgatatttgataaaagttagtatcaaggattgattaaagatttgaacaattcagggggtatttagattctggtttgtacgtacctttcattatcagtaaatttcaaaaattctactttgaggtagcatttcaaaaaagaaaccaaagtgtgtattcaacattcacaacgtctaacggtctgtattccttcaaggaagcaagcagtgtaacacagtgttcctacatagaaacaatctggtatgaacatcagtcagatacttgctttggcgggtgttttcacttaacagaatgtgtgaagaaatacacaaacctggtgtcaggcaaaggccactgaagagcactatcgt

SEQ ID NO: 36793 - DNA, 1830 bp, Bovine  19866880829430
  misc_feature (1)..(1): n is a, c, g, or t
nccctgtggtggtttaaacacacatatctacaaattcttgggcactccttcactgagagatggagaatatgtctctttctttgaatctggtttgaatttagggatttcctaggaaccaagagaatgcagaggagatgccactccatggctaccaagcctgggtcataaaaggcaatgtgtgcagacactcactattaaagcgctgagctaccagataagactaattaccctggggcctccatgctgtctggaagcctaggccacatggacagggtcaagtggcttctttagttgacaaccccagcttaagtcccagtgaggtcacagctcagagccaacatcaatcactaggcctgtgagtgaagtcatctccagatggttccagaccctagccactgagtaattcccagctgaaacccagatattgtggaacagagataagctattcctgttgtgtcccatctgaattcttgacctacatcatctgagagcataataaagaggttgttttaagtcactgaattttggggtaatttgttatgcagtaatactgattgtgatacacatgttaagcacaaagtgaatggtcaacataacctgtgattcagtttaatggagggagaagtcaccaaaagcttgcgtgaggatgaggctgccctgcttggcttcccacacttgaaaggaagagcaagacatggacaacaagaaagggaaagtatgaaagcaggtttaatgcaaagatctttgttctttttcctttaaaattcttctcctagagtaattggaatttaaaataaatcagcttctaaagcagtgggaaaaaagattaaagattgaatggagaaggaattggttaaactcccatcttcatttgtggactgtgcttctgagtgtttaaagatgaagctattatgactgcgtataggacttaataatctttaggcagactgataactgagaaagagattactgtaactttggtttggtgacccactaggctgactcagtcacttaaatttaacatttctttaaaattctgaaacaagggttcagaagtgttcttaagcgttcttttaaaagaacagaagagtttcatgggagagcaaagcagtccgctggaaagagacttttcttcatgatttaatgcctctgaggaagtttccaaactgcaggatgatgaatgataaaggcaaaaaagattattttgcctttatttgtggaaagatttttttggagagatatcatgtgcagatagtgtggcaaaagatactgaaggttgagtccttttctttgaaaactttataacatcaggagatgtttataatgtgaagaacgttggtacatgtctcaaagctaaaacctagagatcgctatgtacaaagatagtagtatactttgtgttttaggagtggactttgagcaaaatgttgaggtaggtgttgctgaaacagcttccttcctcttactgtattctcactctccatactcctgttccctcacacctctctggaccttcccagaacccctcagttctcacgctgtctgggcctatcaatccctccttttctctattacactttaccagcactcatttctccgagtttcctccaagctatgctttgaggctattggtggctccttcacgtgtgcccatccaaatagatgtgtctttccttggtgagatgtggtgatgacatggcctgggctttccaggataggtagtatacaagtaatcccattatctccttatactgaaattcctcagaaatcccaacattttgatattaaactgtatatctcagaacttgactcagatgaagaggaacccca

SEQ ID NO: 36794 - DNA, 1480 bp, Bovine  19866880903918
  misc_feature (1)..(1): n is a, c, g, or t
naaaataatacaacaaatgactccataaaatacctggtaataaacacatcaagtaatatacaaaactatatctagaaaattttagaatactcctgaagtgcacaaaagaagaattgaaatcatggtaagatataccaagattttgacaggatgattcaaaatcataaagttatcaattcttcataacttttaaattttaaagtgatccaataagagttctaattgtttttaagctagataaattgattataaaatttatatagaaaaaacttaccaacaaaaacattgaaaagaactctgagaaaaagagcaatagtggtaggggccagatttcctggtattaaaacatttcatgtctcaatcattcaacacagaactagtatatgaataaacaaatggccagaaagaaatgacatggaaatctagtatattacaaaggtgctatctcaaaactagacggtaaaaatggattattaaacaaatggtcctgggatgatgggtggctctctggaaagactaaaactggatccacattggacccaattattgactgtgatgaatttcagctgcatcaataatttacatataaaaaagaagccattaaaatactaggtgaaattttatttttcagtaggaagacttttctaactatgaatcaaaaaacaaaatctgtaaaaaaaaatactagtgagtttggaactacagaaaagaaaacatttcttcatgacaaaaatgccacgtggtaagtaaaaagacaaattgcaaacctgcaaaaattttgcaatccgtatcacaggcaaagaatgactcttaccattatacggagaactcctagagctcaaccaaaacccgacagcctcaaatatgagagcaaaaaatacagatagctcacaaataccaaaatacgaataatttaaacatgtaaaaaggtagtcaactccgctgaaaattagaggttttgacaacaaagggtatccaattgatttattgttctagattttaaaattcaaattatgctattgagatcctataagttgcatgatattacttacaataattgcaactgcagtttattttcacacagactgacattttatactctcttttattttgcacctgttttcaatatttctggaacaggttccaatcactgggatgaatgtagcaattacgggcctactaaagatgaatcatccataaatgctgtgtgaattttgatcgctctaatatctgccactgctattataattcattctcatttcatcaagtattctttcagacttatttttcttttagacctgacattagaaagttgtttttctctttgaggatcacaaaatgctaccaatgtgagatgagaattttgcattcaaggcaagggtaacattgtttcctgaataatagtgacacctgcaatccttactatcacagaaaatggtaatttgatcagctttgtgtgacaaaataatgaaaagatagg

SEQ ID NO: 36795 - DNA, 1764 bp, Bovine  19866881052137
  misc_feature (1)..(1): n is a, c, g, or t
ntaaagaaatgtgaacaaacggtaatctattacctgacgtcacaactgggcaatgacttgtatgacaaatttaatttcaatagattcagtaattgcttccctgacttcagagcttttaattgattcaaaaccctctagacaataaacagaccccttaaccaaaaaaaaaaaagagagagaggtttttgtgaagtttctttctaattcacaggaaacaaattgcatgctgtctgatcaggttcattacatttttcaaacacactgctgggaaatgttttgtcaagatgctcagagcatttgataatagaagtaagaaaatagaatcaagatttcgagaacaacaataaaataaattatttataatccatgtagatgccacttaccataactagtaaattcttgtatatgtaaattaacttcttttttcatgcaaattatccagttcttttaaaaacatgtcttatagtgcagtgggggaaaaaatgactgtcttaaaaatcataaaatcctttcttcaccatttaaaaacatgcatgtattgagaatgaatatactttgcactgaggaaatgtttgccaaaatatgtttagaacaaaggaaatgtttgaaatgtcattattagttatcaggaattttttaaaggtaattacctttgagtgtagcattgttttgacttaaaaataaggcagtctataattagctagaaagcttaaagacagaagaattggtaagttaaagatgaaaaaaaattaaaactaactcattattaatagaaggaaatcaaagactaaaatgagagagttgatatacattagatctaaaatccttgccagcaatgaaattgttgacttagaagaagtcagatatgactacattaaaattatttgaaatagtatccacaaacatggagcaagaggaaccttaagaaataagtatctacttaaatcatcttaaaggttcctaccaaagaccataaccaaaagaaagtatggtgatgaggctgagttctaaagacaatttggttgttggggtagtgagagagcaacagagtttcaagccaccagaatatttaagtcttcgtggtttacctataaatggttaaattgatttatagattattctatactgttaactgaatcattctcaggacatgcagaaatggtttaaaaatattcctgtaaataaattaaagattaattatataataatactgcaagtaacagcaaacagtaagaaatggaggaagttaacacttctcctgttaggaagtgctcttcaatagccacagtaggaatttaaaataatgacagcctaatcatccctttaaagatctaaaactgtgaagactatttaaaagatggatttacattaacttttacttatgacaaatgcattttcctaattttatttcttaaaatattacttaatgatactaggaaatcatgataattagctgacatttaaaaatactgtttatgtcatttttaactcagcctttttcatttcagcctttatttccatttctctgtccattttgtaatacatttaatttactgtgtacttaatatagtaggctttgaacttaaaatcctcagactattagtatatggatatcattaatgaatatataaaaccagtggtgccataaatatgtgtttccacaaagctttgttagaattaatattctctcaaagccaatagggcttcccctgtagctcaactggtaaagaatctgcctccaatgcaggagactccagttcattt

SEQ ID NO: 36796 - DNA, 2406 bp, Bovine  19866881073871
  misc_feature (1)..(1): n is a, c, g, or t
natagctaactgccatgacaaacaactcaataattctcaaggcttaacctaatagaactctacttctgtgtcgggtaaaaagatcagtgagtatgtttgctgagctgccgtcaggaggtgattcaggaacccaggttactcctgtcttgtggctccactccatatagagagcatcagtcatagattgcatcctctgtattcatagagcagatggaggaagagcgagaacgtggagctcaggcctcaaaatggtgctgctgctgctgctactgctaagtcgcttcagtcgtgcctgactctgtgcgaccccatagacggcagcccaccaggctcccccatccctgggattctccaggcaagaacactggagtgggttgccatttccttctccaatgcatgaaagtgaaaagtgaaagggaagtcgctcagtcgtgtccaactctttgcgaccccatggaccatagcctaccaggctcctccgcccatgggattttccaggcaagagtactggagtggggtgccatcgccttctcatatcactttattcacatttccttagccaaaacaaatcacaagggttactggaaatagtctacctgtgtgcccaggaagaaagatttgaaaaataactagccaatacttcctgcaatcagtttaaaaaaaaaaaaaaaaaatctcttgtcttgaggtatttacattctatatgggggaaaacaaaaacagaataaaacaattaaattgtatagccttttataaggtaaaaaataacacagttgcagctgaggatggaggggagagaaggaaagaaaacacaaagtatggtaagagggataagggtctttagacaatggctgttggtgactgaagttgtatggatgatagaacattggagaagagaagatcaaagaagtaggatgccaattatattgatcttcctctttactgataatgtcacagtgttaaggaaagtggattttgagccagaaaccaaaatcacagagaatacaggattgggggtatcctgtgaattagttaataacagcagtaagaagaagcagcaggcaatttggtgtggagttcagaggtttagagaggatggggaaagaatgatgtgaaaacagcagctagggacaaagagaatgtccgtccccttcttcaggtgaacctgtacaagaactgtagaatacaaagctgctgctgctgctaagtcgcttcagtcgtgtccgactctgtgcaaccccacagacgacagcccaccaggctcctccatccctgggattctccaggcaagaacaccggagtgggttgccatttccttctccagtgcattaaagtgaaaagtgaaagggaagtcgctcagtcatgtccgagaatacaaagcagccataacctaagaagcctatagggaagcactgctcttgtggaaaggccaatttccactggagcaagaaggtaaagggacaattcaaggagtcaataacatcaggattttgctgaagacggattgaccaggaaatctgggactctctgtagtgattgacatgaatgaagtaaatagtacattgaaattagtctcaggcagggagaccagtggagaaggaacttcaatatttagatgagatacaagggcctgaaacaaggcatctttcaaaggcattgcaccatttttctttgactaaatttaactcacaatttgaagggaacatttgttttggaaccaaattttctaaactatttcatattcctttttagtgtttcaaattaaaactgattttaaatccatctttgatgaaactctagtcacgattcttcttctgaagtttaaaggtacataaaaatacatttcttagtgatataaacatagaatcacagattctcagggtttgaaagttttaattcacttggttcaaccatccagctgatattggaagcctttctagcatatccttgccaagcaatcttctggtctaggcttgtatctccaagaatgatatatctagataggtggttaagagcgtgggctctggaattaagcagacctacatttaaattcctattccatcacttccactcatgtgaactttggcaaattatttaacttttttctcagagttccaaaatcttaatctataaaatggaaataatattaccgcttacctcatagtgttatactaaagaaataaggcatgtacagcattcagcacagtgcccaacacagagtaattcctcaataaatgattgatgatattatcattatttttgtttatcccattattattaacttccaaggcatcatctttcagtattggatagctgcctcagaaatttcttcttgctaccatcccatagaaaaatttggtttcaggagaaatttgccaaaataaatgttccacccacagccaattt

SEQ ID NO: 36797 - DNA, 2781 bp, Bovine  19866881075755
  misc_feature (1)..(1): n is a, c, g, or t
nctccttattgtaagagaaagtttattgtgatcgcatggactctattgtcctggaattctccaggtcagaatactggagtgggtagccttttccttctccaggggatcttcccaacccaagggctcaaacacaattctcccgcattgcgggtggattctttaccagctgagatacaagggaagcccaagaatactggagtgggtagcctatcctttcaccagcagatcttccagacccaagaatcaaatgggggtctcctgcatttcaggcagattctttaccaactgacctatcagagaagcccctattccagaaatagaaaaactaaaaatgaatcacttaaaatttactgaaattcaagatgtcacttttggctatagagagaaataaattgaaatgaaaaagagcttggcaaatagtggagcatcagtgattagccaaaaaaaaaaaatatatatatatatatgtatgtgtgtatatatatatatatatatgacggaacagtttatgaaaagcatgtcaatgtttgtgtataaaatatcgaaagtacttcagagagcaatcctggagaaagaaaataatacatgatgatggaattggaggtaatggtggtaatgggtatttgttttgcgttggtatttttccaagcacaagtaggaacacagcaataagtcagcttctgtttgttatcaacccattttgcacctggaggacaaaaagaaaataactattacttcagaacatagggggaatattccagagaacttagtaccatgtcatgtaaatctctgtagagggaaaaatctgctatgcatcacttaaaggcaagaaacttagataaattatccaactggtgatttgtgggacgaaatttttcctggaaagatttccttttaaattttaaaagataaaaatttatcaccagtttttagaccattttctaagaagtcaaaagagaaaacgattggctacaatgctaatgctgttaacacgcatgcatgctatacatacatggagtatgtgtgtatttctaacttaaacgattttgttctggtggctgtcagacaagcattcaaagataccccttttctcttctgatcccatcttgccttagcgctgctactttccatctgctcccttctcttctgtcctttgctgcttgtctgcagttcctagaagagccagagggggaaacaaaggtcttagggttggaaggagcctcacacgctcatctggttacccctcccccacatcattctccacatttcactgattaggaaactgggtcccagagaaagtcaagaactttcgcaatgtcacacagttatgacaaagaaaaatgccaccctctgctacatcacctcctatttccttccagaatttatcactgtccgaaatgatctaattcactaattaatttgcatacgtattgacagtcttcaaatactagaatatacatccaagaatttaaggacctgaactattcgtgtgtcctcaacacttaatgtccagtacatcataggcattcattgaataataaactagaatattggtttcttgtttccaatgtataattttataaactataccaaattatcctatgaaaaatggtataggataactaaggatatcagacctgttttagctacaggtctgtcataagcattagcccaatttatgcattttaagcagcaaaaatttctgttgagtattaatgttttcaactctttgacatgtataagtagcttatgcttcttttacatgttccaaggaagaagaaactccatgaattgtgttcatttggtaaacagatgctgctggccactcaatggatactcatactcacttcataccctacaaagagaattttaacttaattggaaagtaacaaggtacctagagtcttttcctttctcttcccactgttctttctgcttgagacagaccagatacttgaaacagcctctctcttagggccacaaagttacaattttgagatgttcagttcagttatttttcagttggctcagtcacatccaacttctttgtagccccatggactgcagcacgccaggcttccctgtccatcaccaactcctggagcttgctcaaactcattccaaagagtcagtgctgccatccaaccatctcatcttctgtcatccccttctcctgccttcattctatcccagcatcagggtgttttcaaagaagtcagttcttcacatcaggtggccaaagtattggagtttcagcttcaggatcagtccttccaatgaatattcaggactgatttcctttacgattgactgattgaatctccttgcagtccaagggactctcaaaagtcttatgcaacaccacagttcaaaagcatcaattctttgagatcttaaggacaatgaaaagtacctagatgcccattggtgtctggagccacaattccagttctgaacattttcctgcatgatataaataaacctctatccattgtttgctggttttctattatttgctgtcaaatgcttgttctaaaaataatgaagaaccatttgctgaacatactctagaattctgttatttttaggattctagcactccagtatcttgcctggaaaatcccatggacggaggagcctggtaggctgcagtccatggggtcgctaagagtcggacacgactgagcaacttcactttcacttttcactttcatgcactggaaaaggaaatggcaacccactccagtgttcttgcctggagaatcccagggactgggggag

SEQ ID NO: 36798 - DNA, 787 bp, Bovine  19866881127751
  misc_feature (1)..(1): n is a, c, g, or t
ntgtatattttttataaggtatttcataaatgcagtcatacttttttaatactttgaaaaataaatattggcaaaggactgtcatccaaacatttataaaatccagtggaacatagaggaagtcatattatcttttgagcctctttttggtagtttcgggtgctttcgatgaacttcctgcttttgtgccctttccttgatccctgctctctagagatgatatgtggcttcttctggaggctttagcacacgctgtcagctctggctaccttccctccatcggctcataatccttaggcctcattctgtaaaaaaagaaatctaccaaagtgaatggaacctaaaggtcaaagctgaagtgtgccaaaaatagctctgagttagtaaattggtgcacccacaaggaaacaatagtcaaacaacagacagagctcgcctgcgttcttcctggaggcaaagttcaattgctctctaaagtctctgcgtattttgtgttaagcctttcacactgttttgccagttcagacccttaggaagttctggatcaccagagctgcccagccttaatgcagttattattactggccagtgccgtcaatgttatctatctggggcttatactggagagtggcagggcagtactttcagctcctggtcatttccccctcgcacagctgattttctcagccagcagttctaagcccatcagatctgcaccctcaagacagacagcatttgctccgacttttccacttgacactggctaggtcacctaaaatgagctttt

SEQ ID NO: 36799 - DNA, 1074 bp, Bovine  19866881160402
  misc_feature (1)..(1): n is a, c, g, or t
naaatctccttataaaaattaaaaagaatcaatttatccttgtagaagaggcatattgcgtgatttttttttttttttttgcaaaaccagaaattacaaaagcaagaaaatcaaaacacgatgagaaataaccttgccctttcaagacataaaagcatgaagggtaaaatgagagagggggcgatggagtgaaatattcattctcaaaggcagttctgaatacatttacatatacatgggaaggatgactaagaaaataggataatgagtaattcatgttgagaatgctaagacactgaaataaatttgggcttagcagaatcttcttcgtttataaaaatgaacagaataaagagcccatatcacatagaatgaatcacatgtaactccagaggaaattaggatcactgatgtcctacaaaattttagaagcccggaattatcatgttgttacaaagatgttactttccccttggggtctctgtgacattgaagtatttggcagcagtctccatcctgtgggcttctctggtggctcagatggtaaagaatcagcctgcaatgcaggatatctgggtttgatcccggggttacgaggatcccctggagaagggaatggcaacccacttcagtgttcttgcctggagaatttcatggacagaggagccaggtgggctacagcccatggggttacaaatagacacgactaaccaaaaaacactttcactttatgtcctgtgggtgaagatcttttcattcacatggttgtcacaggggcatcaaggtgagagtgccagagagaatgtgaaaccagcatgctattactgtagcactgaattttcagggggaagagccttcctacctctcatcaatgctttcagtgaaaacttgtttcttgattatatagatttataaatatagtcaatcttttgaaatgtggagggtaccaaaaacggcaaacatcaggactcatttcttcatgtgaaacagcattagaatgtgttaggctaggggatagtttgatgtagtttagtaatttttaactggggtaggagagtgctttgtaggttgaaa

SEQ ID NO: 36800 - DNA, 999 bp, Bovine  19866881182846
  misc_feature (1)..(1): n is a, c, g, or t
ntaggatgatacttgcctattactcaaaggtatgctgaggcatgaatacagcagtagactgagactgtctttcacggtttataaagcgctgagtgagcatatgggggcttcgcaggtggagcagcagtaaagaatctgcctgccaatgcagaagatgtaagaaatatggattcaatccctggatcaggaagatcccctggagaaggaaatgacaacccactccagtagttcttgaccgaagaatcccaggtacagaggagtctggcaggctacagtccatggggttgcaaagagctggacatgactgagtgactgagtgcacacacacacacatatacacacacaaatgaacgtatcacaagtttttcattaattttaagtttctacagttgcaaaacaattgttatattcaatgactttccctggaaggctcaaattttttcaggaacttttgaacttcactaataattcccttcatactctccaaaggatagttactccctttgcttgtcttattcctctctgaagaaaaaataataacttatgaactataaaggaaatgaaaccacaagatttcttacaatacttctgttctttgcagtcctaatgtgttgaggctaagcatatagtattaccatctgtgctaataaaaataacaataatgtgcacaaataatgttgaaatgtagaatgatgaagcattatttcaaaaaatgaaattaagtcttattttgtttctttctgcagatgtcatttttgcctgtttgtatttttcttttatctttagtatgttcattgtgtcctgcctcaattacccagagaactctgcttctctccttaaggttgtctgccagctgatcacttctaaaccaattttctttgttacattggcattctctctctttctttttaaattaccttctcaataactttgaatccaattttaactattatattgagttacagaacaattttcacaccattcctgagctagtcacat

SEQ ID NO: 36801 - DNA, 1361 bp, Bovine  19866881184351
  misc_feature (1)..(1): n is a, c, g, or t
nttaaatattttcagtagaaatttcttatgaacccggattcttgtatctttccatacttagaaaagcataaccaagatgtctgttcctagtgactagcagcaactttctgtggagacatgtacctgattacacgcacccctcttgccaaaatcacatatatactgtcctccccctttacctcttcagaacagttctcagaactctctgagagactttcctagattataattctcagtttgactcaaataaaattttccatctctttcttatataggctattgattaattttttgttgacaatatccaggcttgctttttcacataacaatagcttcttgcagttaggtacatgttcatccagctaaaaactatatttctcagccatccttgaagctatgcatgtgtaaataaattccaaacaaaaagatgtatgcagaagtgttacacatcctccctttccctttttatgatgaaagctattttctgtctttgaaaaccctaaccctagcattttaccttttgataacaactctaatctgttcatttccttctctcttagcttggcatctaagatccaagacttgaccctctttaaaacatgtataatactacataggattatttaatacgtttatctgagagattaataaattctgcctgaagtcccaagaatgtggtgtggccagttggtaatgtcacatcacaaggtctggcttctgtacagataagatgcatgttaatatgcacagccgctattgccaaaagcatttgcccagacaacgtgaaagaggcacctgtaggaaaaactcctccattagggccatggtccatcggtggtgcagcttccaggatttggctgggtgactgatgtctgctgcatggagaatcagggacatggttttggctttgtcaagcctgtcaaaacaagggcatgctcacattatcagcacaaaataaccaaccacagtcttttccaagtccaagcccacagatctttaatatgaaaacaaaattataacctacccttcaggttgctgcaaactatttcttatatttttaatttgctggaagtgacccgacatgtctgtagacaacaccatttcaatcactaggttccgaagatccctgtggagtcatcaaaagcagaaaagtttggccttttttctttgttctcaagtgaaacatttaatattaagagtcttatggactctgtgggagagggagagggtgggaagatttgggagaatggcattgaaacatgtataatatcatgtatgaaacgagttgccagtccaggtttgatgcacgatactggatgcttggggctggtgcactgggacgacccagagggatggtatgg

SEQ ID NO: 36802 - DNA, 1546 bp, Bovine  19866881206526
  misc_feature (1)..(1): n is a, c, g, or t
ncttttttcccgaggagcaagtgtcttaatttcatggctgcagtcaccatctgcagtgattttggagcccaagaaaaagtctgtcactgtttccattgtttcttcatttatttgccatgaagtgatgggactggatcactttttgaatgttgagtttttcaatgttgagttttaaggcagctttttcactctcctctttccccttcatcaagaggctctttagttcctctttgctttctgccatgagggtggtgtcatctgcatatctaaggttattgatatttctcccagcaaccttgattccagcttgtgcttcatccagccccgcattttgcatcatgtactttgcatatgagttaaataagcagggtgacaatatacagtcttgatgtacttctttcccaatttggaaccagtccattggtccatgtctggttctaactgttgcttcctgacctgcatacagggatctcagggggcaggtaaggtggtctggtgtttctatgtcttcaagaattttccacagtttgttatgatccatacggtcaaaggctttagcatactcaatgaagtagatgtttttctggaattttcttgctttttctatgatctccagtgaatgttggcaatttggtctctgattcctctgccttttctaaatccagcttgaacatctggaggttctcagttcatgaactgttgaagcctagcttagtgaattaatgcttttgagcattactttactaacatgtgaaatgagtgcaattgtgtggtagtttgaacattccttggcattgttgttcattgggatcggaatgaaaaaagaccttttccagtcttatgaacactgctgagtttcccgaatttgctggtatattgagtgcaacactttaacagcattatcttttaggattttaatggcctagggacctaaaattttgcatcagtcacttgtctgattcaatgcatcagaatatacatgtattcaggaagtttttttttatttttaaaagtatttttttggcctcctatggttagcatcctcaaatgaaagcacaacctccaagaaatatataaatcagttgacttatacagtgtctgttgcttttgaccctggattcactttaatgaaaagtaaatgttccctattcagggacagagtaagaaaattgttaagtttgtcaaactcatcttcagggatcctgactctctctttacatatctttctctttcccttaggagtctcccttgtcttctagggttcctggttccctcagagtctggctgcagggccccctaccaatcttgtgcttatggcctttattcaccctaaagaataaataacactttgaaatatttataaataaataattaactcaccttagcattcaatgtgcttagcagtggaagtttaatattctgaatcaattgtgcagtacaagaagcaagtataatataaaatctcctacttcatctgtaggaagatcaaccctgcatacgtttgtcaaatgcctaagtgccatataaaattttagcatccagcatt

SEQ ID NO: 36803 - DNA, 865 bp, Bovine  19866881238616
  misc_feature (1)..(1): n is a, c, g, or t
nacattttactgaacgagtgcatgagtgagttgactcgggaatgaattaatggatgatgaacaaataaatgaagatctatgtatactttccaaatttcaactctaaaccttacataaaatttctagtaccaagattctatcaaactctggaattgaatttaactgcctgacctactgatttaaatgttttagggttataaaatcatcacataaattagaacctttgcctatataaccttaaaacagactatgcatcaaaagaaaaatattcatcgtgtgaattagtttcacttaggggagaatcaattttcctatcatgtgctttttttttttttctaattttattttatttttaaactttacataattgtattagtttgccaaatatcaaaatgaatccgccacaggtatacatgtgttccccatcccgaaccctcccctcctccctcctccctccccatatcatgtgcttttgttaaatacaaacttctgtttattgtgacacttcaaaacaatgctaaatgaattttatttttaatccagtgaaacatgtttttaaataaagcctgattctcaaagagatttctgtgacaagggatatccacatgccaaaaagtcattagtgctgcctttgttactcacatacttaactgtgtggggaaacacaaacaatttccaggctaagaatgagtgtcagacagtgcaatgctcgtgtgttctattggcgtgacagcaaatgggcaagggaccagcaggctttgcaaccacattgtccttattgggtaaaacatctactctgtgctaacctcagtcataatcattgcagaagctacacagtccaagacaacaaagcactaacaggaat

SEQ ID NO: 36804 - DNA, 1488 bp, Bovine  19866881305483
  misc_feature (1)..(1): n is a, c, g, or t
ngaacattaaataatatcttctctataaaaaaaaatgaaagaaaattttatttgtattattggtagacagaattgatactcatatcacatgctggcagaatcataacttactggcaggtagttgtatgaacctattgctttttatgtcgttattgtctcatctgctagtctatcagtaagtattttgtcctatgggacagaaaatttggaattagagatagaggaaccgaacaaaacctgcaagctgattaaatcatgaatttacccagaatgaaagactttcctgatggctgtatcgtacatgggttcagactttttcagattagtcattacagagaaaaggttaagaactgctaatagttcatgtagaactccaaatagtagttaaaaatagattacagtcacaaaatcttagagacagttattcagaaataattaaatgacttcgacaggttcagtgcaaagtggccaatattccatttgaactcaaatactaccctgtgtgtgactagactaagacagggtgatcccagagtttcagttgaagaagccaagggaggaggaaaaggatggatagtccttatcagtttgtgcttatgtaaatatcacattagcctacttggtgtgggtctcttcctattaccagtagtttctattggtttggtttacctaatttatcttttgtgtaactaataattatgaggttatttttaaggtattttgtgttcatttgctccagagagaaattctgttttcttttgactaaagtcactaacaaccttagatcagttttttccagggattgaaatgattggaaagctgagctttggacttatacaagactagtctcttttcacttcacctttatatatagaaccctctctacgtgtgccctgaacttcattcttctgtctcttgtctcatgaatctattgaaagctgcatagtttcttgcctgtcaagaggtggcaaacattaaccccctgatttctacctcctcctgttcctaggggtcccgtaattcttcaactgcattggtaactctgatgctttcaacagaagtcttctgtattttgtccaattctgcaattgtggtgggagagttaatccaaattacctcagttcagttcagttgctcagtcatgtctgactctttgcgaccccatggactgcagcacaccaggcctccctgtccaccaactcctggggtttactcaaactcatgtccattgagttggtaatgccatccaaccatctcatcctctgttgtccccttctcccaccttctatctttcccagcctcagggtcttttcaaaagagtcagttcttcacatcaggtggccaaagtattggagtttcagcttcagtcctttcaatgaatatcaggactgatttcctttaggatggactggtttgatctccttgcagtccaagggactcgcaagagtcttctccaagaccacagttcaaaagcatcaattcttcgaa

SEQ ID NO: 36805 - DNA, 1572 bp, Bovine  19866881339638
  misc_feature (1)..(1): n is a, c, g, or t
nactcttaattaaattgcagcccgagactcatttaaatctcaaaactttcccatctaatctgagtcactgcttggctttgtcattctaatacactcctctcacctgcaactcttaaagctatttattgatttatacatttgattcaattaactattcactgagtccttattctaaatccttaaggaacatgtggactaggtaacagagaataatacacctgggtgaaccaggatacaactgtaataacaaattccaactgcccagaccacagtacaattaattctgaccaagacacagaggcatttatcatgctcagttttctaggaaacaactgtagattttttttgatcttttggctttaagcttttaagaactggcattagagtaaaagtctactatttattccaaactagtagatatagctactaaaattagtagtgtatccagtagatattaaatgctcatgggctattaaatttaaatggataaaaaacagattttcaaatccaatggcaacctatcaaacttttggggcacctattctggctaaggcacaatgttaactgctttaggggataaaatagtaagtcaccatcccttacctcatcagaaacctacttgaggcataatctgacacatgtatattggtggtaagatcaacagtatgtggcaaaatttaagatagatttcaattcagtacagaaatgtttaccataggatgtttgggggaattaggttatagtgttgtaaaatacagtacaaatattagatgcttgataaatggcaactattattttggagaggcaagcatgtgctacttaaaagtagagatgctgggatcactcgggcctggatctggctctcagttggctacttactgcctgcattatgccaagaaagtggctcgcccttttaaaacttgtttttttcccaacgctaccaaatttcattaaatataaaatatattcattagaaataaggctaatctacatccactgaataaacagatgttcatttttgtttctacacaatagtacacatgaaggacattgtaatcagccattcctggagcttaaggggacatttggtatcaaattttaaataggaaaagtttctaacagctttctaattgctctatttcatagtcacattcaaggagaacagtaaattatcaaacctctaacaacaactgccgaggtccagccctggctgatccagggagttcgaagtggggacggcgtcggcgaggatcaggatacaatagcttcaattagatattaattagagatgtaaggagtaatagaatgaggatagctcagtaggaaaattcagtggagaaaagaggctgagtagcttggtttacgcgggagaccaataaaacttcaagacaagaagcttgcaccacttacgtaggccgcaggtgtccttccgttctcccgaaggagaggagacactgaggcctccccggtcggatcttagaagcccaggcaaaattagtaaacttggtgggttccgcgctccacatggagactcagccagagtttgagagagagagcgacatggggagacca

SEQ ID NO: 36806 - DNA, 947 bp, Bovine  19866881341057
  misc_feature (1)..(1): n is a, c, g, or t
nctaaaaatttacttttaatgatttcattcctacatgcaaatagactcttatagagtctaactctttatctacagcattaagggtctgagaggaggagaatatgttattagtgaaccatctattactcttcttgagatttcttcaaatggcagagagaactaaaactatgagaaaactactggagaggtctaattataataataaagcatccaattttggttagacaacgtaattaacaggctggggaaaggagctaaaataaaaggactagttatgtttcatttcctgaattgttatttccaaaaacagagacattttgttcacttctcattttgtggagctattacaaaaatgttctgccactatacatcttagagatagtgactcttacttaaaagttgtatgtggaaagtctacggccaaagtagacttgtttcatgtgaaagattcaggaacatatctttcctataagatgatgttaggaaccagccttggtgacaagctaaatctttcaaagataaaaaagtaacttcatcttaactatctctggttagtatgtcaggctaattaaggttaggctagctcggtgatacactgaccataactaaccactgcacatgtctgcatggaaagataacacagataacagtgaccaactacaatgcttatgtttgtacttttctttcactgctgaaaaagtaaataaatttaatttaaaattttccacagaatctaaaaaacttgatttactaaaagtttttaaattgatccattatcatagaaccaaaatagtgtagttttataccttttattggtacaatatacaactcagaagaccaaacacctgcaacttacaactttaaaaaaccttcattttacagtttcttttcctggtgtattctattagatcctctttaaaaaattaaaagtactgtgctacacattg

SEQ ID NO: 36807 - DNA, 1318 bp, Bovine  19866881421261
  misc_feature (1)..(1): n is a, c, g, or t
nttcaaatatgaccacttaggctgagatatcttctaaaatctagacaagggatatgataaaattgtcacacaggtgttcatttttaagaatcttccagtgatatttaaatttatttctgaagagaaaatttgacagaatttaagagcttcaggggaagattaagtttctagtacttaaaaggtcttctaaacattcagaataagagaaagaatttatggaaatttaatacttcaggaatttttttaccgaatagaaaattcagcagacaagaactgctttgaagtgtgctaagggtcaaagataagggcccctgggccacttcttgagatgtaaatacgactcttaatagagctggagggaaaagttaatctttgctctattttccccagagttcttttcccttgtttcatgctataatgaacagatgataaggcagaaatgctttcaaatttatttactttcaaatagacattctacaaagttttcctttgagtaaggacagttaatagcaaagcagtgctaccagttcttcattcttcaaattccaaactgattccatcaaaaacacattctgctaagacacagcaacccctcagccaaaacattctctcaatatgttgagctttcatttgactttcttgtcagtgattcagatattactcaaagtcacatcaagttgttttctctctcgtactaaatgtcttctttagttgtgtggtatattgaataaacatcacctgcatagttaatgtttttaattcacacaaagaactaaattcaatgcttacataatggatgtattagacacttaatttttaaaaagttatgttcttatgattcagaactgcccaattgaattttagacaaaaataacaagatgtaacatcaactcttggagaggggaagtcagtaggctttttccaaacttgcttttgatttgcttccatcttggtttcatctgctgctgctgctgctaagtcatttcagtcgtgtctgactctgtgcgaccccatagacagcagcccaccaggcgcccccgtccctgggattctccaggcaagaacactggagtgggttgccatttccttctctaatgcatgaaagtgaaagtgaaagtgaagttgtttagtcgtgtccgactcttcgcgaccccatggacggcagccccccccgctcctccgtccatgggattttccaggcaagagtactggagtggggtgccaggccttctctgaacactaactaaatatcttaaataaatattttaacaaaataaatatgaacaacattgtccgtatgacacctatagcaattcta

SEQ ID NO: 36808 - DNA, 1304 bp, Bovine  19866881527678
  misc_feature (1)..(1): n is a, c, g, or t
ntttactaagggccctcttacaagtcgtgtcatggaagcccttccatgagcactcttctgaaattgcccatttgaacctcccagatacactgccattttattctatttgcttttattaaaattacattgcatgttttttgtttgcttctctatcagccatccttaccatcaaaatataattaattccatgcaggtacagatcatgactgtatggtttatccttgtatccctggtgcctagaatgatgctggagctctctgtgtgcccaatgatgaatagtcattgaatgaacaaatgattaaattttattaacaagtcatctgaattgggcaagttgaataatactagttctactttacaaagtacttcaatatctttacaaatgtcagtatagtcctgatgaacttctgctacaactttatttcttactctcattcttaagatagttctaatcggtgactaagatcaccatagtttgactcacactgtgtaaattagtgtttactttgatacccataagacatatacttaacaaaacaatttgagtttatcaaggagagttttttcttaattccctctttctaaacttaaacattccctctttctagtgaactaagattactcggcaagctgtttctaatttcaaagtgctctaaagtaatttcatgttatttcttattttccatgtcctgtaactatcaatggatcaaccaacttatctaataagagaatgtgatgttatgttaatttattatagatacaaattaaagaactattagaataatggtaaacaaaataatttttagcattttatttaatcatttttttatttagaaaacgaaaaccattttggtaacaaatcaaaaatgttataataccttaggtaaaacagagggaaagtatatataataaggtcatttggggtctaatgccagttatagtttaattctttaaactgtatactactattttggttgtgaatttcattttggaacattctcactcagtaagtatagatttttctttaattcatggtagaagggtttcctctcagaggcatcttttgatacacattttgcaaatatttcccctgaattgaaatatgattcacatgacagcatgaagtcagaggacacaaatattaaatgacagcttgaaaattatgactttagttgaagccttgtcacacaccttggacttgaatgtctggtaaaaataaacctcaagcactgttaaaattgttcagtcaaattgtgacattttaagacttcttttgcaaagtctgtctttgaggaactgtgcaa

SEQ ID NO: 36809 - DNA, 965 bp, Bovine  19866882240432
  misc_feature (1)..(1): n is a, c, g, or t
ngactgaaaagaaaatgaagaaaaggactgatcttaaaggcttcacaaatgaattaaatacattttggctttcccatgtgttactatgtccagttatgaggattttcaaaaccttctttgagttccttaatgagtttaacaaataaaacttattctgttatataatgttgcttcatgtcattgttgatgaagaacagatgagccatttttacctgttgctcagaaacaccagaaaattgagccactaaaaggaaagcacgaagactaaaagcttttaccatggagagggtaaatttagcactgtgtggcaaactgaagaccttgtgacctaggaatggtgaaatgagagataaatgacaagtttttaatttgcacaaaattagaaagtatataaatttactcagattatataaataatttgtaaggcaaagttccagtggtattaacacctgtatcttctgatgtatactcgggaaaatgaggcaaatcaaaatagaagattattttgttatgttaatacttatttatgaggacagtgaactagtatagtaacagtttttgctaatgtggaaaaaaccagacaataggtaataggtttaaatcatagaccttaaatattcaattttattactttaaaatatatacaataaacagaaatactttaatggctaatatgactttaaaatataaaaaaaaaaaaacagcctaaggcaaactaaccacctttctgcatagtttaattatatgatttgtaaacaaatctttgaaagtttttgaagaattcactggttcagaaacatttttccattcatcctcttttcagatcagatcagtcactcagtcgtgtccaactctttgcgaccccatgaatcgcagcacaccaggcgtccctgtccatcaccaactcccagagttcactcagactcacatccattgagtcagtgacgccatccagccatctcatc

SEQ ID NO: 36810 - DNA, 3535 bp, Bovine  19866880404939
  misc_feature (1)..(1): n is a, c, g, or t
nttgtaccttattgaaataattgtgttattacacagtttgttttgatgcctcctttcgaactgcaaacattttgaaaactgaggacatgccttatgtacattcataaccccaaaactaaacataatacaaaaaagattatatatttatttttgttgaggatttcaaagcaaccatcatcattttctcacttataaaatctgcttaatggaaaattcacatccatttatgttgtatagacaattaatgctcataaccttaaagagacaaatttcaagcagtaaaaggatcatgtatgggttagtcatacattttttaaaatttaacaaagatgttataagtgtattccctaacttcatagtaaagcaacaaccttcagcttctggcttctgcatttagttcttgggatgaatgccataatcctctagttttgtttgtaggatacatttcacctgttttcccccactgatactataactcctataattctggccaagtctgttctcagtgccttgatagctaaggtagtggagaataattggtgaccactgactatagagggaccatttgcaattggagacattgtttggtgacatttcactgggactctacctctcagaataagcacatgttagggcaggaaaaaaaaaaaaaaaaactacatgtaatagtagtaactaaatagatgtcttaagactttctcaaaatagcatattgagaacatgagaactcccataaaatccttgcgatgtgccaaaaatggtgtaaaataccacatacatcttctctgtttcttgtagagccctgtgatatgggccttattaaacttgctctacaagtaaactgagattgagactcagttcaagtgatattctaagactggacgacagaaagtgccagaactgtgaacactgtttggctttcttgcagactgaggttcagtactttttatttctcatttaggcctaaactcctgaaaaaatcactctcctaaccttacggcagtggcagtgttggtggccacagtccaataacggttgctggtgagcaattataggcaccctgagacataagaggaatgagtgatagagtttatgacgggaaccactctggtgttttcctgcaagctgactctggtgctttcttgggtgacctttgttggctatgccaagggctttcctttttaatgctgctgctaaatgccattagtagcaacagctgtgattttctctctgtcactctcattaacctcaggagagaaggttccaaggagcctcttctagggaaggtcactggctctttctgtcatcacactaccggtctgtgattagaatagtcaggtgggaagtcaatggaatggtaaactgaaaatgtggagaaacaaaggagaattaaattagaattaggcttccagaccaggaaatcaaacaatatgaaccaggagggccagtgatgggggtgggagggggcaactagtggagaagagggaatgttattttgttccccttttccataagagaggcaagttaaattctacagcgttgtaccacatattttttggtattgatgttgaaatctgtgctcgatgtttaaaatgacagaaaagagataggtgtaggggtgaggaatctaagccaggtatatggaagaatgctcttttatcaacaatgatttcagagatctccataaaaatggcacacaatgtggatattaaagctattctgatgatttgggtcttatatgcagtatctcagacgttctcacaagtcacagtggatctcacaaggcattagttcctcacagagcctgtaagattgccagttcactgaaagggaaaaatttatgttcctggaattgatgctatgtgagctctctctactgcccctccttaattctaaaaccacaaagatttgttctggggaaagctgacagattcaaacatgaagttcctatgggattttcctgatgcaattaaagtaaggaaatatgtggaaagaatggcttcaatgaaagggcactttttcatggatgatatgttattgtgatcgtggaaggggatgatgaaagtgggtgatgtagttaagtgttaaggtcttacatggcttaaggacctttgttgttaaaattatgattcattttttaaaaaggtcactgttaaatatatatttgcctttaaaaatcttgccagttcaagctattcttggtattttgatctctttaggggacttctaaagctgagaggaagctttatatatttctaagatttcataaaatcatgagcaaaatttctaaaatgcagctccctgacttaacaactaaaggagagacttacaattctcatgatcatctgttaaaatattgttttttgtgagccctactatgtgacagagcccttaaagctagaatcaaaaaatattactgataagcttctcttcccacctttcctgtctccccagcaagacttatttttcagtcttctttatgtttccattgttcactgttataaccttaaatagtatgtaactaaatttctctcactgactgcagtctcttaaaagtcatttcaggaagagagaccagtgttcatagactttgagccaagaaaatctacatcgggaaggactttgatatgatcaagaagtgttcaatttcccttaaatacccaaagagtgacaatgagaaatgagatgcttctgaagaagtagacagaagatgattcatactgctccaaaagtctgtgtcaatctttaattaaaaagcattgtaaggccttggatagtatggtcattttaataatgttaattcttgaaatccaagaaacagaatatatctttctgtttgtgttgtcttcaattctttcatcagtgtcctataggaaatataatagaacacaaagaatatagccaatacttataataagtatcagatcagatcagtcgctcagtcttgtccgactctttgcgaccccatgaagcgcaacacctataaatggagtataatctttaaaattgtgaacctaagagtctgacatgactgagcaacttcactttcacttttcactttcacttttcactttcatgcattggagaaggaaatggcaacccactccagtgttcttgcctggagaatcccaggagcgggggagcctggtgggctgccgtctatggggtcgcacagagtcagacacaactgaagcgacttagcagcagcagcagcatacacccatagcttatataatattttacatcaactgtacttaaattaaaaaaaaaaaatcaactcaggatgagaagggtaaatatcttccctcctgtgataatctctgacttgttattgctcccaacaataaagatttaatttttaatgaataataataaaaaggaatgtaaggccaaggaaagcttctttttaagactctttcatagttgtcaagagatgaaggcagacaaaaattggtgaaggttctaaataatgtttctagtctgaagacactttcattcagataacttagagatgatatataaaaccaagtaaata

SEQ ID NO: 36811 - DNA, 853 bp, Bovine  19866880530601
  misc_feature (1)..(1): n is a, c, g, or t
ncttgaaaagaaatctatcaggagcagagtggcaaagttaaattggaaggaggatcaaggtctaacatcttatataaaatgaatgacttcggaataactatacattgcattgatatttaatatttcacagatgcatgtattctatttgtatgtgctattactcgaacagaagcatttgatgaaattcctccctcaaggtctgtagggttttttaaattttcatgttacaatgaatttctcaggtcaagtcagtggtagcaaggaaaaaaatggctatgactaaaattttcttttctaatcttctgctagagtcaaagttgtctcaatttatcagtcactctgtcctcattaaaatcattctgcctgcagagcattttatgagtttccacacatggaaatggaggacataggggagacaatgagaataagtcatttttttgaatgcactgatgataaaagctgccatattgttaattaacttatataagtttaataagcaatatgaatagagaaatgcataggtaaatgtactaatggttgaatattattattccatttttaaacatatatgtgtgtgtatttgtttttttatattttatatttatttttcaaaagaaatacctaaaaatgttaaggtatatttatgtctataggttatgtgtctatccctttcttaatagttatgtgggaaggcagatgtatggatattgatttttttccttgtgcttattctggttatttctaaggtttttaaaattttattttatttttggctgcactgggtctttgttgcttcttgcaggctttctctaattgtggtgagcaggggccactctacagttgcgatgtgcag

SEQ ID NO: 36812 - DNA, 1376 bp, Bovine  19866880764474
  misc_feature (1)..(1): n is a, c, g, or t
nttctttccactcactactttttcacatgattttcagctttgtgatgtggtatacacatatctgaactctgcaagagtaggatgctctgtgagattgatacactcactccagcaatgaacttgaaggtgttgcaagtatctgtgagatagaagggttccagacaggatgatgttcaagtctttatggcgcatgtgctttctctctttatcaaagttaaaaatgcttgcacttaacagtcatttgcatattatatagacatttcccctgatatttttaatctttgacactttgtatcattattaaaccaatcaccataacagctacttcaaaaatgatacattatatcccttgagtttatcaatcatagaacaatctcagtccatcacatgaattattacaaaactctttgatatgtgtaccaaaaagggaagagtagtctcttgtctttgaactttttaagacaattgcattagagctgaactgtgaagcactctcatgtcaattataaagacataattcagtggctgtgctcaatccatctgacttagagttaaccccacaactttcactattaactttactttccacttcttttaatatttgacacttacatatcctaaaagattggtaggatctttgaaatagaattagaaatcaagcagtacagggtttgccagagtggaggatgtgaaacaggggtataaatcagggtgaattttagtggaacacaagatggttttagatagcatgctggcaaggcaataattaaccttgaatcttacagtgagaaagttattcccatctcagccttctttcattccctctggatacatcaagcagaatgaatcagaatgttgctaatgggtctttaacacaccttcaacacttgccattatcgccaagactggaccttaatctcaaagcctggaagtagagcaggataaaggtgtatatttgttatttgcaaaattttgtaatcttatatttaaggtaagtgaatatggtgattttccattttttaattgattatgataaacagtttccttttaaataaatttataattgaaacagcaatttgattgaagaatatcaacaaatagtaaagataatatgtggaaagtgtccaatccacaacactgactttacagttggaggatagaatcttgatgtttttcggtgttgtttttgtttttcgactgtgctgggtcttagctgcagtgctcaggctcctctagctgtggtgtgcgggcctttgagcacaagggctcagtggttaagacaggcacacttagttgtggtctgtggcatcttagttctctgacgagggttagaaccctggcctcctcattggaaacacttatccatggaccatcaa

SEQ ID NO: 36813 - DNA, 1047 bp, Bovine  19866880785777
  misc_feature (1)..(1): n is a, c, g, or t
ncccaaccgaagtatctgtactcaagaccttaactcagtgcctcctttgggaaaagcctaactaaaatgggagttttccctcatcttatttcttcacttcacataatgttgtacctattcagagattttaatttaatattttatcattgattctcttatctgtttcccttacaaaaatttaagctccttaaatatacgagcaagattgtatgtagccttctaattttgatatcattgtactcaattaaaggttgttgaatggatgaataaaaacatggagatataaatccatgagtcgttctctgccttactgattatttctgggaccaagacagcaataattcagttgaggaaagcagatggtgatttctgtttcctctgaggacttaagccctggctcaccatatgccactttggtgccacttttcaagaagctgagaggaaactattaaacaatattgaaacttggtagttgttcatataaacacgaccattccaggtacattcagacaagaatattcagagagagcttgctagactaaggacctcaaggagtatatgggaaagtttgggaatatgagataaataaggtagatttgggtgccaatttttccactgtaggaactaacgctctatttggaatgacttcttccatctgaaatatttaatagctgttcaacaagttggaactgacagtagacaaaatgttttactgccatgtgtcaggtagcttgatgcacttcatgcctggataaatgcaaaatggaattttagctgaaggagatggtatggcaaatggttctttacagagaagggagtaagggatatgtctcccatggagaaactcatggtgacaatgtgtctgattcatattttaattgccagaataaaatcaaatatccataagttcaggcatgctaatgaacaagaaggagaattagatttttctctgcctattaaattttctaatgttgagagaagcaaacagagcactgtggatccaaatattaccctggaggtgttataagcaccaaaacttgaagatta

SEQ ID NO: 36814 - DNA, 1460 bp, Bovine  19866881095313
  misc_feature (1)..(1): n is a, c, g, or t
naataaattatggtatatataatatataccactaagtatgcactaccattgctaattggtactagaggaagttggacttcctactggaaaagaaaggcaacaaaataatcatacagtatcaaactttagtcctgtattcacatttctcaagcactcattgttaatatcagctactatcatggaagctttgcttgaggtattaccactacttcttcttttttttttttttttggccttttgaaactcttttttttttttttttttgatgctatatttttttttaattttattttttaactttacaatattgtgttggttttgccatatatttctttaacacatttgtctcaaaatagaccagtctcccacccaccttctgtttgagttagcttatatctttcaaaaagactagctaactcaggttcctctccaagaaactagaactaaagggaggattaagacatggtgatttgtgggaagtaaattttcatttcaggccccaaagttgtctcttccaccaaaggggatgaggatagcttcaaatttatcctttttcctgttcaggattatctctgtgactaggacaagcaggacctgtgacctctgctaagcagggcataggaccaaagtactgtcatattttataaacacactaaccaccagcgtaaagcatctactaacttttttccttaaaattaagtgatagagaggggaggagagaatcagataagctagtctaagaaaatacttgtcggtttttttttttttttccctccatttggttaactaaatccttttcccttgggctaaaagttgtctcattaagaaggcatcggtgtattgacagttataaacaatattagttgtgcttgtcagtgatccatgctgtcccaattaccattactctaaaaagatttcagtcacaagtcatcctttatacaaagaatagatcaaaacaagcttgcaattagatgtgtaattttagagcgtctttttatattaacgcattactgtgtcttctgataaatgtcccttttggacaagagcaaatagcatgagctttcctcattaataactgattctctttaaaattctttaatgtccagaatgagatgatcatgtctcaaaagaattaaatacctctattcttcattgcagttaagctgaatgtagcatgatggaggaacactattatctgagttgcaattagggtacctgttcaagttgtgacagataaaggtaaatgtaatcaaagaacaattaacaagtaattatactgttactacctaaattcatggctggagtgagcagagatcctgaatttcagtctgtgacaatttaggtgaattatttattttcattgaataactattgaggaaagcaaatgaggcaaggacagatatcatccatttatctgacaaagctaaatataatagtcaatagactatccatctaatagg

SEQ ID NO: 36815 - DNA, 1552 bp, Bovine  19866880152140
  misc_feature (1)..(1): n is a, c, g, or t
ncaggaaagtgacaaacttccagggaactcaacccaaagaaattctttatattccaaatcactttgcactctgaaagataccagccttcctcatctcctcaaaatctttcatggaatcataatttctgtagaagtctgcatatgccttctttcttttttcacctacagcaaacttatagaaagttgcaaaccccagagagaccatgaatgctccaacaatatgaaatctcagacgtttggccagaaggccacgcatctgaggttttgccaaagcagtggacatggcagtttttcttctcgacggctcaaccgcgatgtcctctcaggctctaattaaaactttttttaaacaatctatcactctgatttgtatttgtttttctttttctgatcatgctgcatggcttgtaggatatctcagttccctgaccagggactgagcctgggccaagacaatgaaagcccaaaatcctaaccaccaggccaccagggaagtcctacatattattattacaatgtaatatctcttgtttcaatgttataatattaagtatcaattttactgtaaagataggaattgtgacatcgcatctcatccacactaataggtacaaacatccaaaattatatttatcatttctctaatataaaagtgcctcagaattctaatccacacattttatgctttctgttcatactagttataactcacaattacattctaaatttagaacttaaatagttaaataaacctacctcccaccttaggtaaagttctaaaaataatattataagaaatgatttaaagcactcaagttagttaccatggtgactgttgctatctaataatttggggataggaaattgttcatcattatctttccttctataaataaaaagagcaacaatcttgatctttttaaataaaagcagaaagaccttctaatattttatttctgtgctagacaagaaggggaaaggccgtttctggagcaaaggacattctacaacaggctactgaaacatttctataagtatatttgctctacatttggtcctaatcagtccacgtctgactgtggactcccgaatattaaagtgattcaatgtgaacgacaaaggaaaagttcgtaagactccagccaccgtgttgactcaggatgcgcctgcctgctggaagtggctggccccatgctctcctctgcactgctgctgctgctgctgctgctaagtcgccttcagtcgtgtccgactctgtgcgaccccatagacggcagcccaccagactcccccgtccctgggattctccaggcaagaacactggagtggcttgccatttccttctccaatacatgaaagtgaaaagtgaaagtgaagtcgctcagtctgtttgaccctcagcaaccccatggactgcagccttccaggctccttggtccatgggatttgccaggcaagagtcctggagtggggtgcctctgcactaccagagggcaagaacagaaggcaagaggtttcgctggactgtaaacctcccacacgtgacgtcccc

SEQ ID NO: 36816 - DNA, 1159 bp, Bovine  19866880567263
  misc_feature (1)..(1): n is a, c, g, or t
nctgaagaggtgggggctcgctctctgaggccctcagctcttgtttctgtgattttaggtgcaaaaagggtttgcagagctcatcaggggcctcagcccatcagaggttctgagggagcccagagttttcactcaaacacaccagatgcattctccttatcaaacccctggcccttcactgaagcatgttcagacttggaataaaaacgtgtttattgacagcctctctgggtccagccctttgagagacactgaggaaacatgaaggggtaagagaacaaccgtcaggcaaccatcttacagagacagaaactaaggctcagagaggctttgaaatctcctcaagggaacacagctaagaattcaactcccagggctctagcactggtaagattagcactgtaatgtgaaaaccaacccggctactcccaaatccttttaggcacaagaaaaagttagttttgtgaaactggaatctactaagatcagaaactcaggagtccaggacacagggctggctggctgagttgtcttgttcagaaatgcccagcttggccctaaaacccatgtcagagcttggccaccttctgacacccttctctgagccatccctccatcccaggtaatgagcagcggcaggcaggcgactgtcatgtgacctccacaaccaatatgtacacacgcatcacagcagctcctggagctcaccaggtcctcccaaggttgtgtgtgttgcggccccttgtacagacaggcactaaaccaggtgaactggactggtttgtagagctacagctggtggtcttccctccagagacagccttctcccagagcaggtcaaggtcctgcctgtctccccgcagcctcaggtgagaggcctctgcagggatgctctgagaaccgctccttcctacaagtgtcagaggctccaagctcttcagtctggtcttccctcctcagcactaacctggctttcagagatgctttccccaggggagctaccagacagcaggaaagccgtttgtctccccgtctccctggcccctggcccgctgccacggtggcctcccctcccccaagaagggcggtgagctgggaggtgggggttggaagaatccgccgagaacgatcttgggaggggtgctggaagccaggcagg

SEQ ID NO: 36817 - DNA, 1362 bp, Bovine  19866880663084
  misc_feature (1)..(1): n is a, c, g, or t
nttatgctttttttgtagcataataggtattttagaggggaattatttgggttcttacacttcactgcctccattggctgggtgcttcatttgaacagtaaaggtagatgtttcctaaatattatggcataaggctattactagtatcccctattgctaagattttgttttggagattaaaattttaatggcaatttagagtgagtgtaacttttggagcttatttcttttgatagcctccgttgtttgatttgcttgtgtgttaatgtgtggtatgtctgagaaattatataacatgtgtttgtttttttaacaatttggtgggttttctgcagtgatcaacttctctaaagaattggtaaatacagtgttacaaaatataattttctaaaaccgtctcttcctacttaataatctttccttgtttttgtagcttggttgcagaattgttggtcctcaagtagtcatattttgtatgcaccaccagcgatgtgtcccaagagctgaacatccagtttataacatggttatgtctgatgtaaccgtgtcctgtacaagcctggaaaaagacagaagggtaggtgttgctgtattaagtggactatcgtcaatatatatttgcacacttaatttttcactgtataggggatgttttggtgcttatgacatgtaacagagtctagatgatattgtatgtcttttttttatttatttaattggaggctcattactttacaatattgtagtggtttttgccatacattgacatgaatcagccatgggtgtacatgtgtttccccatcctgaaccccccctcccacctccctccccaccccatccctcagggtcatcccagtgcactggtcctgagggccctgtctcatgcatcaaacctggactggcgatgtatttcacacatggtaatatccatgtttcaatgctgttctctcaaatcatcccatcctcgccttctcccacagagtccaaaagtctgttgtttatctctgtttctgttttgctgtctcacatatagggtcatcgttaccatctttctaaattccatatatatgcattaatatactgtattggtgtttttatttctgacttacttcactcagcagttttttaaactttgatttaaaaaaaaaagttcacagcctttgacctagtgatcattctctaaaacatgtatcctatagagacagcaaaaactaaagatactgatattctgtactagttaaagcttaaattcttaagggcaacaatatacaaactagtaaatatgacatgtcattaggataatgtatttttcgtccattaaaatatttataaatttaccagtgttcacaaatcaatcactag

SEQ ID NO: 36818 - DNA, 834 bp, Bovine  19866880787040
  misc_feature (1)..(1): n is a, c, g, or t
ngatgaagtccagcaacaaggtcaccatcactggctgccccacccatggaaacacagcataggagatggaagcttcctgacccatggtgaccattaccctttgtacagacctgggaggcagcccctggcggtttccctgaagccacacaaggcaggcaaattaggatttgagtgaagtgtttgctgaagaagattggagaaccctgtgagccacagggactttggagggccttgccatggtcttcactctcaggcattcatatttctctccctttctattcgcctgattttgggatttgtttttactttgcttctctctgccagcctccttcctttactatttcttttatcctttgaacaggaacactttggaaaagacaagtcagcagaattccagctcttctactctcctcatgggaaagacctgttatttacagatgctgccattgggtttttaagagtcccacctaagatggatgccaagctgtacttgggatatgaatatttttcggtcattcagcatctggggagaggtgtgtagctcctgggaagacctggagagcttgggcatagggcagggcggggccgtggaggctttcctgggacctgcaagccccacctcacccaacccacactggcctgcagggtccaagggagggccaactgtgctggattcttgtggggatgttctgctgaacttggggaaaggcctgaacctcgggttcacaaaagggtttgaaagaccttcagattacaggctacttaagtaataacgggggcttccctcatagctcagttggtaaagaatctgcctgcaaggcaggagaccccagt

SEQ ID NO: 36819 - DNA, 1217 bp, Bovine  19866880817137
  misc_feature (1)..(1): n is a, c, g, or t
ntgtaaattatatattttattgtctagattggacctggcatggagcagccatctagtaagtgttcttgataaatgttgaaaaatggtaggaggcagaatgggaggacacagtagcctctcttatataacatgagggcatcccaggtcacactttagggaaccttgggaacagctctcaaagctattacttattacttttctctagataaactgggaattttacaactgaggcgaagtaatgtttaggtcatattaaaatctcattaagaacttttcaaaaacttgactgtagttgttaactctgagtacatataattgggattttctttttactctgccattgaccaagatgatattaacttcttgttcaatcactaagtcatgtctgactctttgtgaccccatggacccagcacaccaggcctccctgaccttcactgtctgccagagtttgcttaagcttatatccattgagtcaatgatgctacctaaccatctcatcctctgccaccctcttcttttgtcttctgtctttccagtgagtcagctcttcacatcaggtggccaaagtattggagcttcagcttcagcattagtccttccaatgaatatttaggattgatttcctttaggattgactggtttgatcttcaagggactctcaaatgtcttctccagtatcgcattctttggcacttgcttatataattttgggcaaattatgaggtttattgagaatattttaagttataacaagatgaaacaggaaatctaatttcattcattatttcagttgatttgcttgtctaactcaacatatattttaatgtctggtttatttctttgaaagtaagtttatagctttgtggtgtgaagtgtacttcacatgaaaactaataggaagataaaaacatcacttcttgtatgcctctttagagacaagaaaatgacatcagtggctcatatttatttcttttcattttaaatctctagaacaaagtttggaaactgaaacaacaaatgaggtgaatctaaatccagatactccagagcatcctgtaacacatctggaaactcagagaaaaacagccgttacacctttagatatgaaccgctttcagagtaaagctttccgcacggtgatgtcacagcactccggacaggcttcagtgtccccttccccaggacagtcacttcagaaggagcccctcattaca

SEQ ID NO: 36820 - DNA, 880 bp, Bovine  19866880824121
  misc_feature (1)..(1): n is a, c, g, or t
ntaatagaaagttacctgaaataacaaaatgcagctcctcagctagcttgtcgttaaaccatattgatgtgtgtgatgtgggtttttatttatttgcttgtaagtatccaagtctgtagtttagtggaagtttgagcaaggtgttagattttcccttaaaatgtctgctttaattcgtaacaagaaagttatcaattgggattcattcatattttccctgatttttagcttcttaccattttatctcttcttaacaggagcctgagcacaaggtttaatgaggaactgaggctttaaacttaagtgtgtgtgtatatatgtatatgcatgtttgtacaaatctccatgatgtttgccaagtttgggggccaaaacttggaagataaagacaataaagaataaaagtagtgactcaaagtagttgttcaaatagataattaaaaaaaaaaaaattctggtaaccattctcgttgaagcaaataaaagatttgtaaaacagcttaaaaataaatctagttatgtttctgatgttgtttatgtataattattagggcttccctggtggctcagttggtaaagaatctgcctgcaatgcaggagacctgggttagatccccagattgggaagatcccatggagaagggaacggctacccactccagtattctggcctggagaattccatggactgtatgtatagtcaatggggtcgcaaaagagttggacataactgagcgacttgaacatacacatgtagaaatttgctctggtgggttaaaaaaaggaagaactatagaactgcattagcctctattaatctaaacctaaacaccagatactacatgcatggccacagttctctaaatgtaaggctacctca

SEQ ID NO: 36821 - DNA, 1223 bp, Bovine  19866881041496
  misc_feature (1)..(1): n is a, c, g, or t
ntaatcatttctgcatttgatgactcagaaaactaagtaaaatgttactgtaaaagaatccatagacttgatagctgttttgatgttaatttttttctaaaataaacttttccattccagattataacaatagaggagactcatgaagacttaaaaaaacagtacatatttcagttgtcatctctgaatcctcaagaacgtattgattattgtcatctgattgaaaaactaggtacaagtatcttacttaagtcgaaaatgtaaccttatttggaagtcaaatgtagctaactattgattaccatttttaagctgtagaaattgagattagaaagatgaataacttgtctcaggccatacagcctctcagcagtagaacttaagtcttaggatttaaagatttaaagtgaatcccatcattcaggtgtaagaatcttgtcctactttgaatgttcattgttgaaactctggacaaaatcaaaggaattatatagttaaaaactacattttcatgaagttgaaggtacactgatatccagacaggagctcctcctgctgtgatgttcttattctactggttgtcaagctcttcctgaccattctggaagcagcatactagaaagctaaacttcctaacaactactttaaaaagtaaaatgaagcaggtgaaattaattttacatatgtattttatttatatgtgtactttatttaatatttactttattagtatatgcaaaatatattcaaaatattttattcaacatgtaattagtataaaatatcagtgagataatttgcctgttttcttactaagtttgaaatctgggatatattttacatgtacagcacatctcaacatctcaatagggagtagctgtgcttcaggtgttcaatagccccatgtgactaggagctactgtattggacaaagcagccttatagaacttaatatgacaacttgacctagagaaacattaagaaataatgattgtttttaatagtggccctgaatcatcaagaaaagattaaaggtcctttagtgctctcctttttaagtttgtgggacaaacttaaaactcctttttaagtttttttttttttgttaagatttctttcagatacagttgtgtacttaagaagctgtatgttttggaaacttcactcatgtggaacatttgtttcccagtcatacaataaattagatggagataagtcagaat

SEQ ID NO: 36822 - DNA, 848 bp, Bovine  19866881087839
  misc_feature (1)..(1): n is a, c, g, or t
ngactgatgctgaagttgaaactctactttggcccctcatgcgaagagttgactcattggaaaagactctgatgctaggagggatcaggggcaggaggagaagggaatggcagaggatgagatggttggatggcatcactgactcgatggacatgagtttgagtgaactctgggagttggtgatggacagggaagcctggcatgctgtaattcacggggttgcaaagagtcagacacgacggagggactggactgaactgaactgaaaacatgtttcactctagttctctataaagctggcttaccttagactctgagaggtttggttgttagtaaccaaaaaaccttccttaaaagcagcctatagatactaagtacacttcctgcgtaattatagttattgtttaattacagttattgtttccagtgattaaaaatacaacctgtgaatggtcagcaaaataaccaggtttctaaacatgtttccctaagcctatataattgagaaaagtcccttttctaaatgctgtaatcattttggaattttttaaaatttcctacagtaaacttaccctctgaagttgagattcaatgtgctttattttctaggtaaaacataagtttctggggaaaaaaattttttaataaaaatttccctaagttcaattattgaataagtattttcaagttgcttactgggtgctagatggtggacatttaaaggtgaaccaccaatttgcagtctaacttaacagaagttatgaggacggattttgttatggctatctgttattaaaattgtgacttctgttccttaggcagtctcgtcaaacagtacctgatgtcaa

SEQ ID NO: 36823 - DNA, 752 bp, Bovine  19866881132243
  misc_feature (1)..(1): n is a, c, g, or t
ntcaacagctggaaatgggagaaccggattcaaaggtatttgcaaagatgtctatgtgtgtccacctgtattcccatccctccaggtgctgagcatttgctccttctatcaaagcaagcctctccctgggttctcttggctctggccctctcagccatcaaggatctttttctctgtctgcaaactttcattctctactcactctttcctttcatccaagaaacattcttaaaattcttgcatctttaaaaaaaaatcggtccctatcactaagtggctctctagctttctgccaatctctcacctccattccattggtatgcttcttgggaaagggccccaaaccagctatccccacctcttctcctcccacccactgctcagtcaaggtggtctggttcctgcccctctgcccactgaggctgctctggctgtggtcgccatggccattcatctccaaattgtaaggacactctataggccagactctactagtaatagatgaacttgacccagtggaacagtcctcttctttgacattctggcttcctttgctttcatgacatgactcatttctggctctccctgcctctctaacggctgttcctcattggcctcttacaggatcctcttcattaaaacactggcattcccaactgttttgtgttgggtacctcatttacatcccagtctacatcccaggcctcacctctgtcctgagccccagatccaggtagcctatcacatactga

SEQ ID NO: 36824 - DNA, 865 bp, Bovine  19866881289262
  misc_feature (1)..(1): n is a, c, g, or t
nctgctgctttgagagggagatagttaagaagccagcctcaaaggcatccatgccggctttgggatgggaatacagcaaaggcatttccaaacccagcttgaagaaacattagttttctgctttatttctttagccttaaatctaacaagaggagtggaagcaaagcctcatggttaagaacacaccagagtcaaaacaggtggggtggaatcctggctccttcatcacctgccctgtgattcaggcaagcttatctaagctttcagaagctattttcccatctttaagggattgccaggaattaaatgagtaacatttgttacatgttttgcacagtgcctgccccaaggttaaacactttatgagtaattttttaaaattctaaaaaaatgatttgctatttgatactcttgctagactggagctaaggttaaaaaaatatatgaaaggaaaaaaaaatatatgaaaggaagatgggagggtcagagaaggacataggaacataacagaagctgcaacctgcctttaaccccattacactaacatggtgctactgaggtggggagtccctgacatccaagtttaattcaggctctaattaaagccatacatttgaactgtaaaattagagaaacccaggaagacaactgcaatagtttcatcaatttaaaaccaaagacaagcctaagaggcttcctctctgtgtccatatgctattcaaaaggatgcttcagtgcaacccagatgacccctagaaggtgactgaagtcaaccaccagcccaaagtgtggtcagtaaagagcctgaatttccagtgctgagtaggcaaattgatagtgcagttgctaaagcctgtctctggta

SEQ ID NO: 36825 - DNA, 1204 bp, Bovine  19866881766132
  misc_feature (1)..(1): n is a, c, g, or t
naatgcggatcccataaaggaatggtgaacacagggaatggtcactacctggctaaacatgtaaaatgtctttcatatcagttagatatctttaagagacacctgactgtttaaacaaaaataagaaagttattggatcacagacctaagagaacacagaagaaaaatctttgttaccttgtcagaagccatgcaaacaagaagaaaatgaagcgatacatttgaaggactggaagaaaaatactgtcatcacagaattctatacccagcaaagatctttcaaaaaccgaagtgaaataaaaaaagtcaggtaccaagactatttctagctagcagacctacaacacaagaaaggaggttctggggacaggggaagcaggacagcaacacattcacacaccacacaaggttagtacacccactgacagtcctagatcttaaccctggctctgccactgtgtggtcttgagttagtcactatcttctctgaggctcagagtccttatctgtccaatgggggaagaaatgcctacctcacagaagtgccatgaataccatgagacgagtaaaaagttatcattctgggtaaaaggcatatggaaagtcttcataatattcctacaactttctacaagcctaaacttattttggcataattttaaataaaattttatttaaaataaaattttaataaaaagttaaaggaaaaaaattaacaagatgattttttttaaaagtatgcacacatatacatatagtgcataacactatatccaagtctctcagattctgaacacattcaggaaatggcttgttctgattaaacattctggtcaacatgaaaatttcctaaggaactagaatataactgtacttggcatcaacagtcttcacagagaaccaggacctcgctgggtgggaattgctgtgagcccttctaaccacagactggagagggagcaagccttgacaggccagcttggtgggcagaacccggcagaaccacacaggcacatgctcaccaagatgcatgcaatacacacacacacacacacacacacactcaacccagcaggtaccagaagccctggtgtgtgaagaaactctctagtcctcctgatgtcttagctgcgaaactgagaaatcatcaggatttcttaaaaactacttgagatcgaccacacaggatcagcccacccactgt

SEQ ID NO: 36826 - DNA, 1205 bp, Bovine  19866881898100
  misc_feature (1)..(1): n is a, c, g, or t
ntcacacacagtgccatttctaccatagtcacaggcccgcaaatttcgccccggagagagtgacagcggtgcactgtaaggagagcgtgtgggctggggcatattttgtgagccatcatggacattacgatctgccacacctttcccaccgcctttctgcgtaagacccttcggaagctcctgccatgcctgggagggaattgtgctctgcagtgtggccacaggcctggccatctagccctggcccactgggcttgcttctggtttgggtttaagtcaacccggtgcccatacagagctcccttgaacagtgtttgttatctattcctcacacacctggttgggccccatttcccctgagaccaaggtcagacgtggacctggagggccccagtgtgtccccagggctcctggccaggctgctgcccctcctccactgtaattagcctgttgcttcccatcccgtcgcctcacacaagtgtcttgtctccctgcctcagcactcacactgttccctctgcttgaaatacctgttcccctccaaacccccgcttcccgctgggctgctccccaccacttgtggccttcctgactaccaagccacaccccagaacccatgccctttgtgacctcctgctctgctgctggccagacctttccataaaccagcgcaacgtcctgcacgcggtgagtcttaggcgtcatacctgggtttccacatcagctccagtgcttcccagccacatgaccgtggagataagaaccaccttattggataccgatgagattaatgaggaaaactaagaatttcttgtgtggtgctgagtagaagatcagtaagaacgtttccattccttctttctggagcttcctagtaagtgctcaggatgaattttctcaccctcatttgggtgaaagagggaaaatgtatctccctgcttaatcctgtgggcctaaaccgccagaagattacgagaatattaccgagctgtgagcagagaggaaaaagctcagtaatgatttgcttgcttatttttaataaaatcctgccagaagagctgaatctttgctcctgaaaagagctctgcattgctgtggtggtatctgagagctgtccttagggcagtggggcagtgtgaccttgagaacagagctgtgtgggcaggacggccctccaataggatgcagaaggatgggggggacct

SEQ ID NO: 36827 - DNA, 3010 bp, Bovine  19866880531806
  misc_feature (1)..(1): n is a, c, g, or t
nggttgtggtaggaagaaggtgcgccatataatgtacttgctcttaagacatctgaccgaaataacacaaacagcttccactcacatttcattggagaaagcaaatcagatgtctgtgtctaactttaaagggaaggcaaagtctaatctaccatgaacctagaaaaaaaattattggagtaattttaaatgatcttaatgagaggcccattgggctatggcccattcatttgtcatccctggccaaggcccaccccagtgccccggtcccctctgtctctctttgttcttggaagaaacttccattttttcacctctattcactcctcccatattggctgtacgacttggctcctgctctctgcattgcccctaagatgaactcccaggtgtaggatccctacttttacctctgattctggtctctgccttttggcttcagcccatatagaaattggaaagaatttctgtacccacatgtcatggctggaacctaccaaagctagattagtccttgtcttcccccctttctgacagtggaggtttagatactcagaggctcagacttgcagctggaggacaaataccaaagctgtgtccaagggaagagtgccaaggctgagcaactcagccaaatctagtcaccatggaaggagccagaggcaagaaacaggatcccaagacaaggtcagggagccggggaacatgagagtgaaaaccagcagggtagacgctgcaaatagaaactccgtaaacaaggtcccatattcacacttagggttttctaattaaatctctttaatcaaagtaatacctgcacacattttacaaaatcagttggttttccaaggctttcaatgaaaattgccagttccattctctaccatggaggcaaactttcaactttttaaccttttcttttgatatatgtatcttcatatgttaataatttggttatatattcttgaattttttgttttagttttaagctatctgtttagtctagctagtgcctttctgctgtgaaataagggaaattagctctcatatgcccatatctactttcccactccctgccttccagtgttaatccatattcagtgttaacacgaggctgactatgtaaatattgccacagaggcaacagcataataagagtaagaactctggaggcagattatctgaatttgaatcctgcctccaccgctagctgtgtgtgttagactaaataatatcttctcaaagatgccaatgccctaatttccagaacctgtggctagtttactctgcatggtaaaagagactttgtagatgtgattaagtcaaggattttgactaattatcctgggttaccaggtggacccagtgtaatcatatgtcttattaagaggaaggcaggagagtcagagagagaagatgtaaggatgggagtagaagtcagagggagagaagatgcctcactgcttactttaaagatggaggaagaggccatgggccagggaacgtaggtggcctccagaagatggaaaaagcaaggaaatgaactctcccttagagcctccaaatagaacgcaggcctgcagacatcttgatttttgctcattgaaacctatttttgacctcaaggctccagaacttcaagataataaatgtatatcgctttaaacaattaagtttgtggtactttgttagagtaacaagaggaaatgaatacactgtgtgaccttcaacaaggtccttttgccaaagatttcttatctgcaaaattacttccctgatggaccagtggttaggaatccacctaccatttcaggtggcagaggttcattcctttgtacaggaagcctccacgtgccactggacaactaagctcatcctccacaagggaagccatcgcagtgagaagcccgcacactgcgactagagagtagctcttgctccccacaactagagaaagcctgcacatagcaatgaagatgcagtgcagtgacaaatgaatcaaataattttttaaagccaagaggtaaatttcaattaaaaaaaaatgagctactaagaggatcgtgcatgcatgctaagtcacttcagtggcatccgactctttgcaaccccatggactgcagccctccaggcttccctgtccatgggactctccaggcaagaatactggagtggtttgccatgccctgctctaggggatcttcccgacccagtgattgaacctgagtctcatgtctcctgcattgcaggtgggttctttaccactgagacacctgcgaagccactgtgaggattaaagttaataaatgtaaaacagttgaaacagtgcctaacacacagtaagtgctgtatgtgtatttgctattattgtttgtagctaagccaccaaaagtagtatgattttgtgccttttctttttcttgcacttattagtctgcatattcatagaagaccctcttagtcttctatgaatttatcactaactcatctgaagctataaaactgcttgttagtacagccatacatatagctgacatatccattcaattattttcttttactgagatacagttgtgtccagtggttaagattttgccttccaatgcaggaggtttggattcaatcactgttgggaagctaagagtccacgtgtcttgtggacaaaaaaccaaaacataatacagaaacaatattgtaacaaattcagtaaagacataaaaaaattttaaataaactaaaaaaaaatgtgtttttgacaagacctatttatttaatcagataaagcttaaaaaaaaaaaaatgcttaaaacaagagtagacaatcctgaaaggacatatatcttataacccaggttggaaatacatgaaggattatgaatagtgattctagttgtgcccataagtgaccctggggatggtacccccttcccactgttcacattattcatgtctctgttcaatgctccttcttcaaacagctcttaaactgttaaacctaaaacagccattc

SEQ ID NO: 36828 - DNA, 628 bp, Bovine  19866880534871
  misc_feature (1)..(1): n is a, c, g, or t
ncctgcctcgaaagcacccaggcattgcgtgagccgggattcctgagcactgagtaaggccggcaactagaacgatgaggggggaagagccaccagccactggttggggtgcggtgggcaggccagcctcctctagcaggagaaccagagccccaccaccacctctcaccatgcagactcttccttacaacacaggccaggcacctgagggcttggagcctagctaatgaggatggggagaggtggtgggttgagactagggcagcctggacctggggagggttggaacagatgcctgtatgtgtggtgtcgtaagagagagacagaaagccaaaagaagaggcagtatgaaaagctttgagaaggatagctggccagaatttgcaattcatccgtgaacttcagcaacatttatggacagggtgaaaaatgagatccaaaccctaacaatgatcgcaggctgaaccctagacctggcctcaaactgaactttaaccctggccaagactcaccactaaatctgtcctcagacttacctaatcccaactccttcagcttcactgagcctaatcttggccactggccacttcaaaactgcatgtttgatctcaaaggtagaggaaaagag

SEQ ID NO: 36829 - DNA, 1320 bp, Bovine  19866880603084
  misc_feature (1)..(1): n is a, c, g, or t
ncgtgacataaaatatgtgtcactatcaaaaagtttgaagacaatggtctagaggcaatcaaggtagtgagacaggggactggctctggtgacctctgctggccccacccatccctccccacctggcctttccagctgtactggctgcctaagggtttcctgccaccaaccacatagaccttgtcaccacaccctgtggcccagtgcctgggttttggggtgtggtgggggagagctggaacccaaaagagtgacttttaaaataggttcttccccagatttattttcccctggctccttctccctcttccttttccagctccttgccttgtcctccttctccctctcctgttccgagatggaaggcgaagccaaatcccgctcatcagagagtctcctcctgccacacgatacatttctccttcccaaggcccctcaccccatgctgaggagtcaaaataacctgactgaccccgcgcctgcagggccattcccacctctggcagtcggccaccagccccaagtctgcgagaaaatttatctgatctttgaacttagcacttccctggagataaacctgggcaactgctaaaggtatcagagctgctgcagagtctgagagtcaggcattcgaaggtgagcagggcagggagagggcaggaggccctggagcagagatgttgggagtcagagggactatctacgagccctttctccctcccttcatcctcagattctggcccatggccaaaatggaatgtctgaaaatctaccaagtgatcttctctttggaagtccttcaccatcaccacctccatcatcacttttataggcgacatagggtgatcccatgtctccatatgcctggaatattggggtttgcatattaataggcccttgtttgactattaagagtgttccaatatggattttaaattatctcgtcaattgttctggtctatgtaggaaaactaaagaaaactttaccaaaggtcataaagatgatcagcagttcatctggggcttgatgcaaattatatgctcctccccagatgcctcatgctcttcctaggatgcctcacttcctgcttctcactccacctgatgggaaggagagtgtagattgatgtgtgaacttgtgtgttgggatcctaaactccttacaggccttgagagctggttagagtgacctcattcaccctctaacaatcttagctagctgcagggtgcagtagaaccgagagaaatttctgaagcctcaaattcttcttcatggatgggggagttagacggaagctaagtatacccagggggaaggat

SEQ ID NO: 36830 - DNA, 1186 bp, Bovine  19866880614346
  misc_feature (1)..(1): n is a, c, g, or t
nttagtatgagttttaaagaggtgaagcaaaggtgaatgggatgaagagagaagaaatttcagaagttaaaatagatcagacctagcacgagccagttataagaaatgaaaggaaataatcccttccaccatacatgagggattggattccctcagtatggaagtaactctcaaacaatgagatgggagactatggagaaaaaggaagatgctttcttagtgcccgagaaaaaacacatgacccaaagaagaaaactagaaaacaaaacagactataataaatttgattaaaaattttaataatagtctagtaaatacaatggtaaatctattatttacctcgtcttttaaattcatgttttcaggagccatacttattgagagttgatttccatccattgatattgggaagcaggtataaaattttatcatagaatctgcagattttctatttatttctataaatgccttttaaaatagaaatgacaagaacaaaaaaaagtcttattaagttacttctccttaaaaaatttaatacttatgagtcaaatgaatttcataacttaccaaatatttttaaaataaaaaatgcattccttagaaaggtgaggcatatacactaagaacattacaactaaaaccaagaaataatgactgaactcataaagcaatactaaagaggaataacaagggacactgtagtaaatgacactaaggaaatcttatttatcttattcatcactatatccttactacctagagcagtatatagtatgtagcagacaataaacgatcatgaatcaagtaaataaactcaatgattgacaaaatatgagaaatatgaggaaagaaagaaccaaagaaatgtgtaacggttatcaagttctgttctgttattttcttaagtataaaattggagcagtgtacagtttggtttctaaaaccagcttgaacatcaggaagttcggggtttacatattgctgaagcctggcttggagaattttgagcattactttactagcgtgtgagatgagtgcaattgtgcggtagtttgagcattttttggcattgcctttctttgggattggaatgaaaactgaccttttccagtcctgtggccactgctgagttttccaaatttgctggcatattgagtgcagcactttcacagcatcatctttcagg

SEQ ID NO: 36831 - DNA, 1709 bp, Bovine  19866880654333
  misc_feature (1)..(1): n is a, c, g, or t
ntggcctggagacctcttgtcctacctctcccttccttaaaggaaactggtgttttgagggtccttgctatttaaggccctcctcagtcaatggcaccccactccagtactcttgcctggagaatcccatggatggaagagcctggtgggctgcagtccatggggtcgcaaagggttggacacgactaagtgacttgactttcaattttcactttcattcattggagaaggaaatggcaacccactccagtgttcttgcctggagaatccatggggttgcacagagtcagacacgactgaagcgacttagcagcagcagcagcagcagcagttactgctgacatgagtgttcccacccacaggcagacacaacccctggaagcttagatctcctgtgggacatgattttgcttgaattcttgagtttgagattttccttgagtttgcgctgggctttgagagctagagccaagagaaaaaacccctcgccagccttcagtctctgtcaatgtccacagggctcttcaaaggtctgcaagaaccagaaacaccaccagggcagctggcttaagaggtgactccagaggctctgagtgtatggggcccggggaccctgcagtctgccttggttccatgtcttccaggagagtcccatgtcgggggctggggttgggtgtgtgagagaagactgcacttggagaacaatgagctgaggcctggacataagacataatgagcctggacataagacagccagatttgggagcactggctgtacaggcccactgtccctcgagagtgttcagagtgtttgacggtccagaggaggatgcctggtgggcagcatgtgggggagcaggaaccttaagtgaaaattagaaagactgtaaagagtcttgaacactagctaaggaccctgattttcttctcttgaagacggggaaccacacagggacaggaacgcaatccgagctatatggggaagggagccagcagagtggacaactgacctgggagggacgccttagtcagggaacgtgtccactaacctcagtccctcaaggggcaaggaccacatcatctcccttcctagctggctgggcctggaagagaagctgctggaagaatttcccacagccggcgagttcccggcacgtggctggactgtgggaggaggcactccagccaccggcatccaggcctggaggacagtcaggtctgggcactgcggggagaggagttttctatttagatagaaaacccagaggttcagttccagttcagactggctcattggtttgttctctttttaagatgccgtctttgtttatagagaggttttggatttgtttccatttgggatccagcagatgagtgtaggaattccaggctccgcttcacggatcagctcttcttggacacacgcacagtcctcctcagacggagctgtctcctgtctgtctgctccccaggatgggggtgccctgaacatgcaggggacaagggctgtcccaacaaaggcaccaagggacagaccaccatagcacctggcttgtggatcatctcacttaaatccttacattaacattgtagattgggtataatattaaccccattttacaaatggaaactgaagctcagagaggtttaagttgctctgttggcacctgcaccgctaggatttaaactcgggaacccaagtggtctga

SEQ ID NO: 36832 - DNA, 1114 bp, Bovine  19866880669459
  misc_feature (1)..(1): n is a, c, g, or t
ntgtgggccagaagagcctccctgaaccaggggtaaaggggcagagagctcaggggaagaaagcagaaagaaggcagagaggagcgccagcatcctgagcccttgtggggttctaggcattcagtctgctctgtcccctgcctgagtcagcaagggacgagaaggaccaccctcatttgccagggaaaccctcccagagcacatagtggggcgcccagctctcctcagagcccttccacccttccaagctctctgaggaggaaagaagggcatgcaagtttcctgattccaggagaaccagtgcagggtgaacaagaaactgcccagggccacacacccagtgcatgggtggagctggatgcaaggcctcttggacacccagccctattctttctgccaggttacacctaagtaatcacttcacaggaagtgaggggtagaaaggagaggtgagttgagatgaggaggttcacatcccagctcaaagatgatttccaggaaggaccatgattattcacaattcagggagggagcttactgtgctggcatgcatgtgcatgcactcggacacacatgcacgctcacacacacacacacgcatcggactgcaaggagctgtgaatcacataccacattctgctcaggggaatgcaggctctgaaaaactttccaaaaacacaggagcaccagacagtcagactccaaaccagctctctgcctcccttcatcatgaacactgattctcagagcccaggaaggaagcagtggccagatggcttcctggcagtgcagacccacccccagtatccacctcatgcctggaccactggtgagcagggctgttgctggtccctctgtggatgggatgaggaaaatgaggggccatggagctgttcttcagctgccctgcagccacagagcacgtgaaccacaggcacacccgtgctcacccaccagtgcacgagcctgctgtcgttctgagatttgtggggcttttcactggcctgtgaacccaagtgactcagagctatgaggtttccagatctccctccctgtagctcaaatggcattgctgagtaatcacagagaggttacaaggatcagagccaccagt

SEQ ID NO: 36833 - DNA, 669 bp, Bovine  19866880677536
  misc_feature (1)..(1): n is a, c, g, or t
ntggggccctctgggttgtcagtggagactgtggcctaaaggccccattgggcagacatcttttgtgcttggcacctgctccccttgtcctctctttttagtctgcttgcccaggtcctgagcccctgggtttccttctaatgcatgctctggcctgttctctccagttaagttgggatgaaaggttggaataaaacagccacagtccagggagcaattgtcccttggcagatagaggtgaacggaccatccctcaccccaggaggtcaatgctgtgaaccacatttccttcccagcagcatctgcccatgggcccctctctgagcctctttgtctctttcttctcagtggggctgtcaaaagctgagcctcacaggttgtgactaatcactagcagattttttttccatccaagaagaagaaaaagctgaaggagatgaagaaaaaccccaacagtgaataactcggaagagtttccaacatgtgggtgtttttctgggaccaaaaatcaggaagattccaaatgtaaacaatcccaaaatagctcagctctcccaaccccaggcattcccaggacttggatgtccacactccctcccttttccctctgggaacccaaggtcaggggagaggtggcaggatttgggcattgtgaaaaattgtttgagt

SEQ ID NO: 36834 - DNA, 1713 bp, Bovine  19866880737706
  misc_feature (1)..(1): n is a, c, g, or t
naggcctaaagggttcctgatccccttccgagaaggaagcagagaccccacccacccagcccaaacccctgtcctgacctctggcatccagaggtgtcttgccgtgcgtgatatctcaagaactttccagatacttcagatagcctcctagaatggctaggaaaaaaccttgtggacaagatgctcaaagagggggtgggggcagggggagctacctaaaagtccatcagtagaggcctggttaaataaaccctggcttatccaaatgatagactgtaatggagccataaagccgtgcggttgaagcacactcagtgatgcggatggatagtcacagtatggtggttgcaaaccactataaaccagtgaggtcatattttaaaaaatactaacatatattttatactcacatggaaaattctagagatacccaagtgccaacagtggttctttctgggtaatgggattagttagtgcctcctttatactcttccttttgctagctgttttctcagatttctataatgaacgtatattacttttgtaataagacaaaaaccaataaaagctatttttaacaataaaataaatagtcacccttgcccatctggaagtagcatgttgcctgatttggcagcaggggttagagtgggcagtgaggagtgtgaatgctggaagcacttcccgaagctgccaaccccgggaagaggcccgctggggttctgggtcacagtgggcccagagtggccgaggcgccctcgtcagtccacatggagcaacgggggtgaaccctgatgacaatgctgagaccaggatttccggatgaggcgtggcggggaaggcgaccaactcccaggcagagaccagtgtgagccagcccgcagccagctcagccctacctcacggcctttgcacttgggccgccctgggcctcgggtgctctcaccctggttttgcctgctcactctttcaggtcagccagtgtcgcatttccagagggctttgcctcaaacttgtttgaaaaatgaccccctgttatttctatctctccctccgctttatttttcctccagcattcattcattactgcctgaaatgattttttcgttctggctccctgacagagaacttttacaagggtaagaatcctgtgcttagagcagagcttgggcaggacaggtgctcaaaaaaaatgcttgctgagtgaatgaaaaaccagaaaacgtcaccatatctgagccagttccacacacaggtcacccccacctgcctgctgcctcccacagctcccacaccggggcgaggccctgggtctggtcaggacatcaccagttgtgaaaactgggaggtgtctgggcctggcaatggggtgcagagagcaaggactctgaatcgccatggctgggcacaccctccgttaacaaatgtgcggcctcccagagtcacagttttcttgtctcttatatggggctccaaacagctacctctcacaggtgtgggttaaaggcgacactatgtagcagagtgcttcagtagccaagggctcctctccgaccaacctccgacttcatcctcacccctggactgaggctggaaagacctgagtcttcctaggagtgccctgctcccccagtttgatgggaataagaaaggagaggggcatgtgcctctctgacctggtgggatagggtcccaggcatccgaggcagccgg

SEQ ID NO: 36835 - DNA, 3074 bp, Bovine  19866880787153
  misc_feature (1)..(1): n is a, c, g, or t
naggccaagccccagtgtccttccttccttggcaggaaggtgcggggagacccattcgcctggggtcagggaaacacagaagaagtcgtctgggaactcacagtcccctccctgatctgtgaagagagcctcactgagggggaccctggcctcccctaaaccagccctcggctgtttaggcccaggagcacaggcaggagggcagaacggccgggcacgcagccacgccgctggaggattccagggggctggctgcatgtggcgtgacccttgaatcgaccagatgaactccacgtgaagccctcggcggcccagagactggcccagccaggcagcagctctgcccctctggttctcatcctgaacctcacagaagccttattgttatttttaatacagatcgtttttagaaaggtgagagggaaaccggcagttcaccagtgcaagagggagaaaaaataaagctaaacatagttgctccaaaggtctgcgccagcttccgaaattacacgttctcctttgggatccgggcataatttgctgctccggttctgggagcacgttcccaccttcacggcgtcccagagactaaaaccggagcaggcggctcaaaattagcccaagccgggagccagggagcagccagccccagcaccccaccccatgcccgtggagagcaagcctcccgactcctcctgcacactagcctgcatttcccccagagcctcccaggcccatcacacacatatgagtgcatacatacacacacacacacacgcactcagtacaccatcacacacacgcagtcaacacacacactgtcaacatacacacaccgcctgccaccaagcctttgccccactcctctgcccaccaggggagaaggcaatggcaacccactccagtactcttgcctggaaaatcccatggatggaggagcctggtgggctgcagtccatggcgtggctaagagtcggaacgactgagagacttcactttcacttttcactttcatgcattggagaaggaaatggcaacccactccagtgttcttgcctggagaatcccagaggcaggagagcctggtgggctgctgtctatggggtcgcacagagtcggacacaactgaagcgacttagcagcagcagcagctgcccaccagaaaaggcctcctctccccactgctgttctaatccctctcaccagccccctcagagaagctcccctgatgatctagtccacactgaccctgcaggcccagaatcccagatcttggtgtccctgctaagtgagcattcacagctttgccatcactctcatcatctcatatggatccacagtaccaacctcctgtttctgcccaccagaggggagacttcccaagagctctctcttcctctttacccttcctcaggccacacacatccccccacccgagtccctggagactccaagaggatactcctacccatggtggtctctcagagcaacaggaaagggtcaccttgactggcggctcccatgcctggaggtgggtgatgtgggggataggcaaggggtgtcaccctgacgtgggcctcaagaccctctagggaatggcggggagccagctccaggtgtgttcctgcaccacttctcctccccttgtcatcttcagaacacaagaactagtagatgaggaggcgaagaccccaggtttgtttgaaggtaaaagtagagcctgattcagactcagaggcagatgagacaggaagagcagcctggagtaggggaggcagcggggtcagactcagaggcagagtgagacagggagagcagcctggagtgggggatgcggcggggggagaaggacaggacagaggaaatgctgggagcggttcattcacattgtcttcctggttggaggcattgtctgtctgttcattatttttctatattttcccaactgtagacaacagacatatatttataatcagagaaaaatgaatatatcctttattttgaggagcgcactagacagaatgaaacacctctgagcccctctgtgaggacacccctggcctgccctcagaaagtcagacatcaaggccacgacacttacagcagcagcactgagcttgcacacacatctgctcccgccccccacctctcatgcacacttacccacgcacatacactcacaccaccccatccccagcctacggttctgaaatctacacaaaggacagccgcacagaccgagaatacactgaggggttactatgtgagagttcatcttatcccagtcccctagagaagagtccaggaggccacgaccctcctcacccccagagatgggtgcccacttttgaaccctggaaggccaagtggacagctctgtctcatacatccatttcagatcatctccagaactggccactcttgacagaccaaaagatttctagaaacctgagaaacactcggccgtggtgggcaacccagtgacctgagcatcaggtcatcgggactttctagcatgtgcagctcatcccaggaaatgggcaatgatggggagacggttctttggccaagaaggggcgacagagcaaggagacaggagggaccaagacagaagccagatgtgctaagagagcatttggagctggggaggagccttctgctgggtccacagccccagctggtgagcacagcggaggggctgtgtcacagtgggaatggtaagctggcctggagacacaggttagacaaacaggagccagaaaagtcccagttctgctagacttcgtgttcctccagtccccagagaccagggccctccatcccacctgcagtggggaaggggacaggggacaagagcccagccagaactatgtggaaaaccactgggtctggaacccacggtgtcctgagtcagccccggtcctcccaagtcctgcatgggggatgtgcaagatggagtcagtgaaagatttctggaccagccaaatcagatcagtgatctcagagaaaagcgcgacacagaattgctttttcctgaagctgccatcagaccccatcaagacagggctccctag

SEQ ID NO: 36836 - DNA, 1391 bp, Bovine  19866880810306
  misc_feature (1)..(1): n is a, c, g, or t
nctatgcgtggggatgtgttcagcatccccctggaaggggtgaaggtgtgcctcgggcgtgtctgtggctgggtggccttggggcagagtctgagataggagcttggctacctgcagtttgttgaggcagagctctcgggtgccaagagcaagactgtggtcccaggcaagacggttttgacttgaactgtggctcagaaaggggctcaacctggagcaccacagcgctctcctcacctggaggcaagggggctgggtttgtaccaccttagccatcagtcactgactggggttgctggggtgggctagctgcataccctccccaggaagcctgttccctccagcatggccaattccgcggagaaggggcctgctgcggatgagggtgctgctagtcaaagagcctgggtgggctcagtcagcatttaccagagggcatgttcaagtgtgagcacccctgcccacagccatgcccagataccccaggatgcagacaggtgcagagcgagcttgtgtgagcacacacctgcctgcacctgcttccggggtcacccagacgctcgcgttctgcgtgcctgcctccccggaaccctcttggcctgtgtccttcctttccaggcacacgttggaattttggctcgagaactaggcctcccctccagtccaggaatagcctttggcatgacccaagtcccttctctctttggttacagagactctagagaggaaggtcactgggtcccaggagaggccaggcttttgggctgttcctggtgtcacgaaccagacagacgccactgtgcctatgagggcacccaggggacagaggcgaagtcttgccaggcgctgtgcctcgcctgccccctcaccaccggcatcgccccgcagagggacacagccagccttgggactggcgctgagctcatggccctgaggatcatctcaggtcatgagatggtgggaaggggcttctgggactccctccaagatgggaaagggcccccttggaggaagtctggggggtctctccgcactgttgtaggtctcacctcgtggagaaacaacctatgtctgggaaatgagctattcattttgcctccgaattgcagatccatttccttttttataagtcggaatatgaagaagaaaaaggaaattacaaggaaaccttgggttcacgaaatccacctagaatccaaataaacaaacaaaccaaaagccccagtgttttcatcactgctcagtctaccttcctttcttggctccttggatctccccacagcccagggagcctctgatttcctgacctgggactcttgtcattgcagaaaccgctcagaagcccctcctccaggggtccctcccaggttttcctacctgcagggtgatga

SEQ ID NO: 36837 - DNA, 775 bp, Bovine  19866880831504
  misc_feature (1)..(1): n is a, c, g, or t
ntgggtgacgaggtttcctatatggggatcctgggtggggtgaggttacgggaagggtccctcaaattatgatcatcaccaacaggtatttgtcatatgtctctgttgccaagtaattgaggatgagacttgcccctccaatctgacgatggagtgaaaaatctgcaagcaagaggtgcagacagaaatcacgaagagcaacaagataggggctagagcccattgagggatggaggcagagaaacggagcaggagcaaggcggcgacagggatagacagaagtagggtcagggaaagaggagaggggcaagcagagacaggaagaggccagggcctgggtggggcagggacccagagagcacaaacaagggcaacggagaggaaggccaagcgaagccgagagaggcagaagggtagccagagcgtgggcccctccctccttggctgcctcagtgccaggctgggctctgcatcctcaaagccactcctgaaactcctgcatgttgaagcacgaaggcagaaggaaggtagccaaactggaaggcagccgaggaccagaatgccagggacgcatgcacccagaggggtggcgttgggtcaaggagaaactgccctgccctgtggcccacaccatcacacctccacttcaccccaacctagctgagggacagtccctcacccagagggcagaactgggctggatgaggagtccttctccaaggtcggccttgagtgtcttctggggacagggaaagggagggacccgacagaccat

SEQ ID NO: 36838 - DNA, 2519 bp, Bovine  19866880875187
  misc_feature (1)..(1): n is a, c, g, or t
ngacctggaagtttccgtgacatgagcagttcctgggttggtagggggaccccagtgtccaaagaagaaaacacacacggaactcctcgggggcatcaggctcaaggggcagtgaagtggttgatcaggaacaggtagagcagaaagctgcaggaggccaagaaagaggggtgtcccagggccaaggccagaggggttttcagggggcgacagccagtaaagccaaaccccacagaggtcaagcaggcccctgcaacccggagacacagtgggctgacagcagcccccacctccacaaacccaacagacacagcaccccgcctcgatcaggggaagcccaggccacgttccctgtgggccgaaggccctacgcctctgttcccagctctcagtccctggtccccagctctccccactccccccacctaccggaaaaagagtccttgtccattgcaggcagatcccgggcctggtacatgtagcagcgtagatggtagcggttcccatctgcaccagagaagaaacagatgccgagtgaggggctgggggtgacaggatcaggggctggaggatggagcgcgtctctagaaagcagtggacagaggggctggacgaaagagactacacgtgccacactctcaggatcaggagagcagaccacagcccaaaggcggagccacagaacaatgtgtcctgggcctggtgagcactgggaagggggcagggaagggggaaggggtcaaatgaaccaccgtgccttgagtgctggacttcaggctcagcactgacaacatataccacacacggacacacacacgacactgacccaccaacacagacgcagttctccacagcccccacacatacacctgatcacgcaacccacacacccaggaacgtagggtgacccatccgtgtcacccctgtagatacctccaaacatcacttacagtcaaagatgcaggaaatcgtgggtctgttcacaccaaaactcaaggtggagacggacacggaatcttcactcctgtcgtccaccacgccaccctggagacacagagctggtcacagcagattctgaccccagaggctgggggtggtggggagactggctcagatagtcaggtctccaaggtcctttagacaaggctctaaagcgctaatttcactccagatcccaatgtcaagtccacagggaaaagcctctccctttctagcggagacccgacaagccagaagggggttttgagttgttccagcccaagaggttaaagttcgatagaagaagggactcaaggggctctctggggtagggtggaatccatcaggggtctgcccagggtaggggttatggggagcccacgtctggagggcctcaaacagcatctctgtcctcccctgcctggacacagggctggtgtggggacacacaggcacgcagctgggtccccagctctgcagagaagctgcgctgtgtcttctcatctcttaccagttcccactgtgctgagggtcagaggagcctgaggctggggacaagggcatggggggggggtgggcatctacactcaggctcagaagctctgcatcaacctagatgctcagtccccgcccctgtcctcgttggccactgggccataaatcgccttcccggtgccctgcatccctccaccaccgcctctgccacatggcaccccctcatcgaggatgagccccagcaggagtcaaggcccccggaaaaaacaggaactgtgccaatcacacggcagcccgcccttccagacctggccttctaggacataagttccaccagcctctcatggcaggagcccagcagaagggccagggagagctggacagccttcctctgccatccctctgcatggcccttcccctctcctcacactgtcatctgctccagtccctctttccaaaacccaagcacgcccacccttgaaagaaaacccagcctcccttcccatggcctttttcaccccacccaggcccacccagcgtagccactccccaaggcctttctgctgggctacactgccctctacccagcagcagccagttcccaggaatctccacctctccccaggccctgcagttacacccccaccccccaccccaacccacacctccaaatacaagaggcgcggccactgacatgctcctcctctccaaaccgtgcccaccctcagggcctagctccaggcccctggtccaagaagcctccctggacacctgtccccttcaatcatgtcctaccctttgtgaccccatggactgtagcccaccaggctcctctgtccatggaatcctccgggcaagaatactggagtgagttgccatttccttctccaggggatcttcctgactcgacccagggatcaaacctgggtctcctacaggagacccagaatctacactgcagccagattctttaccatctaagccaccagggaagcgccaagtatctgtgagtgtgggagagttctacagtgtgtctcataggctgc

SEQ ID NO: 36839 - DNA, 1420 bp, Bovine  19866880907623
  misc_feature (1)..(1): n is a, c, g, or t
ntctgtagcgggaatctccctgtcccaggctccgggcttaaaattcagattccccattgccatcacctcttccagcaccttctgtaagctcttcttcttataaattctccccaccctccaaagcccaccacttccaggaagcccttccagactgctctcagctctgaggctctccaagttcttctgccagataaagcatctaagtgctctcagtactattctgtggttcatgcaatctctttgattagtagcagtagctaaagcattagcaataacagagaacacatttaaatcaagagccaggtactgttcttcatagatattaaaggtttgatccttaaagtaaccctaacaggtaagtgctattattagccccatttcacaggtgatagacatgaagcagcagacagtcacacctgggcagggggtggctgagatcacaccctcattaggaaaggtgtgtaactgggcgtgaatacccgccctcccctgcatgcttccacgtgtagctctacctgtcagggggtgggtcacgaactggtactgtggatggagtgtttctaaccctaagaaggctggctgatcagccagcaatgtgaacttggagctcccatgacagagacctgactgggagtaggagggtccacctgtgtctatacacatgtacacacacaggtatgtgcactcaggtgtgcccatgttcaccagcacagattctaacaccgtgtacacacacacgcgcgttcatccgtcaaacccgccctacccactttaataggtgccactaaggaagcagcctagtactgcaggaggaccactgggccgggaacctggttcttcctctaaagggctgggtgactttgggcaggttgtcaacccctcttggtctgaacggcctcatctgcaaaaacaggcagaattctggctttctggctttcttttcctatgaatttatgaccatgagccctggtccctgtgcttaagctgctcacagactagcagaaggaaatgagaccacccctaaaacagatgcgagttctacaggaaaagagaacgggggtggggtcagggcctaatggaaaggagcctgactcagccatgaccttggagaaccagagaaacagaagaggggtgggctggggatgggggagccaaagcctccttccccttttacaacctcaccaccagctctgacatcaaacatcgctgaaagcagcaggaggcgaggggccagctgggcctgtaaacacctccggggagtctgagctgctccgggtgggccgtgcaggcctgtgagcatctcagacacgcagggagcacacggcggcaccctaggcatgagcattagacagacccaaagcgtcaggcaagacgagggctacagggcttcctgccaccctctggatgcaccatgtgcagg

SEQ ID NO: 36840 - DNA, 854 bp, Bovine  19866880912755
  misc_feature (1)..(1): n is a, c, g, or t
ngatggatgctgtccacattctttggctcatggctgcgacgttgcagtctttattttgattgtcattctaccttcttttatttcatctgttcctttcagtccaagctggtagtgtctctgctggcatcacattctcaagatcctctcttgggtgatccagcctaggctttcctctcctcctgtcaggcctgcagcttgaaccctgctgaccttgactgcctgttttggataatagatctgtaactcagccttctgccctcccctccaggagcctggcctagagacccctcttcttaagagaagatgagctcctccccagggctagtgactgagacatgtagaaacgatgttggccagcacagcccaccttggagatgctggaagtcagggccaagattctagacctgaaccacactgcccacaggcaactccacactttacaggcagaggcaggacccggatgctggccattatgcttacaacagccctatagggtaggcattgccattactggtttatgaatgaggaacttgaggttagagaggaaacagaggcttcactgaggtcacataactagtaaaaaacagtttgcccctccagaaccacccctccctgccagaagtacaaggtgtcctgctgagatgtcactgtctctagccccagtaccatccttacacccgggagagaaagaccctgtccttgaagtgcatttcttaaaacttttagatcctcttctgtggttaggacagacaaggtctggcactgccatctgagtggggcaccctgagttttaacctggacctgtgtgggccccaggcctttctcctccctcaactgccctccaaccctctacc

SEQ ID NO: 36841 - DNA, 778 bp, Bovine  19866881021346
  misc_feature (1)..(1): n is a, c, g, or t
ncccaccattacttctgaaaataccaccataccctccaccatcatttcattgccacgagcaccatcaactccactgttaccagttccatgattttcaccaaaattttcattatctcctcaggtactgtattatcacctccagaaatttcatttaaattatacatttagtatattcttccttttgggttacaacagtgatttttgagtacacagaaaaggagtaatatctacatttcaacacacagaattctctgcgtgggtggaggggtagaaaagaacatactggtttctccagctcaagctacatacataggaaggggtggggtggaaagggaacattcattgagccctttctaggtaatagacatcatactaggcacacgagttagaggattttctctggtaagaatcactgccctagttttacaaggaggaaactgagattcccagatgctaaataacatactcaaggccacacaattaataagtgttggagccaagattccaaccctgtgtgacttcaaagtccatattctttccattacactatgctggcaagaaatctcaagagcttggtttaagcacaatgggttatgactctgagtaaagaaagccattgtcatggtccctgatctcagggagatctgatctgatgaggcaggaagacgcccctctctcagaaagaagactgttattaatgaacaagattaaatcccagattcacagagcctatgctttgcctaggctcactcaaacaattcttcacaatgcccaaatc

SEQ ID NO: 36842 - DNA, 1320 bp, Bovine  19866881091311
  misc_feature (1)..(1): n is a, c, g, or t
nttggtaatgaggcgtttcgagtaatgtgattgattatgggcatgcaagcaaatatggctacacagaagatccacttgaagtacgtatttatgatcctgaaattccaaccgatgaggtcgaggatgagtttcggtcacagccaagcatttctgcatctgttcctgctccaaatgtgatgtgtaattctgtgtttcctgttgaagatgtgtttcgacagatggacttccccagtgagtcctccagtaatcagtcctttttcccagttgagagtggaagcaagatgtcaggtttacacatttcaagaggacagtcagtccttgaacctgtaaaatctgtcagccaatccattagccagacagttaatcagacaatgagtcagtctctgattcctcctcctatgaaccagcaacctttttcatcggaattaatttcaactgtaagccaacaagagcggatcccacgtgaacctgtcattaattcgtctaatgtacatggatcgggaggaagtaaaaagaattaccagtcagaggctgacatccccattcggtctccctttgggattgtgaaagcatcctggctaccaaagttttcgcatgctgatgcccagaagatgaagagacttccaactccttctatgatgaatgattattatgcagcatctccaagaatatttccacatttgtgttctctgtgtaacgtagaatgtagtcatttgaaggtgagtgtttttaaagatcactgtatcatgataactcagtgcccaagtttcatctaaattctcatatgtatgctggtgttaactagtcattaaggaaatggcagaaattgtgattgcaatgtcagtgcttagttgtaatcttaagtagcctggcctaagtattgaattgagtgttaggctttctgtattcctgtgactgggcacaccacatggatttttccatttattttgaacttttgagaggttatcccagagaatgcaacataaaaatttatatgacacaaactgtatttataagacaatgtcacatgagttacctttatctgaataagagaatctgttagtaaaaaataaaaatttggaataaaatatttgtactgcacacttttaaagagccagtatattttagctttgcatgtatcttacctgttttgagctaaagatagttaatgttgatttaaatatttttgactctatgattcttacctggatttttagtgcttcatgagaaggagcttcttaagataactaaatccatagcatagcaaaattgagtcagaatgaattattgggaccagctgtgggctcagagcatagagtg

SEQ ID NO: 36843 - DNA, 1868 bp, Bovine  19866881146710
  misc_feature (1)..(1): n is a, c, g, or t
ntggaacgatgttggccattagctgctaataacttaatggagtataattaataaaaatactgaatcactgaaactaatataatattgtaaagcagtacttcaactttttaaaaatttgattttgcacaagagttggccttttttttttgtttcatttctgagtgctgtgaacttgttaactataattataaatctcatttaacgccttctccctgcctcttaacagcattcaagatgaactggcatcaaagtttacttctttaacaaaagtactttatgactttaataaagtactagagaatgacaggaaacatgggagtcctttaaaaaaattgatgataaataatttcgatgatgagcagatttggcaacagttggaactgcaaaatgaaccaattttacagcacttccagagtgcagttagtgaaaccattgaagatgaagacatcagtcttctcccagagagtgaagagcaggagtgtgaagaggatatgatggagctggaggctgctggccaggaggacctggaacaagatttagaggaggaggaggtggaggaagcagaggaggtggaagtgtcagacctgagtggtgatgatcctgaagcagatgagagagccaaaaactcaagcaaattggatctgaggaaaagcccagatttcagcgatgaggactctgatcttgattttgatatcagcaaactggaacgtcagagcaaggtgcaaagcagagtgcctaggaaaccaatgagaagtccatagtagatgataaattcttcaagctctctgagatggagacctttttagaaaacatggaaaaagaagaggaacaaagagatgaccaagaggaaggatgatattgatttttttgaagatgtggattccgatgaagatggaggagtactgtttggaggccaggatcttaagtcaggtaaaagttccagaaacctgaaatacaaagatttctttgatccagttgaaagtgatgaagacgtagcaagtgtccacgatgatgggaatgaactggcttcaaatgaagaggaagagattgctgaaggagaagaaagcatttctgagacggatgaagatgatgaccttgaagaaagtggagacagtaaacaacataaagaaacctcgaaaagagtgacctttgctctgcccaatgatgaggacactgaagatacaaatgtcttaaatgtacagaaagactctgatgaagtaaaatcctcttttgaaaaaagacaagaaaagatgaatgaaaaaattgcatctttggaaaaagagttgttggagaagaaaccttggcagcttcaaggagaagtgacagcgcagaagcagcccgagaacagcctcctggaagagaccctgcacttcgaccacgccctgcgcgtggcacctgtggtcacagaggaaaccactctccaactagaggatatcattaagcagaggataaaagatcaggcttgggatgatgtcgtacgcaaagaaaagcctaaagaggatgcatttgagtataaaaagcgtttaacactggaccacgaaaagagtaaattgagccttgctgaaatttacgaacaggagtacatcaaactcaaccagcaaaaaacagcagaggaagaaaatccagagcatgtagaaatccagaagatgatggactccctcttcttaaagttggatgtgctctcaaacttccacttcatccccaagccacctgttccagaaattaaagtggtatcaaatctgcccgctgtcaccatggaggaggttgcccctgtgagtgtcagtgacgcagccctcctggccccagaggaggtcaaggagaaaaataaagctggagacataaaaacagctgctgagaaaacagctaca

SEQ ID NO: 36844 - DNA, 617 bp, Bovine  19866881192262
  misc_feature (1)..(1): n is a, c, g, or t
ntactggagtgggttcctatttccttctccaggggaccttcttgacccatgaattgaaccctggtctcctgcattgcaggcagattctttaccagttgagccatcagggaagacccctgttggtttctaaataccattctctgatcaaaggaaccaagaccctttggagaaatggctgattccagggctgaagcagcaaaatatgagatgattctggactatcttgtgctctgtgttctgtgttcctttatgtaatgatcagtcaggtgcggccacaagaggaggcacaagagaagcttgggaaaacaaaatatattatactcacagtcctcgaaacaggatgccatacagtgccatacggaagagacaccagggtggtcaggagccaaaagaggcaagagtgaggagaggggcctaggccaccactggtggaaattcaagggcaaggcaaggcaggcagggtaagcaagctaggattggctagcttgaataatatcagcaggctccaagctatagggtattcccgagctgcctggcacctggccctgggatgatgaagatggaggaataatgtctcctgggccctccagggccctccagggccagataagggacat

SEQ ID NO: 36845 - DNA, 1355 bp, Bovine  19866881232089
  misc_feature (1)..(1): n is a, c, g, or t
ntaagcagggtcccttttctgcagtctatttagtgccacatttttcacattttctgtacctttcatcagtgattctgcagtttaaaatgccctccgagtggagtgctgaggtactggtgttcctaagctcaagaatgttgtgatggttctcaggaaggaaatacatgtgttagatactctttattaaggcatgagttacactgctggttggtcataagtttagtgttaatggatcaacggcgtatgttaaacaataaaaacacacataaaacaagtttctgtgttgatcagctgatgaaaaagtgatcagaggctcacagaaagccctactctgtatttctccttgaagcaaaggttcattgtttgctaatctactgttcatggcaactttatagaatataactattgcaaataatgagaactgactatgtatcctcagactggcttccatatacagttgagtagaaatggaaatagcgtcccctagagttactcagtgcacagcatgcccaaccatacggagcagcaccgcccttgagatatgatctagttggaatggatattaccgaaaaacaaaatagaaactcctatccttaacataccccaaattttaaaaacttttagaattagtcagtgctcaggatgaaacgactgtctatggggtgtctatgaaatgactgtccttgacatggtctacccatctggaagcctgactgtctcctggaatgcctttcctccattcctcttatgcttacatcggcattctgaatcttacgagaaactgcccaagtgtttctaagtttcttgctcagatcagtttgtaactgtcattaataattgcagatggtgcccccgtgagaaagttcgccacaaatccactgcagaaacacagggcagtaacagtaaataattcatgcatgcacttgcaatactaagaagatatactgggagagttattgaaagaagagagaacacaaaagcagggaaaatgaaaagagaaaaatcaggaagaaagagaatgaaagagaaagactgagtataaaatagtaagagttttagaaataaatggcacttgagaaaggcatcagcaacatagatcaaaatttgtttctatttgtgagcgtgggcgggggcttttggcttttacaatatgctttgttactggagggctaaaatatatagtcagcctaatcacactgctcatggtgtaacaatttcatacaaataaaccctgccagcatgcaactgtcctttgaggatgtcaaaatttggataaaaaagatcatgctccttaaactctgaactcagacatgagggctcaaatcccattcataccacgaagctacaaaggttca

SEQ ID NO: 36846 - DNA, 1391 bp, Bovine  19866881273712
  misc_feature (1)..(1): n is a, c, g, or t
ngcttgctattctcaaacatctgtagtctgtgtgaagaaaagttctcaaaaattttattacaaaactgaacccatgacagaatataagcttacacatgtaaatagtatttacattatatgcaaaacatattacagctttaatttatgaaccgatatatcctggtttttcttctttttcttctcggttttctttgcattgctgatttgcattttcacttgatcttgtaatttagaaaagaatgcctgagatgattttaaggctttgtctttaccttcatcctgcaattagaaataacataaggtcatgctgtaaggtattatgcttaaagatgaacaaaaacaaatgactacaacagggcatcacagtgtaaatgtggaaaagaactagacagaattatgagagcctgcgccaattagagcagaagtattatacacattttatacgactacagtggtctcacaacgtcaggtgaccatgagcccctgcacttgaaatccaaggtttgggctgtaacacagccagtgcccacagaggcctcttccctcccctcccatccctttccctctgtgggtgagcttggtcactagatgcccaggtcacctaaagtgtgccactggccctgtattcaagccccctgacacctctcctccccgtcctcaccttgagcagagaggcttttcctgtcttggtcagctgtttcagcttctcagaggctactgctttggtgtatctccctgcctggtctgggttattcttttcaagaagtcttctccgcttttctttctcctttattttcaaatgcttttgatatttctttttcctcctttctcgtttcttgtctgtagctgttttctcagcagctgtttttatatctccagctttatttttctcctattgaaaaaccaccaacaacacactcattaatctaatctaatgacttcggaaactgtaagagaagcaactgcatgaactgtggcccacgtgtgagaagcagcctgacccgacccaggctgaggggctctgaccactcagcgatgtaagacctgggaagcactataagacccgggaagcactgtaagacccgggaagcactgtaagacccgcgacgtgtgctctgcatactccttcacaaaggtggcctggagagcatgagtgtcagccttcccctcttggagaagcaggcagaccccatcctgggttccagggacctgcctacggctgcccagctctgagccgttgagggcaggaaatctagctggtgaaggtccacttcctcccttttctcctctactccagcccagcctagggtaggaggcagaggctctgaagggtgggtgtgggtggagcaaaacaagtaagcacaaaaatggagggctctgctgccaggctg

SEQ ID NO: 36847 - DNA, 768 bp, Bovine  19866881402013
  misc_feature (1)..(1): n is a, c, g, or t
ntggaaggtttgtagagtttatagaactttactatgtaagttacagaaatacaattcaaatgtaaaaaatactgtacaaacaaaatctttttttttaacatcacctcactgaagtgctaaagcaatgaatggccaactatggcctgccatctgtttttttgtaaataagtttttttgaacacagccatgcgtattcatttatatatcatctataactgttaagtactacaacagagttgtatagctgagcaaaatagttgaaatcctatgacatgccacacctaaaatattatctggcccttcaaagaaaagtgtactcgtctaaaaaaacagtgtgctgttgtaaaggatataaagcagtatctaggaaccctgttcattcaattccaaacatttacataactcaagtaacagttgtatatggagtaaaagctgaaagatctgacaagtctttataaaacaaaattatgactttttagaacagactaaataactcacttcctttctgtatggaacaatcaggacatcattaacctttccaaatggttgaaatatttttctaatttcttcttcactacagccatcttctggtaattcagatatcagaagaacaggaccataatgtgaagactggtccttccgaagctatttttgagatgaatgaaaattaaaccaaattaagtgacaaagtatagttacaataattcccaatataatttttctaccatttatcctagtacattaagcaatcttttttactaaaatatt

SEQ ID NO: 36848 - DNA, 1145 bp, Bovine  19866881460710
  misc_feature (1)..(1): n is a, c, g, or t
ncttttcatgcccctcaaaaccataaagacatatgcccacagccagccaccatgttgattctgccgaactctacactctcatgacaaaaagaatcacttaattatttccacaagtggagcactgggccttcagcctcttgttgacactccctgcagttctgcctccatgtctgtcgagggatcattactctgcttactctgacttcaagctggaccagcagaagtgggagggaaaggaagacctttaaccaaaatgctgaattgcttccaaaaggcccagtgaaaaagtgtgcccgaaatctggcagtcaagcagatggtgaacagaaaagggtcaggacctgacaatttgactattggcctgttccagatggagggcccaagtgaggtgggagacttgtgggaaatgtctttccaaattcagaagcctaaggtatgtatgtgagcccatgacttagtcctccaaggacaacatcaccccataacccatgtagaaagcccaaacaaatggaatctacccagtagggtgaatgaaagacaatcagagtcttcaaacctgtgaagaaaacaatgagacacggctaactcagaatctgtgatgattccaacaaggcctgggcaaaagcttgtcttaccttcattctgcttatgtagacagttttgcttaacaaaagttccaaccagctacttaagagaaaaactatttttgaaggccttcccagggctgcagaagcattcatcaaactacagacactaatcttagctatcttaaattcaattttaaaagtattttgggggagcctactatgtgccaaagtcaacctgctttctagttactgtgtgagttttcatacacaaagtcatatcactttccaaatattctatattttgaacttgctgctaattcaagctggtttcccatgcctccgtgaacgtaagagaggtgctcacgtcactgggcaggttgataagctcctttggggcacttgtactcagcggtgagcactgaaccaacttccaagcgctgtttggacccaggctggggagtaggagggggcaggggatgatgacaggcccatcaggggggaggaaggcattaaattagacctcagagagaacttcctgtcctgtagatttcaaggaaag

SEQ ID NO: 36849 - DNA, 816 bp, Bovine  19866882016118
  misc_feature (1)..(1): n is a, c, g, or t
ngacaaatggagataaccctcccttgggaaggtgaggccatgatagagaccctcttgggagggaggaggagatgggtctgaagcacctcgtctaggtgggcttgtcttatcccagtcaggaggattctggaacacttggagggcctgggtacctgtaggggggttggggggaaaccagactggagaatctgggaagcaggtgctgggggcacaatgaagacatggtgggcatcaatgctggagtctatagaggctgctaaggagctggaggtgagagaaaaccgcaataaaaggcagcctgggaccctctcagttcccatcctcataggatggcggaggagaaaggagagggtggggagggccaaaggcaatccctagacgtagagagctttgactcaagggtcaagggaacagctgggaaagccactggcacatctggccaggctgggctggaggagggttagcctgtgcaggcaggaagccagagactggtggagagagatagggccggtgtttattgccctgccggctgaggtgttgcaacaggaagagggctggggggaggaggaggcggctcaggcggaaacaatttatctggagcacgaggaacagctggggagggaggccagctctgctgctctccaaggccaagtgagatgcgaggaacggatgcctggtgccagcgcagccagcagtccctggctcctgccccctgcttccccgctgccctggaatccagcccctcggtcctcagcagggtcatccgtcagccgttgcccagtcctcatcccctgctctgctgcctttcccagtagg

SEQ ID NO: 36850 - DNA, 734 bp, Bovine  19866882124401
  misc_feature (1)..(1): n is a, c, g, or t
nggcttaagctatttagatggggaggatggatattaataaaatgagagaaggtttggggtacatcagagtggaccccaaagaagggaatccccagtcactgttggtagcccaggctctgagcctgagaaatggagggccccgcccctgctctgcattgcccagttggttaggaagcagagagaggaagctggtagccaggaaaacatcttggaccatttttttccactggtgaatcagaggagagtggtaatgggagccaggctgacctgaccccagtcacctccatgagtcatagctgaggtccctgtgctaatcttaacccctcaaagaggacttgttgggacttgccatcgagacttgaccgccaaaatactcttggagctgatgtcaccttgggaaggcctggcccactctggcagggttggaaccagagttgggaggggctggttagagtgttagattctgcctccggctcacctgtgaccttgaccaggtctctgtgaggagttcaactcccacggctcccagctctgacattcccccagagctcagctgagctgggatctgagagggccagcaggaagccttcaggccaagtctggccctgtcctcatcatcagcaattgcccactgaggacctgactcctaaagatgggcagcaagttacggcccatcctgggtggggggcccagccgctctccaaatttgttgtgcaactttggaccaattgctt

SEQ ID NO: 36851 - DNA, 774 bp, Bovine  19866880446479
  misc_feature (1)..(1): n is a, c, g, or t
nctggacgggaggccccgctcccagccgggcccgcccactgcgccggccctggcttcggggccttgggtgccctgagcctcaaagaggaagacaaattcagttactgtgggttttgctgccaggcgccagcacgcagtgggggacttggaactgtgctcaagagccaagggcgaaaggggcggaggagggaggggcaggcaggcaacctggggctcctggacccctgctgctgtcactgatcccaggcctcggggaggggtctggggcagagagcagcccacataggccgggtgagacagacacccagtcctggctgccgcctgaagccagagtggcctcccgtgtttcccgcgttcttggctttggtcttaccacctatagaatggaaacagtttggccatcgaccctgggcagtcctgcccacaaggaagccagagttcaggaaggtgtagaggagtggatggtgggcgtggggtgaccaggctgggtccccagccccacacctggccctctgcaccagtcactcactgtacccctgcctgtcgacccccctagcatccttggcatgcatctctttggctgcaaattcagtctgaaaacagataccggagacacaatccccgaccggaagaactttgattccctactgtgggccatcgtcaccgtgttccaggtacagctgggcaggccgtcccctgctgtgcacgggtgggttcctggagggccatagccctgctcagagctggctgaggcccctccgaggccactggggg

SEQ ID NO: 36852 - DNA, 1244 bp, Bovine  19866880489199
  misc_feature (1)..(1): n is a, c, g, or t
ncacgcaccgcggggctggccggcactcactgatccacaggtggatgtgatacaggaagaagcggcccagcacctggtccagcgcccggttcatcttgagcccggcgggcgcacccatcaaccactgcagcagatgctggagctcctcggccacacgctgcaaggatgggggtgtcacccggtgacccacctggggaccctacatgagcctgggggttcaagctcatcaggggcccacgagctgggcaggggtggggtagctgaagggtcccacggagggaagaatgacgaggggtaagggtctggcacggggcctcacaaggagcgagtaagccgactcccatcctggccaccccaggaggaacacggtgcaagcacggcaggcgggccctcaggcctgggcctcggtacccatggggggccacaggcgccctgtccctgccctgtctgccagcccctcctgcctgcacacaggcctctcccagccctgggtgatggcctctgctgcgtctggggcagtgagaagggaacagaatgttctttataaatagagcttatttaatatttaaagggtaagagcttggcagcaggaagaagctttcatttttaaattaaatatttatatttctgagcaatcctgcagaaaagaggcctaggataaaactggccgaaaggcaaagcgaggatgaaacgggtggagtggccgagccccctcccagcccccaggtcccccctcctccctcctgggccagcctcccttagaagctacgggacttggcctgcgggctcctgccctgtggggtcctggccaccagcaggcccagtgcccacctgtgactggagactaatgatagcaggagtggctgagcccacaaggatgctacagtcagatctcagcggcttgaccacacccagggccgagagggccccagaggcctgggaggggtgctgaggggctgccctgggcaaaaagacaagctcccgatacaagtgctgagacggcagagagaactcagagcctgtgtggacggacagcaggcaggcggccatggctgggagaggaagccggggcttctggccctcagtgcgggagccacagaaccggcgggagggtggcagacgggaggctgagtgcaccacagagagcagcctggaggcacggggtctccgtgacgctgacccgctgaccgtgcacaggcctgggctgatggccaggagagcagaaacgactgtgcacagcgggg

SEQ ID NO: 36853 - DNA, 1412 bp, Bovine  19866880747565
  misc_feature (1)..(1): n is a, c, g, or t
nctgtctgagtgaggacggcgtgcaggggatgttgtcagagagcaagtgtgttgtgctgaaaggctgcatctccatcagccctccccacagggtgtccctgagcggaaagcagtaaactgggctccctagctggaggaggaggtttcccttggtggcagcgaggggcacggaggtccaggagccgcgctacagccccatggcctcccatgtggccagttctctcggcagagtcagctgcggcaagttttgtgtggtggttagacagcttcccggcagaatccccggagaattctaaatttcagttgcactctctaaattttcattaagagctttcacccagagaaaatgatggattagattttatcactggaaagaagccagataaaattagctgccttttagtccccacggcacccccctcactccctgcttttctttaaagtccctgcttttctctctcggttcccaggaaacaggtgcctgcggatgtttattcgttgaaaatactgatgttggaggctgcctttgagcctctctgcttttgttccttcagtgattttgcttttactccaatctcctcaagtctgggacagctttgggccttgggctctgcattggagagtgtgtggtttctttcttctcctcagtaaagcttgtttgttgttagaactttatagccgaaagctgtagaatatttttgctgcacgaaagaaattccttgtctgtcttttcttttctctcccaaattctccttcttggcaaagttaacctgtgtctcatccatcaaagtgcagttaggagtttgcctcccaacagccacttttagcaaagctagcttctgagaggtgactgtcttttgttaccatgtgtggatggtgaattgtgaaaacagctgttatttcttcccacatcagtacaaggaagtcagattattctgcacaaaaactcaggcttagatcagtctggaggagctgaaaccatcggggaagccgggggcgaggacattggagttattcatgcgggtgtgggttcctttaaattccacgtgcttttggcttctttagcacaggcactaaaactgaaacaataatgagcatggcccctgcccaaggatggggattcctaggtggctcagtggtaaagaatctgtctgccaatacaagagacgcaggagacagaggtttgatccttgggttgggaagatcactggagaaggaaatggcagccggctccagtattcttgccgggaaaattctgtagactgtggagcctggtgggctacattctgtggggttacaaagagtcagacacaactaagcacatagtgtgtttgtgtgtgtgtcccgtgtgtgcacatgctcaaggataacatgcaaataaacgcatgaagcatctgtatcttttcatgatt

SEQ ID NO: 36854 - DNA, 800 bp, Bovine  19866880771305
  misc_feature (1)..(1): n is a, c, g, or t
nagcgagtgcagcttgggcagggggatggcaccgatgtcgccgcagccgctcagcccggggagcgcggaggccaagccccggccctccagctcctcctgcagccgtcgatattgcgcctccacctcctccttcttctgcagcgccagctgccgggcactgtcggccgcaagcgcccgctccttagcctccttggcctcccgctgccatgcgtcgcaggcctgaaacccaggagccgaggtgaccctgcggagccggctccccgccccacgccctgctcagccccgcgccccgccccgtgggccccgccccctgccccgcccgcccgcaccgtggcccgccgcagctcacctgcttcacctgctgccaggactcctcccactgccggatcttcctcttggcctcatccagctgcctccggacccgggccagctcggcgctgctgggactcacgcctgaggaggccgcgggcccggcgttcaggattggggatgggctgggagagaagctgccagagacgaagtcccagatgctgccggggacgccgttcaagcctgagtgtggaggagctggcgtcagcctgctcgagcttgggcctcttgggcatccccccagccagctctggggaccccagccctgccccccgacaaggacgcctgcgccatcactcgccccaagagctgtgtcgtgggggccgcggagctcagagcctggtcccagaaccctgtccacacttaggacctggaggaccccacagggtttctggttacctgagtgacatctattgacgtatgtgacatca

SEQ ID NO: 36855 - DNA, 1862 bp, Bovine  19866880787528
  misc_feature (1)..(1): n is a, c, g, or t
ntgaggtgttggtgtgcacacatggcagggcccactcctggcactggtcacagcccacaggctggccactgggggcctggcctctgctaccacaggcccaagcaccctgaatgccagtcccagcccagggcccctccaagactgaagagatgagggtgtggggcctcctgtacccctgggaccagcccttggcaggctgggctgggccatggggggcacacctgctctggggagggtggggggcttccggggctgcagctgttagtccctgggacagacacagcctccccagcaacagctgggccggaggttggacagccaggagagcagagcccaggctgcccccggcccccctgggggttggttacagcggctgcagatgcttggagacgatggggcggggtggaggaggggagcaccctgcccagtccccaggtgcgacaccaggactcccctgggtgggggtcagcatggacgtggctgtccaccccctcccatggcccagggatcttgccacccacttgaaactatccctcggcctcccgtgctccaggtctgaatctctgatcagcagccatctgcagcccaggatgtaggaagacccctttccactaaccctctgggcagcacatgggatcccccaccctctccccaaggctgagtggaggtgggcagggcagggggcaagatggaggctgggggcctcggtggggcaagcctggcggataggggtgagaggggctgccccgcgtcggggccacagggtcattgtgggtgccccagaacatggcaggaccccatcggctctccaggtgtcagcggcccaggcttgtccttcactcctgcagtgcctggtctcacttcccatgcctgagattcgggggtccccaagcaagggacaatgggtctcaccccaggcctgggagcagactagataccaagctccagccgaggagctgccataacgctgggcccttctctctgagccatgtaggtcctgaggtccccatcatgactgtgggctgaagcctccccactggccaccttgtctcggagggacagtacccagatctccgccttctggtccgaggtggccagggtgctcagactcctgcttaagtgtttccaggcctttctgctaacacatgaatctgcaggcccccaagacccagccctgccgtgaggacaggtccactctgcccagaggcccagggtctgcacagcctgcccaccctggatcccctggcctctccgggccctggggctgtctgccggcctgcctggcctcagtccctgccagccagttcagcaaaggacaggccaatcgtcagggccaaggactccctggcctggccaagtggggccggttttcaggactcggggattttgaaccagctgctgtggcaggtgtggccggcccagctgagcagaggcaccggccgcccggagagttgccagccagctgctggagggtgcggggcagccaggctggcccctcgcccgggcagcaaagccaacagagggcggacgggggtggcaggaggcccccacagcccgcagggttcactgctgccccaccggagcagggaccgcaaccggcttctctgggccctgcggacggctggcggtcggctggcctgaaacccccggttttcaatccagggtgggaaatcttcatcgtccatcagaaaagaggcgccgcaagcagagacccgtgccccagccccacgtctcagcctcggtcgcagggccctgaggcgctggggctgcgtcaggagcatttgtgagctgctcacacctcccagtggccactgccagctttgttcgcagggattcacagaggctgaagggtgccgggggga

SEQ ID NO: 36856 - DNA, 1814 bp, Bovine  19866880789250
  misc_feature (1)..(1): n is a, c, g, or t
ncgagcaggggccagaggctgaggtcacaggctagtcagcttcactccccgccacacgtgagccccctgaagcacaagcacaggagtcactgcgttgcatgagcccaaaggacagaaagcctggttgtgtgtgagcatggcagggctcccgctaagcagggaactatagggttaaactaacaaaaggctgagagcccacaaagactcagagcccacatccaggacagcctggtgagcacacagccacctctcccacggctgcctccacagggaccctgtcttgcccacaccaagccccccttggctggatgacatgcatccaagacttaaaggatgaacaagggtctcagatctctcaaagctcgagcatctggactggcaccaccccggctggtgctcacaacaaaaagggccgcctgtgtctggacatcacagtaccaaggacgcaccaggcatgtgcggacgcgggcggggctgggtgaccacagcagtgcggggacccggtgcctaggggagctcagagacccacagccaaggcagggaagtgcagcatctgcccgccgtctgctcggtgtagctgatgcttgtaagactcaacaagagcacaggatccctcacccatttggtgctgtgacccccaaagccgatgacccccttgagcctcaggatcggatctgggaggaagctctgaaacaggtagacgcacagtgagatccagggggcaaggtccctgtcgcagcagggctaccccgcccagagccagttccggcctctcaagaaagccatccagtcctgagctccggccagccactctgcggcaggaagccaggactgcagtcacaatgctggatcctccaggtgccccagtcctgcggaccccccacagaccactggggctgggggcagggcaccagctctcttactctttgttgaaaacgcttcttgcccaaagctgcctccggtaagctctgcttcctgccaggagactggatgggaagggaccatcagaggggaccacccgccccttgcctattccccgcaggcagtagcccgacagccctccatccactactcatccacatgcaaccccctcgggggtgcagtccagccccaccttcctcgggaaaggccctcacctcatgcggagctgcatcctctggggccgcgggctccaccgtcggctgaccggccgacacgtgaaggccgtcaccagctgcatgctcgtcagtggcctccgcccaggctgagggctcctgggtacagccaccagggccagccacacgggagacctctgagcgctcacaggacatgctgacctccggaaggggcctgggcatggagggggcccagcgggactgcaggaggacaagtgcccatgagcaccacaccttagaccagcacccacagccccacctccaagggcgccgggcactcacggctgcggggtcatgcttctggaccatgagggccctgctgtcccgcgcaggcttgctgcaggccactggggaagggagcagccgtggcacgtgccccactaagactgcagcggagaagaaccgactgagcagagtgcagacaggcacaaggcactgggcaggggcggcagggggcctggccttgccccctctgcaggagaggggccacgccgacagcagcagcccacctagcaggggccccaacacccatcccagcagcaaagtttgaggccccaagcactcaagtcacagcctcccgctgctccagagcctcaaggccacctccctgcgcccttacaggcaccacactgctggggtccccagatgcagcatcaggac

SEQ ID NO: 36857 - DNA, 1094 bp, Bovine  19866880802543
  misc_feature (1)..(1): n is a, c, g, or t
ncccttggaggggtgggggctggagacaccaagatggttcccacaaccgagagccacgtggtgccaggaagctgccacccagtggcacactccaggggtgcccaccatcaacactggcctggaaggctcctggccagcctgacctagggagacccagggtgctggagggaccagccctcccagagaccccatcagggagacagtcacatctatcagctctcgcgggaagcctgaacaacctctggttccccttcacctgcacagcgccccaccccgttcccaggtggactctggcctggcccacctatgagcctgtaccttaggaaacatggcaattttcctcccttgacgagaagtccactgactccctcccgccgccccacatacaccttgcatcttctccaggagccaaaaatgcagctgcagattgatttgcagctgagctaaaaataaccgccaggctccagccagggcccgggaaaatatcccattgctaggagacaacgttactgggaaaccgccattgctaggcaacagggttgcttggtgacagctgggccctgagtcatactcagccctggccactccaccccccgcaccccctcccctgccttggtgagtcgggcctgggtcccaggaggagggaaggcagggagcaaaagctggaggcagcagaggcctgcacccaccgcctgccgcctcccacagctgccagggccgccccacgcttcgagattctcacttccctgggctcccattgggcttcagagtgctgaggaccgccaaacacacctgtggcctccccacgccacgtggtcccccccgcaggccctctcagggggacgcctgcctctgggtggggatcaggggcagtgggggcacagtgtccatcctccctgcgggtccagggcagcctgacctctggggagcatggggctgtcctgacctgcactacatgaggatctccagggcgaccccttgggccccagactcactttccaagaggggacctgcttgtctgaggccccaccccgggagggcggacctgagcccaggtttgtgatccctgagcacacacctcaccccaaggaaag

SEQ ID NO: 36858 - DNA, 1228 bp, Bovine  19866880802824
  misc_feature (1)..(1): n is a, c, g, or t
nctgagagaaaagaactcacggcctaataggtccttgtgttgccagcccacaggggtgtcagaatttaggggaaggatttaatgagctttgttggattgtgttggtagataaagaaactgaggctaatttgggcctttcactggtcactcagcctcagcgtccctgcatgtatctctgggctttaaagagtagagtgacatgaggggcaggcatgaggagaccccccacccaggccaggcctctcttttttcagttcactaaccgctgccttctcaagtggctgaagctgtgggacctagtcgtgtttggccgagagaagcctgtccagaagcctaggcccagtgcagaaccggcccgtggtggcaaggaggccacagcttccagcaagtggaagagccatgaacaagttctcgaggagatgctggaggctgagctggacccaagtgggcggccccggcagaaggtgagtgcacctgactgctctgcacacatgtctaatggcttattctgggtggctggtgcctttgcagccttggggggccatgaggcacatttactgcccccgaggctgtgatgatgtcagtgtcttggtgtggagtgtcagcagtttgagctaggacgcgagtcctttcttctaatgacttagacaaagtcagcactacttgaagggccctgcatcttcccacagtgattacactggaacgtgggtgggtttcaggcgtcagtcatggcagtaacagttgtgtctgtgtccgatctcaatgccactcacctgacatgagcctttattgtttgcgccacgagcaggcgggggcttgtcctcctctggtgataggggcagggcagggcaacatcccctggcactgcactttgtgggatgggattttgtctctggcatttgggccagggactcccaaagtctatgaggcggggcgggttgcagcacattttctcctgtcctggctgcaggtggcactgctgtgtgggcccccagggctgggcaagaccaccctggcccacgtgattgcgcggcacgctgggtactgcgtggtggagatgaatgcgaggtgaggggggaaggctgggcctccctgtgtcctaacgtgtctggccgactgggacacagccctgaacgcctggtttggaggtggggtctggtgtcccaggtgcatgaggcggcatggtccacacacctcagggctcctgggacttggcgtggtgtcaggg

SEQ ID NO: 36859 - DNA, 2081 bp, Bovine  19866880806951
  misc_feature (1)..(1): n is a, c, g, or t
nagcttgagaccaggtgtaccaaggcctgaagaactcccccggcctgggccctgcacttgggggacgcgggtctgggcgcggggggaggccctgcggggggccccaggtgggctaacccccagtctcctgtgggaaggagccccctgcagccagccttctgaagaccctgggccccttctctggggacagcctgccggctgtggggggcggggcgggccactccaggctgcgttcccatggaaggagtgagcagtcccctggggtcgctaattcaggccgcgggcagctgtgcagtgtcgcggaggcggttatttctggcctggagaattcctgcccggagcgggccccacgctgggctgtcatcttcccgaggggcccctcttggctctgtgccgcctcatcctccaaggtccagggctgtgaggagccccccaggaaggaccaagatgggcagaagtgtggctggaaggaggcctcacctgggaaggctgggccctcctgggcccaggacagagccagcggggcggactgttccaaggcctccactgctccccgcgggagccaagacagagctgtgacagaaagctctgtcgggaaagctggaaataagggagggaaataaggctggaagggttttggaggggcagcttgggtggctttacttgcaggcaggaacattcctgggcgggggctatgggccaccaagtgactggcgggatctccacaaggcttggtggcctagacgtggtggcttcttgcgggtgtggtgatcggcagtggagaccaggcacttttccctcagttatgccttgaaaaaaatcccaaatcaagctctttattaggagttgaagggaaccattagcacccttcgtaattagcacagtcttctgaattgggtgctggtaccaggagctgtgggcatgtggtatggttctttggtgtcctgcagtcctggggggggtcttcctcccgagaaagaggagtgccaggcccccccaaggccaccacctgcaagatgcacacgtggcaatttgcacgagcttgtgtgtgtgcaagagtgcatgtgcgcgtgatggggtgtgtgtgcatgatggcgtgtgtgtgcatgatggggtgtgtatacatgatggcatgcacgcaagagtgcatgtgtgtgtgatggtgtgtgtgtgcataatgtgtgtgtgtgacggggtgtgcatgatgtgtgcgtgatggtgtgtgtgcgtgacggggtgtgtatgcatgacgtgtgcgtggtggtgtgtttggtgtacagatgtgtgagcatgtgtgtgcacagtcttgcttggatgcacgcctggggtgtggatggctctcaggaacaagcagagcacagactcgcacgtgcctggcacgcgcgtgccaggggcgcaggcccgctcttgcagggatctggctgcccaccccctggccccgcctggctggaggccaggggctgcctctgctcctgtccccctcctccatggcacatgggtgtggactgccagcgtgagaacggcgctctcccgatgagctgagtgagaactctcacaggcggggcgggggcgtcggtgccccaggctgctcagggtctgggcgccagcccacatcatgcggccccagggcgctgggggaggggtgtggagcagactggggtcagagcgggcttccggggagcctctagactcagctccggaagtctttcggggccgccggcacagggaggggctctgaggacacaaagttgggtccagggggagaaagaacgttccggcagcctcagcaagccgcttgtggggcgataagcacccatcactgggctgggtgggtagtgggctcgcaggcgcccgggaatgcgctctacctgggacagtccagcacccccagtaccccccgcgtgacctcaagcctgtctgagaacaaacagctccatgtttggccggctctcgctccccacccagccggccgagcagactgagtgagtcacacgggcccaggctggggcgggggtgggaagaccggccccgtgcgccggggtctgagcaggcggacagtcggggaggtcagtgggcaccat

SEQ ID NO: 36860 - DNA, 2966 bp, Bovine  19866880940306
  misc_feature (1)..(1): n is a, c, g, or t
nccgttcccccgtgcacgagtagactccccgtcagacccccccacagaagaggtctcctgggcgcccgcgctctcccgcggtcctgggctgtggggaggcccccgcacccttgtgtctgcgctggtgccagccagtctgcgggctgccggctctgaccgtctgggagcagccgctccaggtgggaccgccaggctaagcaggtcggcagcagcacccttgctcgcaccttggtggaggcctgcacagccaggagccccgccatggggctatccaccacacgcccagccgcagtagggagcggcgctccggacgctcctgagaggcacctgcaaacgtgtcagctcctgctcaccaagcagaggaggcccagcctgcactgtccagtccaccatcggggggcacgccccacctggtcagagcctgggccccccacaggtcccctgaagccagtcccctcatgaaggcagcgagtgggcagctggtctattcacacaactgctgcttccctccgtgcagcctcaaatctcacactgacggctggcacacaggccaccaggagatgcccaggacaaacagggatgagcagggccccaggagcccccgcactgcacacagcccagcctcggagctcctccctgcaggcccaccaccacaacccgtgtccgccctctggcatctacagcagcccttcccacagggctggccccgagcccacagctgccgcgccctgcacagggtgccacagccctgcagaccccatggaggatggccgtgcaggtcttacctgtgcgccccgcgagtaggacctgaagatggtgcagaaccggccctggcccgaggtgtccctgaaacaaagtggggggatgcgacccatgggagcccacctgcatgaaggaccccgcccctcccgctctgcatgtgccctgcagacctccttggcctggacactccagaagactgccctgtggggctggagaactcaagtgcgggggaagtcacacatcaactgcgagggtctccaaacgccctcaatgtggaatctggtagtgacaaggagggaagggccggggccccctggaaacacgtctttatgggcaaaagggagccaggctctgccaggacaggcagccctgaccttctggtctctgcgtcacatgcggtcccgtgtctacacggctgctatactggtggtttccttaaggacccgactgacttcaccccgctccctggccccggcaacaagggaagcacagcagcccccgcccaggcgtctcggcgcgcagcccgactcaccagagctccagcttgacccgccggccgtccagcaggatggtggttgtcttgtagtctatccctgcgatgaagcagagcgcgggtgagagactcgcctgaccaggacccggtctctgcggcccagaggagacagggctgcagctggggagcccagtggctcctgtcatcccaggggcccaagggggtgccaacgcgccagccaaagggaggggtggttggccctcagcgctggccacgtcacacgcttctcagagctaatgggtttctgagctcctgggctcacccaccacccaggtgctgacaactggagtgtgcctggagcactgttaatgacaaagcggcatctgaaatgcttcttctctggaaagctctcaaagaacctctgctggccacgtctttacttttcattttttgaatactttaaaaattgaagtatagttgaattacaattgcttcagctataccgcaaagcgactcagttttacacggttatctgttctttttcagagtcttctgtcataggttattataacatactgaatttagtttctgatgttatacagcagttccctgtttattactttctcatactttcatgcggaaaaagctaaataagtcccgtccctggcaggggcagggacagtgatggacgcatcgccttacaccaagatcttcaactggtgtccgaaaagctgggtccttcgtcctcctccctggagccttaggcatccaggttctcgactgttcacgacacctgttccagggaggcttggaaatgggcattttccatgcagactctgcacgtgggcagactccaccacagcgctgcacgaagggcccgagggccttccaccccactcactgctggccacatgtcaaagcctggctcccacccatcaagacactcatcagaaggaaaacgtaatccacaaaatgggacatgataaatacttgcaaatcacgtatctgaaaaaggaccagtattcagaaaacataaagaaatcttaaaactcaacaaaaagaatccagttaaaaagtggaccaaagacttaaaaagatgtttctccaaagaagatatgcaaatagctaataatcacatgaactagggaaatgcagatcaaagccgtatgagacaccgcatcacacccatcagatagttattatcaaaaaagcagaaaacaagcagtgttggtgaggatgcagaggaactggaacccgtgagcactgctggtggggctggaagatggcgccgccagcggggacagcacggcgctccctcagaattaaactcagagtcgccaaggaatccagaacatccatccaacatgtacgtgtcgcacacgcatgcttacggcagcattattcacgacagctaaaggacggacacaaccccagtctctaaagatgaaagaatgaatcagcaaaacgcggtccatctgtacaacagagtatcatcccacctcagagaggaaggagagtctgacacatgctgcaacgggaatgaacactcagtaaaacgagccggacacaagacaagcactgcctgaccccttctggcgaggtccctggagcgtgagcctcagacgaagactggacggagagaggccgcctaggaccgggaggcgtgggggaaagaggtgctcaacgggggagtcccagctgggaaagtgga

SEQ ID NO: 36861 - DNA, 1054 bp, Bovine  19866880986001
  misc_feature (1)..(1): n is a, c, g, or t
nggtcacttttttttttaatgtttattattttttaaaaatgtatttggctgtgccgggtttcatttgcaacacgcagaatattgtcttcactgcacacacgggatctttagttgtggcatacaaacccttagttgcagcatatgggacctagccccaccaggaatcgaacccaggccccctgtattgggagtgtggagtcttagccactggaccaccagagaagtctctggacaggggctcgttgtaagccctggtcttggcttggagccttggcaccacaagggtgccctcggagtggggacgtccacacctcttgcatctctcaccctcaccccaagttgaggagtctgacctccatcccgaagactgcagtctggggcccccagtccctctgcccctcaccgtcagcctcctttctgcccagtgccagcgcttccctcctgcaaggtttctggtgccagccggcaagccagctgtcccgcgaccaacttgcagctctcatcaggaggatggcaacgcaacatgtcctcctcagagcctggcaggtcagtggcagccaccaccaagactgcttgggggtcgagggcagggggggactccctggagaagggccccagggacaggcaggaaggaggcgcccctagcagggggccccgggcggcacaaggccaggatcggggtcaggacgcagggtagttctcctggagcgcgagggccactgtaccgacagtcttattataaaattaatgtaaaatcagtaatacatttgacatgacctgaggggaacgggacaagatgtccagcaggggtggattgggtaagtggacccttagtgagccaccatggtggggcccgacaccggaaggggaggggctctggggctggtgttccctgtcctgttctcacctggaggtggatgcaggaagaggcggacaggaagtcaagtgacagagagctgccaggcaggaggggttggtggacacgggacagaactgagaggtgggtgggggctccagggaggtcccagtcagaagcggagggcccaggagagcc

SEQ ID NO: 36862 - DNA, 626 bp, Bovine  19866881022419
  misc_feature (1)..(1): n is a, c, g, or t
naaacccggggccaatggtgaagagtatggctctgtgagggaacacagcagtgcccagccggcccgactcgagtcaccagcactcaccagagaagccaatggccacaaggtgggccccagggcacagactcatggacacagcaaagaaaggcagcgggatcttctccaccacctgcgggcagcaagcatgaggctctgggggaggggcccctggccctgagacctgtccctccccagccctgggtccctcaggctcccaggaccacagcgaggtacacgtgcctgcttctggcggaggctgtagaagaccacctcagggtacacgccgaggcctgcacacaccagcaccgccgggtcccaggggcagaaggcggcgagcgagggtggcaagcagccgggaacctgtgggggcacagtgcagggtgggagccgggggcactgcgcccacggggccgccgggactcttacctctgtgaggccgggtgctgggaagctcaaccaatccacgagctcacagtggtcccgcagccagtcagaggcccacacgctgactcgctggtccccgctggcggccagccacaggtccgtgccctctgccccgaagtctccacactggggaacaaggg

SEQ ID NO: 36863 - DNA, 1116 bp, Bovine  19866881058158
  misc_feature (1)..(1): n is a, c, g, or t
ncaagcgaagcctgaggccgggggagcagagcggctcctggcaggacggccactcaccggacgtcacacacgggcggccgcaggtccagcgggccgtgggcgaaggcgcagtgcagcccgttcttcacgcagtggccccgcgcgtccgtctcgtggatgcaggtgcccgtcttgtagtagcgcaggtggtacttgcgctccgtgtccccggtcgtccggtgcaggtacggacacctgggggcacaggacagtgcgtgtcggggcccacctgctccccggccggctggcttgcgtcagcttttcccagatgcctgctctggtcggagggtgaacagcaccagagccccatccctgccccagacccctcacatggccctcagaccccacgaagccctcgacgacacgtgggaggaaagcacaacacccaagctcctggaaaatcacccttcgtaatttttttgaatcaagtggaaaacaaagttcccatcagacaagcggctggcagcctctccctcctcccatccaggtgcttccggggacccctcggcagaggcggcgctggaggacgctgtgggggacaggccggggaaaagcgactgggggaggacgggggcagtgtccctggggccacacaaagacccagagcctcacatgcccagggagagccacgggcagctccaggagcaccaagggtcagggtcaaggccaaggtcaagggtcccacgcagggagatgtcagcagtgagatggcatggatggtcccagcacagacatggcgggaatgagcccacctctaggtcggtccctccagacaaaagccatggacacagaaggatgggacaggagcccctctgagcagccccaggacggcccgaggccgatgcaggccacagctgcaggcccccaggtctaagaacacggcctcggcccctccccgagacagcaaggcagcactgtgtgggagttggaaaaggcccactcctgcctcactgtcaggcaggccgtggcccaggcgctgggagcacctgtgggggtgtgggggctcccgggcagagcacagatggatgggcaggaccgagggtaaaaggaaagcaaccgaggggcaagcaatccgca

SEQ ID NO: 36864 - DNA, 898 bp, Bovine  19866881641982
  misc_feature (1)..(1): n is a, c, g, or t
ngccccttgtgagctgtgacatttgaaaaacaaaaacccaacatgagagggggcttttctttttggtcagttttcccttaactccttttagggtgtgttgaaggtcagccactacggtggctagtgacttcatttttgcagaaccgggtggctagtgccagtctttgttggcagctgcaatttgccacctccctggttccgcacctttgcctcgagcatattctgcacctgctttctggtgggagaagtgccagcctcggggatcccgccacaccccaggaatgctggagacacttgagcaagggtggcggaatggaggtgttcctaactcagcagcacctgggaagtctccccacctggggaagcccaactctgaacccctggtggtggctcagctccaaacccagggctgtgtccagagctgctgtgtcaacagaggtgcctgtgtgctcacatcctcctcactgggctccgccccacctgttccaccccagaaccccacccagagtcactgctgaaccagttcagccacagggaaccccaggagcaccaactataggcaggaggatggaccacaatcattctggtatgcagcctgtagggcttcctggaggaggcaaagataacttgaggaggaggttaggggtggagctgctgactgcagcttatacaaccacctggttggtctgttttcaggcatctgggcacaagctgccctgggccagcagagggggcccagagctggggaggtcaagggcaggggctgatgggggagctgggaccccacccccgtgcaaggccgcctctaaagggtcactaaaactgtcttgatgactgccttggatgcgtgacagaaattagacaccggacaggcacctcttagcctctgcttcctcag

SEQ ID NO: 36865 - DNA, 957 bp, Bovine  19866881793423
  misc_feature (1)..(1): n is a, c, g, or t
ntagcatttatgcaatggtttacagaattcatggaattatttttatcagtatggaaattaattaaaactctgatctttattttgtctgcatctttgaggacaacccccgagggcctgctggctcagaaggagagaaaggtccttaggccgaagcccacagtcctgagggtcacagggtgtccccacgcagtccagggtcacctcgcaggggctctgccatcccggccgtgggcacctgggggccccagtgctcagagctgggggtttctgccgaaacaccagacagtgggagttaggacccgaccggcaggcataaagcccgggtgggcttggccccctcaccccccaccaggcaccacagacctgtgggcttcccgtaggggacgccgtgctgggtcagcacgccttgcagtctctttatctcctgggacagggccttatgtgcctagaccggaagtggagaagaatggtcaggcccttggtgggaggccgtccttggccagggggccgtgtctgtacctcctggcagctctccagcgtctcaaaccgcagggcccttggtgcctccttcctgctgcgccgcttcatttggttctgatgtcttcagataaccagcatcttcaaaaattgccctgagcgacttctcgtagccctgcaggtggaggatgaggagggagcgcccattgggctgcccggcccccatctggggcctgcccacggctcacctgggccgtgatcagctcgtccaccaggtcctgctccagctggtcccaccgctgctgcagggccgcaggcagggtcggatacactgagggtccaagagaaactggctgagctgagcccctctgcccctcaaccccccgccgcccgcccgggcacccacctaacaaggagtgggggtggcagacgaggggcgtctcgaaggtcagcgcgtagacacaggtgcttgctcagaca

SEQ ID NO: 36866 - DNA, 730 bp, Bovine  19866881855946
  misc_feature (1)..(1): n is a, c, g, or t
ncctggctcctcacggacctcggcaggcacttgacacagccacgactcctgccctcgctgcaccttccaagcccctggaggctgtgtgtctctaccagggcgaggaggtcctcggccggcgcccctcccatggccgcaccctcagggtctggtcagggtggtgtacacaggctgctcccagttactgggggggctgtgggcgggcggcacagacaggcccccgagcaggggcgaggcgtagggccggcggggcgagtggaagtaggggtactggtagaggcctgacgggtagccagggaacgggccgtagtagctgggtgcctgaaggtcggtgtagtcgcactgcgagctggtgaaggagctggcggctgcggcgggggcggcggtggtgacgctggcctgcgcgctgtaggagccgtagtcggcgtggcccggggagccatgtgactggtcgccgtagtgcccggggctcagctgctccgtcttgatgtgcggccgtggggggcccgcctcggtgggcgatgcggaggccgacggagtgcccttgtgagcccatacaggggacgccccgatgccggccgccccggaatgcgagtaggacgtgcccccataggagccggccgccgcgggctggccaggctcagcgggcagggccgagtggccgttgaggggcaggtactggtcaaactcgtggacgtcgaaggtgtccatgttcccgatgacctcactg

SEQ ID NO: 36867 - DNA, 1704 bp, Bovine  19866880255039
  misc_feature (1)..(1): n is a, c, g, or t
ncattagaactgattcaatgtattctttttaatagctgagtaatactccattgtgtatatgtatcaaagctttcttatccattcatctgctgatggacatctaggttgcttccatgacctggctattataaacagtgctgcgatgaacattggggtacacgtgtctctttcaattctggtttcctcagtgtgtatgcccagcagttttttagagatttttattatgtttcaaaatacttaacaatattcatatgtgttgactcaaaatagacgtcaaataatgtatcaaatggaaatagagatgtgaaaaaattttatatggagtcattgattgtggcatcatttataatagggaaaaatagaatattctaaatttataataatatgagatggagtaggtaaatcacagtgtacataagacactggcctagaaaatctgcagttattaagagagagagttaataaaatgggataaatgtttactacagattttccaatagataaattaggttgtaaaatagcatacagaatacattatatgatgccaactttgttaaatataatgggttattgatatttgcatcctatctgaacagaaaagtgaacttgaaggaaatatagctaaatattaactggttacatctaggtgtcataatcacaaggtgatcttgatttatttttgtgcttttgtccaagtttccaaattttccgtaaagagcatacataacatttatagtaagtgaaaagatctaaaaagatttttcttaacatataattatgatacagtaacttgtattgttaagtgggcttgtgagaactgcaaattattgattatacataacactttattttatatgtgagttgtgctacttttgagcctttacttttgtttatttttagaatagctttcatttttcttctgtaattaactaagaactgaaatgagttttctgaatagaatagttcttaatataaatgcaaaatcttgttttctctaatataattgtacctgagtgaaagtaactgcaacaaggactataaaggaagacaaagtagggatatgatgtataatttccctttgcataattgtaactctgaagaacgcatgctctcggcagaaaggtaatttaaattgtatcacaacaaatgccatattttaaaatagaaactgtccatcatgcactgagtaaagctggtagcgacatgtaagtctcaaggatatactgaaaattcctccgtgaggaattttcctccattaaaattcctccattaaaaataaattggttggtttaattctagcacacgctgaaataaagtctaagtgacataatataatttttaagtgcataaaattactaattgtgcatttaggggaaaaatgatataagataacaagaaacattgcaagttttttattatagaaatattgagacctttaccatgtaaatagaacaatataataaactccatgtatccatcatgggcactattctttttttggcacaatctctctttggagcataatttttaaaatctgaaacaatactgagtacctactttttggcttcatcttatgggaaaaactagttttgaacaaaagtgaacattttagtggttgtagactgcagattttccttccttatgttggggttatgtcctgataaacccatcataaatcgagaatatcataagttggtaacacat

SEQ ID NO: 36868 - DNA, 936 bp, Bovine  19866880400377
  misc_feature (1)..(1): n is a, c, g, or t
ncgcagctcaggagaaaggcccctggcgccgagcagcggctgtgttggcagaaggaaaccaatcatgccacttatcgccccggttggaaaagtaattgcagatacatgtgtaaagggcagggcaatcttttctgccaattatgtgccctgctattaggcgattaggagctggtaaagtcccggtgggtgtgagggattagcagcacaattctctctcccgtcacctcggcatttcggcttctctccagggcgccttcttccctccccaggtgccggtctcagcttgaccaggtgcctctcccaaattatgtccccccagacacacttgtccttttctataaaaggaaaaaagccctgccagggactcctatcaaactgcagttgaaaaacaaagttaggtctgcccggccaggaggttgcaaacttgtatttgcagcaatatttgggaagactatttggttccaggtgtttccaaagttgttcacggcccagacggtgctggtccttgctgctcttttcacgcacatgctgcctttcttgttttatttggctttcatgcctgtgtacatctgcccgtttctttgggccttactgatccacctgtcccttcatttttcaaggcactatttaattaagcatgtatttgctgcccagcacagctatgctctttgaaataatagcaaagtctagtggctaagagcttcagggtcctgaatagtcctgaattcaaatcccagctcagctcctttgggaatgcagtaaccacatggacctggaagcctgggaggaagaaagaaagaggggcagaggaaaggaagaatggagcagacacaggggaaggggactcccaaaagtgtaccttgagaaccatggcaagaatactgaagcggtttgccattcccttctccaggggactacctttgtcagaactctcca

SEQ ID NO: 36869 - DNA, 844 bp, Bovine  19866880406555
  misc_feature (1)..(1): n is a, c, g, or t
ncttccggatctgtggaccctccggctgtttgcctggtgccagatgtctttggcctgacctcatttttcccttctctgtaggactgtggtcccgctgggtaccaatcactgtagctgcaatcattgttatcttttctgatgcccccaaagcctccttaagagcttaccgactgatttagttagagaaatccaagtgttgagaaaggaagctcaaatgagtttgtttttgtcttgcttatctgcctagagaaagcatccttgctctttcaaacgtctgataaatggacttgattatcctcttcaagcaaacacgtggtggagcggtgggaattgtggtttgttggaaagtctatgggccgccagcaaatccttctctttgctgttttcttttccatcctggtcacagaaagttttctgagacacaaagccctgatgtaggtttctgtactctgcaccccacaaagagccggagtgtctgagaagggggttgccatgcctggggtcgaggtccagcagagcaaccctttggtgtcagttcaatactaacagtgttgttggttagtcaagctgatttttcctattcactcaacaatttgcttattcagcagacagatattaaactcacaacatagtggttcccagcatgtgttctgcggccatatttcctgggtttgcatcctggcttgccacttagcagctgtgaggcctccaatgagtttttttttaaaccttcctgtaccttttcctcactgataaaattgagataaagaaagatccatctccggggttgttgtgaggattaaatgggttattatttccatatgttaactgagagtcatcccta

SEQ ID NO: 36870 - DNA, 959 bp, Bovine  19866880449026
  misc_feature (1)..(1): n is a, c, g, or t
ngaatatgagagcatttagagacctttttttttttcaatagaaaaaccaaataaaatagcatgatttagcatttacttgcaggtgttaccaaaaatatacagaacacacatggggccaaaaaccttcatactttaaaggtaaatgatacacagtttaacattagctcctggctggcaagatctgtgtataatttattatttcattgtctgcatggtagctgatagatgctcagtcagtgttttcttagtcagcttaggctaaattctactgtggtaacaaatgaccccataattttagtgaattatattagctaaggttcattcctatctcatgtcaaagatccattccagatcagtttcaaccctacgctacatctttttcatttcaggatccaggaaaaggaagcagctcctctctaggacctgctagtctcatggcaaggggcagagatggcaaaatcgtggcatggcctttgaagttcctacttctacatggcatgggtgattcccactcacatttcatcggctgaagcaagtcacccattcaagcctgactctactagggcagggcttcctagggacaggccaggaaaggaaaggagaaaataatttttaataataatacagtttttcacagtgacaggttacgtgaacaagctttttttattattatttttatgtagaacttccttctactctacccgccctggaatttttcctgttttactaatataaaacagttactcatataatataaaacagttactaatataaaacaatgctcatcctattgatgttctagggctaccattaaaaagtaccacattgtaggcagtgtaaccaacagaattttcctatcccatagttctgaaggtcaaggtgatggcagggttgcttccttctgaggccctgagagagtctttgtttcatgcctgtccactaacttttatatttccaag

SEQ ID NO: 36871 - DNA, 2224 bp, Bovine  19866880460706
  misc_feature (1)..(1): n is a, c, g, or t
ntctcatgctcaaatgactgcggtgacaatccgcagtcaactgaacttcatgtcacatattctgaaattgaaaaatctcaactaacaagagagctagagtgttttactctgcttgatccccaccatgacccctttatagatcttcaaagtcttactctcttggaaaaatgctacagcccatttagagaccctgcatgttctactggacaaatatagtgacttctttcaaagacatgccatctgtatgcttttcaaaaagcctttttgaagtttgctaacttatggcaagggccaccttcctctcctctgctgagaatcacaagacttcatcttttccccacaatgtcacaagacccctcctctcctgatgaccacagggcaacatccacaggggcctttggttgtgttcatggactttcttaagcctgaaaattgacgaagtgaaggatctgggatacagaattccaaggcctctgaatggtgagcactttcctcttttccttcccgcaacatgatttaaataaactacaaatttttctttaaaaaaaaaaaaaaagtcaatctccccccccccaccccgcttttactctatatattaaaagcaaaaattggcttttctagtttcaactggcagctctccctggcaccaagttcataccactgtattagttaactactgttgccccagaattcagtggcttaaaataagactaaacatttattatcactcagagttcctattggttagaaattcaggagcaacttagctggataattctgacttggggatttctgttagggccaagaaacagaccaggactacagtcatctgaaggcttgactgggattgttcagtagttagtccagttcagtcactcagtcatatttgactctttgtgaccccatggactgcagcatgccaggcttccctgtctatcaccaactcctggagcttactcgaattcatgtccattgagtcagtgatgccatccaaccatctcatcctctgtcgtccccttctcctccccagcatcaatcttccccagcagcagggtcttttccaaggagtcagttcttcatatcaggtggccagagtattggaatttcaccttcagcagtagtccttccaatgaatattcaggactgatttcccttaggattgactggttggatctccttgcagtccaagggactctcaagagtcttctccaacacggcagttcaaaagcatcaattcttcggctctcagctttctttatagtccaactctcacaattcatacatgactactggaaaaaccatagttttgactagatggacctttttggcaaagtaatgctttctaatatgctgtctatgtagatcatagcttttcttccaaggagcaagtgtcttttaatttcatggctgcagtcaccatctgcagtgattttggagctcaaaaaaataaagtctctcactgtttccattgtttacccatctatttgccatgaagtcatgggaccaaatgccatgatcttagttttctgaatgttgagctttaagccaacttttgcactctcctctttcactttcatcaagaggctctttagttcctttttgcttcctgccataagggtggtgttatctgcatatctgaggttattgatatttctctctgcaatcttgattctagcttgtgcttcatccagctcggcatttcacatgatgtactctgcatataagttaaataaacagggtgactacagacagccttgacgtattcttttaccgatttggaaccagtctgttgttccatgtccagttctaactgttggttcttgacctgcatatagatttctcaggaggcaggtcaggtagtctgatattgccatctctttaagaattttccacagtttgttgtgatccgcacactcaaaggttttgccgtagtcaataaagcagaagtagatgtttttctggaactctcttgctttttctatgattcaatggatgttgacaatttgatctctggttcctctgctttttctaaatccactttggacatgtggaaattcatggttcacatactgttgaagcctggctcagagaattttgagcattactttgctagcgtgtgagatgagtgtagtagtttgaacattctttggcattgcctttcttagggattggaatgaaaactgaccttttccagtcctggggccactgctgagttttccaaatt

SEQ ID NO: 36872 - DNA, 965 bp, Bovine  19866880467315
  misc_feature (1)..(1): n is a, c, g, or t
ntttgactcacagacagtgtcttttcacttctgttagctctgcattttcattctgatgctcgttcttcttggcaccttgtcttgagttggaggtgaagcagatgctgaggaagtctgcattctctttaccatccttctcttttgctcacctgaagaaacgggctttacgattcaactttctgctctaaacttagctttaaagcccatttgggtgtccttagaagtttttctatgtgtcagctcatatgagacaccccactccagaagtcttgttttttcacttttcaacttaacaaaacacgtaatcggtacccactgtgaggcaggcgttatgttacacttcagagacacgaaggaaaaccagatgcagtccctgtttccaagaggctcagggtgaaaggagagactcaaaaagacaaatgcaaggcagcgtgcaagaactccactaaagaggggcaccgcagagctgggcacctccacctgggggctggaggaggcaggatggcttcatggagaaagcggtgtttgagcaaatgttttactttagtctcctttattccttttattcacccacctcactccattcccttctctagtcctactggcagccactgacaatgtgtacaaatgtctttttttgcttggatcgtactcaggcaaaatacatattgccattttacgtctgtggatttagttttaaattgatgtaaatgaccctgtgttacttaccataccttattttattgcttaacttccttcattaaacattctttgtgtgaacatctaggctgttcctgtaatctctgtctattcccatgggttgctcatccttcacgcttcacttttccactgtctccatgtggcacatccattgtggttccaatacccactcactctgcagtcacacattttacgactcatctgtgtatcagtgtgaaaagttcctgactcatatatatgcaaga

SEQ ID NO: 36873 - DNA, 3357 bp, Bovine  19866880471684
  misc_feature (1)..(1): n is a, c, g, or t
natgtcccatcgtgtatttggagcctgacacaagtagagcctactttctactttttctagaaagtagtggaccctcaatatatttgtagctgagctgaattttcatttaaaataaaatgagctctgtatttaagagtttcagcatcaactccctcccactcaagttaggtacaaatgcagcaagttaagcaataagttgccaaacgctctgctgcaacatgcttgaaattcagttttgaggccccagtcagtgctgaaatcaatgcccactttctccaggtatagtaattatttctcatattgttattgactatctctttaaataccagccaggacaaatctatttctcaagctgttgtaaatgatttgaagcaggaagatgaatggaatggaacgagggttgtttaaaagatttctcccccttcagcactggtcaagaaacgaatggttagtggccaccaacccatcccaggcgaaagctaggatcattttccaacccattcactagtgacctcaatcatctaagtgctggtttcaaaacccttatttttatcctgatcgacagcacatattcccagacacactgggaatctgtcgcttactttgggtctctggtttcttgaagacctgtgtcaggtgtctgaggagctaggagtctggaaacctattatggaggaaaagtctcgttgggagcctggggggaactctcacatggaatttagattcaaatttcagggccccagcaagagtgatggaggtgaggctcttgtaagcatgagactctatgttgagtgtgtctcattatcacgatcatataatatgtacactgtgatatgtctgtcttacaacggagaaaaaggaggcatagtgaggtcatatatatgcagaaagtcacacagctagtaggtaactgaactggggtttaaaactcaggaggtctcactaaggggcttgtgcttttaatcacctctctctactgggatagaaaaggtcaaagggaacttacaggatatgaagagaacaaacatacacacaaatacacaaaatgaaaactggagtaaatgttgaattacctgaacgttcattcatttattcaattattcaacaaacatttatttagcagctgttttatgatagtcactctgttaagtgcctcaaagtagacaaaatctcagccttaattaagcttacttcttaggagggaaagacggaggaagcaataagtaaaattggcattccagataccagtgagtgccatgaagaaagtaaggcaaggaggagagatgagcaatgttgggagctgaaatcgcaaaggtgtggtccgagagggaaacatttgaatcaggacccggaggaggtgagggagccagcccacgttactaacgaggtcagaggtcagcaaccacagcctccaggccaaaggcggctgtcacctgttttcataaacaaagtctattggaataaagacgggcccattcatttatgcattgtctgtggctgtttttgtactaaaatggcagagttcagtagttgcaatagagatttttgtggcctagaaagactgatgtatttgtaatttggcctttacagaaaattatctacctctggtcaagaggagggtgttccaggcagggggagcaaacagcaaatgagtgtctcatgatatgaaggtgcctgatgtggttgaagaggctggtgtggctggagctgtgtgatcctggggtgagtgggaggagatgaagttagggtggacgcaggacataccctgtggagtctcctgggccattgtaaggcctctggagacagtgggaggagagagcgggttctctgtagaggagagtcacacttggaggcatcaggatgattcggactgtttgtgatccatgagctgtcacaggctggggaagcaaaactgaggtggagtttaacatgcaggatgtttctgactccttgggatcaactcctgtggaaaggaggggcaggaggcaggagtgggcaaagagaggagttgtcatgatgcagcccaatgacggctttagcctttcacgtagccactcagtatattaacttcaatcctgtcactttcagaattgtctccatttagtctgagatgtccaggactatattttccagtgttgatcattcgttgaaaggaggtctttgaatggcagtggcaatgacccagaaggagtgtgaacaccccctgaatggctgacagctgaggaatgtttgctcactgtgctcccaggagctggggcaatgggtcctcccctccactgaaggaggatgtgatggtatgttgttgcgcccaccacacagaggcctggggagcaaaagataaagccagatgagtaagcaggctactcgaaaatctaactgagagatgaaggtggtttgagccaggtgaacagctggcaaatgctaaatatccctaatgttagagccttcatgtattcttcatgtcctaaggtcatctcagaggagcacaataaaggggagtaagcaaaacgtttggtgacaagtcataaagtctccaaatccattgattattgtttgtggatggtctttggttcagtttaacctggaatcatctttttccaaggtgtgtcgacaaaatgcgacataatcaccaatgcttcactgacctccatcagaatagaacctgtcgtgggagacagggcgtgtaagtattcatcacatggcccagtctgtcccagcagtgactgtactattccttgactatccagcaagagtgttgtactgctaaccttggcatgaagcagtgcagttacttatgcatctccatggcatggggtatcgccttagatttgagattctgctacggctacatgagtgggcaaaatcaagaagttgtattccataatttaccttcaatctgacaaagaacactgtctgtaatagaaggagtgagcttgtaggttttagcacatttattacagcatgatgtgttttgacatggtgtctatgagccatgtgggatgaaatggaaggtataaatggattccaatttcattatcccactgtgatctgagggaagctgataccaaaatgttgccacccaataaagcacttaatcaaattccctccctggctgaacagcatggttctgccaaagggagctatctgctgggtaaactgttcagcgagttgcatttttaatgcaagtgcccagtcagccaatggtgtctgccgggctttgcttacagtgtacatggctggctatttacacgagattaacaacacgagaaagaaacagattcaatgctccctagcccgatttagaggcttctctgctcattgaattcagccacgctggtcagactacccctggaaaag

SEQ ID NO: 36874 - DNA, 1545 bp, Bovine  19866880478642
  misc_feature (1)..(1): n is a, c, g, or t
naccgcttgtgatgaagtgcccttcctggatttttattactacccatgactaaagcctaccaatatacagtagcctactaaatgagttcttactcttagagtttaatttttttttacaacagctttattgagatatgattcaataacatacatttcactcatttaaagtctacaattccgtggtttttggtgtattcacagagttgtgcaactgtgacaacaattgattttagaactctttaatcagccccggagaaaccctatgtccattaataatcgtgcttcatttcctgtatcttaccctcagcagctgggaaccgataacctactttctgtctcagtggatttgctttttctgggtgtttcatataaatgaaatcatacattatattatcattttgcctggcttctttcacttagcatagtgttttaaacattcatccctatgtaacatatactagtacttcattcctttttattgccaaataattctctgttgcatggatatatcatgttgtctttatgcactcatcaactgatgggcatttgagttgtttccgctttggctattgtgcataatgttgctatgaaaatttggttttaggttttctttatagacacgcgtcttcatttcttctgggtatctccctaggagtggaattgttagattatatggcaactctgttttaaacctttaatgggctgttaggctcttctctaaggtgggctcagggtttattgatgactagactgctgttcaactgagtacagtctgactcacattgtttggcaaaggagaaaaactcccactatgcacttgcacagatagatttcaatttctaaagcatcaagaggatgttatcagtgcgctgtcaactgttaagttgatcttggttctccgtgcctgtacttcttgctttctgctgataaatgattaacactctagcttcaccattatttgtttagtttatgattatgggttgtctggttaaccctactgggtgtagtaatgcatgttttcatcaagagtatttttggcctgcagtttctaagtagctagaatttaaggcatattcaagtggcagttcattaaacatgcatttgtttttatttggcatctgctgtgagtcagacaatggcagcccactctggtactctcacctggaaaattccatgggccagaggagcctggtgggctgcagtccatgggggtcgctaggagtcggacacggctgagcgacttcactttcacttttcactttcatgcattggagaaggaaatggcaacccgctccagtgttgttgcctgaagaatcccagggacggtggagcctggtgggctgccgtctatggggtcgcacagagttggacacgactgaagtgacttagcagcagcagcagcagggagtcagacactgtgtttggtactaggaatatagttgggagtgggggcaaaactgacacaactgttagaaagaaatacactttgagaggaagtgcaccagaagatgcacttctagtcactgttggggacctcttccccaa

SEQ ID NO: 36875 - DNA, 807 bp, Bovine  19866880504001
  misc_feature (1)..(1): n is a, c, g, or t
ntgcttttattttgttatttgcatctggaaatcattcctaaaatcccatagaataaatttgtcttttctttttttagggactttttcccccttattataagaataatagatgttcattataaaaactttaaagaaaaagcatgtatttaataacagaaaagtgtccctagtttcctccacttgagataacagttcttgacatcccaggactgtgcttcttatcctttgaggtacacacggatttgtgaaaacgcacattcctgagcctcatcttcagagatctggagttgccaagtctggaatggagcctaagagttgccatcctagccagcaccttggttctgctgacgcccccaggtctggggcccacactgcaagacgctctgtcctaaacgtgcactaaccacccacacgtgaccctctggcacttgccagtgtctcagaaacatctggcatatccccagatgcctttcttcagtatcatatggaaagtctgtgtggcatgacatgctgctggaatggccatgcttgagtttcagggcttcttaacatgggcactacagacccaaaggggttcacagagagatcgactgcacttgtaatccaatgtatctttttttttcttttgacacttgaagtatttttctgagtaggatgccacaaggtttaccaactgccagagaagtctgacaaaaatagttaaaaacctcttctgctctctccagtgaatggtgtttagttgtttccctctactagctcccagctataaatcatactgccctgagcatcaccatttataaaccttta

SEQ ID NO: 36876 - DNA, 2137 bp, Bovine  19866880593647
  misc_feature (1)..(1): n is a, c, g, or t
ncagtgtccagagaacaagataaaggaggagccaggagaccagccagggggctgtcgcattatccctgggaggtagccatggtgtctgttctcaacaggaggaggaggcagagagatgtatatggaattagagatggctaatgggaaacatctacaaaaactaggactgtgttgatatagaagtgtgtgaggtgtcaagagtgactcctagggttttggcttataatgatggatttactgaggatgggatgtcagaaagggtccatggatttggactaaagccaaactcggaggcacgatgaccctgagtttggtttgggacgtgttgagtctgagatccctctcaagtatccccatgaaaacactaagtagacagtgcggctaagtgtctgggactgaggtgtgcataggttctactctcagtcttgaggggacaccagaatagcgagaacttgttccttggtagcgaagcaagctacatagaaacgtgccagccttcagtaacttttcacactgcatctcctactttatcctctcttaaaagtcatgttgcaaacacattgcctttcggagctggtgcaatggccccactttgatagaattctactcaaagagaggagctacctttctagttcctgcagagttaccttgctggactgaatccacacgagaggccagggcagtaaataaatattaggaagtcagtaggatatttataataattggagcatcctatttgaaactgccctgagataattgagtgagtagagtggcaaggactgaatgagaagagtggcgatcagtaaccttaaggatatccaagttcagtggctagcagaagcagacaaaccattgaatgaggctaaggaggatctgctacagagatgggggaaagcccagtgaggtggtggagaagataagaggagatggtgcctcaataggaagccaggagacaactaaacagaaggttgaaaaagaagactgaaagctctttgttggatctagtgataacagagggtgttcatggtctgggatctgtgtgatggaatacagagatgaaagtaatttgagaggaggggaaataatcactttttatagcagagagttgaatgaatgaacagatgattgaatgaatgatgcaactatctttaatgatacttatgtattgccccttgtcttaaagaggagtccttcagtggctctagaaggcagagtaattgcacttgtggaaggccgactgaagcaggcccctggagaggatgtaggtccctttgtcttagaagcacctgctgttggcttgggccattgagttctgaagggcttcatacacctgtggacgtgtaggtgaatatatgctgaggtgagctggaaactgagctgctttgctaatgtttcctgagtgagttttgaaattggggttgggaggggcattgtttgggcaggaaagattggatttaagggctctgggtggttgaaaaataagggtaccatccttggagggggcttccctggtggctcagatggtaaagcacctgcctgcaatgcgggagacccaggttcgattcctgggtcaggaagatcccctggagaaggaaatggcaagccactccagtactcttgcctggagaattccatggacagaggagcatggtaggctacagcccatggggtcacggttggacacgactgagtgacttcccctttatccttaggggagggatccacggtgaggatgggtttagggcttcagagccacatgttccttcctctttctgggatcagagctaaaatatctctggttttccagtccttgcttttgacccctgcatccagctggagttgcaagcctctccagactcagatactaaaacttattgactgatgtggactcttctacgcatcaaagggctcagtaatggtgttagctggcgggctctttttaagtgcagaaagtgcttctctgtagacagcatgctgagatacctggagttaagataaaaggcttcaaagaggcagcagtctcctggaggctgcctgtggccactaaccttgctgctttggccacactgaccccagacagccagggccagcctttacgtgtctctttccatcgccacgggtactgtagccccagatt

SEQ ID NO: 36877 - DNA, 1387 bp, Bovine  19866880631672
  misc_feature (1)..(1): n is a, c, g, or t
nctacaaaattttaattttaggtataaccccagcagaaataaatacccatgtgtaccccaaaaatgtacaaaaatgtctatagtggtattactcacaatagagaaaaaaactggaaacaacccaaagtttgtcaatagtagaaaaattaagcaaattatgatgtattgtaaatctgttacaatataattctatacaataatgaaatgaaattaattactactgcattgaactaataaataaatttcccaaaactgatatcgagtaaaaaaaaatctagacatgaaagaatatactatatgatttcaattatattagtttcaaaagcagactaaactgatttatgtagtagaagtcagaataatggttatctggagaagatatgtagagaggctgctgagaagctgacaatgggttatttttttttttaatctgagtggtgtttacatcagtgtatttaacttgggataatccataaagctatatacttatgaattattcaagtgtcaggatggatattaacttcaattaataagcttggcttaaaaattacttattcacacattatttggtattttttataatttgagataaactgaattattatataatatattcacttaatagactttatcaagcacctactatgtgccaggcaccatgaagacacagagctcacaggcaatgcatggccctcccttcatggatctttcttttatagtcaaatgggagacagtatataaaaataaacacacggtaagtgagctagagaagaaaaaaaagaaaaagaagaggaaaagagaggtaatagaaattcttagaggcagcttcaacatcgtatgagctcatgcatattgcatgtgaaagaaaatattaaaatgatatatttgactatcacaaacagatatactgaaacacattgtactgataactaataaattgcaatgtgcttcataaaatgttgatgtggctatatgcaatatattcttatctcaaaatttattgctaaattatttaacagtttaaaactgtgtatatggatcacaattttgtcaaagttgcaaaaaaagtttctattttaaaaaattaatttctttggataatttcttccttcttaaattttagaatattaaaatataactacctgggtatgggagtggagcatggggagtgactatattccatgctcttattccatattatccatccacttagagatctcctccatctactcttcccctacagcttacttactcatgcactggtgtccagacaacctagactcaaactgtgactccacctcagctatgtggtaagtcagaagagaattaggaaagaaaaatcacccagaaaatttagttcaacagttaagagctcaagctccagaga

SEQ ID NO: 36878 - DNA, 1396 bp, Bovine  19866880640384
  misc_feature (1)..(1): n is a, c, g, or t
ntcattaacatgatttattatgaagctacaggaaattagttgctgaatatttcaatgtggacaggaaataatgtaattccattgttaccatagaaccactgtatcttggagtaacctgtagccgtagtaacaagataaggacatacttcttaaatgttcaacaatgattctatacttcatgcacattcaagaacagtcagttcctgttatttataattgaattaagtttctgatacatttggggttcacttttcaacagtggttttcaattaccttaatttaaggcaatgaggataataagattttctttagggcattattgttagaactggaatagaacttcttattgtattaagaggacctgaacatggcctttaaaaataagtaaatatttttgaataagcaaaataatgtctttgaggataaatattaatgacataagggtaaatctatctcagggtcttcaaaaatgacactaccactgcccaccgtgagtcttgaaatctgaagatattaactgtatcacaataatagtaacactttccaacaatagcttataaggtttgagaatttaccaaatggcagtatatgctcaatgactgtcttatttagtcctcagggaaatactaataggtaggtactgctatcatgtccatcgtgtgggtgtggatactgagggacagagtcatcacatatgctgaccagagtcatctggctgcaaacagcaggggtggaactgaacccatgttatcctactgcacagtccatgattttatcccctgctcctgctgctctcctagctctcccagaccatcacaaaggacgctgagtccacatactgctgactgtgttctctcagcccttgtgcctacagtcatctctctggtccctgaaagagtaaagccgcaaagaacaaccaaagcctactggctcctgacctccctatccattcactgggccacagctatggctcaggttggggtgcgggtgttgggcctagagccatagaaccaaggtgagtaaggcgaggtgtcagctccttacaacttcagatgccagtgggaagaagacaccaggtaaacagatagatgccccctagtggaatgtgtaccttccaagaaggaagctccctctccatgaggaagtcaagtaaagctcagaggagagggcacttgccccaactggaatttaccagaagaaaagtacttgatagagggggaaatattcatgctgagtatttctagaacacggcatatgaaggctgtgacaagttgtggaagaaggaagtgatagggaatgaggccgaggtacaagttcagttcagtttagtcgctcagtcttgtccgaccctttgtggccccatggactgcagcacgccaggcctccctgtccatca

SEQ ID NO: 36879 - DNA, 805 bp, Bovine  19866880644286
  misc_feature (1)..(1): n is a, c, g, or t
ncttgacatgagggcacagcgctctgcactgctgacagaactgagctggatagcttctggatgtatgagagagtacatttaatttttaacagattatacacaaaataccgagtgacattaaacacaggcttaaatcaaccatcacccattcaaagcagtcttgcagataaatgtcccaaatccacaagcctgccaaatacattttttatctatacacatttgtcaattctttccacaacattggtcctttctgtgcttctccgggggttgctgttttctctctcaaacctgaaatacaggtgacatcaactctctgtgaaacagatgggattgacaaaggaaaacccctggatttgtgactattaatcttttggtgatcacagacccttctgaaactctgaagaaatctttggactactcccccgttggaaaagaaatgaggtaaacatttataaacagattctgcacagtctattgtgttgcattttagattgattctattcactttcacatcatagagtataaaaaacaatctttactaaaaacaggtgccactcactctagatttttcagatatagaaaacaaggactactttaaaaaaatttcagaaaaaaaaaacaaactaagcaagttaaacaaaaagtaaatcttgctgctgctgctgctgctaagtcgcttcagtcgtgtccaactctgtgcgaccccatagacagcagcccaccaggccgccccatccctgggattctccaggcaagaacactggagtgggttgccatttccttctccaatgtatgaaagtgaaaa

SEQ ID NO: 36880 - DNA, 737 bp, Bovine  19866880662818
  misc_feature (1)..(1): n is a, c, g, or t
ntggtgggaactttgctgcttctgaaaacacaatagctcactcaatcttctcaacaatcctattatgaataaagggtgaagaacttgaaattcactgggagcttatcatagctgcaactgtgctaggagcattaattatctcatttatctgaatgccaagtttatgaggtttcatgttgatctgtcaacactgaggccacaggcaggatgaaaatgagctttgatgaaaatctatccatcagcagccctgactgaaagacaaataaggcagtgagaagctcctgtaattctctggattggctggaaggaaagacttactctttcggggcactagggtaataatatttctctgcaaaattttcttccatgttacttgtcactttcttattgatttacaggagctctttttatattaaggagagtagctgtctgttatataacattgcaaaattttcctgtcatcttctcatttgtcttgtaaccttatggtctcccaaatacacaggagttttagttgcttttatattttcttttgtagtttctggggttggagccttacttagagaggacttctttaatccaaaattatatttttagcatctcctatattatcttttggtatattctacagttttcatttcatctttagacctcatatccacctgaaattgcatgttgctatatgtcctaaagtaggaagctgttatttttcctagatatacagacaatgtcccaat

SEQ ID NO: 36881 - DNA, 1491 bp, Bovine  19866880663401
  misc_feature (1)..(1): n is a, c, g, or t
ntgagtttgctcagactgaatctggaacattggttgctttactttttcctgttctccccaccaaggtagctcaggggcacccctaaggaaacctgggattcctcagaataaagttgagaactaactcacacctaaaacgttgagggagaggctctgccatttggagaaaaagtgtatagagctaagtatatagcctgaaattggccaatgtgcctactgcatgtcattcaatttcaggcggacccccaagttcagaggtgaggaaacagcagtgccttcaagacactaggtttgccttggtaactagatttctcccctcctgttccccatccctgtcctctggcatagacagtgacagctcaggtagcagccagcgaggattagtcactcctgcaagtgtgcgaggtccgatcgtccttgtgacttggaagagacctggagctgacctctactcaggaggtgtgacttcctgtggcatgcagcgtggaaaagcagttgctgccccgcagaagctttagagtggaggctagctctccttaacctggtaggtgcaggtacacagaactccgggaatgcccagaagattcccagccaccagaaggaggtttctgaccttcttcagcctagcctagcagctgtactgtcacattattatagatgcttgtcactgaagcatcactgtctgcaaccttgacatgcaccgtttcagattcatttttcagaattgctctgaaagcccagggcccgtcccatccattagtggaactcctctgtgacaggtgttgggagtgatggaggtggtaggaaacgccccatgctctgctgattcatgggagacacatttgaaaagatataagctggctggggcaaagcctccatagaggtttgcaggcagtttcttccctctcagaggaaggcatcctgcttctatagggctgcatgaccccttcctggaaaaacagaacttgcacacacccctgagggctgaactcttcagaactgagggtgtcacctgtccaacctgtatgctcttaggctgaagaggaaaagttaaaattttacataatctccttctccttctgcctctgtaactcagcttgccccttgcaaagtctagatcacataggtcacgtagtctcagaaagtggggacttgcaatactaggaactggactttatctcactcacccttgtcctgctctttgcaatcgcccagcccctgcaaacctgcttaaccgtgcccgtccatataaagaccagacatccccctccccatcttgaccactgtccccacgcatgaaacctgtgcgtggatgatttgagagaatagcattgaaacatgtatattatcatatgtgaaacagatcgccagtccaggttcattgcatgagacagggtgctcagggctggtgcactgggatgaccctgagggatggggtggggaaggaggtgagagcgagggtcaggatggggaacacatgtacacccatgg

SEQ ID NO: 36882 - DNA, 4609 bp, Bovine  19866880709037
  misc_feature (1)..(1): n is a, c, g, or t
ntgaataaaaatctgcccatctcccttggagcaatcaaatgtgtattcccatccagcagatgatcaagaaattcattttctttctatccatttgtgttttgggagatacagttattgtttagtgatggctgatctagatgtgtgagcttattgtaacatggcaatgttatgaaaattatttcatatcgttttttggtttgtttctttgtggtggtagtagttgaaagagtattagattcatatctctcactgtgaatcttgcacatgatatagaaatctaattataacagtctatagtgacagcagtctttacccagtctatagacagatatgtttagtagattgcattttctaatttcatctgaattttcataactatgttgatataacaaaaaaaagggggggcaaaggaggaaaatgaggatgagaaggaagaggaggcagaggagatggatggaaagttacacctaagttgtaagtgtctatttgctgtaaaacacttaaaaactgtcagaaagaccatgcattaattagggttgaaatgcaacctagacattgcaaaacttattttctaactggtttcatgttcataattaatggctaatattctgccatttataaggaattaaaataaacagtggtttaatgagatttcactaggccacttgcaaacactcaatcaaatcttatttccaatatgcaaagaatgtctccttgactcttaatgcatttaaggtcaacagtaacatcttcatacataaaagattctattccacttttaaagaagaggtaattataagagaggggtcacaccgaaggtctacgttttgtgtaacttctattctaattaatttatcgtatgtgggattttgctttggcttccaagtgttgatcttttatagctaccacattccatgtgataatgggtttcattcctttaaaaggtcacacttgatataatttcaccgttaacagaaggaacctaggcgcatgggtgttactgtgtcattgcaccgtgaaaagtcatcggcaaagtcctgggtctcttttgcccttagacgtcatttaaaaaccaaggggccaaggcatttgaacaaaaggtgagaaattcaattaatcattaagaagggtgccttcacaatggaagccccacagaagcatgtggatcaacagaaatatttgtatctgagaatgtgtttttgcttgtgccttttgttttataagtgaaatgaccggaatgtgactgttattttctcttgtatttattctgtgagtggtttccttggggtggcatgacccacagctgggctcctcaggcctttcatcatcagaaacctttgtgttgctgtttgggtcgtttccttctgatgcttctcatccttagaaaaatttgggtcttccaaggaaactgaagttattaagcaataattacttcatttcccagggccttcctaccctgccacttaaaaaaatcaaagacatacataattgtcaaatagaagcatcttagataaccaaccaagctgagaacatagaattctggctcaaggaagagaaacttgatgttaacctagctcaagatacacgtgtgagttcacctgagattcctgaaatacggccagtttgcagatcacaatcagtgactgaccgcagaaaaacccctagactaaggcagatcacaaacgttctgagtgcagatgaccgagggttttgtgaagatgcggattctgatcagaaggtctgggttggagtctgagaacctgcatttctggcaagccccccacccccgatgatgctaatgctgctagtgcctggaccacactctgagaagctgggctctggacagtaaaggagagcaaacggggaactgggtcacaaatgtggctcagtttcacccccaaggaagatttgttaagcatcttctgtatgccaggcccattatatataacacatgtccattttttatgcagtatataaacggggcaatatattggtatttttccttcaccggtccacccacatcttgccacataaaaagtctgtgcattcctgaaaaaagccagatcatgcttgggacagggaatatttctttggccattataacatgcacttactatcattgtaactggccctcctccatgcatggaatgattcacagactaagtagcaaatatttatgtgccagatggggcttccctggtggctcagatggtaaatatccccctgcaatgcaggagacccaggtttgatccctgggtcaggaagatcccctggaggagagaatggcagcacactccagtattcctgcctggagaattccatggacagaggagcctggagggctacatacagtccatggagtcagcaaagagtcggacatgactgagcgactaatactacatgccagatgctatgctatgtagtagatgtgtgatgccaagagaaatagatacagcctctgccttcatggaacgtcaagctagaaagactctgccaggacacagaagaaatacacagctatacatttatatatgtgtgtgtgtgtgtgtgtgtgtgtgtatctcatctttttagtactcccaaccctcaccaacttacaagcaaatggaactagttcctcttcttcccttctgctgtgtcactccccacttgggctagaacattcactgtgccaggcaccgtgcctgatgcaaacaacactgttcgctgctcttggggactccaagggttagcgaggaaaaacagatgctgacttccaggatcactgtttcacactcagcatgctgtgtgcatagcaaaagctagtgtggtgtctctcatgaagctagagttcagacagagactttggagtgaatgaatgaatggaagagtcagtgggtacaaggccaagtgtgtttccatagtgagactctaaaacgctgctgtacagtggctctaattagctttatgtgcagagtagggtacaaatcccagtcctgccaccaaccagctctcagaaactttgttttctcttttggaaaaacaaaatatgatagtaacatttttcttataaggttgttgtggggattaaatgagatatctatgagatagatatctcatagatatctatgatatcttcggagaaggcaatggcaccccactccagtactcttgcctggaaaatcccatggacggagaagcctggaaggctgcagttccatggggtcgctgagagttggacacgactgagcgacttcactttcacttttcactttcatgcattggagaaggaaatggaaacccactccagtgttcttgcctggaaaatcccagggagggcggagcctggagggctgccgtctatggggttgcacagagtcggacacaactgaagtgacttagcatgagatgattactccacagcataacgctggttactcttaacaccatgtttattattactttcctagtgactattatggaagtggcataggatacaaccctccaaggagatgaagaactctgagacgtggagatgatgagaaaggttctgcagagaaaacaagtcagattattgcttacacactcaataagtattccactggttatttgtgcttgccagggaattaggtggagattaattaatatttataaagtattttgatatccatgtaatatctagtaagcaattagttctgtagcacaaagccaaatccttttacataccaaacaatgtagaacaaaccgaatacagctgtgtaagaaggaacagcatttcattagctcctgttgtaggaaatacgaagtcagttgaatttttccccccttttagtaattttcttgctgattttctctggcttcctactgcattttcctgccttaccccctgcagcaccaaatcaaatcatttcctcttgggtagcagtaaaagcaggaagatgaagacacatgaaattctggcctctcctgcttggaaggtgttctgaacccaagaatgcacaaagggtttaacagggaggcaggtggggctccctaggtgcgtgtttccatatccattgccccagtcaggtggtgttcttcttctagatcttcacagagaagaacttcagggcagggaataaaaaggaaattcactcaaaagactggttcctcactggcatgctttctcaggttctctccagtccacacatacatgtatatgaccaagcccccgaatgacctggctggattctccccacccttgctcatggctttccatgcaccatccttgctgctgctgctgctaagtcgcttcaatagtgtccgactctgtgcgaccccatagatggcagcccaccaggcttccccgtccctgggattctccaggcaagaacactggagtgggttgccatttccttctccaatgcatgaaagtaaaaagtgaaagtgaagttgctcagtcatgtccaactctcagcgaccccatggactgcagcctaccaggcttctccgtccatgggatcttccaggcaaaagtactggagtggggtgccattgccttctccttacttatggacaatatgttgtcacatatccataaatcccttgtccccatctttttactaaagcctatcacgctagcttaaaaatt

SEQ ID NO: 36883 - DNA, 1016 bp, Bovine  19866880718452
  misc_feature (1)..(1): n is a, c, g, or t
ntggatggaaactctatgaaggaggccttcgacttgatcattagtgcatcctcagtgtccagaaaggaagcctgtgccagcgtgagctcacaacgaacattactgaaaggagaggttggacggtgagtagatgcaacactgcagacacgacacatgccatgccagggggtgtgtgctttatgagcacagtgaaagttacttgagtggaagcagagaatatgcactctggagacccatgggcctggatttacagctaagttctgacttttagaagttctggtccatcctcttgcaccaacctgagccccagtttcattatcagtaaactgagaatgaaaatagtagctctctcattcaaccattgcttgaattatctgaggcaacgcttatacaacccataaccctgtacctggcatataaatgattaaagcaattcaatgaatagtaatagatactggtatttccatgcatcccataaggatggaaagagaaagaggtatccatagtagctgagcacctgcgagatgggtggtatgtgctgtcctgtgccaagtcgcttcagtggtatctgactctttgtgaccctatggactgtagcctgccaggctccagtaatcctgcccaggtggattccccaggcaagaatactggagtgggttgccataccctccccatgtggatggtatccccctggctaatcctacctgcctaaacttcttcccaagctgtcttctgaaacaggcacgctctccctggtttctagatgagaaaacggaggcgcctggaaaccacatggtttgcccagcgtccttcagttcctaagtgacggatccagatcacaaagccaggctctctgctttttcattacagtagattgcttttcttgaaaataaaaacagagcacagaaaacaaacaggacatggacacaagcagccccagggtgtggaaactttattttgaggctcagtttaaattctcccaagtccttcttcagacagctccaatagaaaaggat

SEQ ID NO: 36884 - DNA, 733 bp, Bovine  19866880735478
  misc_feature (1)..(1): n is a, c, g, or t
ntcatgttaactgtcttggaggatcaactggatggagacattcagcttggaaagtggcactccgggctggaatcacaaatgtttaaacaagctagggaaaaaaaaaaatcagatgactgacttagtaaattaatccttattttctccacttttaatgttcatcttataagcctcatcttggtcgggaaaaatgattctactcgatgtttgcttttaattttacaaaaatgacctctgctgtgtgggaggatatattttgacatcacgaatgtgcatgtttaaccccggttctgggggtcgtgctacttctttcagcaggtgtgtaatctcagagtggaaggagaggatgggagctaggattgcattttgtacctggtgccctcagcaatttctgatgcattgtaaacggttagataggaataacctctttctaatgttggaagcaggttagtgggtttatttaatcaccgacaaaagggtatattttccaggtggaaatgagagcagagaagggtgtgtgagcagctagatggaagaggcacaggcctgaggctttgagcttttacacggtccaatggtaatcccgagagccctgcgttagaggggagggcagtgtcccctccctctctggtgaccagcaatggcctcttgcaaataaatctgtgttcttggggcagcctggtcaaccccgggccctgcagagttctgccagtattaccacatgccccaagag

SEQ ID NO: 36885 - DNA, 878 bp, Bovine  19866880749700
  misc_feature (1)..(1): n is a, c, g, or t
ncctatgagtggaccaaagccagtgggtcctcacagggctcaatccctcccccaatctcatgagcacctcttgatgaggagggtcccatggaaattagaaaacatctgccttcccctccagattcatccagattctccccgctcctcagcagcctggtgtgccctgcacttattacacagagctgtggagagcagaatgaaggaccctaatccatgtgacatttaaagagcagcagctctctttgagaaacatctgtcctttgtaagcctcttttattatttgctgtgactcactagctcatatttagggggtgcatttagcctcgatttctggatttgacattgaagcagttcgttttgcctgttgaaagcattcagaattgaaacaataaggcaagtatttagaggtggggtgcactcatgcagggtgctggtgaggtgtgatatacaaatctgaatgatgtacatgtgtaacaaatgttttacaggcagtatgctgcaatggtcatttttttttttttaataaaaatgattatagcctggattccattctcaaaatgtccagactgaagccaagaggtaggggggtcactagcttctgacacaagagcagggtatatgccataccaaagcacatgcaaagctgagccctcatcaaatcatttaacatttccagctctttacaactcagccacagagatcctcatctggaagcttattctacccaagtaaatcatatctggtacagaacacactgccacaggttctgtcccccgctcccatctttcagtggacttaaatgaactgccagaccctatctctcttttccataaaattaaatctggaattggttcttctctccttgggatgacatagat

SEQ ID NO: 36886 - DNA, 1607 bp, Bovine  19866880770240
  misc_feature (1)..(1): n is a, c, g, or t
ncaggccttttacgtcagaatgtctgtatcaacctcgttcttctgagaataggcagagtgatcaattaccaggacacaccatcatttatctaacccagcactatccagcaggtttctgtgatgatatcctgtatctagactgtataacctggcagccactggtcacacaaggctgttgagtacctgaaatgtgcctcatgaggcagcgggactgaatcattcatttttcactttctgtaatttggttaattcgaatttaaaaatagtcacatgtggctagcagctactctactggacagtgcagatttaatgagtcccctaattgaagggcatacattagtttttcctaaattatctccattagatattctgatgggatgcacatttctgtgtgtgtgtgtgaatatctgagttcattattccctaattgaggtttcccccaatactttgtgttctctattaataaaaagccggtttcctataaactgcattcatttgatggaataaaaggcagatgtgtccatatatttgctgctaacgagccttgaggcacagagcctctatgggcattagcctccagtacggaggtgcacagttgccctgaagcaaccaaacaggctggaccttctacaaggtgctactgctgatagctaggctttcaccaaggaggcaccggcgctaatctcccacttgggaagaagggtcttctggctgcctggcatgaatgagctggcagcaacttcttcacttcggtgtttacaatatggcatcattaatagtgctcatactaaagcacaccaagcaacattttagtttgtttcttaatgttcctcaattacccattcctatctcttcctacccatccccagaaaagcataaataaggtgtttggctgcagctcatgtaattaggctgtgaccagagctaatctgttgcagtggatgaagtgtgtgttctcaggactatctctcactacaacatggggagggagcccttgatgccaacctcactgggtcagcatgaacaatgagctgatgttggagtgggaagagaggcaaaggaaacagacagctgtgtccctccagcatgaaaccccacactgacccctgggtcatcatcacacactcagcgcctgcctccagggctgctgtgaagggaccactgtcgtgttcctgggaaggaagaagatggtgggtgttcagtttgtttttatgacttcatcaatgaacttaaaataattttttaacctagtgaatattaaattctaaccagttacatctttccaaaggctcttctcatctttgttaacattcacatatatttttcttttatagctggaacaaaattgtagcagcatcaacagacctctaaataaaggaaggaaaaaaaatcacctgtgatgctgaaagccctacaaatcaaactgttttcattttactgtgctccctttctgtctttgttcatgggcatacataatttatgtctgaaactgctctggtgattttggttccaggtatgcaccaatgggattaaatataactcaaccctctagcacattttcttctgggccctaagccctcttatttcttctgcttctacccggcctg

SEQ ID NO: 36887 - DNA, 1120 bp, Bovine  19866880781731
  misc_feature (1)..(1): n is a, c, g, or t
nggcgactaagctgccgtcggtgttcaccctgaagtatgggcttgagacctcatagtgcagcttgtcatttcccttgcagtcactgaaggtcactggcaaaaacaaaacaaatgaacagaaacagaaggagtgtgagcaggctgggaagtttaatgctggagctgtctttgacccttaaatatgacttaccactctgcaccccagatccacgagtgctgagcctcacccactgcaccctcttgtggcctcatggctttgactatgtgaaggactccactcagtgaagagttccttaatcacctcccctgtcccaggcaggtgctaagccttttaatgcccaaagagaacctcttccctgcttccacactgggagcagaagatactgcagacaaggctgggaactgagacagagggtcccttgttacttctcatctaggttgagcccagcagtggagacaggtaggaaatgaaggactcagccacggcctccccttacttccccaggctctatgaacaaccattcatgacagcatttagcctactttgttcaactttcacttagctctttggtgaagtcaggggtggcgccttttcttccctcagaatccctataaagctttgcctagctgctaagtatggttggtatctgtgtgtgagtgttgaatgaagttttgacaaaggacagttatgacagcatttattgatggcatctgagtggcaggctctattataaggaccatacattcagtctctccttccagtctcacaaccattctaagttacggcacgcatttcccaggttcatttttattatctcccccaacaagagaaatgtttttaggtattgttgcctgatcatcaccactctcatgcattgtcagggtcatagagctgttgtatgtctgtttacttaccgcatgtatatctgtactctacacacacacacaaagtacaattgcttgtctttctcccaagaaccctgtgtcacccctttggtgacatagagccccctgagaatgcacagtctacacacatcatttccatagcatgggaggcaagactgagccttgaagagactgactgacatgctcaagaccacacactcagaaaaggcagaca

SEQ ID NO: 36888 - DNA, 1512 bp, Bovine  19866880787815
  misc_feature (1)..(1): n is a, c, g, or t
nataaagctcccttggttacattagaagaagtagtgggatgccacgttttgatcctagaagcttgttgaaaaatggccctttaaagacgaaagcaagtctagttactggaaaggagagcagaataaagagttatttggatgtgaggaaaataaaaggctttagaacaactgaaggaaagacgtatcggagtgagcggtgaataaaatattatggaaataaaaggagcggaggtgaccattagtaacagttaaaacagaaaaagataagtcattgagaattgagaagaaagatgaaaaaagataaaaggaaatattactgtctgaacacagacagcaggaagtcgtggacagaataaacatttactggaaggtgctgaacgctgaacacagaattggttgaatctaagtctggggtgtgagcagatattctatgactgccaggcaaagacacaacactttcagacaagtttatagagtggtgaaaagtgtggacatcaattgattgattatgttgtattttatacttcctgcaagacaaaagttcatgatgattggaagccaaagctcttgtaaaatattacagagacaaaaataaaaattggaagtgtcagtgtcataggaggagttcaaggtcatgttactaacctggtttcttgtaacctctatttttacctagatcatcagcttatgtttacacgttactgaatgatccctaaccatttccaggatcttggcagtgacctcacacatctaagtatgcttaaaccactgattctgtttgattcttcccagttttcctcccagatgttagccttgtgaccatatggtcttcattctgagagaatgcaccactcactggctttttggctaatcacatttttcagaaagagaaaaggtcttcgttggaccacagagaaatgcatgaaggaactaagaatcagaagggaaggagggagatgtaaaatgttggttgcttggggaaaaggtctgttcaaagttttggactttttatttcctcctgcatgttgaacagagaaaaatacattgttattacttctggaaatccagattttcccgaacagtagtcagtaggcattttcagctccgtggaaactttcttctttatttaggcacaattaactttattcacagtatctatgacaacctatgctcactgttttgagatagactgaaaagtagcagcccacatctgtttgtccattttctcccctagtaatacatataggcccacagtttcattgacaggggagggggctggtcaaattttgctgatccaacaattcacttacaaaatcacatataaatttttaaatatcctcaaatcaccgacttttactgaatgtgctgtcattgataatcaacccagttccgtttcacttttactagcttacatagaatcaacaaccataacccactaaattacctagaggattaaaaaaaataaaaaaaacctacacagacacacacaaaactgtaatatggaatgtacag

SEQ ID NO: 36889 - DNA, 950 bp, Bovine  19866880789806
  misc_feature (1)..(1): n is a, c, g, or t
ncatagattttcctggtggagatcgaaagattgcaaactgacatgtagaaacacaggatacttcttgaaatctaggcggaaatggtcacatggtcacttcttaccccctggccaaagcaagtcatttgggaaaagtaatgcattctgtcacagctactgtgcattgggattttttaaaaaaggaatggttgttcaaaacgggttacctcttcctcatgtgcctatatttttaaagtaaatatgttgctcttcattgaatggatcaagctaaaattacctcacaattgccctttacctttctcattctctaaatgattctcattctctagatgattccatatcttcctttccatccactttctaaaatacaaaacttaccatgtccattttctgctcagaaaaaagcattattgagtccctgttttccaccgatagagctcaaatccttggctggcttcaaaatatccttcacaatatattgactgtctcctctatcaggctctgtcggatactctcttttctttctcccatctctgtgaattcttattcatttgtcagagcccagctgaaactttacaacttctgtgtacccttcactcattccctggagagttttctgcctccttatctgtagtttcctagcatgttaaacatatgtcaacatggcacttacgataatacattggaagtggtcactcacatgtctatttttctactagcctgtgaaatccttgaagatagggtccatgtcgtcttaattttctatccttagcacttctctctatgcctgtaacgtggtagatttcagataagatggtttgattgatttgaaggagatttttttttaattactttttttaagaaataaaaatggccatagcacaagtagatatgttcagtcttactaataattagatgaactacaaaagaacaaaccaaagttgcagaag

SEQ ID NO: 36890 - DNA, 1938 bp, Bovine  19866880793245
  misc_feature (1)..(1): n is a, c, g, or t
ngtttaaattaacagactattgcaacacactgttccatgtgcagaagaccaggtcttgttctgcaatatatctggtgtgtggtatgtagtaagaacccactaatcctttgctgagtttaagttcattgtgtcataatatttctctctatctccccacttgctcattgacttcatttcaaatcttgtttccttgatcctctaccaatattgtcatttttctcaaaatttccatcactccttttttagaaaaattaggctacatagtcactatctccacctccttatgacacatgcactctcttgcccctttattctttcaaggaatttgatatgatcactccccatgtcgctttaaggaaagggctctctggatggtcatcccagacctccatgctgctgatccagtggcctctttgagttttcttcctcctcactctcttcactgtgttgtggttactggccactcttcccttgcttcttggatatagcataatattggctctttttcctcctctctgaatattctttctctgcctcccttcattcctttacttcttcccaacaactcagtgacttaaaaaatctaactttttataccttctccattagcatttttcttttcaggtatcctatcataatttcattcaagagctaatgcctaatccctgtatacattcctgaacactctagaacagtttcacctgcgtgctgggtatctggatatcctgaaggtgtacaaactcatcatgtcaggaaccaaactatttctgacttactaacttggtttaacactagggacactcgcttagtcacccaggctgaagaccaagggttaaggtggcactttctcctcctcctctgctgccctccagactgcttcagtggccgcatcctgtccattcatccatctctttatctctattgccgcatttccatgccgtttctttttaactcccctcactggtgataccacagggtctgtgtcatctcccactggataaaagaaatctaaccacagaaatatgttccttattgtggaagttaggggtttggattcttgagctctgccccagacacagagatttaaccctgcagagtctgctctgggttttacaaacagcactttctcaacacttaattctccttctcttcctccatgacctttaagtttgtttgtttgttgtttgttttcactatactcctttttctatttttaaacagctttactgaagtatagttgatatacttaattttatgagtttgggcataggcatatacccatgaaactatcaccatgagcaaggtaatgaacattcatcacctccaaaagtttccttatggcccccttttttgagggtgagagcacagcacaaaatccagcctaagtttttaagggcacaatgtaataagcttcaactgtttcactaattttaaagagatgaccaggtaagtttacaaaggtatgaaatgatttgagcctacttagactccctgttggagtgatgaaaagatttgacttatttattttaaaaaatattagaagaggaagtgctactttaagataatggaaggcacaggtatttatctctgattatttaaaataatttaaatcttggttcatccatattttaaagagcaccttgcctttgcaaaagaacaggaaaatgtggtgacattcaaacttttgtcagcgttttcaaattatcaacaagttaaaaaaaaaaaccagttggttctgaattgtgagctaaatatatgccacctgtaatatttgcctaaatagtgtacattcagaatggaatattgtttaatctcttttaacttgcaaaaaacctttcttttttctgaaaagacacttaaacttttggtgttggctacatatgaaaatatgtcaaacacccagattcgacatctctagatattcaaaactaattattc

SEQ ID NO: 36891 - DNA, 837 bp, Bovine  19866880829664
  misc_feature (1)..(1): n is a, c, g, or t
nataataataatagtaaagacagcaacaaccatggctaccgttattattgccacatattgactactctttctgtgtccagcattaggctaagtgcttttcagaaccatcttgtttaatcctgtaacaacactaagagagagagagaaatatccccgatttttcatgaggaaactaaacttctgtagattaactgatttatctgtagattaacttctgtagattaactaccaaagctaatcaggcagaaggttgtggagctgaggtctgaacctaggcttaggcaagcgtatactggggacgtgaacggcacccattgtgaactccagtccaccaaatgcaggatctgtatagcaccttggatcttacaacattcagttatcctgggaaaggcagtgtttccctagtctgtcagacctcagacctccccagagctaaagggggagtttcaatgcttcagaaatgatctgaacctggtgttaaatataccagctttgtatataggagttttgtaaattattctgagtgcatttcgacctaaattctataaattttccttgacttaaaaagaggctgcaggaagcagtggggaggcagacatagtgaacagacttgtggccacagcgggggaggagagggcgggacgagtgcagagcgcggcagggacgcacgcgcgctatccacgtgaagcagacacacagtgggggtttgcgcatgactcagggagctgaaacctctgctctgtgacaaccaggaggggcgggaggggtgggaggtaagaaaagaggttcaagaaggaggggacatatgtacgcctgtggctgactcatgctgatgta

SEQ ID NO: 36892 - DNA, 1920 bp, Bovine  19866880889610
  misc_feature (1)..(1): n is a, c, g, or t
nagcctaagacaaaggactaggtacaggtagcttccttcggcaggatgcaggcgtgagtggcaggggagggattcagggaaggagagagagccagtgtatcgaggatcattgatgtcactgctgcggaccatgaggtctcagcccaccggcccctctgagtggcgcacaaatgcctctcagaggactaggtctggaatcaggcaggttggggcacttaaccagctgcgctttccagcatcgagaccgacactggaggttgtcctgggaaccttccctcctgtgactttcccagctccgcttgatctcactgtaacctgtagcagagcagcaagcccccgggcagaatttgaaaaggttgcgggtactctgcagggcaaggccttgctcttgggaactgtagtgactgggatcggaggctggccacagtgatggattcaggtcctgatctattgagctgtctcctcgaatcccagacctcttcctttagaaagcctcctttgttatctccatggaattagagttttttgtgtagcccaaaaaagtgtttcagtcctggcaatggcagatatttcatatttgcttcattgaatttcctagggctgttaaggctcacctgagattatctcacactaagagtcctttatcaacttaggggctgcaggtcttaattgatgtttggctgcactaattttattaccaaaatttcatagacagacacatataccatcgattctagggcaggtacagcctctagtttctactaagagccaacaaaccaagtcttcctaattttgcattaagtaacatttttacaaaacactattttttgttttaaaaatttccaactgtctaattgattaatcctggaatcttaagagtgaaaaagtaattccattcagacaaaaactgtgactttattgagtgaattctttctggctctgttttagccagactcaaggacacatacctggtgaattcagtcctattttaggtggcaaaatactttcaaataatcttgaaaacaatacagagcttgttatccctgggaaattgctccctgtctcttcaactggcatgccctagtgcatttaccaaatccctgcatggaacactctctcttatactttgcacttgaaaactgtcaatcttctttccaatatggccttatttgtgacatggttccgtttcctattctcatctaaagagcatgtttttccttattctgtattttcataatacttaatacatattcctttatattaatacaaataataacaataggtggcacgttgcacctgttatgtggagtaggaaatggcaaaccacttcaatattcttacctggaaaattccttggacagaggagcctggcaaactacagtccaaggggctgcaaagagtcggacatgactgagcacagcacagcacagcacctattataatcctgtccctctcttcaaccttttgatttatgttaactcatcaaaccctctagtgactgtatgcatgggtggtggtatactcatttagagaaaacagagaggctgttcaaggttaagtaacttgccagaagtcagagaaatggccacataggcagaatacaggctcagattagttttggcttgttgtcccacgtttttccagatatacacagcttcccttttaataatttgaggaaaagatactgagtagcatttaattagaaatgaggtctagaatgctagtttcaaattgtatatgaggcaacagcaggacttgccaaactggaagcattctccccttttatcttcccaagaatctcaaaatcattgctcagcatcttacattaatggccaagaaggtggcaggtgttctgggtctggaggctgtaaagcagcaggaatatttcaaggaggtcagactcagggaggatgtagatag

SEQ ID NO: 36893 - DNA, 2648 bp, Bovine  19866880899225
  misc_feature (1)..(1): n is a, c, g, or t
naaataaacaggcacagttgtttgctttcgtcactaggaacaagatcataaatggcaacagctcagaacggccaatttctcgtttcttcccatcactgattcatgctcttgacattttccactaatttgctggcatcttccattcatgtgtgccctgagaatctctacctctcatccatggaaagtgtctggaaaacaattatggtttcccttttgttcctgtactttcttgtggaagaaaagaaattataccttagagcagattttttaaaaaataaaatagtatttggtcatgaaattactgcttttaaaatgttattgtattctgaaaggcatcctagttgttggacttctgcagacagccttgtgatctgcccctggcagtttgggttctcttgttttgttgttgttgttgtttggtttttgcttatttgttgaataccatttagaagagtattaaggaaaaacaaaaagacccatgttacattcagagaagaacaatcaagttgggaaaatataaatcgtatgcattgctcttatgatcacatgtatgtcagtgtcataagcacatgtatgccgtgtacataagcatactgttgcaggcatattcccaaggtaaatgggtgaaacacgcctccaggtttaattggcacttctgctgtgagccccacatcttgttcactgttctcctgggtgctcactgtggattcagactcatcagaggctcaaatgcaccccctcaacatcaagatagactctgccaaccccaaggtgtccatcactgattcaccttttgccttcacagctgcctctgaatatcggtagctggacaagcacaactaggtggatattttaataaagcagaaagtctaaattgccccccataaggccttcaagttttcaccttgggaaagttctgtgttatggtgccttatctccaagaggctccactgacctctaaatacctttcctggcagggttaacaccagtgattctggatctgatagcacattagaaccatccagattgcagaaacatcctggcaccacagccatgctgcagccctagcagcccaccggtacagaagatcatagtatatggtcaggcttgagaaccaccgggcttcaggattaggaaagttacatttctgagtgggaaagttgtatcagatgagttcctcacaacctgggaaaatcaaaagcttgacttgaaagcgcaggacatgaggatgagttttgatggggagcatgggctagagagcgaggtattgcccatcaaggcacacagatgtccccaaggaaggagaagacagatggtgattttaaactgacattgtaacctgctgttttcataagcataacttattctctgatggatggagaataggctgtggaaagagggaaatgagatagacaagggggtagcacttgtaattactcagaacatacggggctcaagccagggccatgatggtgggaggggagaagggtggttgtgaggtgtgatcagatcctgggaatgtgtggacagtgttctggaatgataatggcagctctgcctgcccagccatatacctctgtgaagtttcctaccttcttccctggtcctcctggtggttttgcagagaagctggcatcagctcagagagatgccattacttgcttaaagccctgtgtccagctttgaccaagcatctggctctcactgctgccctttttctactctaacaggctatatctgttccaaagtctgcagaaaatttaagactttcagaatttcttattgcatcggtatgaatattattaaatttcccgtaaacttgaattttctctgtttaaaaagaccatagatctttctttttagaaattgaggtgattaagattaatgaccaaccataaaattttataagcaattattacggtttactgtgcttccttcagctgcttgacactctacctttccttcccttgtttgtcaaagtgggtttgcacatcactgaccaagaccttggaatggggagagtgtacagccaggtcattggtgaacccatctttttaacttccggctataatgatggtctgtcagtgatagaagtttattagcatttactcaccttgcattagtaatacagcacggtacgttttccattttcattagcagtgtttgatagaatcattagaaaggaagtaaattctctggttcaacaaaataaatgcagcttttgctttgtgacaggtaatataaaagctttcttttgtctctgtgtgtgtgtgggaggggctctcatcctgattgagagccctagggttctgtagacccctgcctcccatgtcctcccagcacaccagacactcagcccatccctccagctcctcatgaagagtcatccttccaagcaggattgctctctgcccagcttctctgagattccccaaagtcccatctcaagtttttagccctcctctacagcctagctcctcattccacttaagacctcaggttcttactttttctgattgccccaattttagcaaactgaaggaaaagtagctggaagggaattctattagtcaggacttggagattgtatatgataggagcacattcacgttgctgaagtaaaagggcacttattattcccacaacca

SEQ ID NO: 36894 - DNA, 1302 bp, Bovine  19866881016886
  misc_feature (1)..(1): n is a, c, g, or t
nagctgagttttacttggatattgatgatctgtactgcaagagcatcagtgagttgatgaagccacaaggcagtttgccctggttcaaggagtatacaggtgatgatatagagaagacagatggggagtgaattctatcaaaaagcttggctgtctagggaaggtaagagatagggaaataacttcagaggtgggtagaattgaaaagaggatttttttttttttttttagttttctagaataaataagacttaaacatgtttgtaagctgccaggaagtagccaatggagagaaagtgattgaagatgggagagaaaggaagggtaattgatggagcaacgtccccaaggagacgtgagggatgaaatcaagagtgcgggtcaagaggtgaggctgggagaggccagctctgaggcaggtgatatttctgtgcaggctttcggcttttgtgcagaagagtgaggaaggcatcaatcacctcctctgtggctgggtaaatgccaggaaattctacggcagaaacttccccaggcagcaggctcagaattaattgtgaggattaagcataaaccaaaaggagcagggaagtcttaaacactaaatcccaggaatggggccttttcggattaaggaaatgcttctgagaatggtccggcagccagaatgcggagggagacctctaggtacttggcaaccacacgaatgccccttgtaggattgcttcacatggtcaaggtgtatgttgattttttttttttttttttttttgctgtgattataccttcagaacaagaacacaatcttggagaattaaacacaaaacacaattttggagaattaaaatgtctgcatgggagaaaaaggcattttttgaccttctgttgacattgtcttattcttgtctcagtttgtttgcaagcgaagcaaggaccccaagttagaaatctccttgcagtaagttagaaatctccttgcagttgttcaaatatgatttaactgaataacaaaatcttggtggaacatggaggatttgcccaatgtggagtgtgtgtgtgtgtctgtatatgtgtgtaaatgaataaatgacattcttgggtgaatgtcatttattcgtgtcctcctgccagggagcaggggtgagaacatgctgaccctgtgttttacccagcatgatgacagtgggccaagccagcagtgtaaaacaaaatataagtatttggtgaacaaatgagtgcgtgagtgaacagaggaatgtatggatcaaagaatgaatgaatctacctgtcaatctctaggctcta

SEQ ID NO: 36895 - DNA, 2816 bp, Bovine  19866881028887
  misc_feature (1)..(1): n is a, c, g, or t
ntctcgagcccgggagcccaactcctgaggcctgcgtgccctagagttcctgccctgcaataagagaagccaccgcaatgaactgcaagtagagagtagcccctgcttgcctcgaccagagaaaagcccatgcagcaaccaagaaccagcacagccaagagtaaacaaatagatgtaaataatataaacaaagaaacaaacaacctggaagagggagcggggaggttctaggagaggagaaactaaccaccaagtctttaacagagtactgggaacataatagatattcaatcagcggcgctccccgccccagtcctcatgtgatatttcaactgttttacagaaggcaaaatgcaggccacttggagaggttgagttgcctatggtgcaaaggttagtgatagagttcaaactgagttcaaacctagttccaccacactccaggcttttcactgcactgctctgcgccctttgactactgtgtttgaaaaattctctaaacactagtaattaaagagaggaatatttcacataaaatataacaaatcaatctttattggattagccttccaatccacttgatgcacaaaaatggacaaactgactgggtatcaagaattagtaaaatgtcagactttggtttatgacctagttgagaatgccacgtgaatgtcatcattccctctagttcacactagttcagtgaacataaatggctgtggcatcaaggattagagttttgattcactatcagtgtgcattgggaatcaccaacgcatttccctagatcctgaagacattctacaaacccataatgctgatttttcatggttgatgtctaccttctctgctactgctactgctaagtcacctcagtcgtgtccgactctgtgtgaccccacagatggcagcccaccaggctctcccgtccctaggattctccaggcaagaacactggagtgggttgccatttccttctctaacagttaccatttacagctagatacttaatacatatttctttcagttctctaacagtcccatgaaggtagtgtttcatggatgagaaaactaagactcagagagattaagaaaacttccgtgagtcacacagcattgagtagcaaagctggagctctgctctttacatctgttctagagtcctgtctcaggtcttggggggaagaggcaagatcattccaggatggtgaaattcaaagtaaatgttagaagtctattctgtagtttaggagcccatggattaacaggaagttggtctgcctagaggtgaaagaggttgtcagtggtagagatgagcagaatgttgaagccaatgattaaatccatcagcaggaaaacccatatagcagaagccagaagaccctgtagatcaaagctcagggaatacttgaactctgaaaaaggtttaggaaaatacatgaaggggacccagccagatctttatgcagccccaaaacatctaaaagttttcaagtgcttttattagcatggtttctttaaaggatgaaagaaaatatgtgtggaatttgctaccattgatccgtctataacttttatcaaggaactttggagatttgaactttctgcagaccagtgctctgctattctacagattcatcacaaatccccagattacaggcgataagacaacatggaggggggaaaaaatagcatggaaatttggtccatgatcttcagaatggtttgattttcattaagactcgtagctggtctgcagccagtgtgtggatgggcatcctgtgtatgaagagtcctgaggcattttgaacaccccatcctgcattccctgtgcacatctagagtgtttccatgcagagatgtccttgtgctacctgcagagcagtgtttggaggctcaagtgtttgttgcctgaggcaagaatgagtgcccttcccaaaaggtacgcctgagatattgagaggttggtgacttaataaccagaagggataccaatcaaactgtaacacagcgccaaacactgacttgtccccttcccaattttctcctgacctaggctttggtaacctaacctgggagcttcgtaagaagctccatctctctggctatgctctgcactaaccctggtaaaagttggcagtcagaaatattagtggactctctgtggttgtaaccaattaattcactcacctcctccctaattgcagtgggtgagatgctcaccagctgtgattacaaattggttctgtctagttgacaagaccttatcaggaaattaaaataaagtgatctggcttacaatacatgaagcacaattaattattgcatacatatatgggtttctgatataagcaaggaaatgatcagccctctaggtcatgcctattcatcctccagttgccaagagatttttattgcatccctgatgccatatggcattgtctctagctttagcctcatgggaacgcaggaggcggcctgccaagaatatctcatcacttgttaaaggtaccccgttttcctgtgatttcttctcttgacaacaatggcccacattcatttccttaagaagtgaaagctatcacagctgaaggctttccaccctacctgaattatcaggggaagtgcaaaagccaaacataaatcacagctttccatcaaaagtggcaacttttgcaattgaaggattcttataggggatcttgagtatagtactgtgattacagaaggccctgtgtgtctggaagtgttctttttgcacctacccacggcaagtctcaggtcccgagatttattgcttgtgctttttctttatg

SEQ ID NO: 36896 - DNA, 1795 bp, Bovine  19866881081398
  misc_feature (1)..(1): n is a, c, g, or t
ntctccaaatttgtttaactcattatttataacatcattaaatccagtgacactaaaaggtgtcactgtgagcatcaggcaagtgcaattttaatcctcagaaaacgtgtccgtgtctttctttccttccctcccccaccctcatcagggaggatggatggaggcaaatgctagatttgcaggatgtgcaacggtctaaactttcactgaatcctaatcaacttaatatcctgttgcctttttgaaattggatgatgaaatgtaaccccgagacagcttaaacagaactcaggcccgggtgctttccgcaaaatggcctaatttggtagttatagcactagtgtggtatgtgcagcgatcaaatcccgtgttttcaattgtcctttttatggtcaattaaggcagtcttaggatatagatttaataccggagcagcctaatgtaacagactaaagcgtgccctccaattatggggagaatgtctttttgtgacagtggttctcccggtaagttttacaggcttctatttttgaacttgactccaagggccaaagcagcacagtttgaaaatggttttgtaaaccgtaacgagggcgtctttctttagcagcttcctgcctgaagacggcagagtgctttacaaacttatcaaagtgatatacagggatcgtttgttctctgctgaaatacagaggcctagggggaaaggcagtcactgatgaaaaatctcagagtgcccgtgtggacagcaggcatggggagcgtggagcatctaaagcacactcctcaactggaggggctggccagataggcggaggggctgtgctctggggtgccacgttgcttcagggaagggtgcctggtgagctccttgtaaagctgcctcttcccttggatcatcccttatgtctgcggcactttgaggtgcctcctgacacacatactctaaaaaaatgggcacgtttcactgctcttgatttcttagcacaggagatcatcagaggggctctgatacatcacagcttctcgatgccaattaactatcctgaagacctgtctgaatcatagcatgaaggaaaagcagtctgggccttaaaggactctaagaaatgttcaaagcatttctgagcagaagtcttttgggctctgttttaattaatagtttaaaataattcatatttaatatatcaaatgtttctgtggagctgatgatgtttaaatgcctccagacagtggttccttttcatcctattgattttacatagagtccaaaggtcagttccacagagggagcatttatttgtcactttccatgtacatcaccacattcaggatgcagtagaggatgcagaagtgaattaattcgtgggctctgagaggctccggagttgtaggtaagagatccacgtgtaaaagattcagaagcaagcagagctgtggttaatgccatgatagatgcgcacgcacagagcccagcagcatcctcagtgtatcagcatctttacgtctgttgagttgtttaattgtcatacatcttacgtttggttatgaattaataaagtagaagatctgaagaatttcccccactaggagatgcttatagagtatgtagaatttatacttctgcattttcatgtgacacatttgggtcttcctaaaacaaaattaaatttaccacagttcacgttaatgtgtagcagatggaaatatgtggaactattcaaagacaaaaggatgggaaaattcccatatccacactcacacagctgctcattgtaaaagtgatcactggatg

SEQ ID NO: 36897 - DNA, 1396 bp, Bovine  19866881110023
  misc_feature (1)..(1): n is a, c, g, or t
ntggtactccttaagagattaatgcatctggagatccattggtccatctgttctcattggccatagatcatgtgctcattcatttctttaaaagaaagaaagaaagaagattattgagtgcctgcctgtcatggaccaggcctagttctaggtcctggagtaccatgatccataaacagatatttagttatcatcatgaaactcttactgtagtgagggaaacaaacatagaaagaagtggacaataaaatgaaataatgacaaatgatgggaataaataaggaaatgaactgatgagggatggcttctcctctgaagaggtgacgcacaaacagattctgggaggatgaacaacctggaagtagaggaacaaactttccagaaagagagactagaatgtgcgaaggctcaggtgtagggaaaagcttggcctgcctgatgactgagggacgagcagggtgcagtgagcaaggggacagtgcaaacaggatgaatttggagacggagacagaggagagctttgcaagtccttaggggctgtgaccaatttcccttttctgtcatgtgctaggagagaattttgtaattcaagacatactcacttttgaattttatgcaatagaaacagtagacaaaacgtccatgtggagtttggggactgaatggggacacacagtgggccaacagtttgagagccgctgctctgggcgatggatgctgatactagaggtgcattgtttggtagtttgctgcaataatatgagaatgaaaacaacagatgtgcaggccgagcaggccctctcctgcgcacgtgcactgttctatcgatgcagcccactcgcgtgtactcagtgtctactcagagccagacggtgtgtggccaagggaggttcacgggagagaaagacagatgtcatccctgacatcatggaaatcgcacgctggccatttgaactccataaaagctcagcttaagaaacaaaaaagagtgttggatttgccttttctggttctcatttgattaacttcctgcagctgtcacacattcagaatcattaaaatatagttttctgtgcttaacttgcttccacagattaactttccacagctcattatggtggccttgacctcggtctattcataaaagaccacaaaaaccattaaccgggtgggttgctctttctaggagcagcacaattttatctactagaggcattggcagatttggattgcattgtaaataaatttatccactacaaacattcagggatctgcctttcattgtaaataaaatttcacaagtaattgttaagtgatggcctcacaattatactggcacaagaaaaccagccagagacagattcagggctttgcagtaaatattcaaataggagcc

SEQ ID NO: 36898 - DNA, 1458 bp, Bovine  19866881110592
  misc_feature (1)..(1): n is a, c, g, or t
nctcagaatgaagatgtctgctgacggattcctaatcaatacttgtgtgtgtccaggagtccccagagggcgttccacacagggcccacatgcagtctcactcctctctgcccagagctggccggccttgcaacatcccttgcttcatactgaagtcctgttttctcctgctggaaaacagagctctaccctggaagctatctctgtcccacggcggagggccaggatttcctgttttttgcacagctcccctaatgtatcaggagaccaacagccctcttgtataccagttctaagaaatgatgcctgggtttcagaggcctgccctgccttcatgtccagtttccacttagcttcatctgaaacctcccagctcagaatttgtctttggagtctcatttggagttgaactcaggctattcagtattgttgatcatgtttttataggttcctaactagactacaaacacctggaggacaggatctgtgtcttatccatcttagtattccccagagagtttagcgcggtaacttatctatgctgggtgttccgtgaatgttgctgattgactgcctgctacgccagccccaggaggtgaagggcttctgggagagtctctgcagggaccaagtatttgtctcttagcctattcaattgtaacaatagatcaaagcaagacttcaattatccttcactttcattcccaaactctctgctttgttcattctattgaaaaggtctggtgacagagagcaagactctgagagagagagaatgcttccagagccttaagaaagcagtgtagcaggaaggacatatttcaatgtagttattttccaccaaggctaatattgtgctccaatacttcagggtctagtgagctcatcaacaatgtttgcctttaattttaccatttgtacccagtcatatgttacttgttatggtttctgtctagctccattttatcaaaggcatcttagggctttcattgtctctgaaaagttgctgtaagatggacgagcatggatatccatcacgtttaactatctccttcatcactcttccatcgtctgttaaaggacaaattgttcacatgctcgttaaaaactggaacttttgtgattgaatggaggaaggaaattgcatattggattggggtgaggggaactctctgcctgatttccccctggggagggcccttggcctttacctgaaaggtggggaggcctcttgcttgcaggagagaaaagcctgcattctctcagaaaggaatccatacagcttcctgagagatcctcaactctaagatgtgtcttagaatcatcaggggatagatgctggcctcccacctgctctggtcaattaaataaaaatctcttctttggggcttgaaaactggcattgatacggttttaaaaaccctccatgtgggtctgatgtgcagccagaggggtaag

SEQ ID NO: 36899 - DNA, 2295 bp, Bovine  19866881145258
  misc_feature (1)..(1): n is a, c, g, or t
ngtgtattctaatgccctgaaacctatgacagtggtgagtcatatggcaaaagaaattagggatacagacggaattgaggttgctaaccacttgaccttgaaatgggaagattatcatggattaatggattatctgtgtaggtcccatgtaatactgaatgtcccggtgaaagacgggaccagagacaagggaagatttaaagatgctgttggttttaaagatggaagggagagttgtgtgtcaaggaatgaaggtagctctaaaagttgggaaaggcaagaaaattgatgttcctctacagcctctagaaggaactggataacaccttgatttttgccccgtgaaacctttttaggacttctgatctccagaactaaggcatcttttgttgttactttaatccatttagcttgttttaatttgttacacaagcttacacaacaggaaattaatacagttctgatgtcagaatcttgaaagagaactgtagatattaacggcataaattctaattttctggggacctttataaatgttttaaatcaattctcatgtgtaactctacagagtgggtatcattatccccattttacaggtgaagatgccaggactaaaagttagctaacaagtgcaaacactgaaagttgaatcaaggaaataaggtttcatagttcctgtccctaaaacagcactgtacttcctttttcagaatggaagaatagcaagaaacagccctcagacagtaagggaggaggagggactgtgtgttaagctacagaagctatgggaggaccagttttgagactggggtaagaaaagaagaaactattattagaagatgaagcatgggctgtgcaatggtctagactagggagccagtagtgtagcctttgagagacttactgtaattgggaagaagagtcaggaaggtaggtgcagtggtgcagcaaaggctgaccgtgagcactgtatgtggggagatatatcaagaaatgagagtttccccaaaaattcagaaagtggaatcaagcaaaaaaaaaaaaaaaaaaagggaaagaaaaaaattatgtggtttgttgtttatggggcaaaagacctgagtaaatactggactgagctgacattaaaaaaggaaaatcttccttgtagaattcacagttgaaaccatagaaatccagatggttgtccaaagaaactgtgtaaagacagattcttgcagcagaaagacagtagtagtggaatagtggtttctctaaacagttgtgtaattttttttttcctttttgacaaaaaagaagaaaggaaaatacttgaaggggatggagagaaagggaaatacagaacagatggccttaagacttaaggttaagtcttagcaaaaagagatggtccttcctctgagaggagaggaggaaggcacgcacagagggtggagaggaggatgaggacgttcatctggacctcactggatttaccacctcaccctccagagatggggtgtgggaggattgcctcaagagtggagatttagaactggaattatggtacatgagctggggaactgaggaaagaggaataaagcgtgcttcagagaacaaatttatcagggcacaaactttattcacaagcactgaggattaatttacttttgcgatatgctggtgagaagcaaaatggaagtatattattagtttcctccttttgaattattttgaagtgaccaagtgaaagtcagtaaccagatcaatggaaaatgactccgttgaaatggagtcccttttgaaaactgccctcagccgatacggtgtgtaagtcagccaatcacaggaggccgagcctctgatgatggtgcttcccaggctcccagccttcctttgtgctgaaatgacagaatttgggggaaggaaaaaaaaacaaaacaactcagcagtcatgtgttgtcctgaatcactaaccagaaagccccaggagggtttcaatacactggattaaggagaggagctgccgacaggaactccatgacagagacttcaatgcaaacagttgttcccttttagtgctcatgaatgcctggccatgaaacaaacaaacgtttcttgactattaggagtcatgagcatgaaacatgaggaccagaaaagacaagaaggttcatggatacagttcatgaagtctgagagctctagggctttgcctgggcaagatactgaaaccaaagtctcagctacttctattccagaacatagaaaccaccccctagcttgttggggaggattaagacggaatttttttta

SEQ ID NO: 36900 - DNA, 763 bp, Bovine  19866881239041
  misc_feature (1)..(1): n is a, c, g, or t
ncttgcttgcttgcttgcttgtaggcaaagtgcaatgtattttgatttcatcagagtatacaaaaagttcccctttagactttatgcataagacagggaaatgtgtgttcatgtggatttatcacctagaccaaagatcaataaactttttctgtaaatatgcagtcagtatgtatgtcaaactttgctgcccatattgtctgtgttggaactactcaattttgccattgcaatgtgagaaaaatagacagccatagacactatgtaaacacataagagtgcctgtgttccaataaaactttatttacaaaaacaagccactggccggatctggcccttggctatagtttgccaacccctggcctagatggttgaatgactgtaaccctaatgtgccatggactgaactggcaaagagtttctaagttgatcatgtgagaataggctgactacattgatgagtgatacaaagctaggagaaatattcaacgtgatggatgacaaagtcacaattttaaattaggctgagacaccaaaacaaccagtccaaattaatgtgatgtaagttaatgcctaaaagtatactgttctttgattaacaaaacatcataaataacaaaactaagctatagtctatcaacacaatgaaaggagaaaactgggtttggctgtaatcgctcaaaaatgactgggggctggccagcgacttcacttgttattcattcactcacttctgcagttttcagcaataaagtccctgtgg

SEQ ID NO: 36901 - DNA, 775 bp, Bovine  19866881292203
  misc_feature (1)..(1): n is a, c, g, or t
nccccaaatggtgctctggtctatctaggtatgacagcagaattctagctactcagccaaacgtaacaggaaatcagtcacactgttctattcatccttatgaatctaagaaaataggagacagaggaatcttagactttacagcatgtgcgttttgttagaaagatagttcctctgtcatggggcttaacaacttttcccaattcaattaattggaatctcacagaaaagcaaatgccgtaaaataaaagactcaaacatctgggaccccaagcagcatccagtggaaaacactaatatgatgcagtttcacagcttgcggatgggaatattaagagccttcatttctaagaaccactgctcagagagtgtgcggcttcttttaacagctagttcacaaggcaggtttagatggtgggttttctcagaatgcaatttagtgaggcatctccaatgcatgcatgcaatcaaagtatactaagtgaatgtctctttggggctagccatggtgttagggtataatggaacacacacaaagaagacacaagtcatttctggcctcacagagcgtggggtctaactgcctttcaaaaactcctggcctagaaggagagagtcagggagaaaaggtaaccccgacaagacatgtgactgctggtcaagagacgcaagcagactgaggcccctgcaccctttgttccctcttagggctttccacggccaaccagggtccacaggaccaaggagccctgccgacagcatccatgcacacggg

SEQ ID NO: 36902 - DNA, 1277 bp, Bovine  19866881297171
  misc_feature (1)..(1): n is a, c, g, or t
ntagccctagtaaaagagagaggggtgtaaaagtcgaagacaaatgtgctacgattctattcattctataaagcataaagagcacacatttgtcatcagcatgggaaacaaaagtcttcctgtatcatatttcagaaatatgtaatgcagtctctgccaccaacagaaagaaaaaaacatcatctatgtcaagtctctgcttccttggcttgagtcttagcttctctctcattccacaatcattgattgagctggatggtgtgggaagccttgtgagcaagacaactgtaattttgccagtgagattattcaattcaggattgcccacacattttgcctgtgacctctatggctggaacccttactcccctgccccttgagagcagctggtccttctgtgccaacaacgtatacagactcaacaccttatcttagcctatccttgtgtgatgcgattatggaagaggcagccagagggcgtcaatgcaatctctcaccactgtgataaggttgtcattccctgtcactgaggtggcgagaatgtaggagtaggctgggagatttaaggcactgccactttatggcaccaagagtaggtccagaaagccaggcatactggactagggtttagaaccataatggggcagaaagggtactgtggcaagaagacaagctagaaagatcaggccagaatgctaggctcatgcagatgaaatgtgggcagaaagggtcagaggtgacccagatgtgggaaaataacagccaaagcagagagacagagagtttagcgagaccacacgagggtcataccttctcatttgtaacttgggttttttttttcagaatgttgcttatgttataattattacataacataataaatcctggttttaagatgagaacactaagccacatggaggtcaaagccaaataacaaggctaagttcagagcgctagtaagcggagagctgatgtccttggtggagatgggcactgtttcctgcaggtagagcccggacactcttaggcttgagctgagctgcgggcaggggctgtttgccctctgccatctggattctggaacgtggccagaccatggctcagaggaaacgcccatctctaagtgtcactgacttccaaaaatagcaagagcagagggttaggccttctgggagatccttccaatatttttcttagaagtgagcacatccatttcccaattaattatctccattagctaagctcaattactctgggtccacctccaagaatacaac

SEQ ID NO: 36903 - DNA, 1298 bp, Bovine  19866881324861
  misc_feature (1)..(1): n is a, c, g, or t
ntgttcttgcctggagaatcccagggacggggaagcctggtgggctgccgtctatggggtcacacagagttggacacgactgaagcgacttaacagcagcagcagcaaatgtgttgggaatctatccactcctctccttctttcataccagcactctgttctgagttaccatcatgtttttgctttgaataccgatatgcctcccagctggtctccacatagccacttttcccttcctccagttgctcttttctcctcagccagagccatcctttgaaagctttgatataatgcatctgatcatgccactcctatgcttaaaatccttcagtggtttctcagtgttttgaggataaataaaaaacaaaccttcctcatcagctacaaggccaggcaaactgctctgatctcctctcaccgctctgcactgtaaactccagccgtaccagtgttggctcatttgctgagatcttcatggaccaaggcctttacacacacttccttctccatcaagaatctacctgcaatccaccccagaggcttcacctaattcagactcattcatccttctatgtcatctctatcatcaggctgggcttttcttctcttttcgtctctctcgtgatgccacgtgcatctgccccataggccaggttataaacatcacttccacttattgatggtgaataggtgattacggtttacctctcctgactcaatgcgatatacaagggcaaggaatttctttttaactcatcgttgcatccccactgctgggctaagtgcttggcttgtaggtaattaattaataatgactgaattaatggatgcatgggtgaggtatgtagaattagacccttttaacagattaggaagctagggctcactctaagtgagaacttagaagtatcaggggcagggtgcagtccccaggtcacaaagtgtaagacactttaatacatacagtagcgatgacagattttttgttgttgttgaaagaccctccaatcacgctacactaatttcagtttgcactctacccttttattttttctgggcacataggatattttgagggtaggaaccagacactcttttttttttttttttactgtcttgatgttttctggatgtcctgcttaagcctttcttcaagtgtccaatcaaactaatccagtgaacttggctgctgaccttgctctcacaaatttgccatctcagaatgattgatgtctgcttggtccctgttggaaaaatggctgcagatatgatccaggaaatctatagtcacaaatcta

SEQ ID NO: 36904 - DNA, 815 bp, Bovine  19866881357623
  misc_feature (1)..(1): n is a, c, g, or t
ntgactctccctgtgagtggtgaattttaagtctgcagttccctagcagggaagatcggtcaatctctacagaatgacaacgcacgcacagcgagacacagcgactccctcagctttacgaaaaccaagctgagcgtctcctctttgagaaaatctttgccgtcatcatttgtccagtgtcctaactatggggagagaaaaggcaccttaaaccctatctctgttgcctttttcaagcttcatgtgtttcatcaacctaaagaactattcttccaacagaaaagaatgaattgataataaaaccccacaagaatttcattaacctagataccacttactttacatggccagacgcggactagagtagggcgcaataataatccatattttcataagctcaggaaaacacgacgtaagtacggattcttcatcaagctaccttaccagggtcatctgaaaaatataaggtgtgtgctaggtcatctttaagacccactccattcctagcacttcacagtcagcgtccacagactcatatcctgttcttgccatggaaaaaagtagaaaagatgtaaaactaccaccataacatcactgcctgaaacaacgacaagaagtttccctggagtgtttggtgctccgttaatagggcataattagaaaatgcttatatcagaagttttttgttctttttttaatgtgctgcttcactacgaatgtaataatagaaacattagcagacaaagacccaaagcaagctgaaatatcacccaaagctcactgcaatgtttaggctataaattggaaattaaaat

SEQ ID NO: 36905 - DNA, 1595 bp, Bovine  19866881395957
  misc_feature (1)..(1): n is a, c, g, or t
ncactgtcatattttgccttgagcaaattgcccctttgctgaatctgttttttagacctgtaaagtagagatgctcaaattaacaaggaactcatggggtaattataagactagaatgagctagagagcatcattttactggctcagaggtaaagctgggtacaaactttagcagttgtaactgtgactgttattattatcaacattttactctgtgggtccatctggattttgcagtcccctggtccatagtttcttttttaattccaggtttgactaaggtgtatttggctggattcttcttacttgtctcagcttagctggctcccacttcacgcatctttcaagatgtttgtggaaaactaatcagcatctacgtttgttttctaattctcttttgctcccacataccatggccacttgattagcaatcagcactgtgttggcagtcacatacaggccccgttccccctaatcagggatgtaggaagcaaatgctggtgttaaaagggaacccttttttgagctcctgtcccatgactcctaattgttgtatttctcaaactcaacccagctgcaagctttattagggaaacatttattcagataacaggcctcgtgtatgaaagaggaataattattttgcaaatgcatttgaatcgctgtatgctatagtgcaactcatctcccaaatggagaagatgcacatttggactgaaatgttgctttgtagatggacaatgcagcaggcatatgaactgggagcttctggtaaatgatagaaaaacgaacatatgaaaagacaccatcaaaataagaggtaaaaaagtgatcgaaactctgaaaactgatcaaggtgaacaaaatgcctaaacttcattcctgaacatgttcattcactcattcattcattcattttccatgcaatatttttgagctcctattatatacctaagggcttccttggtggctcagacagtaaagcatctgcctgcaatgcgggacaccaaggtttgatccctgggttaggaagatcccctggaaaaggaaatgtcaatccactccagtattcttgcctgggaaatcccatggatggaggaacctggtaggctacagtccatgtggtcgcaaagagttggacatgactgagcgagttcactttcactttcattatataccttgctctcaaggagcttcatggaagagaaccaagcacctgggctctaacatcctataaaatgtaaataatattggttcaaacctccattccatgccttgtgaatgctctgtgatatctaagaaatttgaggcattccatggagtcccatcacttcatggcaaatagatagggaaacagtggaaacagtagctgactttatttttctgggctccaaaatcactacagatggttattgcagccatgaaattaaaatatgcttactccttggagggaaagttatgaccaacctagacagcatattaaaaagcagagacattactttgccaataaaggtccatctagtcaaggctatggtttttccagtagtcacatatggatgtgagagtggactataaagaaagctagctccaaagat

SEQ ID NO: 36906 - DNA, 1991 bp, Bovine  19866881422744
  misc_feature (1)..(1): n is a, c, g, or t
naatgtctgagtgctatcttaaaccctgagggatattccaccaccaaactcaatgctattgaattgaagacatgtaagttgacagccaaatactatttacagccaaatctgctaaaaattcaagtgaagtgaagtgaagtgaaagtctctcagtcgtgtccaactctttgtgacctcatggactatacaatccatggaattctccaggccagaacactggagtgggtagcctttccctcaaggggcaataggagtagctaccacattctaacactactgcccagtcagacgttcaacttttgcagagcattaaattagtctggattcttttgaaaatgtggtcttgtcatttcagagatctgttacgtgaaacccagagaggcataaaggaattcacgtgaaagcaaagtatgtgttagttaaaaagattcctctggcccctttatatttacccagctaattcagacccatctttgagatcaaagcaaaaatgttccttctgtgggtttgctttctttaattcctctaaatgatgttagactccctggctcccagcttgtccatgctcctgaagagacccgtgatttcctttcacattagattttaattttagttaatcaattaattaatgatttgttaatgcctctcaccttttgtagtctataataacagcactcttgactgcctatcctatgctgctgctgctgctaagtcgcttcagtcgtgtctgactctgtgcgaccccatagactgcagcccaccaggctcccgtccctgggattctccaggcaagaacactggagtgggttgccatttccttctccgatgcatgaaagtgaaaagtgaaagtgaagtagctcagtcgtgtccgactctgtgcgaccccatagacggcagcccaccaggctcccccgtccctgggattctccaggcaggagcactggcgtgggtgctgtcgccttctccggcttatcctatgcagcactgttctagttgctttatatgcatcattcattccattggacccacaaggccattgtcatcgcacatcttattttttcatgtttacctacatgagaaaactgaggccagagtgatgggaaaaatgccaagtggcacagtcagtaaagggcaaagccaagaatgaaccaagtcaaatgactctggaattcatgcttttaacaactgtgttacggggcttctctctaagctccaggacaacatctagccaagtgctaactgaatcccaggagtttaacaattgtttgggagcaagtgaatggatggacacaaggaggaggaagtgagtgaattatttggttctaagcctgctaagtcactcttgcccaggagagtgctgtgtgttcatattgccaagcacttaacctgaagcttgactgctggatggagtgatccaagaatctgcaaaaacaaaactgagcctctgagagttctcgcaccactcccaccctccctgagggcctgcagttggaaagggcttattttccctttgtggttccagaggaatcctgaatagaatctgccaagaagccaggacagagactgagccacagacagataaaacaccaggaatgccactcacctgcactttcagtcggtcctggatgcttagctcagcatctctggagaaatgtcatctaccttagcttctctgggatgactggtttcctggtctgagatttgagggaagaattagctgattaaaaggttaatatataattgtaggcacacggtgcctggggaagaccctcgaccatttgatgtttaactgaattaacgttcgccagttatagattttctgcttgtaaaattgccagcaaatgattctgagtcctgaatctgcattttctgtgtacaccacttgggatgtcagtgttacaattgtctcagaagcaacctacccagaccctgctctcaaggcaatggaaagatttacacgcagaagtgctcagatatgggactacagcatc

SEQ ID NO: 36907 - DNA, 987 bp, Bovine  19866881479046
  misc_feature (1)..(1): n is a, c, g, or t
ntggaaggctttctagaggaaatgagttgagtctgagtacctgaaggccaagtggggttcgaaccttcagggaaacaaggaagagagagagttccaggccagggggacagcagatgaaagggcacagaggcagaacgtggccagggaccagaagggcgggggcagggagagtgctgcttaagaaaaggctggaacgagcggagaggcaagacctcttccacccacacaggactgctctgaatcctgagggccaggagaagaccctgagtggttttaagcaaacttctgggatctgatcttgccctagaccttgctctgtcagagctgaggggtcacccctacagaacacatttttaaaaataaaactttcctttctgctagttattctttgaaaagttgaacttagaaataaaacacaagtaaaacaactcccgccacagacatattctatcacttactctaaaacaccaatttccccatgatagaaccactagttaaaataataataataaacaaaagaaaatgcttgggatgaaaatttgccaaatcatgcttccaagacgaaattgcttccaaaatatttcatgaatctagcagaagcagaaacaacacaaatcaggacttgctggtttcactggaggtgaaaaatgttttaaacatatttagattctttagtcagaggtccattcaaccacgtgtgacggtaatgggattataatggatacaattttcctctatctgctctggcattgacaaaatattcatggtaaagagctacttctgaacacctggaggcatcttgcagaatgttacagatgggcttgtttttgtaatacacatacgtagtccagcctcaacagctgtatgcgtctgagtatgtactctagatgcatgagcacatagcccagatcccaggcattccggtcagcatgagctcataaacgtgtgactggccttcaaagaaaggcctgttagaaaacccacacg

SEQ ID NO: 36908 - DNA, 682 bp, Bovine  19866881586015
  misc_feature (1)..(1): n is a, c, g, or t
nacagctttcactgcctttggcatttcagtaacgaccccagaactgccactgacctgccagctcgcttggtaaagtgacagtctgctagagtccttcccctattacaatgtggcggcagcaggcaggaggaaagggagagagaaggcaggcgagaaagaataatgactgcaaagaggcccgcatccaaagcctcggaaccacgttacatttcatggcaaaacagaattatgttgcagatggaattaaaatggctaatcaaatagctgactttacaataatgagagtaatctggattgtccaggcagcccaacgaaatcacaagggtccttaaaaatgggagtagagtcagaggggacgtgactaccgaagcaaggtctgaagacgtgtgagggtggtttggaagatggaggaaggggttatgagtcaaggaacaggagtgtcttccagaaggtaaaaaaaagcaaggaaatggattctctctcccctggagcctccaaaatgaatgctgcctgctgataccttgattttagcccagtgggaccggtatgtggctcctggcccacacaacactaacggaataagctgtgttgtttcaagccaccacgtttgtggtcgtttgtaacagtggccatgagaaactcacacacaaggccaggagacagaggcagaaggttttctcag

SEQ ID NO: 36909 - DNA, 1344 bp, Bovine  19866881679004
  misc_feature (1)..(1): n is a, c, g, or t
nctccgcttccctaaccaccagtaagagctactgtcagtgacagcaatggtgtgatacaaacaacacgtgcatttggtctttggagcatatcatttgacccacacacctgtctcaggaacaagggtgacttcgtggaggtaaatgtagatacctacaaggggcaggtggaataaaggaggaagctgattagtgacaggaagacagtggagactggagaaccaccaggaaggcctcagctactgttattgctatcctacttccagcagagttttcagaggcctttacagacctgagcatttaatcctcagaacaacctacagaggctgctaccactgtgattcatttgcctctggggtctatattctggaggcccagtacttcccagaagttatgaatttttaaaaatgaaattctcaatgttgacaacaaattcctttcattaaacacttcagactcctacactgagctgccaaacaggacaagcaggacatatctgtgggacaaatttagtccatgagctgacaatgtgattcctctggtctatttattcctttcattccactgataagaaagtttatgccaagagagctctgcccatatccacattcctcttctcctaaggcccacttagcctgttacctcgtatgtttcccaatctgcaaagtacaacttaggaccctagtctcatggaggatctctaagcattttaccatatccccctctggtgtgtatatgtgttcttttcactctgcaattattttatatcactttacatttatgaaatgaggcagttaatataatgcatttatgaggatcataataaatattaattaactgattagtcgactgtcacagttatgttggtggtggtgggtggggagcaaacctgtaaaaatatttttatttttaaatcctttttattaaaaaatcctttctataggattctgtttacatatagtaaaaagtcatgagtgtaaacaggagtccacattcagacccaaagtataatcaccttcatgatgatggagtgaattaagtgacaccagaataattttccttggtatatcatgacagtttaaaacaaatataccacttgtaactgcaacctattcagatctatgtagactgtggtacaggtcatgttaaataatttcactaatcagttaatcagtctcccaacctgaaagaacatgcaaggtagtagtgcagaggacaatcagaaaatggaaaggaaattatcattggtttcttttccattttttaaatcactaaaactgaaaacccaaagaacttaggaagttctcaaggtatagaggatatacacagacaaaaatcccaatttc

SEQ ID NO: 36910 - DNA, 1149 bp, Bovine  19866881748064
  misc_feature (1)..(1): n is a, c, g, or t
ncatccatagatatgaggtttgtatactcattcatccatcgatgtgtccagccagcatttatggggcaccagcccttggctgggcccttgccagggcagaagatacaatgatggattagacagaaaactttggttttaaagaaattagtccagcgcctggctttagagcaggattttcaatctttccacactattaactgtttgggctggacactccttttttgtcagggctgttgtgtgcattataagacacttagtagtgtgcctagcctctacccactagattctgtggccgttgcccttctagtcatgattaccaaaaaatttctgcagaccttaacgaatatcccctgaccagggagggcaaaattgccccctgttgagaagctttgctttagagttagaaacatagcttttgttcctgccttgatctcttactagttgtttatttaacaaattgttatttaacttttccttatgcccagcacttaacagtttctggcacagagtaggtatgtggcaaatgtttataggttaaatggatgaatgagtgaatgaatgaatgtctgtaagaccaacctattcctaaggagctgacaggctgttaggaggatcttgagtcttgctatacacaaagccgagcaagcaatatattcaatcaaaaatatgcctcagctaagcaaggaaaaaagctgcttatatgatgtttagttgtgtaggcctgacagataattgagcgactggatttttcagtttcaacagattggtttgccattctgtagccacaataacagagcaaagtaacaatcatgtctatgtttaattttccggagggtgttgcatctctaaggctcacagtctggccaattaaatgtggccgattggcactcccacacaagtttgggggcatttaaaatagctctctgcaaaagaaacaaaaaagccaagctgcagagaaagttttaactctctcaagatttcatatttcaaaagcaggcttgtgatggtaaaattgctctgggtgacagtgaatagataagccgtccattttgagcatccctggtgtcaatccaagcgtcagctttgtggctggtgtctgtgtctcttggtggagttggatagttttttatatttaaggaaatcatcaag

SEQ ID NO: 36911 - DNA, 1227 bp, Bovine  19866881788854
  misc_feature (1)..(1): n is a, c, g, or t
naactctagtttccaaatatctgatttcaggaattcttatacattcatagaagctaaattttataaagattttctttatgggtatccatttcttcagtgatactttccaaatagactgcttgacaggccccttagttgactgacttcatccacagtcgtttccattaatccaccttctagctgaggcagctatgtgccagcgtttggaacaacttgatatgagccaaaacctgtatggtaggactttctagagagcgtttccattctttattgaaagaggttggaaaggacagcagcctttgcctttctcttttcttcccgtgtcttgtagagacaaggtctggaggtccttcagccatttttcaacctgaagcaatgagcctgaagaaaaagaacaagagaagctcagagaatcctgaccttggctgatagtgacccttgaaccaacactggcagccttctgcctccagacttctaatttgtcccttctcaaggatgataccagagatgtggagaaagagataggaaatgtaaaagtagccaaaataataaaaaaggaaaaaaaatagtggcagagatccgtatctctcttaggattttaaaaaatcacagaaaggaaaggagcacacaaccaaagcaagcccatccccattccctccagtggactgagcagctcgaaagcagagatgtgcgcccgtgctgtgtcgtttgtacctggcatcctgcctggcgtagtaggtgtttgttgaacaaacaaaggaatctttcttttcacctcttttaactttggccaaatctatctggctcatcagagcagtcgtgatgacggttgtttggtggctttccaaagacggtactatttaagatagagcacacagccgtagggggccaggcagctggagaactgaacctggctgcccagacctgtgttcacaaaactcacacatttcacctgaatcttaaagaggaaggggtttctaagcacttgctccaatttgtgattctccttggagaatttcgaatgaggagtcaaatataaggttgttaggagaaactcgttcattaaagttctggcctctatccccaggatcgtatgaccaaatgggagacatgtcagcaattttcaggatcctacctgagcttccaacttggataccaggagcagctgccagcatctcacctgcaccacagaccgcttccaaactgtggcttcccgaaaggcagcga

SEQ ID NO: 36912 - DNA, 806 bp, Bovine  19866882006043
  misc_feature (1)..(1): n is a, c, g, or t
nccagcagacatcactgatcagccgtgtcatgatgcaccactgagcctggatttggcctcagattccttctcaagacactttccccaggaatcactaccattcaatgagagctgaccccaggatggaatgtatttgccatccccaaatgaagtctttgttctctgatccagctctgttcttattgagatcctttgggtgcttcatggagaacaaagaccatccatgttccttgggtttggtgcttattatctggaaatgctctgattgctagaagacttgctgtacagctgattatgcttaatgtgaatcctcctcatatattgacacacacaaaaaatcatggaagcaggacatttgtaatgcagcactgtcccttcttctttcaatacattaccataaagtaaactacaaagttgagaataaggttgacatttaatgaatgttttctttaaaaagaaaaaaaaaaaactgtccatgtgttttccaggctcccttgggaaagccttactttgtctcaggttcccagatctcacagataacccagcaagtgagaaatgagcaatcccaagtctcatgtatgtgtcgatacttgccctctgtcttgggctgacttactgtgtctagagttgggctgcagaatggcacccatcaccctaaagtcaattccagcggtgccttctctggagaaagcatatcttgtggctaatatgaaatgcaacagcacaaaacacagatttgaagcaaaaatctgaaattaatttctttaattcttcttaggaatcaagtctcttctcatatccaggca

SEQ ID NO: 36913 - DNA, 2939 bp, Bovine  19866880352014
  misc_feature (1)..(1): n is a, c, g, or t
ncttgactgctaatgatttgtttctttatcttaaaagagaaagttacttcttaggggctcagataaaaactgcttaagttccatttaaaacaaaagacaaatcctttatatgtgcaatttaagacaatttgaagttcctctggtatctgatcattcttagaaaaattatagtaagttgctttatcaccattgggaaaaaatgttttgtaatattttagattataataatggtttccatgggggcaacaggtatcagtgggggagtagactctgtgggcaggctgcacagtattactttttattttttaaaactttcttattttttgtgttatttattttactgaaacaaacgtgagactgaatccactgcagaacttaacatggaacttccttgtctctctaataaaggacacacagaaacaataagcttattagaaatgataattagatcattaccatttgtccaggcctgctcacaactcaacacctactggcttcaggacagagacaagaaacatcatgctggcaagggtagttactgtaatttgcttagattgtgtggccatgtcattttacaagaaggacagattaagtaagtactctgatttgctgtgtaaaaatagtaagggttataagaacaattttccatcttgcagtctttgtctctccctttctcactctcgcttcacccatttgtgtgtgtgtgtgtgtgtgtgatgtttccccctttgacatcaacagaacagctatgagaaacaggtgagttctcggcaaaaatttttaattgaaccaaaaatatttgtcctattctcccctctcttacccaaaattctatataccctggatcagatatgttaaattgcattcttaaaatcatggtatgtttcaataaaactaatgactaatgtagatcattggaattctcatttatgatgaaatgttttagtaactataagaaactgaaagcttatggaaatgttcttctccatctaacattatactaaaaaatgataatatccattagcagatcctaccaaaaatctacaggttggctccaaaagaagaggtcttaatggcatctcgctttgaagttatcagactggaaacagttggaggagacaggatgcactctgttggcagttcttgacctgagaaacagcaaattcatagggatattgaaccgacttcctgctgccaagaggtctgcagtccgtttaaggaaaatggcccacagcacccaagatgagtgccaagtgaacggttccagccagagggtactacttaggactctagaaaagagactctgtgggttaaagaagttaggaaacacttcacggggaaatggtatttaaacatactttaaatagcctaaatttctgtctacaaagaaaagcaagactggaaagcaaaatgggaagaagcagaaaaataaagttgaaatacttcacttctctcctattgttaaatagataacacaaataataaagggcgtgggaaacgggtacagggttgtcaaaagagagttattttccctatttaatatttctaatatctgtcccctgatcggaaagaggtaaaaatgaataacacttctgggaattagagcagggaaggagtcacatggattagtccatcttgggtgatgggtaagtgtctgacctttgtcaaatatctctatggcatttgacttaatctcactgagtagatttctttgctatggttcagaaaaaaaaaaaaatgtaattaagtctctgttccactctgggtaggtaatctcagcagtatttttcaataaggagtaacttctagaacctgagatgatggaatccaattccaaattggcaagcagctcatctgagagttctagatatgcagccagtaagacaggttaagagtttttctgcaatgcaggagacccatgttcgatccctgggtcagaagatgatcccctagagaaggagatgtatacccactccagtattcttgggacttccctggtggctcaggcggtaaggaatctgcctgcaattccttacctgcctgcaattgctcctgcaatgcaggagactcaggtttgatccctggtcaggaagatcccctggagaagacaatggctacccactccagtatacttgcctggagaatctcatggacagaggagcctgatgggctacagtccatggggttgcacagagttggacatgactcaaggcaagtttaatgtggattctgccactgacctttggagcctgcgtttctcacttgtaaaatcagcagctgggagatgacagtgaaaatcaactttcttcttaccctaattaatccctttctgatgctacaattccaggaaaccagattatcatttctcttacaaatatgtataaattaaaaataaaatcagatctgtgttggagcctaaaatatgttcctgagtcaagcagatgatcttttgcacatggatttcatgatatctattttggctgctaggcaactttttaaaaatggtggtagaattgcagttatttagttataatatccatggattcttaatactgcctgatatttttgtataaaatgaaaagaaaaccctttatctacatgttctgataatgcatctatatttttcaaatagaaagtaagaaggaataggatgtgtgtcatcatgggcttatttctgttctcccaaaactcatgagttcaagtcctaaaccccagtttctcagaatgcaattgtatttggggttagggtctttaaaaggtcgttgttactgttgttgtttagttgctaagtcgtgtccaacgctttgtgaccccgtggactgaaacccccaggctcttctgtccatgggatttcaaaggcaagaatactagagtgggttgtcatttgtttctccaggggatcttccgaaccagggatcgaacccatgtctcctgcattg

SEQ ID NO: 36914 - DNA, 1775 bp, Bovine  19866880565730
  misc_feature (1)..(1): n is a, c, g, or t
ncctatcctaagccttgcaaacaagttttccagtcaccctattatggggtctaatgccttgttgtttcacagggacaaattcatgtctaaagggggtggggaatgaaggtatcagaaaacacagacaaatataggtatttgaagtgaaaatacactagctttctcagtacagtaaatatcccaatttgtaggaaagtttagcttaacttatggataaaattaatttaaactgtatttgaagacaaatgctttccagtaaacagcaatttagccaataagaacttgagtatggtgggaggtacattatgttttagctaatcttatttattaaaatgagctaaagggacagaaatttaatccctaagaaggtattggatttgtcccaggccaggaaaaagtaaacatgtttgttctgcttcccccttcctctgaaactgcagttttttctttgtgtgttaattttcttccataatagccttaaagtgaagttaaagtgaagtcgctcagtcatgtccgactctttgcggccccatggactgtagcctaccaggctcctctgtccatgggattttccaggcaagaatactggagtgggttgccatttccttctccaggggatcttcccgacccagggatcgaacccaggcctcctgcattgcaggcagatgttttaccctctaagccagagtaaactcttcaataatagctttatattggtccatatactctcatttgtggcattttaaaattctgttcactccttcccctaaacctttagtttctatgacttggcattttcataattcttcactcatttttatatattagcagaaattaactttcctcaagctttacctgacattcctttttccaccattaaagtgggcattctataagacaaggtcagcccatatttcatccctctattcactctctcattgatctcatcagccacacatgctcacctgatatggtaatgtgaatggttatcactggccttaacctctgagataaactgatgcatttctaattacatcctgcataattagtggcctctgagtatcccagtggaacagccatctcaaagactgaaatccaaaccaatgaaccttacagccttaaaataattctcctgatattatgtctgcttattgtagcatagcttctttttttttctgttagccagccactaagcagaaaatttttaaattatccttgatccctctgtaatcccaattctagcctttggtcatttgcccagacttacattccttctaatacagtagttttcatattcagcttttcactttgttccaatgccatcattctctatgaagtttatattatatcattattctgcttactaatttttctgtttctacctgccccaggaaattacttcctatttatatctaccagacttttcctattgcttgcaaaatgaaatgtaataattcaaaatcctctagagtatgcaccaatcctgtgtctggaagcttatctttttgtacacagatgatcctcaactaaattcacagtgggggaaggagagggtaggataggctgagagtagcactgacatgtatatatacgatcccacgtgtaaaacagatagccagtgggaagctgctatgtatacttagagctggttaacgttattgtacagtagaaaccagtacaacattgtaaagcaattattaaataaacaattaaataaacttaagaaaaagactgtttttcagactctgtctttgccattgccaaacaagtatctg

SEQ ID NO: 36915 - DNA, 1652 bp, Bovine  19866880609809
  misc_feature (1)..(1): n is a, c, g, or t
ncacatatttgtttcttaaaatgcattaaatagtaactgtatcatgtcttttgggatttggtgctttgttctatatagtttttatgtgaaacacagatgaagatagaagtgtctagtagagatcaagaaccatgttgtctcaaatgacaagatctccatttttaaggctgaataatattccattgtcctagcattctcttaatggatatttgaacaaatatttaaagaatatgtaatgaattcaagttttcagctgccccaggcaccaaagtattagtctgcttggagttttcacttgttttctcccctcctttgttgtgatgaatttcatcagtcatcttcccctccaggaattaattaaacttaggctctttctcctttctctttacacacacgcacgcacacacacacacacacacacacatacacacacatacatattccttgttaaatcttgctggcagcaaatagtagcagtagaaaggctctgttaaagcaattaacgccagggtgtaaatagctgacaaaacctgaaatgtgttacacagtcagacatatttgcatgataataaagaacagagcattttcccaaaagacataagttttaatgtaggaatctaagaagaaggaaataaggacaattttggagtcagtgtctgtctaggtgatcctctaggtctgttcaatccaacagataaatattgagcaataggaaaatgacaggtttagaaaattcagagatctgtacaacccagttccagcttccaacaactcataatctaatgacaaaagcaactataacataatataataattgccataatgagtagagaagtataaaagattgctaaagaatggggaaaaggaaactaatcagctttggaaattaaaaaaaagaaaaaactcttgacaaggcaatatttgcagaatgaacatcaattagcaaatggtactaaagttggagagccagggagtagtaggatggggaagctaccttgcattcctgggataaaccccactggcccataatgtattattatcagtatatatacacttttacaaaatattcaattttacattggattgcttttgctaaaattttaaaagtatctttcagtatgttcatgaaggatattggcctgaagtctcttctcttgtaatatttctatcaggctttggtatcagagtgttaccagtctcacggtttgtggtagacaaacattaaacctattgtgatagtctaccttcaataccaatacaacactttcaatatcaactccagagctgtagcaaggatcaaatgcattaatactcgtaaaacattagaatagctcctgacacacaatacatgctatttgcttgctaatatatacatacattttaaaattgtttgcctttcaccagtagattgtaagcttcaggaaagaggcattttctctattttgctcagtgttgtattctgaatgcctagaacactttgctgactaattttatttatttgtttgtttatgtgtttattgcatttggctgcagcaggtctcggttgtggcatacgggatcttcattgcaggcttctttctggttgtggtgtgtgggctccacagttcacggctcaggagttgcagtgagcaggcttagctgccccaaggcat

SEQ ID NO: 36916 - DNA, 1564 bp, Bovine  19866880617513
  misc_feature (1)..(1): n is a, c, g, or t
ncagctttgtaagactaaataaaagtttgcaatgccaaaccaagatgaggagttagagcagaaatttgcagagataatttatatagcttcttttagtcaataagcttatttttctttaatgagaacaaccttgaaaattaataccagaatattcctcatattatgtttaatctctttttaggtgtactagaaatgtgagaataacaagtgtgttaagaattccctcttcttcagctttctaagacacgggttctgaggattctgtcttttgctctttggagcagtaatagacggttgcaaatcagtgcaacagttaagtctgctggagaaacagcacagctgcccagtgaagctttagaaacagtgtgaacttaagaaaagatacccaagatattttagatagttttaaaagtttctgtacatgccactctccctatcttaaatagaccttcaaggaggatcttcattaccactttaagttttcatgtttcattttaatgtgactaaaggaaatggcaacccactccagtactcttgcctggaaaattccatggacagaggagcctggcaggctacagtccacggggtcacaaagagtctgacatgactgagcgacttcactttctttctttctaaagctaaggaggatctggaagtgagatggctccattttatttggatggcaagtaggaacactccactttggttaagtgctgagtgatctttgcgtatttcatttcacagtgtgagtatggtaaccctctccttttggatgtctagatgaaaagtccttagttaaagaatcatttctgggtttactaagatcctgaagatgaaaacttagtgatacacatcctcaattctgtagtggctttcatctctaaaaattaaaactcagtcacacagtctggaaaattcaagtaccagagatgtaatagatcctgaaaatcaggtgagctgccacagccccctctccccacatcctcgtctctgagtcaccgtgggtgtgctctttgttgctcaccccagtctatgctggattgccctgttatgatttcctgcagtccttgtttggcatgctgacttacatttgctcggatgcccacagtcaggtgcaccatcacaggtcctgcctctgatctctctccctgggaagcagaagtctgctgagcatttctttgaggccagtagactggtggctcagcatgactgcattattaggggcctttcctttgtcctttgatgttgattcatccagaaactggatgtgagaactctggcaatttccattgtcacactcctctgtatggattaggttcagggtgtacaaaaagcagagacaatgtagggatcacctctgtggagcaatagagactgaacagcatcagccctaagacccagcaggtgactgacaaattgaagtcaaacataaaagaacctttcaatctctgccttttattcacctgtttgctctcacatctactccccacccttatccactccagttggtatcgttacgtgtacttcccaggttccttggcctctagtggtttgtgtttagtca

SEQ ID NO: 36917 - DNA, 785 bp, Bovine  19866880657718
  misc_feature (1)..(1): n is a, c, g, or t
nctcatttatttttctaaaaagctaaatatttgacagtaaagagttaaggataaatcttgaaaactgaaatgttctcatccaggcaggcaaataaaatggaaataaaactataatgattctttcgattctacttaagtttaatactccagaaaatataacaaccagtgaaatcaattctacttcctaaaatttccttctaatttcctttcattatgtttatttgccttcttttaaattagtgcttatataccaaaatgaacagactattcaagtggaaatagcaacaaagagctgtactaataatgaaggcattgagagatgtttgggaatagaaagaagctataaaactttagttacagataatcttgaagagatatagttattacactaaaaggtcaatgtttgccattagattgctgtctaccaccgtataaatgttatatattagatagcttacaaattggagttcattaggataataatggactacaattgcttgggaaaatttaagagggttgttattaggctttgagtctactgaaaaacaggcaactaataaaggcaaggagcaacatgtaaggttttaggtgacagattcccaagaaattcccctgaagtatagttctgctgtgggcttcccaggtggcgctagtggtaaagaacctgactgtcagtgcaggagatgtaagagacatgggttcgatccctgtgtcaagagggaggagggcgcggcaatccactccagtattcttgcctgcagaatcctatgggcagaggaacctgg

SEQ ID NO: 36918 - DNA, 1147 bp, Bovine  19866880707991
  misc_feature (1)..(1): n is a, c, g, or t
natttgaacctcttggacccaagcccttttgtcactaaaagtgtgaagaaaaaaaaaagaggagtgataattgttcttggctacattttcaggttgttgtcttgagattttgctcagagaccatggcaacaaataagaaatcaaaacatagaaacctttaataactgaaagctgaaaagattcaataaaaatgttttagtggactcccttcctaatgaaatttattgtttttaaagagtctaagtctatagggcttcaagaatacctaagaataaacctaattcccaccggcttatgagtgagaattctataatgatataagaagagtggaaaatgagagaaacaaatggcaccagggaatgtgaaattttatttccagcccagaggataactttttagaaagagatcttggatttaatgctcagttttttgcatttgctgttttcattggcccacttgtgcctgaaccaaatgcctgcggttctgagaggagccaggaagagggatgaggtggagccccacaggagagagaagtgattattttgtgagatgactttcaggaggctgactctgcacgtgactctgaaggagtagattttcgttctctcaaaaatccccatcagtaagtctaacagcaccatcatcattatggggattagtactagagtttgctacagcagcagtggggagagaagatgagattgtgaacatgtcagtgaaaacctgtaatctatatcacagcttcagaaacttctaagtgttttgaactcaggagaagaaaatcttgcaaggaaaatctaatcattaaaacaaacaaaaatgattcatagagatatcaaaagtcctaaaacacccactgttctgcagttaacacattcttagacaaacactatcattccatcacattaccttgttttatttctctatagcaggcagtatcatacaggtcatctacttatttatttagagtgtgagttccatgagaataaggaacttgttttatacctgaaacacgtaggatgaaatctgacacacactagtcgttgttaagttcttaggttgtgtccagctctttgcgatccgatggactgcagcacactaggcttctctgtccttggctgtcacccagagtttgctcaaattcacc

SEQ ID NO: 36919 - DNA, 1376 bp, Bovine  19866880787963
  misc_feature (1)..(1): n is a, c, g, or t
ncacacaacaaaatgctaccaccaatttttagtaaaatcttgattacaatttttttatttcatgaaaggaaatggatataaattcaagtctagataaaaaagaataatatcccaaggtactaatagaactctcagatgtcacaactaaatgttacctctgaacaatcatcaagaattagaatgtagtagaaagctggaaatgggtaaaaattatctttattttccaaaagagggcaaccactgaccacaaaaggcattgttgattcagattacagacaacatcatgatatgaaatgtcattactaaaggacattcaccttatatgcatctcagtggtaataattatttctggcaattatcttttgctttttggcccgtgcagcttagtaactggaagaggactctaagcaatgccatcaagaatttataataatacccctttcattaaagaccagaatggtgatggaaaaaaaaagaaatataataaaaaataatttggaaattagtagagaaaaatttttaagaaaggactatttctcaattatgtataaggcataacaactggctatgtttgggaagtaattttatcatacagaagtagccaaaagggtaacagattaagaaggataaaggtattaattgtacattagaatatgtccgaattccaaaataaatttagaatatatacatagtgatcactaacttgctctctgacacttttgcacaaattttaattacacctcaagagcatcttacattcttcaagagaaatccatgaacaagatggtggttaacagaagcagattcctcctgaaattctgcatctgagcttcagccgagggaaaggctgttctattaataacatctttagtgaaatctatcacatttctctgaagaactgcaaaggcttcattatatctgacttctccattaacttccacagtggtgcattcccccactttaatgtttgagccatactccccttagcaaccgaggatttattatgttgttgtcattgacacagttcagctttagaaaaagcagcactgaaccaacaaaagaaagaaaaagagtggtagcagttcgtgaactcttagctgcagcatgtgggatctagctccctgatcaggtagggatagaacacacgagctttgggagtgagggatagaactctgctttgggagtgaggagtcttagccactgataatctgcgtgttgcaacaaagatctgtgtgctgtaactaaagatccctcaggctgcaactaaaaatcctgcgtgcctcaacaaagatcaaagtgccatgtgccacaactaaaacctggcacagccaaataaataaataataacataagtattttagaaatatagtagtcaa

SEQ ID NO: 36920 - DNA, 729 bp, Bovine  19866881102515
  misc_feature (1)..(1): n is a, c, g, or t
ncaaatagaaagccaatgtgtcctattggatgataaataatttgaaatttaatagaattataaaaaaatcaatttgctcttcatttcactggagacacaattttaactttttggtcagaggggatgacaattttctcatcaaaagggcacagctaaatgaaacagtaaggcctgccaaagtgtcttccatctcaaagtccaatttaaaaataactttctgtcttctctaaagatatagaagcagtgtgaagagggccttgagcaggctccatgagatacaggttttttttccccaacccattaataaacactgacttgaactgtcttttaaagattgtgtggctccaggacctgttaaggctttctgtggataatctggaccacacagaggtccttggacaaagaatcagcttccaagatcccaagaacccagcggcatcacactaccctccagcttccgggaggggcttcttgatttagtcctacatgtaaatgtacagatgctctcaacagcctggcagggtacccagtgcaataagaagtgttatacttctttttgcaaagtatcattaaaagctatgtaccatgcccagactgagttatcagatgctccttagattttgtcttacttagtgtgtctttagtgttagtaaaactatattcatttatcagttcttatattttgggcagtacagtttggggaataattttcccccactctcaataagt

SEQ ID NO: 36921 - DNA, 1011 bp, Bovine  19866881224533
  misc_feature (1)..(1): n is a, c, g, or t
nctggaaccagcctaggtaacccctggccaaaaatctactcaatttcattattcaatcaattaccaaggctatttggttctaacatgtaaatgtaagttgaattcatccatttgccctttaccattcccactgcagctgtcttcaaccagaaattctcaccaactgtttaattcagagagaagttacttacattatctaaccctaaattttcttatctgtaaaataaagattattatagaaccaagtgttgttgtttttttaagtactatatgcaaatcacagatgctagcatataacaagctgtggcacacaatgttggagttatacttagtattcatttacctttccttgcttaccaaaagaaatccaattttgggagaggagtcaggagccttttgaaaaatactcatttttaaaaacatgcttatatttctgctttttttttttaagggaaaatcatattctacccttcttagtcaacagaaatgaaaaggataaagtgtcatccactcttttttatagcaataatgtttaccacaccatggctttttattagtggtgcttagtaaggactgaagccattagatatctcaatatcaatatgatgctcaattaaaccttataatttccttttaaagtatcattgaccctattttgcagtcataaacacaattctgtagactttgcatactataacacttctttggttaacatggattcattccttagctagcaaggaaaatatagttatcactcactctagaagttgctttaaaaaacagcaatgaagatgttcctgaaaactgacctcatgagactcacaggtctctggccatgagtttctcttcttaactctttgctctgaaagtttcttttccccttaactcaatttctatgtcttgtacattttattacagaattgcctttcctacctacccactttttgcatacccactgttgtgtctcgacttcaggcaaagctagctcttgcttagaatatctcaaaaagt

SEQ ID NO: 36922 - DNA, 1552 bp, Bovine  19866881249138
  misc_feature (1)..(1): n is a, c, g, or t
ntaatacctgctgccatgaacatatactttgaaataagaagtgaatacaagtccacaatccaaatccatagtttcttttcattatttcccaaaggaccttagctgccaaatattgaaaataagcttttctttatttgtgatgtgaggtggtggttgcagataagaagttgattcctagctgattaaaaaacttttcctggctgaaaatatcaggagtagaaataaagagtgcaattatttatacatttattggcaaaattggcacatgttgagtagcgcttttctgagtggcttattctcgaatgaacagcaccatgtgttaaattgagtttgagtatttgtggatgactgagctaagtttattttcaagcttggaagctttctaattgactgtataaccacatagtgtaattgatgctgtatgttaaaaataactaacctgaatacattcagtacttttttcctgtagtagtataaagccacctgagtatctataaaaataaattcaaagaggcatatatatgataatttaaaggtaatatttatgtttttaggcacaaatgattcagtcacttcatcaattccaaatggtgccatgcttattatagtacttgaggtaatataatttgtatgacttggttttctttcacctgcaaattcttccgttttgactacaatgtcctcatattagcatcatgagaaaaaagaagctctactgatccacaagtaccatcttctactcaaaaagcttccctggttggaattcatctttcccctaagctatttcaagatttagtgtggcacactcatattacacatgctgtgaatatagaaataaagcaataggtttgtatcacagctatagacataattatgccccactgtttgtgattttcagagaagtgcatttttattaaagcaatcatgattagaattattagaatatactagccagaattaaaataattatttctacactatgaaaaaaacatattttaagtgtttttgcattctgcagctacccaaggctctgcccataatgaggtgctcactaagaatctgctaaataagcaaattaaggaacttgcatccttttattaatagactatatcttaagaaggtagaatagtaatgcagtcctctgagctgacagaagggaaaaagactttctttagcatgctaaaccaaccccacttatttaatcagcctgcaaactcagtgttaagtacagctcaacaattagcagagagagttctgtatagacaaatattaaattttaaatgagtcttttcatcccttaatgctgaatagcatggttgtgctacctttttaccatggcagttataaaatttaattgtacaaataactcatactgtgtgtgctgagttatttttattcatattctataaatcaaggaaaatgtatcacttggttacttatacaacggaatatccaaataatataaccatagaataattttcatagtagcctttaatgttcttttagcaaaattctggacaccctgctgcttcagtattaacattttacagca

SEQ ID NO: 36923 - DNA, 872 bp, Bovine  19866881457503
  misc_feature (1)..(1): n is a, c, g, or t
ntgaatccattaggttgaccacaaatgcagagaattttttcttaaaatcaatgaagcaaactttgtggtatctatacatttttaaaaaatggccttaattttctaagctgtatgtaaaatgtttcttgtacttaatttctataaggttgtatatttttacacagtattatagtgtatattctacatattgtacagcttacacaatggttaagcattaaattatgcattaaattagattctaagatttcctgtgtctattcactttgtcttacgtatatcaaaatattccaaagtattaaacattttactgatcttaaaaatatgaactacagctagccatttgttgaattattttttgtttactctttgtcacagacactgacatgaaatataaataccatccattcttaattaagaataaacattctaagtaattaaaagtaaaagaatactgattaataattagcatttttcaaactgtcatgtctagatcaacttatgggtgatacataaaaaatttaatttacgaagaaagtgataatttattcctccatgattggtcattctaatgcaaagatatttaactttctcgtaggatatttcacattaataataccctttgaagatctaaacttaatggactcccagaatagaatatcattcacgagtggatcttttatttgaaatttaaaaccagcattgttttctaaagaaaaggtcatttttcacacttgaattataaagtagctcagctctactaatgaaagctatgagtataaacagtgtccaattaatttacaactgaaaatagaataactttcctcaacatcttcaactaatgaaaccagatttctcgcttaactcagcataag

SEQ ID NO: 36924 - DNA, 1419 bp, Bovine  19866881667246
  misc_feature (1)..(1): n is a, c, g, or t
ncagacatctggagaaaattctatttaaaaagatacatgtactccaatgttcacagcagcactatttacaatagccaaggcatggaaggtttccctcatagctcagtgtcggtaaagaatctgcctgcaatgcgggagatctgggttcaattcctgggtcaggaaaatcccctggagaaggaaatggcaacctactccagtattcttgcctggagaatcccatggaaagaggaacctggcaggctacagtccatgaggtcgcaagagctggacacaacttagcaacctggctgtccaacaacagatgaatggataaagaagatatggggtatatcttctgtgtatacatacatatatatgcatatatatatatatacatacacacagaatactactcaatcattaaaaaaaaatgaaatgatgtctttgtggcaagatggctgggcctagagattatcgaattaaatgaggtcagacaaagacaaatatcatatgacaacatttatacatagagtctggaaaactgatgcaaataagcttatttatgggaaaacagatagacattagaaacaaatttatggttaccaaagagaatgggggcaggaaaacaaatgaggagttttggattaacatatacataaaactatatacaaaatagataaacaataaggacctattctataacacaggaaactatattcaatattttataataatctataatggaaaagaatctgaaaaagaatgcgtgtgtgtgactgagtcattttgctgtacttctgaaactaacacaaccttgtaaattaactatacttcagctattaaaatgtaatactataaagtaaagccactaaaatataagcaagaataattttcattcaactgtattttaaaaaaagctagattgagaaaacttacatttataaatcatgactctaggtattaattctatctatcacctattctgagaatgagagagaatctacccttgaattaaaacaaataaccagagtgctataagttttatttttatcccaacatatggtactcaggcacttctcaactgagtattaagggattaacctacagtatttgttgtccttcagccaaggtggtcaaaatctctctactatgttcatttggattagtgtacagtattctgagctgaatttttaaagaaaggatatcttttactacgcaccatttatttagacagtgctttatctgtacttttccttgcaaatggaagtttgtaaagaaaaatttatgtaattccctgaaatataacacattctaaagcataggttctctttttttcttgaaaactcatcttattcaaagtggctgtgagacaaagcagcctggcatgaactgcctcttgagaacatggtcactgacagagacaaacgagtcctaatg

SEQ ID NO: 36925 - DNA, 796 bp, Bovine  19866881850298
  misc_feature (1)..(1): n is a, c, g, or t
nctctcgcagacattcatttgtacatgttatgagagactcggtgtatgtccgcaccaaaaggaggagggaggcaaagagaaagtgagaggaagactgagccagcggatatattcatccgaaagagacaaacatccttgaactccttgagaccttgtcacattgaactcctatttgaatgatgttacagatcaggaaagggggagagtgtggctctggatgcagaaaattcagcgtacagctaggtgtgcattagaaagtaacggctgatattaatttcatgagtacagggaattgtacatgtatgtgtatgtgtgtgtgtttgtgtgtgtgtagttgaaggagagaggcagacagggaaagagactcgattctttgtaacctaacccagggtaatcagttggggctttgcagatgaagctctgcacctagggacagacagctgacctccttacacttatccttgatttttctctggagcttcgtatgcataagatgggatttcttccttcccaaggccactcacatcaattcgctgatcttccagcagccaatactgagagaaaagtgtgttagggaaacctcaccagagctgacctaacttttcaagttatataatcaatagaacatactaagaggcttgcgtgttggtcagtgttcaatgatgcctcaccagaaagccaagatgccttggaatctagatagaatgtaatgaccctttcagatggggaaagtattctcaagtgaaacttacagcttgctgctgatgctgaagaaagcattctgagattcctcgta

SEQ ID NO: 36926 - DNA, 1590 bp, Bovine  19866880683908
  misc_feature (1)..(1): n is a, c, g, or t
ntcatatttgatgacttttggtgagaaagacatcattactggatttttaaattactttatctgataattttactacaggaaaactgaatacctatgggtatgtttaaagttttaatgtatttattatctgaccagatcttcagggtatgatgtctttatagtcagatttatctaaggtcttttccctttacatattttggctattcagaagttcagtggaattcttcagctttgtgttaaaaggtaggcattcttctcccaaaagccattcattagaaataaattttgttcattagcaatttgaaaaaaaaattgaattttagcatattttctttcatgaatgtgtatgtgaaactttacaacctggtcataactctatactagtaaatccaaagcaaatccccatgtagcgttttccctattctgctcaaactagcccagctctggctggtaataaattcccagaaacacacatttggaaatgtgcacagaacaaatttaaatttcagtaatcctgagcacacacatgtcaaaaacaaattatgggcacacaagagggtaattagcaaggttcacaaacagcacatgtaaaaagctttaagtgttcacatgaatgtcatagcttgtgatatagtcaatccaatttgaagaatttttccacttgccactgtatgatttcagaaactatattcataaccctagtactgtgctctttgaatgtgtttagttgtgagcaatgaatagcaacttaacatgcttgtttccataatattcttgaccatagaaactgggatttaaactttcaaagacataaacatgtcacatggcaatgtttacaatggaaatggactcttggaaggcttcttattggattgttatatttgtagccagtgtctgctctcttaacatgcttacgaagtaaagctgatgcttttctggcctatgttctatacaagcactaccaaggcacaggtacacagatgtacatttaataagatacttcaccaattagatgagtctcccctttgacagagtagatttctgagttaacgcatacagctttccaatttgtgctaacaacagtttcctagcacagggagttccagtttcaggagacccactgacagactatgaggcaggtagtattcctccagcatcattcctagctcttctctaggtctaccagatgccagaacatagcccaatagagcagaacagcttatagttctaaacaatccaagaccagaagagcaagctacggtggtgagaggaatcagatctactagagatcatggaatattaaagactgactgcaatttccatccttcctgatggcactgtaatcccagaattaatttcaaatagaaccctgagtagacctgtacaccattcaataactcacatggttaaaagagggggggacaagagggaagctgtgaacagacatgaagagagtgttactctgagttgattactgttttaagcagtgtaattttttttcttgtaacaactaacttatggcaattttatttaaacaaatattttgtggcttagggaatgatggaaatagcaaagctagtaagcaaagtt

SEQ ID NO: 36927 - DNA, 3308 bp, Bovine  19866880480111
  misc_feature (1)..(1): n is a, c, g, or t
ntagaagtgatctatgaaaagaataggtgtttaattaattgcatgttccctcctgtctcctataagtgggcttgtatctgaggtggagctgagaagatatgttctgcactcctcgccttgacctcatccgtgaagtacttggggcaaccataaattgagcagaggtcaacaggtttcttccttgcaagactcagagcctttatatctccaagagaataaaatagtatgcagtgcttcatcttttccatgcattttgacttcggctcacattttatttcacttttcattttgtagtgaaatttatctgtctcctttttttttttatagtaagtgaaaaacttactataaactatagtaagtttaaaattagactgtaagcttcttgatacttaagattacagtagatttatattctagatcccataatactcagtatagtactgagattatgttattaatcccatgtttcaggtatagaaattgaaattaagagaataaagagagttttttagggtttctaatcttggcacaaagactcttactgtcttatctcggttttcttatctgcaaaaatggaatgttaatagtatgtacctcatttttaaaaattggaggatagttgatttacagtgttatgttagtttcagttgtacagcaaaatgattcagttatacatacgtatttatattttttcataaatatatatatatataatgtatatatatttatattattttctcttatagattatttcaaaatattgagtatagttccttgtgctatacagtagatccttgttggctcttacatagtggtttttgtaaaataagggttaattaagttaatttatgaaaattctttgatatagtgattagcaaagagtaactactcaagattaggtatattattatatgcagattaatacatgaaacaaaatagaatatgttgtggtcacccagcaaagaactattgcaaattaagtcttcagtcaagttgtctgtaattcaacaactgtccttgtgctttatctgacatagaagtaactttttctcttggtaacttccatggagttcagccagtcacggaaagacagaatagcttgactatgggagatattctattctgaagtgttgggatataataggattcaaccccaggctcactgtgttctaatctggaaatctctgttcctgctttttatgaccttcttttagaaagaaaatactctactttagttcagggcatttaggatggaagaacctgatcagttgtagcatgtcttagttttactgtttttacagaccagaaaacatcaaatgaaagaaagaagggaatggaaaaaaaatcaaatagacataaaacttgtatcctttgacaagattacaagtgttcgaatattttgaatttgggatgatgagtggtgagatgggatagaataggatgtggaattggagaaccaagatttctgtcttggctagatcgtttgttcgtgtgtgacagtgtgagttggttttctcatctgaaaatgggtacagtaactaccccacaggattgtggtgagggtaaagtgaaataatgtatgggaatgcatccagtgagcattcactaatgtcattagaaatgaagggctgatgttgtcatcattcagccacccagaaaatgcgacacactcagcactgttctagcctgttgttcagatggaacataaagcagtatgctgcttctgcaaaaagacataatcctaggacgcaaaaaattaggacccgtgattttactagagtatgcttccaaatctttatttgaacttttctattatttcctttgaagatagctacatcttcctgagtatacactttttaaaagtgtatataagagaagggcattgaggaaactttaaacttgattgttgcttattgagggtcaatcatagacagtgattaaaatagaatatagtctgttcaagctgtggaaaatagcactttgattttgccaacattaattacattttttaagcttaggggtactgaatgaaggctgtgtgtagagtggttaagtgttgagtggttaagaacacagagtttggtttcagaccaggaagtagtttgcaagctgaccattgtatgctgcaaacatttggatgaaagtatgtgatttttagtcttagtttcctcattagaaaaactggagtattcgttcatatgggctgtaaagaaaactgaatgaggtaacacatctatagatcatcccaaggacttattaagtatctcatttactttgctgctactgctaagtcgcttcagttgtgtctgactctgtgtgaccccagagatggcagcccaccaggctcccccacccctgggattctccaggcgagaacactggagtgggttgccatttccttctccaatgcatgaaagtgaaaagtgaaagtgaagtcgctcagtcgtatctgactcttacgaccccatggactgcagcctaccaggctcctccgtccatggattttccaagcaagagtactggagtgggttgccattgccttctccgctcatctattttagttattcctttttcttactgttgaacctagggtactgttgtaccatactgagaggtggattgtatagaatcctttccatatccattgcaaacttcttgagctatagaagtatacagaatgtacaagctagtcaggacaataaacagcatctaatttcaagccatcatttcccaaaatgttcctgatgctcaatctatgtactgtttagaacccagatcactgtaccttcttccccaaagttcatcctcttcattccaaagggacattagacagtgcaatgggggtataggttgggaaaggggcctggagacatgaagaggcttaaagggagatgagaggaaatttaacctgttggaaaggaaacttggaataagtttagacttatatcagaggagaaatatgcccctaagcccttttcacaaaagcccatagccagaggcaatcacttggagcaaaagaaaaagttgagtgagatgaattaaaagttgtgtgtgccaaggcggaacagacttcctaacagtgaaagactcatttaatgaatatcagccaagatatagatttatgcacaataaaattctgcatttgacagatttttactattctacatttcaagcttatacaaagaactaacaatttttctcaatagggtcattcttcccaaatgcgtttaatcagtgataagaacaacaaaaaggcctcattactgtgcctcagcctttatagttctctgtatgctttttctgttttt

SEQ ID NO: 36928 - DNA, 2606 bp, Bovine  19866880614726
  misc_feature (1)..(1): n is a, c, g, or t
nagggcaaacttacagagatgagtgagggaaagtgatagagaggagctagaaaaaggagagggaaagggagaaaaaaatatgggattaggaccaggttgtttaaagaaaacatcaactagaggagtgactgttttttatagtctcaagggtgcacatgtgcaaacacagagacagagacacacatggttaagtgttccctccacccacagacactacataggcacacagtatctttatagtcctcaacatgtacaacctgtgtgtccgtccattgacgtttagtcactaagtcatgtccgactcttttgcaaccccatggctcaggggtttcctaggcaagaatactggagtttgttgccattttcttctccccgggatcttcctgacccagggattcaaaccacgactcctgcattggcagataaattcttcaccatctgagccactagggaagccttcatttgtccatgcacacacataaatgcacacctacaaatcacaccccccacacacacatacacactttccaccttgcttatattcacaagagtagcagcagcacctcagcaacagatgcagaaatggagcgcataaatgctttaaagacaggcagacagtcatagggacagaggttgccattgtcaatcagaaaaacagagagacctatccaaatgccaacagaaagatcagcataactgatacctgcttccctgagcaaatggtgagttttctgtacttctgtaaatagaattgaagagggaagaaattcaggttaatggctaagtgctatcattagccagatcactgtccgttttggaaaggatattttagtgacatgtttaccaaagggtctaattcaaatactaaaatagaaaattataaaaaatataaattattctccatcttgattcatctcctcaaaggtacagaagaatcaagtatgacacaaacaaacacacacttgaacatctgtaattatcaaatatcactcctaatgcccattatccagctgtgagttatcaaataagtttttaactactatatctgaaggtcatattgcatgggatggaatgagctgaagaaatgggctgttgagttcacttgaaagctaccatttattaagaactaactgtgtggacactgctccagcatcttcacattatctcacttaatcttttcaacaactctatgaagtaggtactattataatctccatattgggggatgagggaaactgagacagataaatcatgctgaggaaatatgtataatatcataaataatatgctgaaaaagaggcagagcttgaacttgaactcaggtggtctagctctagagtgttaggctaaaatgaggatatttcatccccatgtcaactatcaactatcagtaaccatctgtgatgctatatggagaactgtttctgactgtattcaaacccgacaaggagtgctacagtcaatgggggaagtgtactacccacaggaagatgggagagatgtgcatagtgagtatttacaacacagacctgagatccaaagactgaacaaccaccaaccacaaccgcaaccttgcccaaatatgacagataatagtaaaataatcaaagataaggtcacaggtttagcaatgttgctatgggtttgaacactggtgaggacctcttagcacaatgctggatggctcaaatagcttaatatactaagatcttagatcattatcctctagttcaaaacatgatttcacaattccaatctttgtttttttaaactccatccatctccatgtttattactaaaaataacagaatacattcaacaataaaactcctctgtgcttcaaactagtgtggactgaaatgcatgtctaaaagtcaggtaacagttaaagaaagtgaatttccatactcaaaacaattccatgcagaagacaaaggaaaggacagttgaaattctcacacttaaacaacatccgaaatgtttggcagtttgactagctctaaaaaaaaaaacaacaacgatatttattcctgaacattgatatgggtaaggggagtgctctgtgtcaatttaatccttacagcaacttccaaaagccctgctagaacacttatcctaggtcatccagccattctgatcagatgagaactattgctccaaatagctaaaactagctcatttttttctatggcctcaagattgccatttgaggcaattggacaaataaagcatgtctcaatttctcttataaccaagggtctatagacgtgatgggcaggaaagagagctgtggactatgactgcaggatggcctggcattcagcctgccttcatttgaatcacactctcaagtgacagaattaaccagccatagagattgagttcactgaacaggaaaaatgaggctgccaagaaaaaaaaaaaaagctaatgcaatctaaggctgtgttaaatagaacaacagccatttatttattctctcccctcctccaagaaagatttaaaggggcaataaacaatagtgtcctgaaacaagtaaatgaaaatctcattccatttcggttttcaggcaacacattgcagacagtcctaaattccaagaaata

SEQ ID NO: 36929 - DNA, 1264 bp, Bovine  19866880637986
  misc_feature (1)..(1): n is a, c, g, or t
ncccactcatgaggttcttgcacttgtcttggggactgacctggcattgtagacagattaagatgtgcctgtgcaggggcatgagtgtgtgtgtaaatgcttgggggtggacatggggcacatttatgaaatggatgtgacatgcaatgccagggcaaaaatttctggtgagtttgagtggtgaatttaggaaaggttgcattttaagttttacctattatttataccatatatgtccatttgcaaagtgctttcacattgcagtctctaatcctaactagattccaatgacattactaagacaggcataattatctttttttttttccccagatggtacaactaggttacaccacttgcctgcggtcacatattcagagttgctaagtggtacagtcatgacataggactcatctctaaaaacagtgtctctccctattcccaaacttgctgtaaacatataataactagttagtttgctagtttaaactctttaaaactttaaattctgactatatcaaataactgtggggaatctggtttatcctttcagggtgagggcattttttccctctgatgtaaaaagaaaaatttctcataaagttgcagtaataatactgctgacattcaaattgtcttcacacagattatctcatttgaattgcagaacaactctttgagatgagcaggcaggatgtagttcttacgacagtttagtgtccctagcagttcatttcttacttatatgaagtttcacagcccatcaaatgcacttccagccttggaaaatttctccaacctttgttggtaacattgtgtgttttccttcatccttttttttttttttcttccatatcctgcagcctataaatactacccttcgacccagccctggcatccaatactctgaacttgactgcgagttacacattcttacttatttgggaaaagagtcagttaaactactttgacaggaagagaaactgagaccagcaaatttcagtgactcacctagagcctgcttataactcccgacctataaagatgcaggaatttcatcattatgaaggcccatccagagtctcccacaccagcgctaacatctgaaagaagcctagttaccgtgtatctttggtgtacttcttatacctcaaatagggcattatgtttctctaaatagcttctccaatggattattgatagctggaatttcatcttctggtaaacacttcatttatgtctttcacttgtccctaggagatca

SEQ ID NO: 36930 - DNA, 1047 bp, Bovine  19866880680445
  misc_feature (1)..(1): n is a, c, g, or t
naccccatgaatcgcagcatgccaggcctccctgtccatcacccaactcccgggagttcacccagactcatgtccatcgagtcagtgatgccatccagccatctcatcctctgtcgtccccttctctcttgcccccaatccctcccagcatcaagagtcttttccaatgagtcaactcttcgcatgaggtggccaaagtactggagtttcagctttagcatcattccttccaaagacatcattagggaatggtaaatagattgaaaattttcatgctaattctaattggaagtggctgcctggattgtgtgttaaagaggattccaaggctcagttcaggctttatagaaaattggcagtaatggccatgggatagtgttattccacttgtcatatgtattactgtttccataagtcattttgtgacttgaaacgaatgtcttcaaaacgtacagtagattctcagatagttgtgttgagtgacctttaagcatcacttaggttttaaagctttgtgattatatgatgcaatgattcaattccacgtctttcaaaaacatatccactttaaaaaaggatttaaaaaataagcaatgtcagtagcaagcatgcacagtatgaaatatttgagctggaggagtatataaatagctgtggtcgatgatcttgccttgttcttttctaaatacagtgcttctcagtgctagcatttaattatgcactgtacttgggtaaaaatgggcattaggaaagattagcttttatgatggatatattgaatcctaaatatggcttaaatctttgtactgtaattggaaaactaacaacccacagatgaatgctcatttcttatggaagtgcattgagatatatttacttgtgtattatttgaagaccaatccacatgcaatcagacttcaacaagacaggcgcagcaatcttgtaaggggtctctatttccagacaaaatatctcagaaagcatttcaattcactttccttgccactgtcttatcgacgactccatcctggactgcgagtctttaga

SEQ ID NO: 36931 - DNA, 2142 bp, Bovine  19866880696238
  misc_feature (1)..(1): n is a, c, g, or t
ntctcatatcatcccaccctcatcttctcccacataatctaaaagtctgttctttacatctgtgtctcttttgctgccttgcatataggatcatctttaccatctttctaaattccatatatatgtgtcaatatcctgcattggtgtttctctttctgacttacttcactctgtataataggctccagcttcatccatctctttagaactgactcaaatgtgttcttttttttttatagctgagtaatatactgatgtgtacatgcaccacaacttccttatccattcatctgcagatggacatgtaggttgtttccatgtccttatttaagcctcctaatattgatgcttttgaactgtggtgttggagaagactcttgagagtcccttggactacaaggagatccaaccagtccatcctaaaggagatcagtcctgggtgttcattggaaggaatgatgctaaagctgaaactccagtactttggccacctcatgcgaagagttgactcattggaaaagaccctgatgctgggagggattgggggcaggaggaaaaggggacgacagaggatgagatcgctggatggcatcaccaactcgatgcacatgagtttgggtgaactccgggagttggtgaaggacagggaggcctggcgtgctgtgattcatggggtcacaaagagttggacacgactgagtgactgaactgaactgaactgaactgaactgaatacatataactgattatagggggcactaaattatattctcagcagcagagaataagaatttttgattctctctgtcctaactgttaccattcttcttgctctcaggtaaaattatacccctgtcctgactagcctttgacacaaaatagagattctagagaaagcaaaccactaaaatagaaagaagcaataaattcatacacacacacacacattatcccatggttgtatttttcttaattaaccttgtaaattaaattcttatgcattgatgaaaatatattttcttctgcctgactcaatttgggctgtgaaacattatccttcagactgtttctgctattggtctcttcttgaatataagttgtagcttttatgacacacataatatgcatgttcagtaatgtttaacagtcatttgtcaagtctgtgctaagagcagggctatgccagacatggagaaggaaatggcaacccactccagtattcttgcctagagaatcctgtggacggaggagcctggtgggctgccgtgtatgggatcgtgcagactcggacatgactgaaaagacttagcagcagcagcatgactgacactgggcagtgctgggggaagaaatgaatatgacatggcccttgtgcattgtgggctttctcacaactgagtgaatgattgtagtcataacccaaggcccactgggtatgcagaggctgtatcagaggaatcaaactcagggagataacagataaattatagtaatatggttgctccacttaaaactgctttaaatgctcgttgtgaaacatgtattaataatttattaagtgcttcagatatcctatttcattcagtcatcatcacatcaatgtgaactagctactgtcatcgatttttgtatgaggaaacaggatgggtcttcccaggtgatacagtggtaaagaatccatctgccaatgtaggagatgcaggtttgatccctgggttaggaagataccctggagaaggaaatggcaacctgccccagtattcttgcctaggaaaccccagggacagaggagcctggcaggcgacagtctatggtgtcacaaaagagttggacatgacttagcgactagacaatgaaacaaaaactgaggataagcaagttgcctgcaattgcattgttagaaagcaccggaggcaatggaaagccttttgggaaaggtagggtatgtgatccagaagaagggtcaggcttcagcagacatcttggagtaagagggatcaggcaggaatagagcctgagaaaatcactgcagtaggacagggcaggccatctataaagaaacaggattaaggaacagaagccaggagaggatagaagataaaggaagataggatctagtatggaaagcctagaatgccagat

SEQ ID NO: 36932 - DNA, 919 bp, Bovine  19866880748902
  misc_feature (1)..(1): n is a, c, g, or t
naatcttatttgtttgtttttaatttgatgttacgatgtgcttttaaatttttatttatttaattgggactgcactgggtctttgttgctgtttgggcttttctcaagttgcagtaaacagggactcctctctagctgtggtccatggcttctcattgcagtgacttctcttattgcggtgcacgggcgcaacagttgtggagcaagggtccagttgccccgcggcatgtggaatcttcctggaccagagatcaaacccatgtcccctgcattggcaggcagattcttaaccactggaccagcagggaagtcctagacatgaccttattacttcccacctttgcctaaaaatctgtttctctggtcctactagggtcccagtgatgaaatctactcccagatggttttcagcagtgttttctgagacagaacccagagttctggtttttcttcttgctgcctgtctgcccagacttaagagctgccgaaccggacctgttgtgaagccattggttggctggtggagtctttgctccacaccatgtccctgtattagagacaaagagaaaacttcaggatgagcttctttgggagctgacacataagagaccataccctgttttggaggcatttaaacttatcttacagttaatacagcatctggggcacattttcctacttttatgccaatttttatgtgtttctgtcacacagtcagaagccaggatcataaagaagaaggaaaatggtacaaaaaaataaaagtaaataagcgcattctgctttaacactcccaggagcgctgagtccggcaagtttatgagttagagaaaaaaaaccaaagcaaacacctatagcactgtatataaaggaaaggaaatactactcctttgcattcaagtgcatcaagcaaagaggg

SEQ ID NO: 36933 - DNA, 2077 bp, Bovine  19866880762100
  misc_feature (1)..(1): n is a, c, g, or t
ngtttagagctacactgtccataaaacagccattgttacatggatctagtgagtatttgaataatggctagtctgaattgagatatgctgtaagtatgaaatacacattgattttgtaggcttaggaaaaaaatcctacaaataattctatattgattgcattttgagctgatagtattgtggatatgttgaactcaatataataggctaatttatttcacctgtctctaacactgtgttttgttttgtttttttttttagtgtagctactagaaaaattgtaataacgtggcttgcatgtgtgattcacatttcgttatctctctctctttttttttttttggccatgctgggtcttcattgctaccaggcttttctctagttgtggagagtggtggctactctctagttgcggtgcaagcttgttgcagtggcttctcttgttgcaaagaacagactcaagagcacttagactacagaagctgtggcatgtgagctcattagttgcagatcccaggctctggagcacaagctcagctgttgtggcacacaggcttagttgttccgggacatgtgggatcttcctggaccaggaatcaaacctgtgtctcatgcattggcaggcagattctttaccactgagcccaccagggaagccctctctaattttttttttttttaatttcattttattggttaacttttttcatttttattttattttggagtacagttgattagcaatgttatgtcaatttcagttgtacaacaaagtgactcagttatacatacacatgtatctagtctttttcaaattcttttcccatttagattgtcacagaatactaagcagggttccctgtgctatattgtaggtccttgttggttatgttttaaatatagcagtgtgtacatgtcagtcccaaactcctgatctatccacccaccccttgaccgttggtaactgtaagttcattctttaagtttgcttttctgcttctgttttgtaaataagttaatttgtaccatttttttaaagattctgcatacaagtgatatcatatgatatttgtctttctctgacttactttacttagtatgataatatttctatctaatggtgctgctctagacatttttgcagtataaataaatattaagaccaaaaaaggccaggcctgaatgtactaccagatggtcttcaggtcagaatttcatcattcttttgcaataagaaagaaagcaaagccctccaataccattgtcatactggctaatgtttgccttgtctttcatctgagggagctcttgatgaaaggaaacagcttcaaccagaatagtttatagctgctttggaaagaagcttatattgaaaaggaagagataaattgaaatagttctgactttgaacaactgctcatgtcaccacaaagccaaggccactgtgtgatctgtcagctggctgcagaaagagggcaaatcacttgtctcctcaaaatgttgggtattgcaaaatcctgaaggcggcacagaactgatgaaagctcagcctgcgctgtgaagagggatctttatctggctcgctgatccttctgtctgtgggagcggaggaaagagaatggctcctcacacagggtcccgatgatcttcccaataatgatgtttctttaggggcaatgtggcctccctcccattaaaatggacgcttgcagcactttgcagttggctttctcattttgtacatgaggtacatgactatgtgaagtaaatgacccagaccctagaatggaagtgtctgttgaagtagaagtcaaaattcaagttttcacatttatgatgcaaagctccttttgtagcagtttcaactgcctataatagttcttttaagagggatatatcttagctttttctccacaaaggtttcaattctcatttctccttgaatgagcttcatcagttggctctggacaaagcctgttctatactggatattttgaatacaagttatctttattatctaacttctttcctctatcctcctaacatttggctttattgtttgtttttcattttttgt

SEQ ID NO: 36934 - DNA, 3272 bp, Bovine  19866880788048
  misc_feature (1)..(1): n is a, c, g, or t
ntcataactttcccttccaaggagtaagcgtcttttaatttcatggctgcagtcaccatctgcagtgattttggagcccaaatactgatacaggtcatatttatagtttgccttcctccaaaccatttgatacctgaagaaaaatagactcatgaaatctagccaacttttgtagtgatctgtgggtaggtgatttgctggttagtctccagcacactcagaatggagaggcataggtgaattattcttcttatctgtagctgcaataatattttgttgaatgtagcttattttctctgataacagtaaaagctcattgaacaaaatttgggaaattgagcataaataataggagacagatgagctataactttagatctcaaggaaaattcacattatcatttgtatcttgcttctattgcacgcatgtttgtgctaagggcagcttgctctccataaacttttaataatgtgaggtacctaaatggcctagcataaaaatgagccatactgcttttttttttttttaaagcttttaattttatactgaagtgtaggtgattaacaatgttgtgatactttcaggtgaacagcaagggactcgaccacacacacacacacacacacacacacacacgtgtatattgctgtatccattaacccccaagcccctctcccatctaggttgccatgtaacattgagcagggttcccctgatccttgttggttatccatttcatactgatttaaatggcagggatatgtccagtgttcactgtgattgtttctctttccgttctcattgggttgctatgatagaagcagtatattggagaggttctgactcaattctggagccagaatatctgggtttgagcccaaggccacaacagctgtgtgaccttgattaagtttcctaatatcttagtgccttggtttcttcatctgcaaactggagataaaaggagtactgagtagcggctaagtactttgttgaatgatttaatatgtagagaccagaagaattcctggcacatacagagtgtggaataatgtaagctgttaaccacagggggacacaaactctaatgcctataaagggatcatgcggatgatgtaataaagtcaggtgtaaaaaaatgcagctcttttggtctttcattttctagcagtgtattcaaaataaaaggatagaggacacatctcaaacatgaaggggaaaaaagccccttgaaagcataataaatgcagataagtcttatttattgttggaaaacagtaataaataatcaggaccatagacagaggacttggaagctaggtgtactaagatccacacaacttctgccaagagaagctggaacactagattaatatgtgaaatttcccagtgtttaaatgctagcacccaatgcacacttgaaagaaaaaaagtgtgtgtgtgtaacctaagcaacttatgccctcaagctacatttgaccccgaagttggcagtttaagaactctgaacttcgacttagtatgttttgagttctagccaaagagatctctctctgattcctggactccttctatgacagctggctgtagtgtcacacatttattgaccactttaactcttggattgaaaggaccaaaagatgtgacccacactggtactctgccaattgctagcactggtatatatggatccgggggctgcaataaggaatgatcagtcagagaaaatagcactgtctctagttcctgtccctgtcccttggccacacaataactattttgtcttagctggtaatcccagcctctgcctaaatcacggtctacttactggctgatgatggaggctttccaaatcttccatctgactttggaaatgtcattgtgctactcattctgtttaattgctccctcctgtggaaacactgtgatgtccctgctgctccttcgagtggagaataacaggtctttaggtttttcttggctctttcttgctgaggaaggagatgataaatgctcggtgctgagggggctgctttctgaaccaccctgaggcgacaattgcttattcagacttaagaaaaggaggcaggcatgcagggagtagcttttgaataaaacagtttatgatcagggaaggcaaaggagaaaggcagacttgacttgacctctggggatgtcctctcaccatgacaaagagcagactgaaaggagaaggactgcaggggaccagagcagcagcatttagaactagccaaagggctgcctcgaagcagtctggttggctttacgataactgtctctaacagctggtcaaatagaatgaaatagggaaactctgacaaccctgttgctctccaaatctcagactctcctccacccccagccccaacaaacttccaattatatttgtagagagaaatcttacattgtcatttctttaactagtcttatctagtgagactccattctttttatttctgtcttatctaatcccacgaccctctacctacgctctagtcttctcacttgctgtacactgtctttgcctttgcacattgacttttctgtctggaatacccatctctcatctcaacctacagaaatcctgggctcgcttcaaactttgtctctaccaataaatctgtctggatttctcccagtgagacagaaatcatgagcctctaggaaggaaaagacattcttcatttttcttcccacccattcttccatcctgcatcctagtcccaggaaaatatataattatctgatgggccaaattctaatacttttatgaagcgacttagcagcagcagcagaatcgctttacttctaaagctatgtgtcaagatgtttctctctctctctacactgtgttttgttcttatagtgagaggactgattgcaattagggactggcctcctagaaatgacacaaccagctttctaggaaacccttctcttttgtcttgaatctttgctttcctacactgatattgtggaactgaggtagtaatgagataggaatctgagttcttgtccatggagctgaagaatggaatccacaaacaaacactcatggtaacaagtgaagaggatttattaaagagaggaaagtacaaagctctcagcatagacactgagagggagtagagagcccccccccccaaggtgggacttagaacagtttttatatccttccttaaatcacattatttcttaccaaccaatttaaaggtcaagatacttaacatctttaggcttctactagatc

SEQ ID NO: 36935 - DNA, 790 bp, Bovine  19866880807711
  misc_feature (1)..(1): n is a, c, g, or t
nagttctgtacagaatgatagatgaaatcatggtatatttatatatctaagtgttatatttgagatcttagggctagagatgcgaacatagaaacaattatgattcagatttcatcgtcatttgttcctgaaattgaactgtccctaggaaccccacagcattctccatctatctcactgagcagtttcatctcaccagtttgtagcccaaatgtgcacactcatgttcaactcaaaagaacaaaggtagataaatttgtaagaagctttccaccactcccttttgttatctctgtatattttaaaatctaatttctaaatagacttggtgctttttgaatgtaggattagccttcaatttatgtttttctaagtacacaacacttagcagagtatttttatgtattcagtattaagcatggaatgaataaaccacagatgaaacccagactagtatcccatactttgttgtctatgcctgaacacatatctagagctacatctggatctctactgagctcgagccaatgtccattaacagggataacatttagcacatttagacacgagaaacctatttacatttatattggtgtctaaaatcatctgttgggactgagctcattttaatttattacagtctttaccgcctgccaggaagcaatgaagtactcaaatttcacttgcatttcttagtaggagcccagcctcaatcaatatttggggggatgacagttttgggggaggctcaggatctgattctagctgatatgttatgatcattcataat

SEQ ID NO: 36936 - DNA, 958 bp, Bovine  19866880912477
  misc_feature (1)..(1): n is a, c, g, or t
ntcaatagggaactaactaaatagggctgtctccacttaatggagaggatgtaattggcttttataagacctatagtataatatcaatgtttcagaaaaggatttaaaaattagcaggatatgaacgcaaaagagtgagatgatatataaaaagtgggcttgaagcaatagtataaaagtgagtgttctgtgttttactttatgtgttgtgttgtttaaagcttttatatggaaatgccttgtgtaactaacaaacttaaagcttgatagggaaaaaaacgaagaggattacaggggacccatatcatcttaattttgattcagacagacttttgcctatgtagatggttggaagtgttggaaactcaagaaaagtcttgataagaaatctagtgcttatgaaatactgccacatacaggaggaaactgctgatttcagcaatttggacagcaggagtagagctgattggcagatcacagtgagcttgctgtgtgcaagttggcagaaatgcaggcccacgaggtatatagagatcttgctagatctttcatagctaaggatggcagcattacagttcataactaccattcaggttaaaccaggtttttccacctctgtgagcaagggttttgcttcttctgcacttacctgcctgctctctcaaactcagactgtataactatagaccaactgcattcattttctattgctgctaaaacgaatgaccacatatttggtggcttaaaacaataacgcaatcttaggatgtgacagttctggaggtcagaagcctgaactgggtcttacagggctaaaataaagatgttggcaaagctatgttccttctataggctctgccggagaatctgttccttgccttttccagctgctggaggctgtttgaatcactcggttcaaggctgcatgactgaactatacttatattggtacatcctc

SEQ ID NO: 36937 - DNA, 1060 bp, Bovine  19866881069668
  misc_feature (1)..(1): n is a, c, g, or t
ntcgtgtctgactctttgcgaccccatgaactgtagcacaccaggcctccctgtctatcactaactcctggagttcattcaaactgatgtccatcaagtcagtgatgccatccagccatctcatcctctgtcgtccccttctcctcctgcccccgatcccacccagcatcagagtcttttccaatgagtcaactcttcacatgaggtggccaaagtactggagtttcagctttagcatcattccttccaaagaacacccaggactgatctcctttagaatggactggttggatctccttgcaagttattcataaaaatctaattagtaatttggttgaaagttccttttatactagttggtcttactaaaattgacctgatctactaaggtctgttcttttcctgtctggttctaattccaattatgttttattttacttctaactttgattataatttcttatttaagttgttcctgtttcatatatatatatatacttctaatatcttaaataatagtgtgatagggaaagcttccttttcttttctttgcctttttatattatctgagtttatacccttgcatacattaattgtgcaaattaaaaatcaagcaaaatcaaaatgcaattaagccctaatcaactaaaggatcaaccaagtccctgtttcttctgcctcattcaaactttgtccatgttaataaaaccaattaaaacaaaacaaataaaacctgataaacttgggagaatttttactgtaattttctattattattatatcaggaactcttaaatacagccctaagtgttgccataagataggtcattaaggatgaacccagctcccaacatggtttttagtacaacatgcccatatgccaaaagggtgggggcgtgagtaatttgggcatggcagctcccagaagacacattcagtatcagtgttccaatcagacacttggctatgagcctctggatcccacttgtcttcctcctactgctgaatgtcaactgaggagagcctgttcttaataggaaggaaaaaagagataatagag

SEQ ID NO: 36938 - DNA, 569 bp, Bovine  19866881084893
  misc_feature (1)..(1): n is a, c, g, or t
nacagggatggtcctgtggctacttagcctaattagaaattgacttttcctcccacttgtgggtggcttcaatctattggcatccattcaacatcagttgttgcccataacaatatatcctccccttatcatcatggaatttgtatactgttaggaagtttgaagaattgcacagacaaatggaaaatatgttaatatatgaataagttctaaattatacagtatgagctctaacttctgctggagtttgaaaatggcactaatcagtatatataagaatagccggtagaaatcttccttggggaggaagtgtcaatgaggatcctgagagataagtcaaatttgaattcaatagttgggtgctggttagcagagatgagtgttattttaggctctggctatgtcatgggaagagacatgaaaggtgaaatgagtatattttcctgtaactaaaataaattgagaacataaaatgtatgatgcttgtatttctcatttgactgtgataatcttctgaatagtctcatgaggaagagagttgttttacaaatgaagaaccaaaagtgatt

SEQ ID NO: 36939 - DNA, 1027 bp, Bovine  19866881224538
  misc_feature (1)..(1): n is a, c, g, or t
ncatggtataacttgtttatcactcaccctcacatatttactatgcttcttcggtttatctttggttgtcttattttttttccccctcaagaagcagctgttccctctgaaaattagatatgatatagcattgtctttgttttgtctccagatgtggccaattttgctgctcagtcagaggatggcaaacaaatgctttctcgggagacatcaaataatgacatttaagtcttaattgctcctcagaataaaccattttttaaaatgtttgactcaaatacagtgactctcatggttctctaagttaaaagagctgttgagttaaaaaaaaaatacaaagcacttctatagcatttatgaaaactatgagttatatttttcttttaaatttaagaaagtttatacaactgtttatatattcatgaagcatgactactatgtatttagttctataatagtttacatttcatctcccacatacctactgatgtgcaaaatccatttcttattgtaacatggaaatactgcaaacatctgtcatcctatatcccccacaactatacaacaatagatctcgtatttgtgaacaagcaaattagcatagtttctttttgcaagccctggtatctaaaattctgtcctcaaaattaaattattttatttaaagaatgtgcttctaggaatctcctgttaaaattcaaatactactaggagaggcaatatattcatttattagctgagtgatgcaatttggttcaatatatggtgaaacactgcaagcctatgctaataaacttgtccaaaggaaaaatgagacacctaaagaggtgatgaattccctactgtagaaggttctcaagtagaggccaaatagccacctggaagaagtatcaaatataaatatttaggcattgaatggaatattaaacacaatgactgctcatatacatatgaaattctaccagtttacttgcatctttctccatttattcatgcattcaagcatgcatccattcattagccatca

SEQ ID NO: 36940 - DNA, 788 bp, Bovine  19866881357332
  misc_feature (1)..(1): n is a, c, g, or t
ngaatgtaaacctaatggatggggggagataaaggagctatgaggccagggttctcaatgattaaggactgaccaataggattatttctgtgatttttgatgcacagtctttattcaactatcctgttcttcaactctactgttcattagagagtgtaccaggaaccaaggacagaaaagggtgagttggaaaaagtatgaagatataaaccacataaacaaacctcttggacaagttcctcccccaaacagcatattaattaattctttggatgatgctacagaaagtgtgcttaacacacttaagaatgccaagcagaaaaggatagacagttcacagaatgatagaagcaacattctcatatcttaatatgtcagagttgtgagctgaatatacctagatgaaataaaacaaataaatgcaaattcctaccctgaaattcaaacaccaatggcacaaacataaggtaggagatacagagcttagaaatagcccacaggaatatacttagacttaacaggcaataaatgccatataaccaatgtgatgaggctgacaaacagaaaaattaatccttttaaatgtgcattagaagtaatggaatacataaactgacggaaacagtagacctatctgtattggccaggcctcctttagaatttcaggttcatttgttcccagaagaccaaaaaaaagtacattttgaacaaagtactgaataaagaacgggtccaaagctccgtcctggagaaatgaccaaagaaactaaaggtgttgaggtaaaatg

SEQ ID NO: 36941 - DNA, 1532 bp, Bovine  19866881420938
  misc_feature (1)..(1): n is a, c, g, or t
ntgattctcatacaaagaaagttcagcagagggagacattgctatgggctggtaaggactgggagtacatcctgaatggtaagggacagaaggaaggcaggaagaattcttttggacactggcacaattcctaaagaagagacttctgcattcctcattcctgttatttgtcaaactaactgggacgtgggataaataacatgagtagaagatacttgagatcatattttaaaaagctttgaatatcaggataaggtatctggacttcaacctgtggttcaactttgttctggggggctctcaagccatgtgcctcatctggagtgctcattaaaagcaaaggttatggatccattccagtcctgctgaattctagtttaattgtttcatagtttaataagcatcagaggggactctaggcaccttgcagtttgagaaactgtgtcacagaatttgggagaatactgtttgtgaaaggaccttcaagttagaacaacactgggaacttattgaggaagatggttctggtagcaatttggaccagggactggagaaaacagtgaacccattgacggctccagcaactgtcctaaaagatcatgattccagattgcccttgatagttgactatgaccagatcttgattgctagaatcctgtcatctccaataaatgacatttttcaagtttcagttattcttccgacaggctctaaggttgtcaaggtactacaaaatgcacggtctaaagactagctttttgactagaactgagatgtcttgatgtcagacgaggacttttttgacaagtgacaaccaggggactaaagctatatgtcctttttatcaaaaataaagaaccaacatctacatctcccagggtacactgcagtgaagcttttagtttcaatgaaaatccccaagttatgccctgtacttgactaaatgtatagaaattgggaaagtggacagctagaaatgtatattctctgaattatactgcagggagcctagaaaaggctgaaggaaccccctggctttgctgggatcataaaactaaggcagataaagccagttctgaatatttcttcaaatgctactcagtgagtaaagagaacagaaccctgatggaaagcgtatatgactcagcatcattagtgtttccttgagtttggtacagcctgaatttttagggaatcagaggggtaggaatggtaatgagagattaaagggaacaaaggattgaatcacagtgtttttcagtttttcctttccatccggccactttgtttcaagccagataaaatgcaggatcaataaaatagcaagtcatctactgcctactcccttccgatatcagttacatatcacatctgaatcccttcaaaatcatatttcttttacagttattggtccacactttaaattgaccatctatatccattaaatgggagatttactcaggcttcaagggctggaatcattagaaacagagattggggagaaattatcctctggcttagtcatacattaa

SEQ ID NO: 36942 - DNA, 778 bp, Bovine  19866882228394
  misc_feature (1)..(1): n is a, c, g, or t
ntgaatatactttctgagctactagaagacagaaaagctctaaaccaatgcatattttgaaatgcatatgatgtattattatgctaaactgacagctactgaaatttgtaggtaatatagcaatggttgattgttgtcatctctctcctgtaccatgggccttttcttggggctcaaggaaagatatcttgctgtggcatttagggacgtgaaagagagggcattggtgcaggaatctgaaaataaattgctgtgatcctacagctgtattacactatcttaagcaatattcccattggacccatggataaaatactggctttaaacagtgcctcatgactaggtccatgactctaaattatgtctgggtttagccacttgttacagaggttaagatggatgcctaggaatacaccatgccatctgaagccctccagaaagtggacagagatgaaacatgttgatggagggctatacttaagactgatacattaaaaatggattagctggagaggtagcgattcttggtagaacttggcctgtgttgattcccttgttgcccttggaaaaagagagactccccaagctgtggcgcagaaatgatgaagttgagctaagctagaaatattaatatcattcctaggcccatctctgtaaatggtaaatcaatagcttgtgatataaaatatatatatatatataaaatacatcttctcaccaagaatgagggttttaaaattacatgatttctgtgaacacttagagtcagaactctgtg

SEQ ID NO: 36943 - DNA, 1977 bp, Bovine  19866880656317
  misc_feature (1)..(1): n is a, c, g, or t
ntgtatcttatcttgttttaatccaccctgttcatagattcaagttcatttacatggccaataccatgcatataatatacttttttaaactatttttctgaatatttaacatatataaataaaaacataagattacgtatatgtttacatatatatgtaagataataatgaatatacaaagaaatgtagctatattaaatatacatactgtccacactaagtggtaaataaccctcctgtcagtccaggagatataagagacacaggttcaatctctgggttggaaagatcccgtagagaagggcatggcaaccagcttcagtattcctgcctgtagaatcccacggacagaggagcctggtgggctacagcctaaggttcacaaagagtcacacatgagtgaagtaacttagtaatcactttcaaactaaaaccaattcaaatacctcaatcacattttctttgcacttgttttactaatttaaaaagtatatgatgaaataaagtaatacagtagtcataaaagcaaaaaaagttaaataagttgccttcaaataagttaaactggatgaattctctatattcataggagagaacatttacactgtgacattaagaacaggtttgagagcaagctagttggtttctttggaactgaagtatgtaaattcaggagtggtctggtagcaaactttggctgagatcaccaagaagcagaagataatgtgcagaaagcaagaaaaatgccaaaaggcagagagaaagtacatctaatgttcatgattactttccatcttgattcaatatatcttagtagtgattcatctcttcccttgtattccacaagatacctctctgttcatgtagtaactcccatggttttaatttaaatcagttcaatatgttcctctaatttgtaaccaagagcatcttaataatatactgtacttttcaagtaataaagtaggactgtctcaagaaagtcttgcttatctgtgggctctgtggtttgactctcctgtttctggggcactctcttctaccaggaagattcagctcctttgaatgatcaacagtgtgaaaacctcagatttatttcaggacctaaaaaagcgttatgatcaaaaataaaataacagcaggacaacatgtattttgagtagctatagaattgctgatgcagactcaaaggctatttagtctttgctgtccagttcagtaataaaatgatgcaccaagggaaaagaaaaactatggaaatacactctgagtgtgtattcctctttcactgacttttatcttattagtaaatcaagaagagtactgtgttcgctcagcatttaaatgatacattcttgtatatagtatttcaattacatatcttcttgagttttctatgtcatgccatagggctataaggtgaccaagtaactagcagggaatttcatactactgttattgatcacagtatgaaaagaaagcaataaagacatcaacactacatggcactggatgacatctttacagcgtggctaataaagatgatttgaaatagcccattgactttttctatgcccagaagctcgagtaaatatataatttaatcttgctgtctgggttaaaggcattttttttttgagaattatgacattattcatgttgttaaagataaggcctgccccagctttcagtttcaaagctcagttattaaattgggcttcaaagtgaaatgtggtgaagtaaatgggaggaattgagagactggagatgaaagtttggatctctggttacagaactgagagaaatcaatatgtggagtcaaagcagtatgatagtatcaccttaatacatatgatttggcatgcctaatagagtgatttggggggatatatgtggaatatctaacagataaataagcagtcactggagaagaacaagttttttcacttccttgatgactttttggttaaaagaggg

SEQ ID NO: 36944 - DNA, 1609 bp, Bovine  19866881610720
  misc_feature (1)..(1): n is a, c, g, or t
nttcctaacagtgcatgaacaggaataatgatttataataagtgggctgttctttaataaaagatttctcagatgggggctagggtagggagttctgcttcactggagcaatcgtaactgtccttgaatgtcctcaacactcacacagagtctcaggagaaggagcagaggaattacattgatcaaatttcaatttttatctctttcttgttaagcaaggcagcaaaatattatcaaccctccactatcatttgttaagcagtttatgatatacctgttgaaatggaagtttctagccctatgttcataaacctattattatttatgcatatgtgtaaacctatttttatttatgcatatgtgtttagactttctaataccaaataataactttttttttagcatctcgcactttgctttcctataaatgcattaataaaccaagatgaaatttcaagtcgtttgctggacaggttttattactagaacttgaaaaaaatataaaaattagattattaattctaccaatattaaatttttatattatataaatatgctttcaaatcctaattactaaagtattatgatcataaatttacaatattttctccatttatcttcaaatatattcaaagtacttattaaagcttagaaatagcttcttaccattctcctcattcttttgcaatttttgtgtttgttccaaagaatcaggaatgctatattcaaagaagttacatttctgaggtggaactaattagcaagtgctagaatcagtattagaacttaaagagacaggtcattcattttaccacctggtcatgcaggctacttatctgacaccttcagaagaaacttactcttcagctttagaagaattaacacaccacactgagataggaggagatctctgaggtatttagttttagaatatcaagatattttcaattgccacctggttttcctccttatactatatattatatttgtcatttttatatgaatttaccatctttaattctgcagatagtttattctgactagtgaaacagagcaaaggtatgttttgaaaaattaataccccatcacttgcacttaattaatgatatcctaatataacaaaaatcaacagctttgtgttaccttcaaatcattctccatctcacaaactatacaccaaaataggtgattttgtcatagtttgcacattgctcttaacccatatttctctattagtattataagtggatatatcttcatttaaatagcttcagttaattatatgttatgcatgcattagaagcccttcaactatggcccatgtggtgtacattcacattctttcaagatcttaaccagtgtcaaaattcttgaaataaatattgctatacatgtatctttccatgttgttggcattcttatgtagttatcattattgactgaaagaatatattgctttagtgttaatacatagttcagttcagatcagttgctcagtcatgtctgactctttgtgacctcatgaatcactgcacaccaggcctccctgtccatcaccaactgaggagtttacccaaactcatgtccatcaagtcagtataccatccag

SEQ ID NO: 36945 - DNA, 1927 bp, Bovine  19866880127193
  misc_feature (1)..(1): n is a, c, g, or t
ngatcatcgaaaaagcaagagtgtgcccgaaaaacatctatttctgctttattgactgtgccaaagcctttgactgtgtggatcacactaaactgtggaaaattctgaaagagatgggaataccagaccacctgacctgcctcctgagacatctgtacgcaggtcaggaagcaacagttagaactggacatggaacaacagactggttccaaataggaaaaggagtacgtcgaggctgaatattgtcatcctacttatttaacttatatgcaaagtacatcatgagaaacgttgggctggatgaagcacaagctggaatcaagattgccgggagaaatatcaataacctcagatatgcagatgacaccacccttatggcaaaagtgaagaggaactaaagagcctcttgatgaaagtgaaagaggagagtgaaaaagttggcttaaagctcaatattcagaaaactaagatcatggcatctggtctcatcacttcatggcaaataggtggggaaacagtggaaacagtggctgactttattttcggggggctccaaaatcactgcagatggtgattgcagccatgaaattaaaagccacttactccttgggaggaaagttatgaccaacctagacagcatattaaaaagcagagatattactttgtcaccaaaggtccatctagtcaaggctgtggtttttccagtgctcatgtatggatgtgagagtcagaccattaagaaagctgagtgccgaagaattgatgcttttgaactgtgatgttggagaagactcctgagagtcccttgaactgcaaggagatccaatcagtccatcctaaaggaggtcagtcctaggtattcattggaaggactgatgttgaagctgagactccaatactttggccacctgatgcaaagagctgactcatttgaaaagaccctgatgctgggaaagattgagggcaggaggagaagtggatgatagaggattagatggttggatggcatcactgactcaatggacatgagtgtgggtaaactctgagagttggtgatcgacaggaagacctggtgtgctgaggttcatggagtcacaaagagtcagacatgactgaacaagattgaactgaactgagaattattcagttaacatcaagcttgagactcaagtaataaagagtctttaggaatttttttcagtgtataagccaatgacttattgaactatttctgtttgccaagccaggcttaaagtagtggtgctggtgtactcctggcataccaaaaaatcggttgtctaagaattctgctggtgtgtgtattaactaccgggtcttttggattaaaagatcaatgtattgtttcttttcaactctaactagcagaaaaaaaggaattgttcaataattatgttagattccagattgtctttatcttttcttgacaatcaaaataaagacttgtgactactgctgctaagtcacttcagtcatgtccgactctgtgcgaccccatagatggcagcccaccaggctccctgtccctgggattctccaggcaaaacactggagtgggttgccatttccttctccaatgcatgaaagtgaaaagtgaaagtgaagttgctcagtcgtgtccgactcttagtgaccccatggactgcagcctactggtctcctccgtccatgggttttccaggcaagagtactggggtgggtttccattgccttctccaaaagacttgtgactagataccattattagtgttgtcaaatatttgttgaactacataggtttggtggagaaggggttatatttttagcaaaggaattgtttccttggggaaaaatactgaacatggaagcattaaagcaagtgacaaggaatggaggttatttattgtattcatcttctttgtcctatatt

SEQ ID NO: 36946 - DNA, 1779 bp, Bovine  19866880362281
  misc_feature (1)..(1): n is a, c, g, or t
natcaggtggtctggtattcccatctctttcagaattttccacagtttattgtgatccacacagtcaaaggctttggcatagtcaataaagcagaaatagattttttctggaactgtcttgctttttccatgatccagcaaatgctggcaatttgatctctggttcctcttccttttctaaaaccagcttgaacatcaggaaattcacggttcacatatggctgaagcctggcttggagaattttgagcattactttactagcatgtgagatgagtgcaattgtgtggtagtctgagcattctttggcattgcctttctttgggattggaatgaaaactgaccttttccagtcctgtggccactgctgatatacatacataaaagtaccacagtttatgaaaatagaaaattcagtcaatttacttctgttagatctcatcaagcactttctcaccattgaaacgttgaaatatggaagacaagaattttcccttaaaatgtattgaatgtcctttgactagaactccctggaaagccaaaattaaaccatatgttagtaaatagggatacagatcatagcaaagatattgcttgtaaataaaaattcagtcgccattctttgtcctgctgtttgctaaataggtcttatgattccaaatatgttgtaattgcttagtatattttgccaaatgaaaggacccaagtgaaaaatagtatattatgttttaaagattagtgacattggtaggcttgtaattctcattgtttcagagttgctttgattgtgtcttgttggaaaatcttattatttttttaagagtaagaactttagaatttcataattcttaatagcaatgtgaactgatcagttactcatcacataattttgaacaggatacctaaattctctgagcttaaatttccgtatgtatgaaatcatgaaaattctacctagttagcacaattaaatgtaagaaaatatatgaaacctggcacaatgtctggtactttgtataaacccaaagttcatgtcttctctccttccaattaatcatggcaaagcaatcctttttaaaatcataagtgtttttcacattaaaacttctgtagtttagcagtcaagtcttaattttgacagatgcagttatttgtatgtgtgtgtgtatttctgatttaatggcaaaacgtgttgcacttttctagaggaccagggcaggtaaatgatcaataaaatcatatgaatatgtacatatgatgtacattctgtaaatatgtacattctgtaaataaaggaagagtttgaaaaaggttgacatcactgaatttgtgttgaggtacagactttccttcagtcttcatttcgtcaacaaatactaattgcatacctagtgtgtaataagtcaaagatccaatgatgaagaatccaaacatggtccttgtttgaatggaatttattgtactagagaggtgttaagcaaattgtcataccattaatgactgatatctggttctttgagtgcatatcataggaggctttgacgtagttaggaaggtgaggaaagtgaggaggtgatgattgagctgataaataagaattcagtaggggctatttacataaatagaggtggaaatgaaattccaaataggaagaacaacactcaccaagtacttaaggtaagagtccatgcaaaacataaatgagacctaaaatatactagtgtggccaaagcatagagaggaagaaaaagatataaactttagaaataatcatcatccta

SEQ ID NO: 36947 - DNA, 3199 bp, Bovine  19866880565431
  misc_feature (1)..(1): n is a, c, g, or t
natattttatgactaagttttacataacatcccggatacaccaggatgcaccaatgactgtagtgagaagaaagagtttatgaaataatggtgacctggaattcttagtcttcctgaagatatgcatgtatggcttgatatttcactttggaataaatgtaacaccttagatacaacttccttctaaatatgtgcccattattatagacaaaccttatacatatcagaaaagagagactcttctgcaacatataccagagaaaaaaatataataaatctatttactgagttgtttcatatcattttcagctcactgcattgtgtcatacttttgcatttaggatgttacgtttatgctggatcacgtataacactgccttttattagaggataataccctaaaattgcaaccaccttaagagaaggaaatatttttaacaagattcgtcttaaaatggtgggggatggactttaattaaaattgaaattccctttgagtatgcaatggcaacccactccagtatgcttgcctggagaatcccagggacagaggaacctagagggctgccatctatggggtcgcacagagtcggacacgactgaagtgacttagcagcagcagcagcagcatgcaatatttatactacttatttgctgcattctgtaaaatgtctgagtttctagtgataaaaattcctgccaaaaagactgttatttcctggaaatgtttccttatgtttaaagtaaatgaatttagaatagtttccagaagagtcatcatctaagcaaggaactctgagtacttaaactgaaaaccacagtcagtgactgtctacacagtctgactgtagggaatttgggtctaaatgagccacattggctgtttacacataatgatgactcaattctatgttttactgggcctatactaacattttctaaaggggagagaatgattgggttgaatatgtcaatatttgtttaaataattatcacttgagtcatctgtccttaaatagtacatgcatcattggtaaatttaaattcaataatcatttattttcattgtttaaacttagacattgggttagattcttagggttggaaagtaaatgaggtataaggtttcaagaaatgctcttgatttacctcctcagcacatcttgattaatttcctttcccacccatcccacactccccaaatacaaacccccattaactctagcctgaactactcctggaaggatcttgttgatctcaatacgccctatactcaaacgccctatatctcagtatatcctccgaagtcattctccacactacacggtggtcatttacaatgccactttgatagtgcttctgccagttttcaacttttatatctagcctgcacagtcctgcttgacccatggcccctatgtatctttagcctcagctttggcctctttctcttctctatactccaaccacactggactgttccgttttaatccttttaacatactgtcctacctatctcagagccacacatgctctaggctctgcctattacatcagcacttgtgtcctcttcaccatttacttgcaaattctgttgtggattttagctcaaatagcactcttttaggacaatctttctgattcaccatgtgtaccaccgccaccccgcaaccgcccgtttcacacttgcatagaaccctgcacatttccttcaaagaaaacatgtgtaataatcatgcattaggttatttatgtctatatcactcaccagatggcatgtttccactaaaggatctttgactgttctgcactgtgtctttggtaacatgcagggtgcttaccaccctaaatgaaatggaaggaaggaaagagtgagggagagaaggaaggaaggaaggctggagggagggagggaatcatttcacttgccaggaatttattgttttgctttattttgttttgtttctgctgtaaggataaatattaaaacatgagtatgtttacttcaagtgaatcaaatggtttctgaaaatcataatatatatcaaacattactacaaggaactcaatttcttggccccttattttctcaagcttaatacaggactgagatctggctaaacaatcctaaaatcatgtatttataaaaaactcaattgttttatgatacagaagttaaaatgtattaatcctagttctttgacctgagggtcaatgaatagaactgtggaaactttatcaagtaaaagtcctccatatctctccagacaatgacaaggatttttaaggaatatatttggccactggcaaagcccattaacaaacagaaaataaaaatagaatctgggtaataaaataaagtctaaccttttgaaaaaaaaaaaaaaacaacctttgtgcttagtttctcttgttcataggatgcggtgggcaaaggccttgcccccagcactttggaccagagtggaatttctagtgtgaaatggctacattgaacacttccgattcaggaccaggatggtgtgcagaagtcctgtgcctgaagccacaattctgtagcagcggtggcagtaggcagtgttctgagatgctgcagctagtgcaatgcaatctggactgttgagagctgtaaatagcagcccaaccatggtctgtgtgctctagaccacaagctcccacatctccattcttgatcaaagaataatgcatttcagctctcatgacacgcgcaggaggatccttattggtgcccaaaatcggtcattggtaacaatgtctgagtccaggcttgaaagacaaaattcattaattctgctactagccactgagaatccatggaaaagcacaactgtagggaaattagaaatcatctaggcagtgatatagttcctttattttgaagatgattgaatctaagagcagctgaagaccagaaagataagtggtggtagagtaagacataaagacataaagatatgtgatggtacagcaggtgatatgtttcaattaggactttgagaagccgaaaaattgttgagaggagatggatgaagagaagagggtaggagttaaggaagtctgtgtcttttgaactggagtaagtgtggcatgtggatgacagggaacattttcaatttggttcagttcagttcagtcactcagtcgtgtcaaactctttgcgaccccatgaactgcatca

SEQ ID NO: 36948 - DNA, 977 bp, Bovine  19866880638204
  misc_feature (1)..(1): n is a, c, g, or t
nttaattataataaagcatcccaaaatgttttccttgaatgatagccttgggtctgctattatgtttttattaatatcttaccttatttcatttattattatgaggatgagataatttggggatctctttttccactgctcaatgttattttcggcaacagattattttctgttatttgccagtattcttaaacccacctactcattcgtgtctgatgtggtcagacttctgtggtgaactaaagaccatcattactgtttgttcagtgtttacattttgtttagcaggggtttcatattagtggctactctaggagatgtacctcaggtaattatggcagaaaagcagcaaagggaaggctgaatgaaacaaccctaggctggaattctcaatcgtgcctgcaagtgaaaaaaaaattttcattacactcacctctttctccacactctcttaaataaagaactttttttctttttatagtggactgaaaatataggtgcttagtcttttgttgattttatatgttgtgaaaatagtttctttgaatacttagttatattcttcttaggttctacttgcttgcagctaccctttatttattttaaaaaatattttatgtacacaaaggtgctgtggctatatgccttgggatccttggagagttctcccattaaagttatctttctgtttgtgacatgatagcttagcagaactcagtaggccattaggaaaataagcaaattcttatctggaagtcattaactagaatcagtcattctctttttctctcttgcctggaagttggttcttttcacatcctggaaaaatattttgatagagaattaagtgctggttaaaggtgagtttgtggcagagggactggaatggggaggggactaaaactatatttgcctctgtgttcactgaggggcgttaacaaagacaaggtcagtgaccagctgctggcattgtcata

SEQ ID NO: 36949 - DNA, 710 bp, Bovine  19866880658708
  misc_feature (1)..(1): n is a, c, g, or t
ncttctcagcagtgttctgcaatttggggaggagtgagtatctttttataaaatcacttagtgagtccctttggtaagcctgtacactctattacgctgaggtttagtgtataagaaaaacgtggtgtgttggagtttgcctgcttgtgttactttttctcctttacatgctgtggtagcttactcagccatagaaaataaattcaaagctgtttaataataaggctactgttgtgtagtagaaactaggcattatggcagtaagtaaataccttatacatcaagaatatttcaagtttctggtgaaatccaaagtatcacaagggcttcattatgcccttgctttcagcccacaacccctctgatcttaatgactcccaaacagagtcatccaagattttgtcccatgtagggtcactgagtaagtttgtgatgggtctctgtgtgttctctatgaggaggggagagagggtgatgactcacactgagtatgaacaactggaaccccaattttatgcacttttgtattttttggaaaacatttcttaagcatactccagcagtctgatttatcaaacagctttgcctcttattgctgagtcatcctactacgaatgggaaaggcacccaggaaactacaaagtgacttacatgggagtttgattctcataagttccaggagtctcaatcaatttaacaatcagaaaggg

SEQ ID NO: 36950 - DNA, 2450 bp, Bovine  19866880698108
  misc_feature (1)..(1): n is a, c, g, or t
ntctggaagtgatgtctttagttattcctcatttatttttatctctccagtgggaaggagaatttatttcaacttaaaaagttgtagaaggcttcccacaattagctagatttaactcttcattgcttccaggatacattccaaactcctggcagtggcatttagagaaatcatcacattcttaaaatatatctctagtctttatttttcatttttctaaactcttatgccccaacaatatcgagctactggattttctgcaaacacaacatatatttcaatccttttctcattttatcatttaattcttctacctaaggtcatccttccttcctttctccatctgctgccatcttaccccacttctaagtcataattctcaaatactttcttcatgggaaatcctctcctagactgctcaccttaccccagcctccagattgaccctgaggaaggtcaatgactgtttatcaagcacttggttgtttaatcactaagtcatgtttaattcttctgtaactctctgaattgcagcccaccaggctcctttgtccataggatttaccaggcaagaatactggagtgggtttccatttcctgctccagggatctttctgatgctgggatcaaatccatgtcttctgcagctcctgcattggcaggcagattctttactgctgagccacctgggaagcccctacattaaggtaggcaaagtctattcttagaagaaaagaatagatttgaaatgaaggaggaaacggagaaagaaatagagaagaccaagagggctgtgaatctttacagtgatatattgaaggacagacaacaaaagaggaagcagggaaagagcaaataaaccaaaagttgaggaaagggtaaagagaaaatcgaggggagcagccttaggtgtttatcagctgtggggaatgactgggaatgcagattttggggctattttgctgtacttcatgggaaaaccactcggcatttttcaagaatgcatacaaaataatttaattttcaatttttaggttgaatttctcatgcatgtcataccctggagaacaccattctgttgaaataggccacatggtgaaaagaagagcaaagtcgctcagtcgtgtccgactcttggtgaccccatggactgtagcctaccaggcttctcagaccatgggatttcccaggcaagagtactggagtgggttgccatttccttctccaggggatcttcctgacccagggatcaaacccgggtctcccacattgtaggcagatgcttgggctgtgtgtgtgtgtgtgtgtgtgtgctcagttgtgtccgactctttgtagtcccatggactgtagtccatcaggatcttctgtcagtggaattttctgggcaagaacactggtgcaggttgccattttctactccaagggatcttcctgacccagggatcaaacctgaggctcttacatctcctgcattggcaggaacactagcaccactcgggaagcccttattcaggttacctactataatatttattattgtaattgtttcttcagtggcttgtcttactagactgaaatctctatgaagatagatattctgtcttaatcatttttgtaacaccatcctctaggacaatatctggcaagtactaggtgctcagtaaacattcactgaatgaatgaattaatgaataagtatggtactagaagccttgtaccaactttagtcacaataacatggaagaaaaatcttcagatagaaaatgtcttcaaagtttgggaccaattatgtaacaatatttttccccaaaggtaagaaccaacaccacctaaattttacttcagtagtgattttcttttttgccttggcaaattgcacaccagagctcccacacccagtgtcttgcaaaagagaacaaatatgatatacaaacgcattctgctgattgtagagaggaaaagacacagagtagacggtagagataataaatgtgttggtgtctataatttactgcacttaggtgataatccaccatagccacaaactatattttccccaaaaggtcaacatattcaagtcacatagttatattcttaaaatattctgattgattatgagtgaattcagtagaagattcaacatatttgtaactccaaaatttgtaagtcaaattttgttgcatagcaaattatattttaattgctgttttcaagggttctaatcaaggagatgcattcatttattagccagatatttactgagaattattatgtaccaggcacagggcagtgtactagtgacacgaagtgtacagtgaacaaaggacacaatccatatgcccaaggaacccaggaataaatgcaatttaatgggaatataatgggagtgtttgtggaagtgagcctcagtcctgtgtggaggtgccagggaaggttcacgtataaag

SEQ ID NO: 36951 - DNA, 3038 bp, Bovine  19866880746684
  misc_feature (1)..(1): n is a, c, g, or t
ntaaaatagggagggagacatagagtttgagcttttaaggttgactttttgactctgaaaagaatttttaatggcaacataagtaaggctgaagcttagaatctgcctctttcaaggtctccaaatagtcacagaaagaaaattttcagctctaaatgtggcccttattataaaatgcatcatttatactacaaaaatcattttacatacatacaaaaaagattaactagttaaaatggagacaaaatattggctaaggttttaaaatttcttataaaaataatttattaaaattggactacagaagacagaaaacatttcacaacttcgtattgctcattgttgccctgaagacatcatgaaacatacgcaggtccacagcatgggcttgggcacaatatagagaaagctaaagaaacacaaccctttccaaccaaagactagagttgtaactagtggacttgtgaagctctatcacccagtgtccccaggagtcttccttttttagtggaacctgtaactaactttaaaacttgtcaaaatggaaagagtggccagcaagacgctgcttcaggtagtgtaacttcttcacattggtatttcattttattgactggttcattactggttcattgactggttcattaccggtgatttcagagagatcacttcttttaggttatggccagtaaataagtcttaacagcctcttctattcaaaaaaaagatgtaatattaaagctgaaaagatttatacactttgttttgtatgaattaaaccagtatccagacataattgtgggaatttatgacccaaatttgagctctaaaatttaacttcggttctagatgtgtctttaacaaactaattcatttagtaccttttatgtctttcctgtgtaacaattattaaatttgtatcaatttcacatcaaaaggaaattatttcttagggccctattttcaatgacagttaaccttatttgcagcattattataaattccttcatcctctttcaggtttttataacacgttttggctaactgctttgactagatttttgaagacaaatgagaatttggataaaagaacttccattagcataagataaaattttaatttaaaagaaagactttaaaaaatgtaactgggagtggtagccaaagggataccattatgctatcatggtgttgcctaagcaaacacatataactatttcttgacaaaatgttgtctataatcatgtagattttattgcagtgtcttattagattttcattttctttgacgtaataagattcaaagccaaacatagctctgtaaaattaaactttattgtcttcatgtttgctaagtcaaaattcctttccttaatattgcttaaatacgattaggtttttgaggtttaaattcctttctttaaaaaaatagaaatggattttatatttttccaaataaaagatagagcagtgatgatgacccatacacaaaaccatccaaattgattatagattttgctaataaatcctaatttctttaatagtaaacctatattttagttgaaactgttaagtttacagataaaatatttgtcatatggaatacatgagaaaagctctagtttctagacattgataactagattggatatagtttctatttctgatatctcttactggttttcctgatttctcactatcattttctttctatcatatatttaacttgtagtgaactatatacgtgcgtgcttagtcacttggtcaggtctgactctttgtgagcccatggactgtagcccaccaggcttctccatccatggggattctccaggcaagaatactggagtggattgccatgctctcctccaggagatcttcccaacccagggactgaacccaggtctccctcattgcaggcggatggattctttaccatctgagctgccagggaattgttcagttcagttcggtcgctcagtcgtgtctgactctttgtgaccccacggactgcagcatgccaggcctccctgtccatcgccaacacctggagtttactactcaaactcctgtccattgagtcactgatgccatccaaccatctcattctctgttgtccccttttcctcccaacttcactctttcccagcatcagggtcttttccaatgagtcagttctttgaattaggtggccaaactattggagttttggctttcagaatcagtccttccagtgaacattcaggactaatttcctttaggattgactggtttgatctccttgcagtccaagggactctcaagagttttctccaacaccacagttcaaaaacatcaattctttggttcttagctttctttatggtccagctctcacatccatacatgactactggaaaaactatacatgactatatggacctttattggcaaagtaatatctctgctttttaaaatgctgtccaggttgggcatagcttttctttcaaagaacaaatttattttaatttcatggctgcagtcaccagctgcactgattttggagcccaagaaaataaagtctctcattgtttccatcgtttccccatctatttgccatgaagtaatgggaccagatgccatgatctcattttttgaatgctgagttttaaccaaaccttttcactttcctcaagaggctcctcagttcctcttcactttctgccataatggtggtgtcatctgcatatatgaggttatcaatatttctcccagcaatcttgattccagcatgtgcttcatctagctggcattttgcatgatgtactctgcatgtaagttaaataagcagggtgacaatatatcatcttgacgtactcctttcctgatttggaaccagtctgttgttccatgtccagttctaattgttgctttttgacctggatacaggtttttcaggaggctggtaaggtgatctggtattcccatctctttcaaaattttccacagtttattgtgatccacacaaaggctttggcatagtcaataaagcaaaagta

SEQ ID NO: 36952 - DNA, 1037 bp, Bovine  19866880776718
  misc_feature (1)..(1): n is a, c, g, or t
natttcaggatttaagcttattttatatgcctatttacaagtttagaagaagaaagtcagctttgttaaacaaaagcaaagtcttaactggccagtggcatctgatctccacaagtaacaagttgttccactgctaatactttgcaaaatgttgggaaatttattaaatcagttaataaattatctccttgatccattttccaagggaaaataagtaggcgtgatcacttagtagaaatatacaccaaacctagagataatatatcgtataacacaaatgatagcattccttagaagatacagttgagaaggtgagatatgatgtctggtttactagctatcacaccataatttttttcctacaatttaagaaaacacattggaatttaaatgaatagaaataatgttagtgtactaaaatactatgtcctaatttacaaaatagaaagcaattcattcataaccttcagtatcttattatgggtaacaacttgtgtcacataacagatgattcaggaactgctagtgttttgggtaataaatttagaactttgggatataatatcatgttaagacggatgttcacaaattcaatccaggacggaactgggaccagttattccaatcatctctgttaagatgcttcttactggtgaaaaactggaagaagaaagtcgatgactcatggcaggtacatttcttttcacaattcaggtagactcagatgtgagatgctataaacttaattgggacatgggtcagactttagagcttgctcccatgggagtggtgtacaagaactggaggctaacctgcgcacgtttcaggccagtgcccaggaattcggcatctattgagtgggactcctgaggcaaatggacagctagtctggaataggtagcttttcagatctcttattttgaggtttagatttaaaaaggaactgtaaatacctaccatgaaactaaactgtgaatccagttaaatgcattgagcaataaacactatatctgaagacaacccatactctagcaaaa

SEQ ID NO: 36953 - DNA, 1496 bp, Bovine  19866880789114
  misc_feature (1)..(1): n is a, c, g, or t
ncaattgtagagctgagaaataggatttgttacaggattgctgctcctttaaaaacatccttattcctgctaaaatggcccgggctatttaagttcttgagttgcactgattaataatgaatagagcacattaaagtagttttatttacctaagtttctattgcatgcaaactagtacacacatatattatttacatcctatatatctttctgctatctaaatttcacaggataagaaataaccagtaaagtaatttgcaaaatgtgtttatatgtcatgtgtaactgataaagtaaatggttagagtataggcaaatatcaagaaagcaaacgcaatttccctaattaaaatgttagacatgtaaccatgccaaatagcattttaatcaaataaacccagaccttattattaaagacaagtacttcaattgcagaattttaaataacttaactgcatatggaaaatgtggcttgaaaatataaacacaattaagacaatttgttttagtctctttggtcagcttaggaggataaaaagccttgcatgtatttgagattagatattaatttgtgactctttgtcacaatattccattaagtgttcttgattgttcttgcacaataaacaatgtctttcttccaatttttttgaaagttttatttatgttagttcaaaatgtctttaggagttgccaaaatcttcagtagccatgagacatttaacacaatattacatattccacctatttgttctaaataactcaaatgaagcagcagttttccagtagcttcccgcatcacttggctttttttgaaccagggtttatagtaacaaaatgtaaattggataatagttattaatggtacaaaagcaacattggggtgagcttcctggtaatattatgtcagtaacatgaaaagatgctgtgttgttttggtttggaacttttctgggttttcaatcaggctcagcagatttgagtaagtaggcagccattatggttttatttggttgttgtttttttcctcttttttgatcatcaaggcacatacaaacattaggctcaagcctaaagccctaaaacaagccattcttttgctggtgaaattctaatctcattttattacattgtcaatgagctgcagagattcgtcttgtcttgttaacatgatagcagacagatgagaagaaataaaaagtactggcctgtgaaagccaaatcaaagagccagattgaagggattctcgagttactcaggtgaggccctcagcccctagctagtgacccagctaatggtcagaatgccgaaggttccgtttggatgatccaaaccttcagacatggtattcaaatgtctgcataaatggctgagaatttgccttttctttgtaagcttactatacaataaacaaaagacgggcatttgatactaactaaacatagagaaggaacagacagtaatacggatgaacgtgttcaagacaacacaagtc

SEQ ID NO: 36954 - DNA, 905 bp, Bovine  19866880862667
  misc_feature (1)..(1): n is a, c, g, or t
nttaaataagcagggtgccaatatacagccttgatgtactccttttccgatttggaaccaggctgttgttccatgtccagttccaactgttgcttcctgacctgcatacagatttctcaagaggcaggtcaggtggtctgatacgcccatctctttaagaattttccacagtttgttgtgatccacacagtcaaaggctttggcatagtcaataaagcagaaatagatgtttttctggaattctctcactttttcgatgatgcaaggaatgctggcaatttgacctctggttcctctgccttttctaaatccagcttgaacatctggaagttcactgttcatgtattcctgaagcctggcttggagaattttgagcattactttactagcgtgtgagatgagtgcaattgtgcagtagtttgagcattctttggcattgcctttctttgggattggaatgaaaactgacgttttccagtcctgtggccactgctgagttttccaaaatcaagtatattctaatataaaataaaaattaaattaaaatatgtgtgtgtgtactgacatacaaatacactggaaaacctaagataagtgtgatggggaggagtagttgtcaagctgttagctttgtattaatttcggattattagaggatttcttgttcataccttgtttttcctcaaaaacattaataaacatgagatattcattttataaactgagggaaccaaatgtgcaattattgcacacaaaagtaaagcttttaataatcacaggtattaaagtattttcttgcctgtcattacatttctttgtatcttttggcataaatattttaacctggttgtgattcatcacttatttttctttcatagtatcaccttacaggtataaactttctg

SEQ ID NO: 36955 - DNA, 1417 bp, Bovine  19866880875600
  misc_feature (1)..(1): n is a, c, g, or t
ntggaatttactcgatgtttaaatgctcttttgatgaatttgtggggaagaaagtgttctccccgtcctactcctccggcatcttggctcctccctccaggaggtggcatttctgggatctcagttgaatgcgcctatatctaactcttggactgaactccactggaaatcttcgctctgattgtcagcatctcagtgactatctttcctgtgtttccaaagctttttcttctataagtgcatcttagaagttaactggcagccagaggggaaattttacacatattattagggctccttctctttagtttttttctctccaggactcagccactccattccagttttcttggctaccctaaactctgatctctgtttctgctgtccaacaagactattgtctttatttaggctcaatttccctgaactgtggtttggaaaatgccctgaggaagaaatctggggtttatgtgacgtttattttgtttgcctcttttctctctaggactatagccctgcagtggctgctgtccagtgcctgcaaacaattgttatatatgttttgtctagattttatacttgtttataacaagaagttaagtccaataatagctactccatcatggataaaactagaccttgacaatgttatttctttttatttctctttgcaccatctcttgcttttaagacacctttattctaccatttcagtgacaagacctaatcagacctttattctcctttctattattcttggaccagcctcaaatgctttctccaggtttagcttctaaggctacatttttagtatgtaagaatcagttcagttcagtcgctcagttgtgtctgactctttgcgaccccgtgaatcacagcatgccagacctcccggtccatcaccaactcccagagttcactcaaactcatgtccattgagtcggtgatgccatccagccatctcatcctctgtcatccccttcttctcctgcccccaatccctcccagcatcagagacttttccaatgagtcaactctttgcatgaggtgggaaagtattggagtttcagctttagcatcagttcttccaatgaacacccagggactgacttcctttaggatggactggtaggatctccttgcagtccaagggactctcaagagtcttctccaataccacagttcaaaagcatcaattcttcggctctcagctttcttcacagtccaactttcacatccatacatgactcctggaaaaatcacagccttgactagacagaccatggttggcaaagtgatgtccctgctttttcatatgctgtctagattggtcaaagtttcctactaaggagtaagcatcttttaatttcatggctgcagtcaccatctgcagtgatttggagcctccaaaaataaa

SEQ ID NO: 36956 - DNA, 932 bp, Bovine  19866880916291
  misc_feature (1)..(1): n is a, c, g, or t
ntatttatgtaatttattacagaagtaagctgtattaatggaacaatgaatacatatggtcagatgaactaaactcttgcatagtgggatttctttccagaaagcagagtggtctaagtttagcagcaaaaaactacttatgttcaaaccacagtgctaggttctaagagtacagacctgaataagagagacaacagtggtgtttcgtccaaaagttcatttcatagagaggaagaaagaaaatgaatatgtaactatgataaagttaaaactcacagctccaacttatagggtatccccttgtactggaccctacgtttagaacactgcggtcataaacatttatggctccattatatatcctgttatacacaagaggaagctaacattgaaatagcttagcattaaggtgcaaactcttatatgacatcaaatatgcaggctcttaagcactaagtgatgttgcgtttcattggttttcaaaatgttaactagcagactccctctgtgtgatttgatttccatattgtcaacagctgcctccttactcttttagcaatggaagaagataatactgaggctgccagtttgaataataaaagatgtgtgttggattccactatctctatgtttgtgttctatgtgtggggcgtgttatggttggaagagggaggagctggcaggaggagggaaggcacagcctgacactctcatctgtgtttcagctctggtttcccactccatcagagctttccttctcttacactaattcttctgggtctcactttttttcagaaactaatggtcagctggtacaaaaggtggttctcatctctcttgctctttcaactagggaatgcagcccaaagcagatggtaaactccattaaagctaaataccaaaagggcactatttcctttcaataatagtaa

SEQ ID NO: 36957 - DNA, 1022 bp, Bovine  19866880929356
  misc_feature (1)..(1): n is a, c, g, or t
ncatggcaaaatgaagttcatacttgtactttacacagatgatgggtttaatattgctgttgttttcttagagggaggggatagcagtggagtacttgtctttttcttcttcaggtatttatattcagttgtactaccatcaaaacacagcataggtgtctccagctccagttccataagtgtccacatgtaaatatcaaccactcactacgtactgagtaactataatattcatggcacagtttcacattctttttagtgtggtgctagcatcatttctactcttggtggtctttagttatgtatgttattatagcttagctggtaactgtttttaattctcaatcccatatgtttttttgcatgcaaaatagtatcaacaacattatgtcagacccaaagatacagaaggtgatgaaaactgagctggtggatcctcattcatctaataagctggaaaggctttacagaaagaggaaccctaattgtacatacaacaccctcagtctcacatgtcttcaaaatgacctttaaaagaatgctttaaatgtcatagcttttttagaaaacattgagccaaacatggaaattgcatgagaagaatttctgaatctccaattaaaggcacaaagagccacattttcaatttcctcttctttttttctttctctaacttgtcaatgcaattatttaataaaaaccaacatcacattaaaataattaggcataagcagttgaatgttgatggatataatacaagcagtttcttagacagaggttaagtttttgagcaaagttccaggatagaaaacgtggtgaagcaaagtttcagtggagtgaccttagcaataaaagtgctccaaaaataacagcatacattttttaaggaatgtccaatcttattcaatttcaaccttgtcaaagaaatttaaatctagctcccaaataaatgtttaagaatcctgacttactcatctcttctcttacttttagcaactgtatataaatgatgtcataatcaa

SEQ ID NO: 36958 - DNA, 1640 bp, Bovine  19866880969707
  misc_feature (1)..(1): n is a, c, g, or t
ncgatcccctggatcgggaagatcccctggagaaggaaaatggcaatccaccccagtactgttgcctggaaaatcccatggacagaggaggctggtaggctacagttcatggggtcgcaaagagtcagacacgactgaaagcagtactactttgaagatgcacaaacaaaattcgagagactttttaagactcccacaaagattgtgacaatagtgggatttgaaacccaactctttccccaaaagccaatgctaacccaattgcctcattttatgatttaaaaattaataccctaagcatatgaaaaatgtgttaaatagttattaaaatgtgttgaatgtgttttcaaatattggatgttacaacatatcttcattgtcaaaacaaggcttataagactataatagcaaagactaaaacccagttctttccaggtataagattttaattaaagatgtgctaattactttcattttttgccatttatgtgtagttatattttggcttagagaaagtgttcaagctaggtttgttgggtggctgaatgaaatatgcttcaacaatttgatttcatgccattaagtatccttaggaactctgaattggcaaacttgaatccatgggaatctgttcttcaagaacgctcagcctacataatttgttactcgtacaacatggacatttgcttagaactttaaaagtacttgggaacagggcatcacaaatattgtaatcgtggctattgggaatcatgatagataaacttctttatgcctttaatagaattgggggatctagttctgtccattgggaaaaagtattattgtgtatgttcttttcttaacagcatgggtgtgctacttaacagcccctttcaaatgtgtaagagatggcattagttctgcttccctcagaccacagggcaggaagccaccttctttatgcagaacaaactttcacgtgcttactccccaatctcaccataagccatgctgtactgttccttcatcacccacaagaacatgttactcacagtccttccctgctcaaatttgcattgccttgtaaagtccaattttctctaactgcatcatgccatgcactataaatcgtatttgcaccccatctaaaacttaaaccacagtagacactgaagaacaaaagaaaccacaaacccaggttttttgatgaaaactcccacacattgataattggaagcacataaatctgtacccagacaagatctgctactcctgccatgacttatgctgcctgactcacagcccagcccattttcaatgctgccaccaagtcccctggaaaagtatgaagggcaagaaaacactaacaaaactttctggggagcaacagaaatgaaaacaataacatgaattgcctaacaaattgtacttctggagtctgcatttaagcatcattgagatctgtctggttggttgatattataaaaatcccatggtgagaattcaatctttaggtcagttctaaaacaacagctagttactaacatgttaaggtacacatttagaaaaacaaggtttgtttaagaagtccaaattattttcagaactaagaaaaaattattttgccccccagcctgtgtaaacaactcccatgaaca

SEQ ID NO: 36959 - DNA, 912 bp, Bovine  19866881052198
  misc_feature (1)..(1): n is a, c, g, or t
ntttgatgaaatctagagattgtctggtttatctctttcccttctgtaatagatgacaccgggggacctagggatatccaaggacttatccaagcatctctaaaagattacttagagcctgaaataaatagttagtacatgttctttctactacaacatgaggctcctataaacatttaaaaactgttggcagccaggcaaaagttttctatctacttaatgttttatagactaatttatcttggtcattacacagaaacaattcattctagttgagcttgaccactgcattttatttataaagtaagaaaaaattttaaagctaacataaatgattagaggaattgttccatgatatattttgctaaatgatcaccatgtcaatatagataattactctaaagttattcctataaaatatctatcacatttactaaatttaatacttttctttaatacaactaaatgtaatatctaaatatcttttttcatcaatttaacaaaaagaataaaatggttagtagagcacatcttaatgttggatttctagtaagaaatagtcttacttgatgcattgaagtgttcacaaattagctaagaataaatagccctgagtagcttaagctacttactgtacaacaagttttagagttcaagctcatggctcactttgaacatgtattttgtaaactaataaagcttttgcatgatatggaatagcatataatgtttctttattctttcaaagattcctcccatagttacttagatagtggatagttataatactaagaaatacaaacatgactatttagcatatacatttttattttgagtatgcaaaaaacattttagctatttatatatacttgtcaaattaaaacattgattcatttgtcatatataaaatta

SEQ ID NO: 36960 - DNA, 1138 bp, Bovine  19866881082881
  misc_feature (1)..(1): n is a, c, g, or t
ntgtataacaaaagtctagattccacttattttacagtggataaaatactatatgaatcccatacaatgtataaaccccatacttgtacaagaggagttaatgtctctaacaatgactgtactctaacacagattgctctgatttcattattaaaacacaaaattacatgtaaatttgactaatctaacccatataactggtattctctcactgcagaataaaatactatgaagcaacatcaaccaaaatcaaataagcaaaataaatggtctgaaacagttaaatataaacatcatatagatactggctaaagtttactatttaaatgaaaactttaggaaacttgcttccttttacattttatttttcattaaaaaaatgtgcatcacataatgtatataccagaaatagttgtggcctacttagagtactaaatgttaaaattctgaatcaataataacctttctctgtttctaagatatttataaatctttcctcctctttagggtcatcagggactttctactgccaagaagctgaaagaatcttgtacaaagaatttgcacatcgtagatgagctaaatgaatatttgttgataatgaggttgatgataaattatcacttatttgttatgtctcagagcagtttccctgcactgaaatgcttcttgttaaaaatgatgtttccctcctacgctttggtttttaacatccattgatgattgccttcacagaaattgatgtaagaaagttgtcatcctgttctctgtgtcccagtggcaattacaaacagtctgtagagcctgaatgaatgaattcttttaaagcccttgtttagataaattttcagcatttatcaaattacaatagaaatttgcaaaaaacacaactttgtaaaagtagttttaaaaagacttcaaagctattgtcaaaaagcaagacttttacaaatgcagttttaaaaggatatatccagtatttctcccaaggaaagaattgactttgttgagaaacataacttgaataaccattctgtacagagagttaggtcctagaggcagatcaatagaagtatacaacggaagatggggaagattcctccatataagaaaatattctagatctgtcaaatattca

SEQ ID NO: 36961 - DNA, 775 bp, Bovine  19866881288841
  misc_feature (1)..(1): n is a, c, g, or t
naatttttaaagttcccagaagattccagtgtgtgtgcaaggctgagaatctctgtttaaggaagtttagtccttgttttcaccttcaacctgttttatgggaagcacatgaggataagatttttgagaaaccaaggtaaagcactttataagaggaaaggttctaatcaatatttcagaatcagtgcttttaagaaaagcttatgtattgaatgactacaatattgtaaaggaattagcctccaattaaaataaatacatttatattttaaaaaaagaaaagcttatgtaaagttctaaagcattaatttttaaacaacaaatggttggtgggtagttaggtgatttcaacacaggtttcacgtgatgtcagcatcaccccatgtcactactttaaaagatgatggaatcatctgcttccattttcccactgataaaaacctcatgtcagaagtgaggcctgatgacttgagcctcatttagccataaacatgggaaatgacggacaattctgatggatgtttaggaaaagccaaaccactatgtgcagctttctttggcctcaatgcaaataaacaagaatttgtctgcgccccgttggtatctgatgggccactttggaacgctttcaaaaagtgtgcagcacagagtcctacagctgctgccggttagattggttggttggagcacagtactatgaggccaagattgtgggtttgggggtttaattcctctgttccaggccacagacttaccaccagccagtctcagccag

SEQ ID NO: 36962 - DNA, 1208 bp, Bovine  19866881481608
  misc_feature (1)..(1): n is a, c, g, or t
ntacgtaatagttatctctggggctactgaatttctaggagaaatgaatacaatgtgtaaaagaatggaacatatagagtttattctgtctgtttaaatagttctaaaattcggagattaagcctatctgagtataaaccatcttcaaataatcattaaaaaaaaaagcctgttttccttgtttagcatttaataatgaataagactgtcacaaacaacaaatttatttgtgataatgttgctgccaagaagatttttaatgactacagtgaaagtattttttgaaatcattttgtttttcaatgaaacacaaatgtggttttgtacaaattatcactgtctaataaaacaaaaaaactcaacttttaatttatgaagtggtaattaataaacttttactacctcagacgtacaaaaaaaatagaaaatcaaaggtttataagaccctgaaataaaaagaattttagatggttagtagtttgtgtgacatatgtctaaaattttaaaataaagacattaactatcaatgttttttactggtgacatttaatactgctgtataattttgtttgctgtcttcgatgccaatatgtttatgaaatttaatttgaaccataacatatacaaaactctttggatttatcttaacttctatgatttgaaatgttgtctcataaagcatactgcgttgtgatttataatttctatctcctaagtataaaattgatcgtttaactcaatttacatgaaatatgttggattcattcaaaaacattttctaatctatttttctgcttagtatgatctgtgtaaatacttatgagtttgccctttaaaacaaaacaaaaaagaaattttaaaattcaaagcaaaacacaacaaaagaaacaaattaggaaagtatttttttcttggcaagaaatctttttgtgaatatttggcctaggatactattgaaagttgcaacattttattcttctggggcaagagcttcccccttccttcttccaaagtaattctgggtgctggttctgatgtctgtttgtttttatgtaatgatgacagcacatctttatgttgatcgattattgactaaaatcatacttaggtaaacagtaacagttatgccagcaaatctgtttctcttctgtaagttaatttacaatggcagccttttctttgttactatcttccaaatgtcccatatg

SEQ ID NO: 36963 - DNA, 2379 bp, Bovine  19866880346490
  misc_feature (1)..(1): n is a, c, g, or t
ncatttaaaattttcctcctaggaattctcattatctcttcatgacatagtaaagttttaggtttctattgataactaatgcaaagagacacctttctgtataatttccagagacagaattttttaaaagttggcatcagatttggcaatactacagaaaaattaaaatatctaccatattatataactttacatttgtccaactctaatcaaagccaaagacatttttgcacaaagtcattgtactaataacatcaaaagttttgacttccataacagctattaattaagaaatatatattagagtaaggggctaagtttctttgatttaaaatcaggtttaactctttcttcaaattgatcttctaaattgttggttgaatattgataggcatttagacttttaaaaaaatattgatacatacatagctctttctatggtagtgcattgtctattttaaggtaatttatgcaaatgagactattttttcttgatatttattcattataaaaattagagttacagagaaattttggtcttgctagtaatgtcagttaagaaattatgaggattgttcacaggtaacattttttaaaaagggaaattatgagccagactctaggacatgacttacatccacatgcatccagagcttgtgtgtctcacaaatatctgcgatgtcatggagcgggtcgaaggccccgaacacggtgctgccagctgtggccacaacacagaaaggagtctggccctggggaggacaaaagctgcatcattcttacaatctcaggaagcccgttgttgtttagctgctaactcacattcgaatcttttgcaaccccacggactatagcccgccagattcctctttccatgggatttcccagacaagaacactggagtgggttgctgtttcctactccagccaatcttctcaactcaggggttgaacccatgtctcctgaactggcaggcggattctttactgctgagcgaccagggaagcccctgactaaggacattagataactaataacttcaaatatttagaggcacctacagtaatggaaaaagtagcttaaccataagatgaacaaataccattgcctctgagtcccatttattgttatttctctctgaatttattttcagaagatcataccacaacaataaagacgactaaactcctttagtagtaaataaaccactttatttacttttggtgataacttgtcttttgatatttaacaggaacaaaatggtcagggaaatattgcaatgtcatttaattatttcacttcagctttagaagaaatttcctacatttagagattactttatttcctgtagcagttcttatcagttgcttgccactaatgaaagtcagtaaagaaaataaagatgcatttgcaagttaaatatggaacttcagaacttacctttcttttagcttgtaatatatttttctctaactcagctggaatcatctttccccttaaaaagtcaaatacacattgttttcttatgagtgaataaacatatcgattctaccagttagaagaattaataatattcaagattaaaaaattagtttttagtgactcccaaaggtatttataggtgtggaaaacaagcaataagcagttccctaaaaccaagataaaatatcatgttatttgaattaaaggaagctgagtttactattcaatcatcttaaaatctgcattatttacatatcagaagattctgatttttctaagatacataatggttttcttccttccttttctttcttcctttttttctctaatgattaacctttaattataaagacttcttagggcttccctgatagctcagttggtaaagaacccacctgcaatgcaggagacccccagttgtttgattcctgggctgggaagatcccctcgagaagggataagctacccactccaatgttcttggatttcccttgtggctcagctggtaaagaatccgcctgcaatgtgggagacctgggttcaatccctgggttgggaagattcccaggagaagggaacaggtacccactcccaggattctggcctgtatagtccatggggtcacaaagagtcggacatgactgagtgactttcactttcataaagacttcttggcattaagacataaaaatcaaagatacaaattgttggggggaatgtggcaaaaattcaggtggtctcacatttttcttcacagcaaatttctgggacaaaaaaacaaaagccagtatcttcctgctccaccctgttatcagactgaaacaccgtcttcttgtaagcattcctcttaaagtccggaatcaagtaagaatgcctaccaccatcaatattacagca

SEQ ID NO: 36964 - DNA, 1571 bp, Bovine  19866880452684
  misc_feature (1)..(1): n is a, c, g, or t
nccacccaaggacgttgtccctgcctcagctcctgggcgcagccagctctgtctgatccagctttgcctcgcctggaggaggtgatcggtaacctttgtgggatgcccttaccgctgcccttaccgtgactgctccggcgccttcacagaggttctctcggtgaggagtcagacgtcattatgaacacccattgttgaagtggactacacggcagagattcccccggcttctactcagggttgcaggactttggcccctattagatggtcccagatgctgtgggtttttagattcctatatcaagtattggagtttttgttgtttttatctgcagataaaggagaccactgcactcttttcagatgctctggcacactggtagatttctagtgataagtcctgtgagtaaaaagggcccggtgagtgaaaacgtgaaccttaatgaaagaattttgtaaactctcctgctggctcagaagcacacacctccacctcttttttaagttttttttttttgattctcaaatatgcataagagaaaggaggctgttgattacgtagttgggaggtcacattttccaaacctaaatgctcttgtagttagagtctagtttacagattcctagggatcgagtctcttagtgtcagtgttctcttggaactcatgcattctataaacctgtaagctacgaacgtagtaaaagtcgtacttcaacctttaatatcacgaatctttttaaaattaattattttaattggaggaaaattacaatatcttggtggtttctgctgtacatcaacatgaatcgaccacaggtatacctgtgtccctgccattctgaacccctctccaacctccctccccaccaacaaattttcaactccttacaaaatggaactgaccttggaggatttatgtgtttaatatttataaagtattttaaactccttaggtaaaaactttctggtagagatattggagtttcactttcacatttatagcttttaggaagacagcactgctcagaacactgcacattttgaacctcttacagctctcatgcccatggtctaatttgatcaccatgatggtcattcataaatacaaatgattgtgagatctgtatccgtgaatctgtaatactaaattctcaaacctcacttggttctaaaaaactggcctcctgaattttcctgtccgagatattattcatttcttgtgtaaatgtcagacgccagagaaaactaactcccatcctgccgcttggtgtgaagcaaggaatctaaaccagcatcattagtgagctcggtcttggtggtaagcacttcaaatactgagcatgtttttccaagctagaaggaaagggcttctgctgcctttacagccttcttttgaccattttaagtttccttggactttataatagtacatcagctatgtcattaagaacgtttaatgttttacatatgaatgtggcatgcattatttctctaagatatatgtgaaagaactggacatgcctataaattcttgtgctttttaataacaaatattttatatttttaaaga

SEQ ID NO: 36965 - DNA, 1732 bp, Bovine  19866880617548
  misc_feature (1)..(1): n is a, c, g, or t
ntaaagaacctgtctgccgtgcaggagtatataagagtacatgggtttgatccttgagtcgggaagatcccctggaggagagcatggccgcccactctgatgtttttgcctggagaatcccatgatcagaggagtccatagggtccatagggtcacagtccataggctacagtccatagggatgcaacgtgacgcatgcgtgcacataaatatttgttagtaaattatacaatatttattccacactagggcttcagtcactctcaactaacctaaagtttctgtgtaagtagctcagtgatgtccaactctttgtgaccccatggactgtagcctgccaggctcctctgtccatgggattctcaggcaagaatattggagtgggttgccatttcctacaccagcagagtgtagctgtgttgcaataaaactttatggacactgacatttgggtttcatacaatttttaaagtcagagaacataactgaattttttctaccccaaccactaccccagtgcaaaaatcaattttatgcatatgacaataagcagcggcctcagatctaaatcaggggacctgttgggggcacccattccattggggaaattttaggagacatttttggtcttctagtgaagtcttccccgaacatttacacattgaaatacattctattataaaatattttcctttttactaataagggattatcaaattagaaatgagttgaacactttaatggatcagaggacacaatgttttagcatggatattgtgtatagctaagtaaaacaaaatctaggactttgaaattatggggaaaagagaagtaggaaggacaagtgaaaattaatagtataaagctcattgtttcaaattttaaaacaaatgaaacttctttgttaactatatctagcgtgcactatttacacacacacacacatttacacacgcacaaatacccagtgagtgaaaacacaaggactcttacaggtttgttcctgactctgacctccaactcctgttttctacagagatagtttctcaacttgcaattttatttccacagggatttttaaatacatgaccttcaagcatcaggagggaatgactgcaactgaaatattgttcttgaagtcagtgcatttctgaataactcatctgtttacaggtggcctttctctgctggaatcctctattagacatgctgacttgtagcagtgtgtattcctatcccgtaatgaaagaagggaggccgtttggaaaacgtaaggccaatagtcttatttgtcgcaaggttagctgtaggttacataaagtcattgcttctagctcctaatgagctctttgcatttgccgtttattagtctttcctgaaactgagccctccgggcagctgtcagtcagttttgtgtaatgacacacagggcgtgggtatctggggtagaaaatacctcatttttctttttagttctattaaaaagatttttttcctcctcgtatgcaaggaaatgtatattttatatccatgcatacaaatggattgcaaactctgcgtgccctcatttccttgagtctaggctcctcggttcagtaaatgccatgccccgataatatggatggcaatcccgaagaaggctgtagtgagtcactgtacaacacctataacaagacagaaaccatttcattatcagcagttaatttttttccagtaggaaacaaaaacccga

SEQ ID NO: 36966 - DNA, 2150 bp, Bovine  19866880622781
  misc_feature (1)..(1): n is a, c, g, or t
naacgacaaataaagagttaagaattatctggctcaacatgtccttagtaccaaggataagaaaccctgctgtagggaagacagtgtaactgcatgattagaaccccaaacttgggagccggagacacctgggtttgaaatctgcctaggagaccacataatcctgagcctcagattctgcatctgtaaaaggaagatgggagctatagtggcttcacaaagggatgaatggggtcatgcatctgaagccctcagcacagtgtctggcacaggggcgaggactgactcacggtggctgtttccatggcccttcctgcgtcctctctcagtgctgtgcgttgtaattggccacgcgcaccatgcgaaggggaagtcgcccagtcgtgtccaagtctctgcggccccgtgggctgtagcccgccaggctcctctgtccatgggattttccgggcaagaagactggagtgggctgccattcccttctccagaggatcttccggacccagtggttgaaccccaggtctcctgcactgcaggcagattctttaccgtctgagctacaaactcagcacagtgtctggcacagggtcaaggactaaatcatggtggctgtcgtcacggccctgtctacgttgtctccgagtgcattttaattgacacaggtgcactgcacagatgtatctaaagaaatggacagcacttctatatcatgaagaaatctgttgtttttctgtatttaaagaaagaagcctcagcaatttgacctcaagtactcaccagccccatgaatcagatgatcacctctgtgcttagctgcctgaagtattccactgaggtgctgaactgccaaatggattaattttttaatgactactcaaggattttatttccaaatacgagtatgccttatatttttggactgaataaatgttcccaatattattgagaggagaacacaggctatggataaaggtagatgccattataatacttcaaaaccataagattaatggaagaagtactttgactgctagataccatttgcttaaaatacaatttgtagtgagattgtgctcagtctctcagtcgtgtctgactgttttcaaccccatggactgtagcccaccaggctcctctctccatggggattctccaggcaagaatactggagtgggttgccattccctcctccaggggatgttcccattccaggaatggaacctgcatcttttatatctcctggcaggagggttctataccactagcactgcctgggaagcacaacacatagttattctctgtcagctacttgcataacgatttttttctagaatgtatcagattatattacaacactcttggacatgcctttctgaataaattgagattatccccaaagcaaagcccgggcttagttttccttggtttagaagtacttaccacaatgcttggtaaagagtagacagtgagatgcacagtgtttgagtaaatgaaaaacaggcagatagataattggctgcatgaacagttagacacatatatttgatattataaccttgtctgtaaaacaaatgtaggcagctttactagatttttcctagagagctctttaggcttagacatgatataaatagatataaatagaataatgatgtaatactgtgcaacaggattccacaacagctgtgatgcagacagttaggcaaggtaatgttttgttgtaggtgctgtcctgtgaattgtaacatttttaacatccctggcctctccccagtagaggccaatagtaccaccagactccccagctctgaaaaccgaaaatgcctccagatagtgccagctgtccctgggagggggagggtcaaaatcaccctcagtgcagaagccttgatatatagtgtctgatttcagggtggtatgacacatttgtctaccttttgtttttcctagaaagtgagtacataactgagttcggaaataaagagcagtgccattttcctaactaacttgggaaagataagaagaaatctttgtgttccagaaaaaaaatttttttcaagtgatttatcccactacattgcatatatccaagctataaagcgaaaagaatcttctgatggccaaaatctgagtgactactgaagcactgg

SEQ ID NO: 36967 - DNA, 551 bp, Bovine  19866880635561
  misc_feature (1)..(1): n is a, c, g, or t
naaataaaataaagtaagatagttaaaaataaaatataaaaggtcagaaaacatcttaaatatctctgtttgttcatatttgcatttttttgtattttagataaattaatatttttacaagaaagaatatcacccaattctagcaaattggaagtgtttagaaaataaaaagtttgaatagaggactttgggttgagaaatatgcagtttttatttgaaaatgctcagtaatgtcttggttgattgaaattgctaatcaaggtaaaagatgtacgattcaagcaattacagagcaaatgtagcttcttattttcaagacacacagtggctgcctaaacagcattttaataaatgttttaaatactttgcaccttagatattttcatttgctcgctattgcttcttttttccttttttccctctatctctattacacgactggctggctatctaacaggtcccaggttttctattactttctggcacatattaggtaaccaagaagtctttggtgtgtgaataaatggatgatggatgaagagatagtggat

SEQ ID NO: 36968 - DNA, 2656 bp, Bovine  19866880657000
  misc_feature (1)..(1): n is a, c, g, or t
ncctgggaagtcttttatttatattcatgtttaaacagatatgtttgtactgtgtgtgtgtgtgtgtatgtgtgtgtgtgtgtgtatgtgtgtgtgtgtgcgtatgcagattggagggaattgtttccctttggggttgggagtgtgtgttgaccttgtggcatcttggcggtgagttgtaaatgatgaatgaacagaacaggtcccctgctggaggaaagagagctgcagaggagcaggaagaatgaagacgcacttagctcctttttgattttacattcacagcgttaacatgatcatcgaccatggctgagctcctcagggatgcagtgtgtagcctgagtgttgaatggaatggagtcagtttggggactctcatgcaattgaaaagagcatcattcccaataagtatgttctgtacagatacaactcgggatcaaacgccttctaaacttataaatttcagaaactgtgaaggagatattaaaggagaatttgatttgtacaggggcttccccaggtggctcagtggtaaagaatctgcctgccaatacaggagactcaggaaatgagggctcgatccctgggttgggaagattccctggaggaggaaatggcaacctgctcctgtactcttgcctggaaaatcccatggacagaggagcctggcgggctacagtcccatgaggtcacagagagtcagacacgacttagcaactgagcacagaggcatgacttgtacagaaattatctgatctagattttcaatagtttttttttttttttttggagacagattgctgttttctgttgttgctttttgcttgcttaatttcaagttcatgtgtatctcatgcaaaaaaccctggataaatgtagggcaaagaagctacttctcactcattccttagagtcaaaaattattaaaaatagaaaaaaaaattgttgagacagattatccatgtgattgaaggcatttaaaatgaaagcttagcacaatcttactaatgattttggaatattaaaattagagtctgtcaggtgccaggtgtgtgaacagagcagatcacacaattaggcaaaatctcaggtaaaattaactccatttcaactaattcatacatgaatttaatgtatctatctgctgggcttagagatggattgcagttgggagcgacagcttcagaagaacccaagacatcctgctttgcttgaagattcaagacaagccctcggctgactgttgttcctttcacaaagactatgtgccaacattatcattcttgctggagtaaacacaaaatgtgagagtctctattacagcgcattttcaccatgatattttaaaaccactcctgtgtttttacttagcattcatataatgctttccgctgggagaacactttgaaatgtcccttgtcaataatctctcaagccactcaatgagataggttggtattcctggcgccatctcacacctggggaaacaaaagcagaaggaggttgttggacctgaaccagatcataatgtttgaatacgagaatgagaactaatagccctggagtttccagtctgttgttcagccagctggcttatgttcctccaagtcttgttacttgtgtaaactcgaaagaactgttaggtccttgaaaggtacattttcaatagaaagcaaagcagaatcagcgctctctcaagagaagtactcttctattgattacctaccatagagtcacttccccccttcactccttgtttatactttcccatatataatacagaagaaaaacaactatgggaaatgagccagatgtttcagctaaaaaaaaaaaaacttctgaatatctctggaaggtcttcattctgacagctcaaagtattagatttgggaggaagagagccaagaaagaatttcttcaaacttggaggcatgcagagaaaagactaatagcagaggtgatgagaaatactcaagggaagaatgttcttgtggtgccagaagttggtatggttagagcatcaggaaaatttggatcagataatgcaaataatatacacaactttttcacagatacaaattagaatttttacttaggaaatcaaatgtccactaatagagcatttttagctgcttggcaaaaagccttggctgaacaaaaggaattcaaatgcatttggtgacagctgatgtggaaaaactttttatagtacatgctctatcgtgtgatgcagtttgtgaattttctcaaaaaaaagtgacagtcaacagaggcctgtgtttgtgggcttaatctgtaaaaataaaagaataagattccatgaaagatgaaattgacaacttatcaacattcaaaatagaaacagttttcagtgctgttttaaggaggatgaatgaactggagaattgttcaccataaatttccaaacttatggtacagaatttagaaaattaaaaatgtagttttgtattatttgctgccagggttagaaagtagttctaaagagatccccaggaagctataaggcagtctaaagacttctagataaaattaaagtctttcttcattttctttcaagattcttaattgcagtagaagacattctacatgttcaacttccttttgtcttgaattatctattattctttaggatgtg

SEQ ID NO: 36969 - DNA, 2187 bp, Bovine  19866880700909
  misc_feature (1)..(1): n is a, c, g, or t
naaaactcagtaatttaattaacaaaaactttccaataaatttttaaagaaagacctctaaaggatacattcacctactcattctttctcctaaaaaccatgttttattccttccctgaaagtttaaaaaatcacttttatattttttcgaactcagccccatcacagtccactgacatttccaaaatcaacagtgacttgtgagagtcaacctcatttctggttgtcagttctcccacagtttacacaaattacctccaaatgacctggctttaattctaggatttgtgcaaactctgagagtgaaagtgttagtcgctaagtcatcttcaactctttgtgaccccatggactgtagcccaccgggctcctctgtccatgggatttcccaggcaagaatactggagtgggtagccattcccttctccagaggatcttcccaacccagtgatcaaaccccagtctcctgcattgcacaatgattctttaccgcctgagccaccagggaagcccttatacaaactagagtttgtaataaaatccatgctgtgaatatttgccaaacccagaaggtgcctccccatgaagcaagaaggagcctcactgcacaaattcagatatgcagctttagtgttcctttatcccacttcctttctgagtctccattctgtggaggtggtgggcagttaattcccggcagtcagcaattccactgttcccggggctggcctagctttctgaggacagggagagctttcatagtagaaagacactgctaagggcatttgccattcatctacatgaagtcgccccaagacattcctttatggctctgcacaatcccttcaaaactggccgttctctccgcagtttacattcctgggatccggaacgcgctcaggccttggtgccaggcgggggcaccagaatctctgtgaagcgatccgtgagcccatttgcctcatatgctgctggctgttactgcttccatgggcatctacccacgatgcagggaccagatcgcccctgatctcagcgtcttcgagtttctgggtggttggctctgcccctaagacctttcttgggacccgcctacactctgccctcccccatacactttccctccccctgcaaactcctcatattccaggaaatccttctctccccgctgtccacagaattcttcaggcaggagaattcctaggtgaaaatctggtccacataagcatgtccaagtacttgtccttcaaggagggcaggatgtcccctatgactctctaacaagaagaaatattactcttttcccagattaaagctattatcagctcttgaggagaacagagcagtcaaaagtgctttaatctgttggtttacatagcaggactgaaatttagtcaagcatgaggaatataaaacttttatcgcaactggctgacatcagatggaggtattctgcagcgaccaccctgtcagctccagaccccgtcctgattcagtgttcactgctaattcacgtcaaggcctcagccgcattcagagggctctggcgctgaatccaccctaccgagtagagcatctgagaagttttctctgattaaagtgcctaacagcaacatgttctatattccaccactaacacacaatgtactcaatagtctaacacttcacctctcttctgctttctttgggtcccatgtcccagtttttaaatctctatggctttatggccatatatagcaatgctatctctctgttacactcgattttgtgccaataccatgattcatttcatataggcagttcaatctaccatttcctctcccgtctaaaatctcatcgtgttttgttcagctcactggatcaaatatatactgcctatcattttctccaccggaaaacatacttactatcattgtatttttttctttgaaatcaggctttgtcctttgcacattgctcctcatctcccccaccaatgcctctctccagcctccccctgcctaaaatttttcatcattccaataaatgtatatattggaatgggaaaaatttagtttccgcctcagggatcaatttacaatgatcttaaataagcctctttttaattgatgagcctgctgcaaattgcatacttcagtttactctgtaaggaatacaataaaccaaggcaaagctgcttatgactca

SEQ ID NO: 36970 - DNA, 2174 bp, Bovine  19866880744146
  misc_feature (1)..(1): n is a, c, g, or t
ngcatatggagtggtctagatgcacaagtttctagattttgagcaggctggttagcatacttaaagctgatgatgttaactttgtacaaaccctgaaagctgaaccacctgatctgggtagaaatgacttccaggtgaaatttcagtttggttcacatcagcatcttcagtgtctataaaaattggttttgggacttccatggtgggtcagtggttaaggctgcacactttcaaagcagggggcacaggtttgatcccctggtcgggaactaagatcccatgtaccacagtgtgaccaaaaaataaaagaataaataataatttacaaaaagaatttaaaaatttgcttgttactttataattttatgggctgtatatgttactatgttactatatacagcctataaaatttgaaaagctaaactggatttggctttacttgaaaatctctggcttagtctttgcccacaatgtcaagttggaacccacaggtgctaactctgaattttgttgctccataaagttgtttttctttttcctttttgtatttgctcttttccgatcaaatgctatgaaataaaaacaaaacaacaaataaacaaataaactgaacagcaagagagtcaagactgtgccagtggtacggtacttttcatctggtaataagaatattatgtatcatatgacacacatatcaaatagcattaatattgtttaattagaatattatgcagaatttcaagatctttactgactgtattcatttttcttattaattcactttaaaaatagacttaataatcagaacacaaataaattgatatcattcatgcctgctttttcttatgtcttatagtagcatgcttctgctgcaatcaaaaactgtaattgctggtagcatcagtgtcagattaaaataactcagtgccatattcttatttatgaatcacaagaataatataatttaaaatatttcttttcctctgggggaaaaataatgtactgtagcattaagcctaaaagccctgctcaaaatctaagagaactgattcattgctttctttttaaaattttctcaagcctgaactacaataattctcctttaactggtcttcccactgggcaaatataacctccaaatggtataagactctgcagctcatccttccagttggagactaactaaatttgcatatattctcttcaagggagaatttaccttgccttccaggaaagccgcatggtgatttgaaaatgttatcgttcagtctttagaactctgaagtctggcttctaactccaggacctacagatagtacatgccctccagctactataccaagagcctcttaaggactcttggcattaatcatatagattttagtattaaaggttttgcatttgttgtcctgtcacttagaatatttatcttctagccaggaaatatttgccagtctgtttctaagtttcaaaggaagatgaaagacatttttcatctgagtttggctacatgcaagtgtcctaagtagctttgtttttggttttgtttttaaaagttgaaaactatgggaataaatatgctctagagtataaagaagtcgtgtgccaagaaggagcctagattaaatttgtgtgggttgttgaggctgacgttccaaaggctaccttagctgttgagtttggttagtacattgcagagtctgggataaaaatggattgaacgctcatgaaaaatgccagaaggaaaacactagtgacttcattcggttcaagataagaagtctattataaacattcataaagaagactttgccactttgttagggattttccctgatcgccaggattgtaaccgtcatcaaaagacctaaatgaatgatccacatcactcatcctccacgttgggctcggatgtttccttctcagtgaaacctccctcagaactcgcccctcatcctcctcctttaacctcacctaaaccctcagctcacacctttcagctgatgctgaacttagctgctgagctgtttgcatcactggaacatcaacatttggtcaataggaacctgtgtgtgtctgcttagtcattcagttgtgtccaactctctgcgaccccgtggactgtagcccaccaggctcctctgtccgtgggattccccaggcaagaatactgg

SEQ ID NO: 36971 - DNA, 1345 bp, Bovine  19866880790026
  misc_feature (1)..(1): n is a, c, g, or t
ntaattgcaccaggtgagataacagttggaatgcgatttcacccagcacaatgccgcatatcaaaggctttcaccttcggaggacatgaggatgaattgactaagagtcattatgtttccaagatatacacaacactgctgaagagtttatatgatgcataaaaccattaagacgaaggtttatgttaatcatagtgggagacatttctaggtcaggcccacatttccattgtcgtcttaccatgttctagatgaagctgtaagaaataatatacacattgagagaaaagggagatgcacagtttttagtcaatttctttttttttttcctccctccaagtttagttccttatcagcttgcgaaaagctgctggaaagaagcagggattttgctgccaggtccgaactgcaggggtgggactggcagtaggaaaaccaaaaagatcgagcaaataagagatagtatagatcgtctcctgttgtgtctgttttcaaattgctgtgtttaaatgaacttcttttttagcaaactgtctttagtctctttcttcctggcctccagtgacctttaactgattttttatctcctttgtgcctcaaagcatctgaaactttgatctttctcttcatgtgaataaatatgacatagactattgggataagcagtttgatcaggatttagggactattggggaaataaaatgcaatttgacattatgccattatttgattcatttattaaaataaaaatacttttaatagagtatgaaaaggcaaacagtaaatatagtgcagttcatctccagaagaggggtgatgatgctggaataagaccagcgtttcatgtggtctgtaatgccaatttcagcttgttagactcacttttgagagagtaataggattcctcctcatatctgtttgataaaaaacaatgtgccttcaaagagaaaatcaacacttagggaagaggaaatgctcaacaacagtaatagttcttctaagtcagccagcttggaaatgcaaatattgaaccatttctgagcaatgaaaaatggtaatagtaagccctcttatttggagccgcaagtgccccctgcttgctgctgctgctgctaagtcgcttcagtcgtgtctctgtgcgaccccatagacggcaacccaccaggctcccccatccctggggttctccaggcaagaacactggagtgggtttgccattgcctcttccaatgcataaaagtgaaaagtgaaagtgaagttgctcagtcgtgtctgactcttagcgatcccatggattgcagcctaccaggctcctccattccatggggtttgccaggcaagagtg

SEQ ID NO: 36972 - DNA, 978 bp, Bovine  19866880807984
  misc_feature (1)..(1): n is a, c, g, or t
nactgaaaaaattggtcttcatgctgagaccaggtttcatcatcacaaactaaatttaagacagttttaacaaaggcttgctttgctaacaaatccttaccaagaagcatgtcatctaggaatgacagcatcaatttcatagaaaattcatgacgtattaaatagtgaaagataattttctttctagcctctattattatcacaaagaagcacaaaaccatgaaagaggatgagaaggtaaaagctatgcattgacatgtagctttttctaccggttgaattattccagctgataacataaatgtatttgcacagttacatattattattgctttgtaatctacaaaaggatattactgtgcaatgtaaactggtattaaactactcactatatcaaggaaggcatttatatactatactatgaaatgatagatacagctagttacaatggtgttaataagcatattattatgtaagtatagctttttgttcaaagaaaaaaaaaggaaaaagaaggaatcatcacacaaagcactcaaaaattgtttatctctttttaatgttatgggttatgaaacaatatggtctttcttaggcttagaattattttacctgttagaagaacatggcagtagagactagcagtatttagccctgtgtatccagagtccagtgctccatgctactatcattcaaagcaagaagcttcttggccaagtggccaagggaataacttcctttgagagtaggaaggagggtcacctgctaattgacagagtccccctgggtgtaaaaggggaaattataatatgatcttttgttgcttttcaaagatatagcacaaaaaaaatgactgtcatatttgtttcacagatctcaagataagaacaatgtaagttgaaggaatttctaaatatttatactaaataccttaaaataaaaaatggaaataggattaagtatgttcaaaacaggcag

SEQ ID NO: 36973 - DNA, 948 bp, Bovine  19866880969886
  misc_feature (1)..(1): n is a, c, g, or t
ntcaaaagcacaatgcatatttttaagatattatattcaaaaagagaaaagggtcgtagaaatcatagctttcttatcttttattcctttctaactttcatgttaggatttgagagtgtctgtttcctactcaggctcagactttcctgctgttttcccaacttaactttgaatcgaggcaaaacctcaaagttccagggataactttggagacgggaggggatgagagccgggtggacgaggcccaggacccttcatcgaagcttcaccagaatagctcccttttcatctgttctctaggttgagcttctttgtaagaataagtttgcaagtttcacaaaagaattctactgtttaaacgtgtgagagtcagtgggttaagggatggaatgttccctctgaagtgtaaatcactgatcagaaagggctgacaccttattgaccattaccaattaaggagtcagaatcactccccagtacggcttcgggctgtgtagatttgggttgaattcgttggtcctcatgatttcagagactcaaggaatgtgacgtggtcacactcaggagaaaagctgaaaggacaggggtgagatccccatgtgaggacaaaaatgtcctatacctgttttgcattgattcttagaacagtcagcctgttgcagacaaggggctgcgtcaagggcagcaacggtctcaagcagaagcagagcctggtgactggcacttgaggagtttgttaggaggaaagaggttggttggagctaattgttatctactcaaaccagtcaatcctaaagcaaatcacccctgaatatttgctggaaggcctgatgccaaaactgatgctccaatactttgcgtacctgatgggaagagccgactcattggaaaagaccctgatgctgggaaagactgtaggaggcaggaggagaaggggacgagatggtt

SEQ ID NO: 36974 - DNA, 1294 bp, Bovine  19866881007279
  misc_feature (1)..(1): n is a, c, g, or t
ncagcagcagcagcatacccagaattaactggacccagggcaaaggcatagggcaactaaactcacaaaagatttgcatggaaatagtgtcaacttattgatttgtaatgattaatttaagtgcaaagagtataagaaattgtgccaattgatcaattcagttttacctctgtaggaaagtctatatggaagccgaaatataacaaatcacttagaactaattcagtcagagaaaaggaaagtaatcagctagtttcaaatgctttgatgtctgatgcatgcatttcttctataggagctctctgatgactaagaactcgggtccggagaggctctgtctcttcagcttgactgtggatacctacgctcttcttttttaaaaaatgcatttgtttttaactgaaggatagttgctctacagtattgtgttggtttctgccatacatcaacgtgaatcagccataggcttacatatgtcccctccctctttcctgaggatactctagttattatctcaagatgtgcgcgatcctgcttaaccactcttcctttacatatacaggaattagtcactatgacttagagcagggatttcaaccctctttagcctctagccagagatatacggtgcaagactgtgtaagacaagtattcctgctcctcttcctttgcactgtcaaacccagtgcaagcctgaactggctctcacctgttgcctttctgcagcctaaaatttcattcaatttgaaggattcctctggctttattcttttcacttctttctactgtctttaatgctcatctctgtcttttctcttgtaaaattgtgttaacaagtcagcaggggtaagcttgctttagggaacttaaaaaggctctcccttctgccctccgctacattgcccccgtccatcactttgcattccgggcgcggcctcctccacagcctgagctcttcgtgtcgggcggcagagcttgcattggtctcccgagttcttggttccctcccaccaccaggctcttgccaaccatccaccgtatacaatatcgcagctccaagctgttcacagaaaatacactcaaaatagctgaggagcagctgcttctgtgatattttcaaaaggaagaaatttgtattttttcctgtaggctaagggtctgttggttttgcattgaaagaggcaaatgaagtccttcacacccgctgaaatcctctgcccctctctttaactccaaggtttttgtatggatagtgggcagggaaaggaagagattcggaaaaagcagcatcatt

SEQ ID NO: 36975 - DNA, 1501 bp, Bovine  19866881009105
  misc_feature (1)..(1): n is a, c, g, or t
nctccccacctctccttctctctctctgtccttccatacatgcacaaagagaattccaaggaggcaagccctcgttagactccaactctgctgagctgggacttccattttgccacgcagcctgtgctatttgatatggcagcccgagctctctcatacatgatcttggccttattctctaggaatccgtttaaataatcagctccagtttgtttgtgaagatataaaccaaagtacagcgtcacaagctacaacgtgagagtgatgaaaacatccaattttgatattttcttttatcacacacatatggctattttggagtttagcactttggtcttatttgggatgtggctgcatttggtttttagtcttggtttggagagtgatggcttgaatgaacagattctaattcttgatacagaacctgtaggtactgaatctgtagataaccatgtaaaactaattgtcactgtactgtataggagtgagtctctaaaagcgcatgctaacaaccatgaaaagggcatacttctttacatggcaaaaatagaatggagttattatagaatctgtaggaaacgctcattaagaactcaaatttcttctaaattagcctgtttcctggatgtctcagattcaagcatctcatcctgggaagacatattcagagaatgactgtgctttatgtttaacttgtaaacgagtatttcaaactgctaatggttaataaatttctccagctttcctctgaaagtgcctatctccaggacttaaatccacctgcttattttggattcgggttgggtttgctaggaggaggcagatggtggaagtcaaacagaagattttttagctggtagggcacagagaacagatttgccaaaatgccctctggtgcctggaatttaggaatggagaccacgggctagctgttgggtaattccgacgcttctcacagccactcctaaagagcacacgtttcagcctctgcagtcttcagccttcaaggcacagcccccatgcagtttaaagagaaaattcacttgcaccagcacatcataaagctatacctagattccaaggtgtaaacataaatgtaattattcatatgcattttttaaaggctgggaaatttcctttctccatgcaattccgctttacagctcctttccatgcctttcgtgagttcccttcctctagtgctgattgttctcttgtgcctctcaccatcgacctttgcagctcctcgtttcctgggacggcaatgaccatctggggttcccatctttctgtgcccgtgccagccaatgagctgaggggcgtgtggacttagaacattcacagcatcgagctggcacaacagagtgtttcaaggtaggaaagaaccaaaaaaaaacgctttagggctatcataaagcagccagcattggtactgatgagccatcaccatttggagcagggaaccctgtgctgcagcaaaggaaaacacaccgtttctgtc

SEQ ID NO: 36976 - DNA, 1167 bp, Bovine  19866881273416
  misc_feature (1)..(1): n is a, c, g, or t
nagacagggaatattcaagttgaactttgtaattgtatctcttcttgcaggagatcatgggcttatctccttatgtagcattacatgtactattggcagagataaaacaccccaaacttataagcaaaaaataatttcatacaaccccataattttttgctttttatgctaaacgtacatcatcgttactgatagttatccctacttaaaacaagtcttattttggccttactctctgaggtaacaaattggtcagcaggccaaatctgactccagagagaccttacctttgttcatggtgtgtttagaagggaggtcacgagtgaccacattttctatcacctattctgtttctcaccactgtctattgtcttatccctgatctcatccacacattaacttactacctggggccctacaccacggggttttgtgacactttagttacccactgccagtgttagctgctcagtcactctgcctctttgcgactccatggactctgcccatgggattctccaggaaagagtactggagtgggttgccatttccttctccaggggatcttcctgacccagggatcgaacccgggtctcccacattgcaggcagattctttaccatttgagccactagggaagccccatggttgctaattaaggggcagctttcctctacaggccaaagggtcctgcactacatgaattcaatgaggccataatgattttggttttgaacatgcacaatgaacctagtcatgaccaaggtctccatcacatcactactcgaaaacagagatcatttactttttcccgggtcaggacagcagagcactgaaggggcacacccatgagtttgtgggggttccaggtcacggagtcggccctaggcaataaaacaagtcctgttagtgctcacgggctaaggagacaaacagaagcccgaagaggcccttccacttgcatgagcagtggcccagttctcacctttcaatgccactgagtttacaggaatgctttctggacaacagcaatccacctccccaagctgcctacagtcgacacaaaggatttgtgtgtttacattaacgatttctttttacatagcactgactgctctttcctatgttacatttatttcaaaagttgatgaggatttaattgctata

SEQ ID NO: 36977 - DNA, 683 bp, Bovine  19866881376470
  misc_feature (1)..(1): n is a, c, g, or t
ncctgcatctgatggcaccagccccgaagttctgatatttgaaactgaacgatgactggcagatactttcatctccatcttatagagaggggaaaatcacctaagtggaactaggatttaatccaagtttgtttccttctaccatctctcaactatctattaaggttgaccgatcacagatatcaaacatttctatagggtttactaagtgccagatactttttcaagcattttaaatttgttgactgagtaattctcacaacaatccttataaaccagatattttaaaaaatattatctttattacacaagtaagggactaagaaacagaaaggctgacgaactttcccaaggccacatagatctgctccacagtttgagttcttagtggcttggctgcctccatctcaaaaacaaggtttccctttatcttacattttgaggtttcgttttgtaagttacttttgcaatttagtcttaaccctgtgtacagatgttggatataagctttattttttatagattcatcaatttggtcctattcaacttcttcttcctagaatgttctgaatatctgcttaatatgttgccagtgtaatggaaatggtactgtcatagaactatggaatatcaggattggaggaaggcctattaattatctagttcaaggacttgaattctct

SEQ ID NO: 36978 - DNA, 1479 bp, Bovine  19866880495002
  misc_feature (1)..(1): n is a, c, g, or t
nactttattttcttaaaatcagtgacattttctcattcacactgaggtttattctggaagataataaaacataagatcatatcaaatcaacaaacagcttgatacaaaggtgtgcctttaacactgatttaccatatgtttatatttcacataggaaataggataagaggcccttatattttaatttttaattcttcactgagaaacacagtagacagtttatattatattgagaaataagtaaagattttaaaagtcagacattttatgttaccaccaaataggagttcacttacactcatatatttaaggacttataattttctttttaactttgcatgagacatttcaaattactttttactaatgtcttaatattcctgtatattggaacagtttattttttttcaattcccatttacaaattgcataatagcagagttggaattacatttgttcccaagaactatgtttatctattaaatttttatggttgtactacttactaggcaattatgagtttcttttgaattgtaataggaatattggggacaagtggaaatcgacacagttcttactcttaagttcatcctgtatctgcattttgtttttaatcttaatagtattatagtgctagaaaatggatataaataatgctcattaatctctctaatagtttctcatatgaagaagcttagcttttattcaacttttccttttattcaagtacctcaacaggaattctctttgactaacattatggtaatttggtaattgagaacatgaattttcaactctactaaaatgcctcccaacactctaataaatgctgtatcattcctgtctctagtctgaagcttcttaagcatgggggattttctcaatcattattccattagtcacaatgattagaaccatacacaaataattttcttattcaactggccaagttctttacaactcattgaaatttgtttaaaatatgagaaaatatgatttatatctaatcattaattggtcagtctttcaaagatgtttagaatttagaaagagcttaaaattggtgtttttttcctactttctttattaggaaagatactatataatttcagatatttgattttatagtttatgtgttcttaaatatatgaaaccagctttgaagtatggatacgaattttaaaatccaaagaaatatatttttaaaaatctaaatttttctctaattatgaaaataagatacgcttattgttaaaattctgaactgtacagaaaatattaaagaagccagaaataaagatcactcagaatgacaataccttgaggtaatgactgtgaacattttgacagtttcattccaaagataaattcttataatgtagaatacaacgctgtttaattgttgagagagtacttccaaacatgtatgtagaatcgctttaaaacaaaatcatagtttttgttagagaaaaagaccac

SEQ ID NO: 36979 - DNA, 1531 bp, Bovine  19866880550518
  misc_feature (1)..(1): n is a, c, g, or t
ncatcatggtttgatttcatttcttgttaatccttgagctaactactgggtaacaatagactttagggggaggaggagggtacacaaggaggttaagagcaatagtaaggagctctcttaggaagttctgttgaggaaatcatccactacagtggccaggctatcgtgcccatcagtattctatagatcaggcccttcaaggtcagcaggaagcctgttctgctggagctagggagtggtgaccggcaggaagcctggcagtcgtcctatttggaggtctggtgggccaccctgaacagcaatgtagcagtgcttccagcactaaacagccactgttcggttggcactggggagcaaagcagcggtagctgcggcgcacagaagcactggttggtacacacccccaccaacaggaaggtgggggtgaccgctgcaggaaagcatgactaggagggcgccctgggtggcctcagtaccagggtagcctcacatttgcatgcatcagcatggagcattttagagttatgggaacagacactgtggcaggatgagcttttgtaatattaaccagtgatttaggcatctaggctttgcagcatcaattgcctcagggaaggaatgttgcagcagaagctcagtaaaatttcaaatgttctctccccgaagagaactcagggtacggagagctgatgcatcaaaacaagtcttccagctccctgggccttcgggtttgggggaggatgaggtgaagaggcaaagacacagcaaaaagggcagtcactgtgagtgtctgggagaggctctgccctgctcaagcaagctaagatgcagcagtgaggagcaaaccctggagaagtctgggggaatacgacagcgggaggtacttgtgtctttttgcccaggtagactcaaggagaggaaagaaccctgagaggaaaggcctgcatggtttgtggagatatgtgcagcatactcaccagggcatttgcacttggatggacctgagattaacacctatttggttctcaataaataattattattagcagtttttaacagattttggggccctctcactgaggctagttcttgtgtagagatgaaggggaggaataggaatcaggcgtcgtatacttagtggtctgggtaccactctgtgaccactaggacataccacatgctggccacccttcctataggcaggaaggtaaatgcattagacagagctgtggggtgagaaaggtgggtggatgctcagatcaatgctaggtaaataatgaaaaaaacagtttattattgacatttttttcacagcaaaacctctctgtcgaaaaaacaaaaatatttttatcctcaaccactcttctgttgatgccttcactccatacatgcatacacataggatccatatactcttgcctttctcttcttccatttctagccaagctaatttaacagcaactaagattctgtcatagtagcatattaacaggtaacgacaggcctgtagttggactgctttccttcctct

SEQ ID NO: 36980 - DNA, 1493 bp, Bovine  19866880713066
  misc_feature (1)..(1): n is a, c, g, or t
ncttttgttttgctgttttggaggaaaggggcagctccagggctttctcttgtgctgcattcctatcataatagctctcatttcacacacagggaggcaatgttgagatttttcagtggccagaaatgcttaattccaactctgcattcgggatctaagaagataaccacagagaaggcctgcagacctactgggcgctttgggagatgaaatcaagcttgtaaaattgtcaacacagaagtgacatctgtcatgcccacttggagcccaaatgcattcccatgcctaactacaagggggctgggacacacgcagaagaacagagatatttgttgagtagtaaattctctgtctcaactgtcgagcaccttttgttggaagacaagaaactgatttcagtattattcttctgtaggtaacttttttggttttgttttattttgttggatgttttatggtatttttttccttatctttgttgtttaaatgtttcccaaggtgaatgtaagtatagatttattttcattgattttgctgggaacataacctgctaccataagtctctgactatttcttaccggattgttttctgaaagtcactatctctggatagtggtgtcagtgttagtagtgaaaaagaagatggaaaaaaccaaagggcaaaggcgagaaagtatttactttgtacagatcaaagcagcagaacagaggaagaataatactttcttttggttggctcagacctagaatttctcagtccattgacacagtgggaaagttatctttctgcttttttaaagtagcaaggcaaaatctaagtgtgctatgacatcaagccagattggggtttttaaaattttgttctacctgccttataggaaggaaagattttcagagtttccatcttcacgttatttgtacttttcagcgctataaggagctgtcacgttttctttccccacattttcttcagttttgtggaaggctggaagagactgcacagacacatttcttttgatcatagagcacagcatcctgatttaatatattgttgatcacactgcatactcaacacagagggtacactggcacttacagaatatgagtattagagtggtcgaagtatcctgctctgtgttagtggaagtttcactaaatctaagaatgtactccatgtttgccggctctcctaagccttctgtaatatgcaggatgtcccaaagcctctttagaaataccagtttacaattgtactctctttcctgtctatatgtttcccagtccaatcttgaatcctacatgtcatggaaacttactggcacaacatccaaagaaaaaaattaaagaaatgaaaagaaaatgagttcttcaaactgcatgtttctatttaaagaagtttggaggatatacttccttactgagaaagaaaatgcatatccaacaaagcagtttctgacttgtgtattttctttttctgtcctccatatatccta

SEQ ID NO: 36981 - DNA, 2113 bp, Bovine  19866880783230
  misc_feature (1)..(1): n is a, c, g, or t
nctgactgcttctgtaaatttttcatttttcatgttactttccagagaataacttccctaattaagggtaatttatagcagaaacaacctgggtgctggactgttgcactgggtttcgacttagtggtggggagtcgtgcccttctctccaaattattttggctcttcctagaggatcagggtgccataggattttcttgtgctttattgccaggtcatgcttttggtacatagtgatactcctggaattcttgtttgaccttgttgatttcttcttgactacagccttatgttataatattgtctaaagttgattttattttctgcttctaagtattttgtatgctttactatttacatgggcctgtattttagagctggagaaggcaatgtcaccccactccagtactcttgcctggaaaatcccatggatggaggagcctggtaggctgcagtccatggagttgctaagagttggcacgactgagcgatttcactttctcttttcactttcatgcattggagaaggaaatggcaacccattccagtgttcttgcctggagaatcccagggacgggggagcctggtgggctgccgtctatggggtcgcacagagttggacacgactgaagcgacttagcagcaatattttagagctagaaagatgttcaatattatctccagtctaaagagtgattatggttctttcttctgatacttctttatagcagttttctttgtctcactgaatctagcccctttttctactgattcttactttactatttctgaattgtctcattatagttaattataatctcaggaaaaattcacatttaatattaactctaggggactataaatccagacttcattataaataaaattataaaccttatattgaaacatatttatatcatgcatcaccatgcatccatttaacattatatgctctacatacctggtattctagaatacaagacttttattctttaaaacatggtactcagttggttcagttcagatcagttcagttcagttgctcagtcgtgtccgactctttgagaccccatgaatcgcagcatgccagaccaccctgtccatcaccatctcccggagttcactcaaactcacgtccatcaagtcagtgatgccatccagccacctcatcctctgtcttccccttctcctcctgcccctaatccctcccagcatcagattcttttccaatgagtcaactcttcacatgaggtggccaaagtgctcagttggttactagttttcaagtccttttctcagatacttgacaatctaccttttgagggtgatttcagccttattcagttcagttcaatcgctcagtagtgtccaaatttttgcaaccccatgggctgcagcatgtcaggctttcctgtccatcaccaactcccagagcttattcaaactcatgtccatcgagtcggtgatgccacccatctcatcctctgtcatccccttctcctcctgcctacaatctttcccagcatcagggttttttcaaatgagtcagctcttcgcatcaagtggccaaagtattggagtttcagcttcagcatcagtccattctaatgaatatccaggactgatttccattaggattgtctggttagatctccttgcagtccaaggcactctaaagagtcttctccaacaccacagttcaaaagcatcaattctttggctttcagctctctttatagtccaactctcacactcatacatgactactggaaaaaacagctttgactagatggacctttgttggcaaagtaatgtctctactttttaatatgctgtctaggttggtcgtaactattcttccaaggagcaagcatactttaatttcatggctgcagtcatcatctgcagtgattttggagccccacaaaataaagtctgtcactgtttccactgtcttcccatctatttgctgtgaagtgatgggaccagatgccatgaacttagttttctgaatattgagttttaagccaactttttcactttcctctttcactttcaacaagaggctactttagttcttcactttctgccacaagggtggtgtcatctgcat

SEQ ID NO: 36982 - DNA, 1447 bp, Bovine  19866880790085
  misc_feature (1)..(1): n is a, c, g, or t
ncccaatcccaagcaaactgggaggagttggttacccctacctggaaggtaaaatgaaaggaggctgaggctagacttggtaaagaagcaaagtcactcacaggagccaggattcaggatatttggttcctgttgtggtttggataatgttcatgtttttgcctggattcagacatgaacgcaaagtagcctgatctctgactggatccatcatggtggcagcgtggtctactggtggtgattttctgtgagattgttggtgttctacaggacaggaggccactgcctagcaacaccaaggccttcagaaggtatcagaacaatttctagctgtcaggagctgttttccttttctccagtacccttcttcagggatttgaggggtgcttttgtggttggccaaagacagacgacagttgtgagtgtccgttgtgagagccttggtttcagtcatattggttctgtgccctaaggaaatgctttggactttggacaatataaatattgtccatctctcttcgcacaactcttcttcaataaagtttttttaatgattgggaccaaatactgaattactgttacatttttaaacaatcgaatacttttctccttcttatattcaaaattcacattagcatattttagtgttcttaataatactaccataaagaaacccatatcatttaattgaagacacttttttcacaggacacattaggattttgatgaacactaatatttcactattaaactaatgtttcatagaaaaattagtttgtttagtgattgtctcctagttatgcctatcgtttttaaaaattagaaatatacataaagggtaaataattgttctgagttaaattgttctgattttaaatgaataaattttcttatttacagtcattgaaaggagatagttcatgtttttcagatttactgttttaatataaagtatttggattttttggggggaaaatatttacctagtagatgaaaatatgtatttgatttagtttaatagctaaggttataatactagttaaattatgaggcaatattttaattattaacattggttcaattattttgactatcttaagctcagtttggttgtcccatatattaattaaatcaactgttccgcaattagttttcataacaatggaggaacttaatgtggccttagctgtattataatccatattaatgaactttcctttaggttctgcggactacctggagatcattattccaccagacctaagaaaggaacattctgggcaaatcagtgagggaaaggaagttgaagaattatcagaagcttcaggaagcgccatatcacaggcagtggtgcttcctgctgagattccatgtgaggtcagtaaaaacacctcgttattgttgtaatggatactgcatttcactagaatgtggctaacacgagaag

SEQ ID NO: 36983 - DNA, 1551 bp, Bovine  19866880806474
  misc_feature (1)..(1): n is a, c, g, or t
nctgagtcagaactaatgggcaaggtccttaatttaacatgattgatcattcttttcctctagagtttgcatattttgtcttgtttaaatttcatttcttccaaaatcataaacatgttctttgcatgttgttcagaaacgtatttcctgtcccaaagttatcaagataatctactacatgtgcatttgtaactaggaattgattttgtgttgtgtgtgaaatagggttcaatttcgcttgttttctcacctgagtactgcagtcacttcagcaccatgtatctgttctctgctgatatacaatgctggcttgtttccacacagagtttttatacctataccaatgtcacactgtcttaattcctggagctcttcagtacgtcttggcattgggtaaggcaagtcttcttcctattacaggaagtttttagttatatttcgtcctttgtttatcatatgcatattataattagcttgtaaaattcttgaaaacccagattactactggatctatagataaatttggaaatgttggagggctttccaacattgcttcattatccaaaataatcatcatttttttgtctatgttttatttaatgcctcgtataaagttaattcatcatggtcttgcatctttttaaaaagaattattcttggttacttttaatgttgtcactattttgcaggtatttttttaatgacattttctgagtgtttgtagatattgtatagaaatgcaaatgaattgtgtattatataaaggatattttttctcaccaaccagattaaaatccacaattgaatctaacactttatctgaataatattttgagttttctagttagaaaattatgcacttgccaggtagcactagtggtaaagaacccgcctgccaatattgtatgggataatgattggatttttaaaaattcgtttacaatacacacatttcttcctttttatttttctccgttgttgccctcaaagggtcctctagtacaatgttgaacaacagtgagagtgggtttattctttattcattaatttaaatgaaacggttttaatcttttgccacttaactatgatgtatgcttagggttttgtttttgtatttctatcagattaaagaagtctccctacatggttaatgaattttgttaaatgctttttctgcatctattgagatgacgatatagtttttctctttctattcattaatgtggtgaagtacattaatagattttttcctaatgttaatccaaactttcattcctgggataaacgcaggttggtcatgacatagtgcataatgtgtgtgtgtgtgtgtgtgtgtgtgtgtacatgcacatgcttccagatacatggccaagtttattttatcttgtttgcactactggcttatacatttttttccttatactgtcctctagcatttttaatcacaaatttttaatgttagcctaaccaaataagtaggatgtttttcctctttcatattccaagaagaatttgtaaaaaatcaggattatttgttccttgagtgagtgg

SEQ ID NO: 36984 - DNA, 1071 bp, Bovine  19866880834195
  misc_feature (1)..(1): n is a, c, g, or t
nctcccttccttttggtatgtatgccttgtaatttttcttgataagtagacataatgtggggttcccggtggcactagtggtaaagaacccatctgctggtgcaggagacataagagacacgggttcgacccctgatttgagaagataccctgtaggagggcatggcagcccactccagtattcttgcctggagaatcccgtgggcagagggcaggctacagccatagagttgggaagagtcggatacaactgaagggacatagcacacagagcacaacgtaatatactctgtaaaaagaactgttgcagatagacctttggtaatgcagtggtgaagtgtggtgaggaggctttctagagacctgtgatttaggtctcagtcctttagtaagcctacgcctttcaactgtgaacctcacaagagtttattccctttaggtgagagaggattgttatagtgggctacagttagttatttcccttcctgtggtcagttcgtctctgaaaataccttaatagattaggctctgattaactaatttttcctgagggcaggccttgttaagaagactagagtgctctggagtatctaaggttgtttccatttccttagaaatactgttccccaatatttgctgtgggaatctggtcgagctcctagagctaaatctcaaaataatgtgtcccctccaagcttttagctgaaccctcctggagattttaactctcagacttgtcctctgttgagtgtccagcaatttgtcaattgcacttcaaaagccacgaccacgaggagcccgtgcaccacagctagagagtagcccccacttgcacaactggagaaaagccggcgctgcagtgaatacccagcacagccaaacaaacaaacaaaaaattaatcaaagaagagttgtcgaatttttagtctgttcagctttttgtttgttaggatggagtggtgatgtccaaaggtccttaaatatggaacctgaaacagaaagtcctatacttcttattttactaaaatgggaacctacaaaattgacaattttgtaacttgaattttttca

SEQ ID NO: 36985 - DNA, 3165 bp, Bovine  19866880876830
  misc_feature (1)..(1): n is a, c, g, or t
ntgaggaaaaaaaaaaaaagctcaaaagcttagttagatttcatagtgctaattatatcaataactacaacaagggtggagggaggaaaaaatccaaaagaatctacagaacaagtcaaaacataagaataataaatgtttttcttgagtcactgctgtcagagtcctttccctcgctgggagtcacagtccagctcacctccctaggatcccctccaacactgtgtgtattcctggacctgctgtggaggcagctcagattttaatctggtcctactcctgtgtgttcttacttccaatgtccacagctatcagaactggtgtgttttcttttgtgggatctctcaatgcccccgtgtatattccacagacacagagtctgcctagttgatcatgtggatttaatctgcagcttgtagagctggtgggaaggtttggggtcttcttccttagccacactgcccttgggtttaaattgtggttttatttccacctctgtatgtgggtcatccactggggtttgctcccgaggctgccctggaggacttgggtttgcccctgtgagggccaggtgtggaggtggtgcagctgcttgggtcgcaggggttctgacagcaccaggtactcaggggtgttggcaactagggcagcaggaaatatggtgctctagaaggatatggcaaccagtactggccaatacgcttcagtattcttgcctggagaccccctcctgacagagaagcctggcaggccacagtctacaggattacaaagtgttggacacgaccgaagtgaccctgcacgtgtatacgcaaaaattttttgcctgtgacagctctgccccagtgagagttgagtgtgaaggtggtgcagctgcttggcttgcggggaccctggtggtgccaagtgtgcagggaaacgaactgcctccaccacaggagttttgaacctagcagggtcctttttccagccttttgtagctggtgattagaaggcctctttggccagtctttctccatagctccacccgtttgggcacttaaagggctcccttgcctggggtccttctttattgttcagtgcatgaggcacatagagggcaccctctggctggggtcctactctgtagttcagtgcgtcaggtgcatttgatgggccagcctctctattgttcagttgcccatctctggcatggagagagagaggctatagtaatgggtccacccctatgcatgactcagcagtatcgccttgcttccatggctattcaactttcctcgacaggcatttcccaccacaatctcttctcccacatctcctcgatccatctctccacagtcaacagcagccctcactctgggattgcttcacaatccctaaactccatatcccagccacttacgccttccaggggacctgcgtccctgtccgtgatatgtatggtcgtggcaaggactgtctgattctcattccatttaggctgccacagatcagctgtttcactctcagccttaaatgtttctcctctgactcagacaattgcccctttgtggggatcagatccctgcttcagttcccccacctgctgagggcagatccagtcctactaacactcctgtttttccccctagttccttggtcctactgagttttgtgtggttctatatattcttttccactggtcaggtactcctgtccactctcagctggtgttctgcatgcactactgtgtctgaaggtgtattcctgatgtatccgtggagagagatgtattccatgtccacctactcctccaacatcttgttctcctttggatattctgttcttataatggtacaataattatgctcatctacttgccactgaaaaaattttaaacattccagctcagccaaaattcatggagaatttattcattcttgcattctcacttcctagactttgtgttaagtggaaatttcatacacaaattttatacacaaatattagtcatttactatgagcaggctcataagtcttctctagctcataagttaaagatttcctacagtaagacaaaggaaaggatatccttctcaagtaaaagataacagtgtcaggttacgtgatgttaggtgatgttgagtgagtggtttagggttctacgagttcagtgagagatccttgtcaggctgcagaaagctgagaagagggaataaacagtctgtacactcttaactatatcagcttaaatcttcagcataattatctgagatgttacaaaaactgccttcaacaaggtgcaatactaagctttaccatgcagatttcagataaactgatgattcttgccaattactgtataataagtgggcatcatgcatgtaaccacatgacaatcatttaacaataaccaaatgataaactgaaatgataaacaaagctagtcattgcaaggagagtctgagtgtgggaagtcagtcagtaatgataggaaccacaaaaagttgtacctttaggaaataaataaccttacccatgaaatcattttaaataagaaatgagggttatggtacctctttgagtctctgaaagaccctcaggataacagataatcaagtgaagtgaaagtcattcagtcatgtctgactctgcaacccatggatacaaagtccatggaatcttcctaacccagggactgaacctaggtctcccacattgcaggtggattcttaaccagctgagccacaagggaagcccaagcatactgcagtgggtagcctatcccttctccagcagatcttccagacccaagaatcaaattggggtctcctgcatggcaggtggattctttaccaaccaagctatcagggaaaccctacacataaccaaagcaccttatcactccagtgaccaagaagccctcgatcagtaattcctagcagcaagtctacaactcaggtcaaaaaaggacaaagtacagtatacacaagaaaacccaacaccttgagaagttctcagaagatcctgcaaacaaaagaatttaaaccaacagaaaattatgaaataatctgaaaggcatttttaaaatataattgacccatgcaaaacatggttttgaactgtgtgggtccacttatattgaaacctttttcaaatgtacatactacagtactacataatcca

SEQ ID NO: 36986 - DNA, 966 bp, Bovine  19866880996379
  misc_feature (1)..(1): n is a, c, g, or t
ngatatgacctcctcctctcactttagccctggactctaatggctacacagatcttatcagtatcttcagtccttcataatgtcaattttaagcatactactgtttctactattttctttttcaaatgttctcctagcccactttcgccttcactccactaaacctcacttcctcatatcctcactccccttctttcccatcttgagtttcatggttcattattataatcattcttctgcataagccatgactctttagtcctttgtttgttcataccctgaaaaagccctagtactggataaatccagtctcccatattaccctgtatctggtaattaccactctgatgactggtctcacttcaaatccttgactatcaaccacaaatgagtccttagaccttcctagtaatctaatcatatttccctttccaactcacttttctgtattccagatcacttttatgatgactttccagatgacttctactctcttcaaatttctaataccatttccattttcttcactcttaagtaatgactttgcctctccttttattaataaattagaagtcatcagaaaaagaacttccacaaacttttatcacaaagtcctcttacaccctgctttgcctacatatattacattgataatacagcatcaaaaccataataatcctcaagataagtctagacagaatgttgagggagtttaagaagaaaacagggcagtcaagtacaggaaaactcagcccctatagtagaaataaacaaggatgtatataccacattcattgacttaaatatttattgattagctctcatgttccagtcagtattcttaacaagtccttaggtatctaatcctcctgttcatgtgtctgttaacactaaccataagcagatttcctgtgtataatttagattgtgaggggctctatcggagacaagcttgcgcagcctaag

SEQ ID NO: 36987 - DNA, 1133 bp, Bovine  19866881027800
  misc_feature (1)..(1): n is a, c, g, or t
ntatgaggctcattttaagttttaaaatcgctaactcctctggcaaaaatgagtttttcttttttaaagcctacagaatctctaattcccaatctgttcagagacttacctccctttacaaactaacaaaaatagatatgcaaccaacctctgaaactcagaagaaatagaaattgctgctttagagtttctttgcaactcaacatcttgaattatatatgaggaagcaagtcaccttttctatcctttgagaaacgcagagaaacaaggtggtctctggagttgatctgagtgagaaatcccacctttcctgactctaaaacaggaagggtgtccgtgacagacaagtgaaaagcctgaaggaaattgattggagaactgtgtgagcatcaggaatggggccggggtggaggtgggtggtggtggatggacaaaaacgaaagaaaaaaaaaaaaataggaatgggaaatgagtgaatgtaagttaaatccatgcttgctttctcctactcctaaagtgacataaaaacacaattttttgtttgttgttgagtccctcagtcgtgtccaattcttttcgaccccatggactatagcaatcaggctcttctgtccattggatttcctaggcaagaatgatgaagtgggttgccatttcctactccagagtatcttccttacccagggatcaaaactgcatctcctgccagtcctctgcattgcaggattctttaccactgaaccaccaaggaagcgtaaaaacatgtttcagttcagtcgcttcgtcatgatcaactctttgtgacctcatagagtgcagcgcaccaggcttgtccatcatcaattccccgagcctactcaaactcatgtacatcgaattggtgatgccttccaaccatctcatcctctgtcatcctcttctcctcctgctttcaatctttcccagcatcaggaaaaaatacatttagaccatgcttaaaaaaaaaaaaaaaacacttttacttataaccatcttacttataaaatgattccaacattctaatgaatgttagtagatttatctgtgacttcaaactttagactattcttgttttaatcattatattgtctagtgtttatttcttcagaagattg

SEQ ID NO: 36988 - DNA, 1671 bp, Bovine  19866881079309
  misc_feature (1)..(1): n is a, c, g, or t
ntctctattcccctgccgttgtaacatcagaagccatgtttccagggctgttggtataagatggtatagcatccattacctgcatggcaacccactccagtgttcttgcctggagaatccccatacacaggtgagcctggcaggctacagtccatgggttgcagagagtcagatacgacagaagcacagcttccattagcctaggttctgagttattgtgtagagcagaccctcctcttcaaatcctgccagcctatgttgaacgagtgatatatctcacatgctgtattaggccataagacattggagtctgtctgctgctatagttgttactaattaccctagtacagctagtaaggaaaactgcatgcattttaagaaatcattattacattttcggctattttgttataggtagtcagaagctagttttgagattaatataagatttacttgacacaatctcaaatcacaatgccttatgacaaaaagcaatatttcaaaacagaaaagatagcaggaatagagattgtgagtagggacagagaattttgtagaacccattcgggaaggaaagttgctcctgtcaaggcacaaaaaaatacaaccattcaaaatattgaaagaagggagatttcagcaaaagattaaggtttcattccatagtatttcagggaagaatatatctcaggtggaggggaaggtaagtggcacctactgtttgaactcattttcaggaacagaggataaaggaaacttagccatgttactgccggaagtaggagagatgggtgttgtattttggggactataaaatgctgtatgtaattttcataaaccatggcagtatgaagaaagagcatattcagactctgtatgcaaaaatttcacagactagctttggaatatagtgtcattagtcaacaatgggtctcatggacataggttccccaagagttacctaccattcactaatcatgactgataaacgtgttgtcatttttttttttctggtaattaaacttcttagtatgattgaagtgagagggtttgttgcacatttcatttatgccctaaggccatgcataaacgaattacttgagggaattatgacaggttctatcaattgttacatatatatgaaattttcaacaatatttgatgataaattgaatgataaatgtgttgaatttaagaaagaacctttttctctcaactctccctcttttattttgattttgttgttcagttgctaagtcacgtttgactctttgtgacaccatagactgcagcacaacatgcttccttgtccctcaccatctcccggagtttgcttaaactcatgtccactgagtcaatgatgtcacccaaccatctcatcctccgtcttcccttctcctcctgccctcaatctttcccagcatctaaagtcttttccaatgaggcgtctcttcacatcaggtggccaaactattggagcttcagcctcagtccttccaactaaaatttggggttaatttcctttaggattgaccggtttgatttccttggtgcccaagggacactcaagagtcttctccagcaccacagtttgaaagcatcagttctttggtgctcagctttctttatggtccaactctcacatccgtacatgagtactagaaaaaacag

SEQ ID NO: 36989 - DNA, 1393 bp, Bovine  19866881134989
  misc_feature (1)..(1): n is a, c, g, or t
ncttggaaacctgcctttcttcaagattcatgtcaatcctttcatggtccggtatgactcactttgtgccagtgttatttcaaaatgcatgttgtgggtgagggtcctagtgccagtctctgagttttgagacatttcctctctctaattagcagcctgctagtagatatatatcttcctgctaaagactagcaggggggcactctttctgtccccttctgatgtctaggtcagaagccttctctatctcttttatactttaataaaactttattacacaaaagctctgagcgatcaagcctcatcactggccccagattgaattcctcttgtctggaggccaagaatcctggagtctttcatggctcagcaacaacctttcaatgtgatctgctgtgaggagactggcactgcatctctgtagtctttcttgcctaaacccatatcctctgcctaatcctgagagaaacattggacaagtccctcctgagggacagtctacagaacacctgaccaggaatccataacactgagaagtcgtcaaaaacaagcaaacagaaactgccacggccaagaggagcccaaggagacatgacaactatgcacgatgtaataccctggatgagatcttggaacagaaaaaggacattaggtagaaacgaagggaatctgaaagtctcaatgaaggatatctttttgtggatggtaatatatccatattgatttactaattgggacaaatgtaccatacaatgtagaatgctaataacagggaagactggctggggagtatatggaaactctgtgccatcttcataactttttttttaaatctgaaggtactctaaaatataaaggttattttttaattaatacaatgacattacaaataatgtttttttctatttgcaaaagtgaagggaaaagtcccttccattgtaatgtttaatgtacaaaacattaatcattgtaattacattcatttatctagagaaataagtaaatgcctcataataatgtgcaggggaggaaaagttgaaagaatttatctcttaggggcaataatcgaaaaaataaattagagtgagttgacaagagataaatgagctctgtgtttaacagtttggtttatgggcccatctgatggtcaatagggaagctaggagctgaatttgttcctgctcacttaattgtgtcatttagagaatatctgagtagcaccagagaaacttgtctgaggagatcagtttcagtagttttagtgttattttttgaaagtttcttttatatttatgcaatttattttgtctttgttatgctgtcacaattcctacacagattaaaaatgcatttttattaaaatatgttaagtttgaagcttgctttatcctaa

SEQ ID NO: 36990 - DNA, 1293 bp, Bovine  19866881139826
  misc_feature (1)..(1): n is a, c, g, or t
ntacattttctcattgagtcaaaggaaatgatatgttagaagaattttctaagagtcaattagtaggggtttgaaaattcctttgagaatgcaaagtattaggcagatgcaaattattagccttgcattcttaaactactctattgcaggcattttacagtatattttaatcacatctgattacagctttgataattttaaatgccctaatggcctttatgaaagacattttttctagcatttcattgtagatatttcacttcctattacttcattcatctctaaggacctcgaaagtagcaaaactctctaaaattttatgattatcagttggaaactgtggttttctattctattacttattaagaatatttctaagtggatctacttataagtaatggtatcttatatgttgtacattattctattaaaatgactttctgtatatatggctattttattgaataaaaaaggaaatgttcacgtgggagggatacctgcttgacctggatgtatatgtgagtttgcgtgagaaagaagtgagttcactacagagacacatacagtggccaagaggccaagctttggagtcaggctgtcatggagtccaattgggcaaataattaacatttctgaaactagattacctatttgtaacattcggataatagaacttatgaaattggttgttgtgaaaattaaataagataaagtatgttgagcatttatcacagtgcctgacacctgtcagctctaaataaaacttcttttcaaacttctggaacgtgatctgcctttcaagagggcatttgtcagaggtaggaggccaattcctgggacacagtgactggaagtcatagagggaatgtcactccctttagaacacttctccaatcctgactccttcaaggcctatattccactttggagctcctacgacttcatgaactccaccactatcaaagacagagtgacccaggtgcccagagcttgtacttagctacttttttaaaaattatttgattttcaatctgtgtatttgtatggtcaccatctactaatggcaagaggtaatgattttatatttatggtagtgatagaatctttttaaatgtatcatatttaagctaaaaaaatttagcaaaaagaaaacattttcttaaacaagattatgggtagtatagtcaaaaactggggaaggtcttcagttcagtttagtttagtcactcagtcaagtccgacccgttgtgagcccatgaaccacagcacgccaggcctccctgtccatcacca

SEQ ID NO: 36991 - DNA, 782 bp, Bovine  19866881158852
  misc_feature (1)..(1): n is a, c, g, or t
ntttagatgtgtgcatggttgtttcatttctttatgttattttctaaattccagctttccaactcaatccttagcgtatactagcctacagagaatgctgggactcttgagttctctgaggaaggacaggctcaagatgctcaccacaggctactaatgcatcctcttgcatgatttattagaggtatttcccactatgatgataggtttgcctggtggcagagaacttcctgtgtgcatttatacaggctctgaggctatgtagggagagaaattttatggaatgactttgggtgatgcagctgcagaatcaattagactgaatagagcccttggttgccaattttagtaataccagaaaaatgaaaatgctgaagctggtagtcacccagatgtttcagccctgctgactggcacatcagtgttcattctttctgttctgtctttggttcttgggcatgcctcatgataaaaataagtcctgctcttactctcacatgaagtccaattactggagaggctcaaaatagtacagtaagaaccatatccattgttccattttcatggcgcagagtctcagccacccaacaagtgaatcatcaggagggtccatataaaaacaaaaaaataaggaagaaaaacaatttaaagaaatactggggaactaatagcagtattaactgtcaaaatgaaaaatttgaaataaaatttgaagcttatttttattagaaagcaaactttctactatcatctttatcaaatatatgtaaatcaaatatatt

SEQ ID NO: 36992 - DNA, 1601 bp, Bovine  19866881264651
  misc_feature (1)..(1): n is a, c, g, or t
ncatttattgaagagaggctgactttttcccccattatacattcttgtctcctttgttgtagattaaaggcccatgaaagtttatttctaagctctctgttcagttccactgatcgatgtatttgcttttgtgccagtgtcttactgttttgataattttagttttgtagtatagtttaaattaggtagcatgatatctccagctttgttctactttcttgagatttcttgttctactttctactattatgtttccatacaaattttaaaattatttgttctagtttgtgaaaaatgccattgattttttgataaggattgcattgactctatagtctgcctgtagtctctgtgtactgacaagacaagtgtatagagagggtgtctgtggccatagtaggtggggggtaggaaattaaaagattttggaatgttgcttatctttttattattttccattgcaaatactttccctgcttttttcactaaaacttatagggagatatagggatagaaatggagaagatgactgggttgaacattgggaatcattgaaaaatacggtctgtagatgacaatcagattttaaaaagaagcttgtatttgatataggtgttgcatgaattggggaaacacacatttggaagaaggaaaagaatacagtataataatgttttaagaagactaattgggcagccaatggcatttgttttagcactcatgacttcagtaaaattaaacagaatagatggtgttacctcaatgtaatttgtcttaaatacctttcggggggctctgttatatcaaattcaaggagaaaaatttaaagaaaataaaaagtcaatcttttactttcaacataaatcttttctcataaaatatcatgaattcattttatatcacattgtagtttaattttttggcaatactttcaggcaggtaactcaggttgtatacctagaaaagaggtaaggtgtacttcagatgattatggagtttacgtaatgcacaaagaaacttcttcaaataataattgtatatatgtgtgtgggaggggtgagaaagagagagagattggaggtatagagggagagaaggaaaacatgcatctctgtttcttctgaaaattcaaagattgttaatgatttaacagggaatagagtttcagacttgagaaaaccaaaataactcacccaatatatccttttgtatgcatttaataaatgtctgtataactgaattttagaatctttgtttatattttacaacgcattcaatgcaaagtagagagaagagtttgttaagtgagttagcaaatataattgaattaaaatttgtagttgatatcaaaagataattctccttcacaggtgttatttaacaactgtatttattggcacatcagaaactgaacccagatagctttctttataaatgtgatctggagatactgttataaaaaggaactttaaattctttaatcattagttgattttcagatattaaattgctgctctgagcttttgggctcttggcaatcaaaatactaagtgcaaacaatagcattctctgtgcccagaactacctagcaattattccat

SEQ ID NO: 36993 - DNA, 1053 bp, Bovine  19866881311286
  misc_feature (1)..(1): n is a, c, g, or t
ncttttgcatatactaaacatataaatgagaacccaattagtagataggaccacacaaatgaacaggaaccacgagacagagtgagattaccctaagaaactaaggattttctacattatcctcttctccccaatactttacttaccttgttatcactaatgagtaaaatgtccctccgatcatcagtcaggtgactttctgaatatgttcactcactaagttgtgtctagctctttgcaaccccatggactgcagcactccaggcttccctgtccttcactgtcttctgaagtttgctcaaattcatgtccattgagttggtgatgctatcaaacttgttgaataccatataaatatttaccaaaataaatcgagtgtttgacagaccaagaatcaggtaccatgtagtagcacaagagttctaggagatctgggttttcaccaaaccaaagcatcatatcatttcatcataaccaaagcatcaccaaccctgaaatatatatgaataggaaaactaggtatgacatgtcttcagttatattcatggtcaatatcctataaaatgattaagataagtaagatggaaggacattaaaacagaatggacatggagatattcactgagtatgtccagaaggtcttaaacactgactgtgttaccagttggatagacaacagtcaggataattaaagtgagcaatggtaagatttttaaattttcttaaagttttattatatttgacaaagttcaatttgcctgcagtttactgggcaaacacaaatatgtgttataggtattacactggcttttttattttctgctgagattttcattatacattagcttctcagtcatttcaaaattcctcgaatttctttctgattctgtcatttcatttagcaactggatagaagcagctgaaagtatttcttggtcttaaattagagttggccatgacaaatgttcctgcaaaaatataggatgaatcccacacatttatcacggcatctgggccatgtttgtttctgtaggacagaggagagggtagaaa

SEQ ID NO: 36994 - DNA, 1878 bp, Bovine  19866880466129
  misc_feature (1)..(1): n is a, c, g, or t
nataatgcaggaaatgactgaggtaattcagtaggaaataggaatatgtttttagtgttagcataaaagaatgccttgctgatgaggtatgaggcatcctgttctggaatttaataatggtgactgacctgttaagacctttttttttttctgctgctctagaaaaagcaatggaagtaatctatcttctaccagatatttggttcattacattgtctttccctaaaatttctcctctattatcagttctttacaacattcctgtcttttgcatttaagaaccccaaattgagaatttaatatcttaagaacttttatagggctatccatcattagtttgttcttccagagcctattttagtcatctcttaggcagagctttgtacattccctgcttactatcacttgtcctaaaactgctgttctttccagttttaaaattgacttattaggaacttaggcatttttcggtttttcccctgtgtattattatagtcataaataccaacaaggccacatcaagggtatccagactcaaggcaaagaaagctgatcctatcaccctgttcttctcccagtacttttgctattttgtagtatctcttttaattctgtattcaaactggacttaattatgctttattttttcaaaaaaaaacgtgtaatctgttatgttatttaagatttacgcttttatcatctgtgtttcttctttttacacctttttctaaagcttttcttccatgtcagtctatccacagttaaataaatgctgtacctcatataaaatggcatagtatttgcttataacctacacatatcctcccgtatgctttaaattatctctaaattacatataatacctcagttcagttcagttgctcagtcatgtccgactcttcgtgactccatgaaccgcagcacgccaggcctcccttgtccatcaccaactcccggagtctacccaaactcatgtccatcgagtcggtgatgccatccaaccatctcattctctgttgtccccttctcctcttgccctcaatctttcccagcatcagggtcttttcaaatgagtcagctcttcgcatcaggtggccaaagtattggagtttcagcttcaacatcagtccttccaacgaacacctaggactgatctcctttaggatggactggttggatctccttgcagtccaagggactctaaagagtcttctccaatccacagttcaaaagcatcaattcttcagtgctcagccttcttcacagtccaactctcccatccatacatgaccacaggaaaaaccatagccttgactagacggacctttgttggcaaagtaatgtctctgcttttgaatatgctatctaggttggtcataactttccttccaaggagtaagcgtcccttaatttcatggctgcagtcaccatctgcagtgattttttagctctagccattctctaatagatgtgtagtgaatctcactgttgttttaatttgcattttcactggtagctaatgatgttggccatctttccatttccttatttgacatctaatttttttttttttggtgaagtgtctgttttgttcactttttaattgtgttgtttccttattgttgggtttacagagctctttgtatattctggattcaagtcctttatcagatagatatatactttgcaagatttttcttccagtctgttattatattcttagtatatatatataagatctctgcttattcttgtcgcttttataacatgctgttctttttaatcgatgtactgtttcatccttgtgaagatataaattatccttaaacttcttttcctttatcttctgcactgtttatccttggcctctcttcctct

SEQ ID NO: 36995 - DNA, 3703 bp, Bovine  19866880527674
  misc_feature (1)..(1): n is a, c, g, or t
nttatagatcatctggcatatattactcagtcattaataataagaaatctctttggaggaagaaacctgtccagttgctgaatgattatctgtgcactttctgtggaaatagtaatgacactcttggttcatttgggaaaagttgtgaatcagaatgtagtgcctttatttcgtactagacactaccactgtatgaagtgccagattcattaaggaaaatatggtagtgtttggaagttgtaagcaatgataatgtatatatatgacaagttaatatataggggaaatggtcttgtttaatacagggatggtgcctgtgatgggaggttaatttgccttgtggtcagtattgattagtggcagcattacttcatgtaccatcatcattttgttttccaccaaagaaatgaaatccacttgccagatacctgactgcaagctagtcttttgggcagaaatctgccagagggaggtttaccccaaaaggctaaagagttgttttgttactgtacccctactagtgttctcacagtttgtacctgctcatcaaatgtagcctacagaaaatattttgctagtgtattctgtgaattgcaggtgactctaaaaataaagctagtcctacttagtggcaagaactgtgtcaacttttcccaaatattttctggtgtttcactcatattgtcctctttatagatttgatgaaaacctcaaaattcaaaattataactcaactttagttgcagttaaaatggggaaatggcgctgttatttctttgtgtgttagctttcccctgctgtagatacagttagtttactgatgactctgtaagatttggtagtcataattaaaacccaaatacacgatggttgtcatatggagaattcatttaaggttgcatgaggaaaatcattcaatctgtatatttttttaaaacaataaactgaaacttttttcatctaaaaagattttaaatattaatttgtagtacagcctgaatgtatgtcacaccaaaaatattttatatttgtagtatatacgctttttgactttcttttactgctgaacagatgttttgaacctcgaagttcttgaaaagttactcaaccacttcagatatctttcaatctcaaggcctttttgaaccacagtatacagtgttttaatcttcgaacctcaaattaatatgcctactatttacagtatttccctattgctagcacttttgttctaatttagtgtgtttatattgaaaatattggacctatgtattagagtgtttaggactatggagaagaaagaagttacaactctagccccacagtttggaaactaaatataaaacatatgtcaaagtatatcaaaccaatatagaattatactgacaaatatgatatacaaagtgttgctaaacttcacagaatcataaaattgtagaactggatgggatcttggcctccaatccagtagatctcagaccttcttacacattgaaattacaaagggagctttgtaagactttacagaccaatatcccaccctgggcaattacgattcagcatattgtatatatatgtgtatatgtatatatgcgtataaagtgtgtgtgtgtgtgcttctcaaatgattctgcgttaatatttgagtgggatctggaaggtatgttttctcatagtgaaatacagtaagaaaagaattgagaaagtaatccaggagtagtggacatgccaaactcatctgatttccgaaaagaaaggagttaggggaaagaggagtgtggataagttaggaatataattacttaaaaatatctctttaaagggattcaagttcacttttcttttttcagaaaaggaaatctgcctttattcagataattacaggtttttgtgtctaagttgagaattagagatgagtagagcagatttttttttttttaagtggtagaaatttgtttcctaagtttattagttctgtgtgtgtttccagacttcaggtgcctagcagcaagtcatctggtgaccttgtcgatctgtttgacggtaccagccaatcaacaggtaagcttcgacattggcttttggttggtttcagagtaattttttttaatggcaaataagagatggaatgaaaatttctaaaaaatttttcttacagtagatttatttttaaagtgaaattaatgagccttaagcattatttaggaggaaatatttaattgcctaaaataaggaaaacgagtacttaagtatttggtaattcagtaatctctcaatttccttagaactgagtatttggggtccctttactttctctataagtgaaatatactgctcttctcatttcactgtcttttcatattctgaaattagccatgcctagagttcatttcggagaaggcaatggcacccccactccagtactcttgcctggaaaatcccatggacggaggagcctcgtaggctgcagtccatggggtcgccaagagttggacatgactgaatgacttcactttcacttttcacttttatgcattggagaaggaaatggcaacccactccagtgttcttgcctggagaatcccagggacaggggagcctggtgggctgccgtctatggggtcatacagagtcggacacgactgaagtgacttagcagcagcagcagcagcagagttcatttacacttttcattcatttattcagtaaacatttattgaaccagacactggcctgggtgcttgaggtattgatataatgcttagtaaagggtcacaaatagttacacatatacagaggaaaagggcattctgtgaaagtgtgtgactatctaccttacatattttaagagggctatatcaaaagaataatagtccattcaccatgattttctcacagagaagttcaatgatttcttcaatttgatttctaatatgtggtagatttttttttaattaatcccctataagttgttttcaagaaaattggtatttttagggttgcatttgaggactgtggggtcataataaactactacaagtcaaagtagcttaataaatctttgtttaaagtccatttcacattaaaatataactggcaagataggcatagaaatgtcaaagtaaatctattgtttgtagttgtgtgtaatgatttttcaaaacttaattattttaaaatttacattagagtttaagtggatgtttatgatgaaaattatttctcactgatagtttagtacatgtgattaatttaataatttacagtgggattattttctcccgctccttacctattaccataaaattaattcttagattgggtgttaacttactagggtgtctggttcaaaccaatgtctgagattcttcaatttccagtctctctttttctgtaactataactgttcctaaaattattctttaaactctattgaactgtcatgcccaaagttacaaacaaccacattagttgtttaacaatttatgtgctgtctttttgtatgctgaagattttaactgtagtattaactggtagttagcatgtaatcatatagtagagacttagtgttacagaatatcaactattttggacttcctggtatgaaatatttaagagcccctttcatgcatctgtgtaaagttttaatggagcaatcagagaagaattaactaggaaggtcagatgaggaatccagcttttc

SEQ ID NO: 36996 - DNA, 1346 bp, Bovine  19866880604500
  misc_feature (1)..(1): n is a, c, g, or t
ntgggattttccaggcaagagtactgtagtgggttgccattgccttctccattcataagtcccaaaagtagaagagggagataaagggtctaagaagatatttgaagccataatagctaaaaacatctgtaacttgggaaaggaaatagtcacccaagtccaggaagcgaagagtcccacatagaattaacccaaaatggaacacaccacgacacattgtaatcaaaatgacaaaaattagatattaaaagtagcaagggagaagcagtaaatagcatacaaaggaactcccataaggctatcagctgatttttcaacagaaattcagtccagccggaggggtataatgtttaaagtgatgaaagatgaaaagctgagaaccaagaatgctttacccagcaatgttgtctttcagaattgatggagaaatcaaaagatttacagataagcaaaagctaaaagagttcagcaccaccaaaccagctttacaacaaatgttaaagaaacttctctaggcaaaaaagaaaatgccacaactagaaataagaaaattacaaaatgaaaaagctcactggtacaggtgaacatacagtaaagacaggaaatcatccatacacaaagctaagtagggaggttatgagacgaaagcagtaaaattatctatatccacaataagcagctaagggatatataaaacaattgatgtaaaatatgacatcaaaaagagtaaatgtgaaaggaggagagtacaaatggagggtttttcaatgcatttgaaattaagagatcaacaacacaatcatatatatatatacacatatacatatatatatgtaaatatatacatatatatatggcacagtctctctccctatgtatacagactgctataaagggcatttagaaatacttggcaatttgaaaatcctagtttgcttgctagtaattgaactatcttatttttgacagaaaaaataggagctttaatgaaagcgtaagtgaggcatgcttcacaaagacccatttttcaagtcgtcttttataggaaagtgataaagttagataaaagaaatattaaagtaactttaattaatttagtaggcttatcagtgttgtcctttggacctaattgaacaaaggaaaggatactttgaaatttttcagttgttaggaacgtttcacttacttttaacttctcccacatggaaaagtatgtatatattatctccacatgtaaaatatctgcctatatatatttactattatataataaagattggctcttaaatgctgtctcttctccaaatttttagatatcccaagagctctcaaatttgaatgataaa

SEQ ID NO: 36997 - DNA, 1300 bp, Bovine  19866880874851
  misc_feature (1)..(1): n is a, c, g, or t
natatgtaacattctgttagtttcaggtagacaacataatgatttgatctttacaaatactgtgaatcgatcacagcaatctagggtattttaaaatttcttatttaactaacacagaatgaggaagttttattttcctcacattcaaggatatgtcaaaatgaagttcagttagttttcataaaaattctcttaagatacctaaatttcaaagaaatgaattttggcaaaatagtctgcccaattccaatgtccctgaatttcattcaagaaaatcattaatattttcttttgctaagatgagatttacacttatttcacactcctacccacctacccccacccacttcctccctccaaagaaaacgaaacaagagtcacttatgagtgaggagaattttatttaggtgtacctgagtagtttgcaatgaaattaattcattgggcacatttaggatactgctgctgccgctgctgctaagttgcttcagtcgtgtccgactctgcgcaaccccagagacggcaggccaccaggctcccccgtccctgggattctccaggcaagaacactggagtgggttgccatttccttctccaatgtatgaaagtgaaaagtgaaagtgaactagcctaataaaatacctttgtgaataaattctttgataagtgggaattacaaatactacaagtagaaaaatggccgaaagaagcagatagggaacagggtgggggaagagctgttttggtaaccttttcactgcctctagatatctggccagtcaaatcatatcataccttgggaagggaagttgcctgatgcagcagctgagccaaagtcagcaaatcctccaaataaatcagctgagccgcctagaaattaaatatgagggaaaaattgttaggaccacagcacaattgatagcagttttattaggaagctattttagcacagtactcaaaaattactcaatatattagaccccaagacctatcataaaagctagttagctgatctagctttttatgccaccatgttccctttaagctatcaccaactctctaacaccctcagttctgtatctactgattgatacaactgttattaaagttatcccttacttaaacacttcacaaacctaatggaggcataccgtttatctggccaatcacgccctatataagaatcttaaatggatgctaaaacctgggaaacatgtttcagggtaataggataatcacatattctcaaatcatgaccctacagattatttaaaaataaaaagggatgaagctattttta

SEQ ID NO: 36998 - DNA, 1319 bp, Bovine  19866880884063
  misc_feature (1)..(1): n is a, c, g, or t
ntttcactttctcacttttgatttttttcttaatattgttgtttaaactcttaaactatcagaagcaaaatttcaagttgagaggtaaaatgatcacacaagccattacaaaattataatctacaataaaaccaactcaccaactggatgagtgatggcgttctgtaggctgggaattaccacagagtaggtaggtgagcgataaggataaattgttggatttgtagagatgatattctgtgtggtaccagaaaatacactagaaacgcttagagggaagcgttttcgcttccctggacgaggttgataaacccaacctagagaagaagattaaccatttttaatttgaacctacaaatcctatttagcctttaaatagttcttttcacattaaaagtccaaaacacttctaagtcttagttatctaaagtatcttttccacttttatgataactatttttgtgcatttcagcatatctatccatatggctcctagctagtggccaatgttgtaactaataattcaaaggaagaccaagagtaaatgtcttttctccaaagacacataatgaatttacagtaaaatcaacattaaaggcactgagtctgaattccaaagtttttcctctacccattataaaaaaaaaaaaaaagccccagtaagacgctatttgtctcctcccattttttttactttctgtaagatacaattatctatgtctttcaatgaagcggttattaatgaccagtcactatttttatgccttctttgggaaaagtcaccttcttagacttggcagtctccaaatctacaaaccacccagtttccttctaaactcagaaaaacagagttatggcagtttttgccactgtacaaccaaaagtatcactggttccctgtaaccactactctgaccattcccagtctgaatctctctgctattactttaggaaaaaaattcttttccctccacgcacaatgtgttggtcataccaatacatattaagcttttaccaagcttagtaacaatgtcctcactgctggggagaaagtcagaatttatttcaaactatgtcatgatgaggataaatttatcaggcaggaggcaggactacattctgataaccatataatattaaaatggagcttggtgctaatgcctgcagtgtgcactgcatattttttctgttgctatgagctgaacacttcattttctaatatatttgaaatatcatagcatagaactctggagcttcaccatcattaaatttatatttttatattaaatcaaaaccactgtaaaactgtatatccccag

SEQ ID NO: 36999 - DNA, 1570 bp, Bovine  19866881106316
  misc_feature (1)..(1): n is a, c, g, or t
naccccagactctggggagtcaaataattgtactcagatgtttttgtttaattttacctctctgccttagtttttcataggtaaaatgtggacaataatagttcctaccttacaggtttatagtgagaattttaagtggcatgatgcatgtaaaacacacatagactagtacaaagcacactgtaagtaactaataaatacttttgttattagatgctattttattattagatgctacttgcaggtaaactgtgaaatgagatgtgttgtaataactcctaatacaatgcctggtacattataatgactcagtaaacagttgtcattattaacaacagtgataaagatgggtagcaataataggaagactggtagatgtagccagagtttggaagcgctgaatttagattttgattcttaagtgtaagagcaccgttggccttggaaactttatataatctttctaagcttctgagcgctcatctctaaaatggagatggttatgagcgtcaaataaaacatacaaactatccagtacagaatcaatgctcttaactattagtgcctctcactccatcacagtagtgattggggaagccagttacttgctacagaagagaactttatggacttttgtatttaaataagatttgaactgctcttaaaattcattaatacctgtatgatgtttgatgaaatgcttccacttcttgatttgttgctagcagtttagatagagagtggaatggataggtggagctaggggagagaaaagacctacagagccttttatatttgtttttatttcttcagggaactcttgcagcagacaagaatgagattttattttctgaattcaacatcaactacaataatgagccactgatgtataggaaggggactgtgttgatatggcagaaggtaatgctgttatgtctaagggaaaacgaaggtcagaaagaaagcctgtgcccaacccatgctttgtcttgcctgctgcctgcgtgctgatgtgactccagtcattggcacagattagaccctttccaaaacgagatgctatagattattattatggatgcttgcttcgtcagttcatcagtcaagtttgtgatctggactccccccttctataagcagaattttagaatttatttttttgtgtcataagctctccccaaatcaaatcaaacccctttaacaggtttagtgccgttaagagaatttttgcattcaaagaacatttaaaaaaatgccacactggaccattaaatggcccacccatcccatgagaactataatttgaggaactgatgttgtatgtgaaggttctgtcccttacagaatgtttgagagattctctagacagtcatagttaacttaatattctgtctcctttcatctaaatccttaattctaccaatattttctctctgatccagctcctgggcataatgatgtctctaaatttatttccttccgtctaaagtatttttttctgaaatgcatgtttttaagtattaagggagtaagtatcctaagagctcaggatctcacggcaacttcagct

SEQ ID NO: 37000 - DNA, 738 bp, Bovine  19866881575199
  misc_feature (1)..(1): n is a, c, g, or t
ntagagtattcgatttaaaagagtgaaaattcgtgtgtgttgtttgttttagttactaaagagcacgctagggactttatatcttggagtatttgtgagagaagaatggatttttagacaaagttgcatgggacctctttggcatgttatcagaatttcagacttttcattcatcattatatttagaaattcttgaacactgatcatatatgaagcttccatttcattgtgtgctagtcaggtttctgttctcaacttgtaaagaagttatcttgctctggaatcaaattgaacatgagaaaggtaagaaatttcagttttagatacaggactaatgatgggaatcttcaggttatttgttgctaagaaggtagtgacaagggcttttgaatacttaatcagaactagtagattccttaaaatgcttgtagataaaaatacatttaacccctttactcagtgtgggaagtcattcttcttgattcttgatttatacaggctccaaattgatttatatttaagtagaaattgctttagtcttagttaatttgcatcagtaataatactcataattttaaggagaattttaagtattttatttcagaatatttataatttaaaccacctactctaaaattaagaaataaaggtaatggaacatatttcaggtaatttctctgtctgacttgcaccagaaaaaaacccctcaatacatcattactggagaatacattattg

SEQ ID NO: 37001 - DNA, 1508 bp, Bovine  19866880142656
  misc_feature (1)..(1): n is a, c, g, or t
ntccctcccgcatcagagtcttttccatgagtaactcttcgcatgaggtggccaaagtactggagtttcagctttagcatcattccttccaaagaaatcccagggctgatctccttcagaatggactggttggatctccttgcagtccaagggactctcaagagtcttctccaacaccacagttcaaaagcatcaattcttcggtgctcagccttcttcacagtccaaccctcacatccatacatgaccacaggaaaaaccatagccttgactagacgaacctttgttgccaaagtaatgtctctgcttttgaatatgctatctaggttggtcataacttttcttccaaggagtaagcgtcttttaatttcatggctgcagtcaccatcttcagtgattttggagcccagaaaaataaagtctgacactgtttccactgtttccccatctatttcccatgaagtgatgggactggatgccatgatcttcgttttctgaatgttgagctttaagccattagaaggtagtaaatagagaaggtcatgattttgtatccattttaaaaggatcgctctggctgctcccttgagcaggaaatgtaggattatagcaggaaaaccaattaggagactacacagtagttcagattagagaagatggtagtttagaccaggatgggagcagtggaaatagagaacatttggattttgacacatttcaaaagtggaactaactgcatttcctggcatattcaacatgggatgtaaaaaaagtaaaagtcaaggtttttggcctgagaattaacaagatgagaaagacagtgaaagctatgaatttggggaaagacaatgagaaattcactattggagatactgagtttgagatggctatttgacatccaagtggcaatattaaaataggaagttggatatatgagtctggagctaatgggaatggtacagactggtaggttaaataagatgaagaataaaaactgagctgaatttaacaatgtggagatctttggtgaattttacaagagcattttttgtgaaacagtggaagcaaaagcctgactgggaggagagaaattgaaaatagagtttaaacaactttttcatgcagttttgctacagagatgtaagagggaattggagcaataaccagaagggagggtagaatgaagagaggatatttaagaggggggaaatagctgattgagtgtttgaatactgatggaagtaatccagtagagaggaaagaactctgataatatgggagagagaaggaagaacttgttagaactatgctgtaggataaatgaaaggggaatggcccttgtctttaagagaaagtattggctttagataagagtatggctaattcatccgtgataatagataggatagagtatgcaggtgcagatgctgctaggaatctaagtgtgatggtggaagttctcgtctgattgctgcaatttgacaagaaagtaggaagcaaggccatca

SEQ ID NO: 37002 - DNA, 1033 bp, Bovine  19866880352068
  misc_feature (1)..(1): n is a, c, g, or t
naactgggcgataatgttaccttcacagttttatgaaattggcaaagagatgaaacagacacaaacaagtgtggccgaaacactgtagcagaaacaccagaggcatgattactgtctgggatgggagaaggaggtagtggttaggctccagctgccaagctggcctgagttatgactatatctaaggttgtagagatacatgatacagagatatgtagcaagagaaatacaatggcacttaactctacttctgaagttcatcctatacagcaggatttttcagtgcactaaaagcaaagacttctaaaagtaattccaaaataaacctcctaaacctgatgaagacccactatactaaattctatttaatttctaagaaaaagtacattgctgttattcaaaatttgatgttaatacggcatgtattctgatttaacagtattatcttttgaaaattaaacatacctttagagaccgaactgaatcgtcagccagaccaatcacgttaacataaagtaaattgctatgcttcaggaagagaacacaatgatccttaaacatgtccaagtctacaactttggtatttctcttcatcgtgaaaaacaaatcccaattcataatagcaggggtatcagctgctgttctcattagctgtgtggaacaaaattagaagagatctaggtatgagaaatgatgactacagcatccagagatgaaaccactgaaaaccagcccttattagtctgcactgtttatgaagagctgaaggaacttaactctgcatcagggttaagtgtgaacatcaccttatgaatgagccctggctagcctgctgggtgggtatgatgcagtgcttagctgatggtcaagcaccaagagccagtggggcctcagtgagacctcggctccttgactgttggggccatcactgagcctagctgagaccagcagaggaactgcctgagatcagtccaaactgatctcaaaatcttgtttataaaagtttgaaaagtttgttaagccactaagttgg

SEQ ID NO: 37003 - DNA, 1903 bp, Bovine  19866880360345
  misc_feature (1)..(1): n is a, c, g, or t
natgattataagaaacaaattatttcttaacaccagggtcctgtcaccttatacatcatttaacagtatgatttggacaatgtctcaacagattttgcaagacgaaaaaaaatgagctttaaaaaccaatctatgagtgtaaaattgataaccccaaacaagaaaattaacccttcacttaataaaatctcagacatgacaagaaccttaaagaaaatcttgtacaaccccaagttcatataaagaacttgagggcctggagaaattactcttttatttataattagttctaattacaaattttatttataattagttctaattataaataaatataaataattataattatttataattagttctaattatagaactaatacctcttgatccaggtaacactgtcactgcatttttttctgatgagtctattaatgagaatttactagaactattcctatgatcccactattttatgtgtcatttgtcaagattgtcttttagaaatgacagtttaccctagtaatttattacattataccaatgactttgattatagactattctctatcttgcaactaaaacttaccatctgtctttatatttcttagtattttcagtatgaattacttttataataaggaaatgtagatgcaatatttaaaggcatccagtgtgtcaatatgaattagtataatgctcttgggatagtctttgatttatggagtcataaaaatactcttaatcattaaaatagtatttctattactaagaatttatcctaaggaaataattataaaaattatggagaaggaaactatcttcttgatatgttcccttttatatttattacaatgaaatagctaagtttttaagaattatgataattcaacttaataataggatattaggaagccattaaaaataatgatcataaactgtataactaatgtggggaaagatgataatatgtgtagtaagaaatgcagaacccaaaattgcatctctattttaattataactatttaaagacatgtataaaatacaaataagccctggaaggaaaaacagaaaaattaaactttaaaaaatgtgttagtttagtgagattgtggaggggtttttattcctgttacttggtttgttataaaaactgggagagtaggaaaaaaggatatccaacatgcattcaaaggaaaaacaaagaaaactctgtctcttttcttccctacaattacatatcttctccaggaagtttatttcctcttctcagcaaaaacccctgtaatctattaatgtaattgagtgttaaatgatatctgtagtttaccttgaaatgcatttttttttaaagatggattgcaagctacataaatatgtgataaaggaaatacagcaaaatgttagcaggtatagaatcttggtggtgggttttaaaaaatattcataataaaatgttagagaaaaattattttgaatgcctttgcggagaaaatcagaaaacataatagccagtttttacaagcagtatttcactaaggagtttttcttttctgtgtgcattagaaattaatatatatactcaataccagtgagaaattgtcattagcaatgatagcttacatttgaaatttattggatttttcctctctctctctccctctcttttttctgcatagtttttttgtcttcctttatcttacaaaagacagtcgttttctcaccatgaatatcatgagcaagaccacttctgaggtgtggttgatagatggcctgagcccttgggacccaccagtacttatccagaagcgaatccatggggtcctttactatgtggaacatagagatgatgagttatacattctcactaacgttggcgagcctacagaattcaaggtaaatc

SEQ ID NO: 37004 - DNA, 1841 bp, Bovine  19866880386846
  misc_feature (1)..(1): n is a, c, g, or t
naaaccttctgaggcagtggtggctctagatgactttttataaagaaagggtttatatagcagcaatttggttagaagtggatgaataaagtacttgttggaaagctgtattcacctagctggcccacattttttcattcagattatatatttttcgggggtggtctaggggagaaagctgatggaaattgtggagggggaagatatgaaacaattctaatcccatctgatgatatcactgcttgcaaaggtagtctcagtttgattactgcttttcacagatatgaaagctgagacctgggaaggataaggaacaccccaggctttgtaagtgcagcagtagacacaggtagaatgacccacagccctgctttcaactcctacaaataccgtctcaagtaggttgatttcaaactctcacaagtgagactgaaagcaatccacttttaacaaaggggctgaacacaaccaaagcagggccataaacaaagtgcaactctgaaccgtctcttaaaacccggggacatctaaaatgactccaggcttgttgtgtctggtcttcataaatattgctacattttttaacacaatttttaaaggttactttccatttacaattattacaaaatattggctatattccctgggttgtacaatatgtccttgagcctgtcttaaacccaagagtttttacctcccactctcctactcctctattaccctcccaactggtaaccaccagtttgttctctgtatctgtgagttttcttctcttttgttttattcactagtctgctgtattcctcaggattccacatatgagtgacatcatgatacttgtctttctctgtctgacttactgtacttagcataatgccctccaaatccacccatgttgctgcaaatggtctttataaacattttaaactttttatagtttcaaaactttgtctctttcttgaaccgactggtcctatttctgtagttaagtatccttcagagcaaatccaatctctctttcagtggctacccttcaaatattaaagatgccattatgttctccttgagataggatttataaaagctaaatagcttaacttattcatcatgtgagattttaaaattttgcacttttgtgaaaattaaccaaagaatcatgaatttattcacaaaaattaaaatgatacagaaatgtgagaagacaatatgaaagtctcctcatcaccaaactccagtctcctgttcctactctccaagaataacagatgctgataattgagtgggctttccagagcttttttctatcaaatctaactagaaacagaaaatatggatgcattatatatttgcgtgtgtatgggtatgtatatatgtgtgcagttgtgtgtatacacatttctttttgtatacatgggatcatacgcatacaatgctctaaaactagcttttttcactgaataatatgtcatggacacccttccctgtcaatacatatacacaagatgtgcctcactcttgttaacaggtgcgtagtatgaatgtgcttccgcttaactgtttcttcatttgggttgtttgtctccactttttcttaatacaaacaacggggtagggaacattcttatataggcggtccttgcttttctctcagcttgagatggatttaccatgagaagcaggaagctcaagctccatggctttccatatgcatgagcctcttctgaggccttgggaggaggcttgaagtttaagcttgcactagctgtcaaaaactgagaaggcatttgcccatttttagtgttggggcacctctaacatgctccatgatttcttaaagattt

SEQ ID NO: 37005 - DNA, 1359 bp, Bovine  19866880395230
  misc_feature (1)..(1): n is a, c, g, or t
nggccttataccccgaggctgccagatttgcatatttctctgttgctctcttggccccccacttaattggtgaatttctaagccttgtgctacttggcgtgatccaaaacccaaatgtggtcaacagcgtggtggccctgctctccattgctggggtgcttatgggctctggcttcgtgaggtaagatctaacaataccaaccgatttagactggtgtggttttgatgttaatgatcacctaatgatgatgattgtaaggcattccagaggagcgtggtgatcctctatcgcctcacagtccagagtgtttatagcgcttactaatcaatattgcttagactctgaactgtttacagtttattcaataaaatgtcttcagagtgagattcaggaaatgatgatttaggtgtgttatcaatatgattcatatgtcataagacattacagcaaaaggagaaaaaccaagctatgctccagaagcacagcctattacaggctaactagcacgcatttagtccatttcttcccctggcactgttgagtttctagtccagctctcaattcccaggtatttcaaggaagttagaatagtcagataagaaaagaggtaagagaaggtaagagactgctgaagaaagtatcaggaccagaaggacatgcaccaaatgttaacagtaattatctctgggtgacattcattttaatttttctttatatttttctctcttttgtgaactttctataatggacagcattattttataaccaggaaaaaatatacttgcacacatacatatgttttaaaaaagtagtagtaagaagggtggaaaattttaggagggtgaaagtggttcctggtgggtgatgtgagttggatctagcaagcaaactatgggtccctgagaaaaatgtgaagacggctatttctttgacttaaaaaccaatcaaataagctactgagcagctattacatgtaatcatatttctttgtttacttttttaactcacccccatcgatgttcaggtaagaaaactaagctcagacttgactttgttctgctcacactgtaaaaagcctctcaggaagcatgtggctccctgaagtcagtcttcctccaaccattcagctgccaagtgaccattggcaagtcgcttttccatcttaataagtttcgtttataagatggagataatgatctcagccccctctgtctcaagggaacatgagactcatgaggtcatcggtgtggaaacacttcatgaactgtagtgacttataaaaggtgagataccattaagcaaagtgagctaggttttggccagttgagatatttttgtgcagtgacaccatgacatta

SEQ ID NO: 37006 - DNA, 735 bp, Bovine  19866880567744
  misc_feature (1)..(1): n is a, c, g, or t
ngacactttgttacagtcagtggaatatgcctcacaatttaggcttcaaaaatcaaaccaagaaaaagaacatagatttcaaattagcccattattttagaaaaattattttcagtttaccaaagcacaactttctaagcattcacagtcacagaatcattttaaactctgattgaacactcaattgaatgtaaaatttagactgatgaacagaaatttgagagaattcatttatccctggagaggagttccacaaaacaacaatgatcttgtttacactgtaagctcagttgttgttattctgctagactaatctatactcatggagaaggtgacggcaccccactccagtgctcttgcctggaaaatcccatggatggaggagcctggtgggctgcagtccatggggtcgtgaagagtcggacacgactgagtgacttccctttcacttttcactttcatgcattggagaaggaaatggcaacccactccagtgttcttgcctggagagtcccagggacgggggagcctggtgggctgccgtctatggggttgcacagggtcggacacgactgaagtgacttagcaatctatactcatagagtaaaggatgtgcacttctggaaaacataagtcttcttcagacttattttgcaaagaacaggctacactttttcatttccaggtgatccaccattagctatcgattacatgtgtaggcttaaaatttatttt

SEQ ID NO: 37007 - DNA, 749 bp, Bovine  19866880620073
  misc_feature (1)..(1): n is a, c, g, or t
ntgatactgctatgattgcactgttattataggtttaatgttaggcaatcaagctacagtggtctagatatcaacaaacagcatcaaaagaaaacatcatattgtccctatccttttgacactgtagctgagaaatttttctatgttagtggccctaaatgaacaataataagtgacaatttagtgaaaaacactattttcacatcttacaaaagtcatgcaatatagattgatacaagtatgatttttctagggccacttgaaccaggggattaaaataaattcagtcctgtgaccacacctttctttcctttttttttccacctacatcatttaaagaggatttatgtaaattttctctgtactcataatttttcaagcattagtccagtcataagtatagggcaccttgacttgatttaattaccaccgtttctactacagcacacttttttattttatttttgagccctgattgctagttcattctcaatcattaacatttagaagaactagtcattactggttttcaatagctgcttgggttcctataagcacttagtcttaaaacacaaaaatggaaaacagatatttcaaaggtagaacaaatcttgattcctagagttagagtccaagaagccccgaggtgtgtggtcactggagcacacaaattcttaaccttcccatttgctttttaaaaaccacaaggaattgggtttaaaaaaaaaaaaaactaggacacctcattt

SEQ ID NO: 37008 - DNA, 1953 bp, Bovine  19866880663171
  misc_feature (1)..(1): n is a, c, g, or t
nctttaccactagcgccgcccgggaggcccctctagttgtggcgagtgggggctgttctctggagcatgggctctaggcgctcagctgttgccgtgcgtgggctcagtagttatggctcaagggttgagttgccccatggcatgtagaatcctcctggaccagggatcaaacctgtttcccctgcattggcaggcagattcttagccatgaaccacctgggaagtcctagggcttcttatattctcccagcctgggacctgaaattgtctcaaagcacgagagtgggttcaaaccctagacaagggataaggaaagtacaaggctgcagaagggttgggaaagcaactataggaaattccttcatagtgagagagagtttccaaagtctccatggttgtttttggttttgtttttaattttattagggcaattttcagtcacacatgaaaatagacaatgatattaaataatgaaccccatgtacctaccacatagcttatacaattctcaacatttggactatattgcttcaaccatccttaccctcagttttcttaaggtttggtttttagccctctgatttttataccatcttccttggaaatttgtttcatgctctcatgactcccactactgcctcagtgaatctgagctccaagtgtgaaacaccagccccatcctttaataaaccaatttagttggtgtatgtttctttccagtcccagagattaatcttggttattctaaactatccttgatgatttcattccccctagagtgattggtttaggaatgtgcatgtgatgcagatttggctagcaactcttgaggggaaataggcaagaagtaggaggttctacagacttttccttgctgttataaaggaacaggaaaaactaccctcttcatttgttggagccagtcttcctatagttgcatcttagtgatggcactcactagctaggtgactctgaacaagttacgtaactttactgtacctcagtgttcttatctgtgaaataggatgatagaaccaactcatggggttgttgtaaggaacaaaggaattaatatatgtaaagtgcttagaacagtatctggcctatcaaaagtgcaaattaaattttagctatgattattattttgtaaggatgtgatgcttggagctgtggcagctgtcttatgcccatggagaggcaagcttgaggagaaagaccagcccactgtgcacgaaagacagaaaatgtggaaagaagcttaatcattgatgtcaagctactgaattaagcaagcttggaattactctacccctgaatttctcaataaggaagataattttccttattaaatgagtctctttggttgaattttcttctattcatagccccaagcatcctaattgatacatattgcctcaaataagtttcctttctcccaaagcttgctcaaattttttcatcagtcaaggcattgcaatttccccattcagtcttctttataatacgccatatctagccagatttgtcaatatttctttacaactttttctttctctctattgacaaagttactgttggtggcaaaacaaaaattagtgcggttaatgcctgaaatagccttcatgagaaacgaggggctcatataaagtaaaagtactggtcatggccatctctgtcttattcacagactttagtctaatgggtactcaatatctatttgttgaataagtgaatgggggattggatggatggatgagacattttccaagtgaagattttttaaggaatactttttcagagaaatcttcccctgccacatacgtttatttgattaaccattcattgaagttgctccaggacttctcagagccttctgtaaatttccatgcattatgaatcaggaagggacactactgttcagtgcttctctaacttaattgactagacaggcat

SEQ ID NO: 37009 - DNA, 859 bp, Bovine  19866880735693
  misc_feature (1)..(1): n is a, c, g, or t
ntttgcagaacaagacagccatttgtaccattaggccattgctcctttttagttgtgtttagggaccttctccaatttagtctcctttgacgtgagcagagtgtctattcattcaaggggaacaccatgacacagctggagaatatggcttgggaacacagagggcattgtgttcttgtttcccaatttcagaaactcagagttgttttatttgccggactgtccaccgaactctggatactgggcagttttgtacatttatagttttgtgttgagattctgcaactctgaagcatcataagatctacaagtaccttgtgagtcattttttaaaaagactaaacattaacaatgttttgttcagtttggggcttacctgaattttatctatttgtaactatttatttgaaaagtaatggttttgtaaatagatatttcgtaagtaatttaaatcaatacctcaagtatcagtaattttttcttaaggcaaccttagacaccagaatagtgctgaaacaataataataatcctaattaattgtgtgtttcctggtagatgccaaagcacctccatacatatatatatgatcttgtttgttttaaaaagatagtgctataatcaaagaaggggctgccctgatggctcagtggtaaagaatctgcctgcagtgtaggagactggagtttgatccctgggttgggaggatcccctggagaagaaaatggcaacccattccagtatgcttgcctggaggatcccatagacagaggagcctggtgagctacacagtccatggggttgcaagagtcagatgcgacttagcaactaaaccaccaccaccgcataggcaaagcaaag

SEQ ID NO: 37010 - DNA, 3421 bp, Bovine  19866880790517
  misc_feature (1)..(1): n is a, c, g, or t
ntagaagtcctggtcctctggtcttatcttcaaattaaaaatatttttgaacagaaaagaaatagaaacaaggatgtgatggtttatattattataaagctctgctttataaagcacaacctctgctgcttctagtcagtgtttactatgaaagagaactattattaatttttgtattaatacttttgaatatttagaatatttatgtttagtgagataactttccagttgcctcttggaataactgaggatagagaaattatctctaagcaggtcgttcttgtgaagaataagaagttcctttcatttctgtaaatgtagtgagtagaccccattgacctaatacttaatagtaatggttattattataatgttaacaatagcaacttttatcagtgacataggcctcactctgcaaatctctttgctgagaagaaagctgaccagcctttgtaaagcaagcctgttatcactggtaggtagtttgtatatgctatttaattaaatttaaaactttaattgagttttatttgtatttaaaataaattttacaatttaaatgtattttatttataacaacactatgaagcaagtgtaacagatgaaacagctgagatccattcaaagaggctgaatgcacttacccaagaccatgaagcttagagtggctgctgtcccttaggcagggcttgagtctcctggtttgccaccattcaccatcccctcactttattttttttaattgaagtgttaattagtgctgaaaagcaaagtgattcagttatatatatttttttcttttgatattccattacggtttatcataggatattaaatatagctctctgtgctatacggtagtagcatgcccaccttcctgttgagccccaccctgcctcctccactcattaatgtgcaccatcacaacctcaagcacttgtggtccaggtaccacagcactggcattatctggcaggtggttagaaatgcagaatctcaggcttcaccaaaaatctaacgaatcagaatctacattttaacaagatctccgggagattcgtatgcagattaaagtttgagaagtcttgctggaggggatctccaaaggtcctcccccctccacacacacaagattctgaatgttgaccatgggccaaaccctggacttttcactttgttaataggtacagctctccgttttaggtgggaaatccaaataaaatcctatattaaagtaactgcccttataaggatggatatacaaatgaataacacagtcaggaattctgcaagggctagaagagtgtccatgggagtagcggaaggcggatgaagcagggcctgtaagagaggtgggaacaaatgtcctgaacaggtgtcccaagttgacaatgaggagaagacagtgagtgtggctgatgggactagagagcttggtttggggatactaagagaattaagtttagaaatgtaataagtgtgtagactgtagcttggacctctaggctgagatatttggagttgattctctttataatgagcaaacattgatagctttcaagttgccatttgagagttttgagaaaattaatggtctgacagattgtgtagtatgagtgggcttcactttaaagatatattcacagtggttttatgtacatggcttgatgtgggtaaagcactttcccaaaagtatgacatgtttagtgttttttctgcctatattggcacttgttcctctgatacatgttcacagagaccccaacccagcacccaaaccattctgaatgtttctgggctttgaggcaagccttgctgagagtgtgtccattaaaggtcagggaatcataaagcctcccccaggaatactgggtctgacctgggaattgaagaattcgcttaacatccaaggaccacatttccgtggcagtagattacagaaaatgacgtttgtgtcccaatgaagttcaaactcgcagtgttctcagaagactgtagcattttaaaagtagcatgtgagtcacactctttgaatttacagtgagactattcgtggcagtacaatgtctatcaatgctgatagttacaagttttccagaacagctcagtgtatctgtatttgacatactggtcacagggtaggtaagttggcatttagctgttgggtgctctttttcaatagaactttgttaaaggccagatattatatattactgtttcttttatgattctggactgttttggaaaacaaagtcttcaagcagtaaagaattgagacattccaaggttaaaacactttataaatcagcccattacactgtgaagtaaattacattgttggccagtgatgtcacggaaggacctaattatgcttgttggtgtgtgttgttttattttgtaatatttggccaccaagaaggcacagtggtgaagtgtgactaactgtggctatggggacttcccttgtggtccagtggttaagaatctttcaatgcaggggatgcagtttcaatccctgttcagggaactaagatcccacatgccacagggtgactaagcttgcatgccacatcaaagatcccatgtgcctcagctgagacctgatgcagccgaagaaatacatacatattttaaaacaaaagcagtgacttctgggttgacaacagccacagaaatcgccaagctgtgagtatcacaaacttgggtctgagatacacggaaacacctgcctctcatcaggtggacgtagccaatttagggctgcacctggtgctgtaagtgcctgttggaaatacaaatcaaagtgctgttacaactcaacaaaaaaagtcacataacctaattgttaaaatgagcaaaagacttgaatagacattcctccaaagatgtacatggtcaacaagtacataaaagatgctcatgtcactcatcatcagggaaatgcagatccaaaccacagtgatgtgcgacctcacactcatcaggatggccactttaaaataataaaatacagaaaataatcagtgttggcgagcatatggaaaaactggaacccattggaacgcttgtgcactgttggtgggaatgtaaaatggtaaaaccgctagggaaaacagtaaggtggttcctcaagagattaaaaattgaactaccatataatcccacttgtgggtgtatatccgcaagaattaaaagcagggtcttgaagatacttttgcacaaccacgttcatggcatcattattcacaatatctgaaggatggaagcaacccagatgtctgacagatgaatgaataaacaaatgtggtatatacatacagtggaataacatttagtcttaaaaaggaatgaagttctttcacatgctacaccatggatgaaccttgaggacattatgctaaatgaggtcacaaaaagtcaa

SEQ ID NO: 37011 - DNA, 2340 bp, Bovine  19866880870860
  misc_feature (1)..(1): n is a, c, g, or t
natggggtctttccaatgagtcgattcttgcatcaggtggccaaagtattgaagctcagcttcagtatcagtcattccaatgaatattcagggttgatttcctttaggatggactggttggatctccttacagtccaaggagctctcaagagtcttatccaacaccacagttcagaagaatcaattcttcagtactcagctttctttatggtccaactctcacactcatacatgactattagaaacaccataggacataataagaaatcagtaaaattcttacaaaatgagatttgtctttatagttgtattgtatgtcttataaatacttactgtgaatcacagaaatcgtacattatctcatgtctttacaataaggaaatttattatagttgtcttctgcaagcctggtgaacattaatgaaattcgagtgtcactcagggtgtcccagatcttctagttgagtggatgtgaggttctgacaggtgactgtgatttttgtcctgtgcaaccatttggattttccaggagtctcacatgaaagacttttggcactatagtactaggtaaaatctgttttgttatacttttggatggttatacttctgactcaggattagtctttccgtgtttcattcatagtgatgacacattggttttacagtttgggtagaattgaatatgaagatttgtactgtatcttggaataatacttgagctatttcatgtacatatttattatctattctagactttcagaatttcactcttcattttagcttcatagcttacttcataacttcaggcagtaaatacaaataagattcacttgaggaaaatattaaaatacgtaacaggggcaatagcctgcaacactgttgattaaaacataagctcaaagccatagaatataggttcagaatagttgctgtctctacatgtgtgtagaacatcattaacctagttctcatgcatgagttttacagtatctaccaaagtttttccatctaaggctgatacataaacatacagttaacttcatgatatattttatattaactttactttttaaaaactttcgaacttatatcttatttgaaatgtatttaaatctatctgtcagatgttgttcttttttgtgttctatttttcaatttcataatatttataaaattttcaaaggtatttgttgaagttatctttcttatgagattacttttttggattatcataagaaaaaaattttttttaagattacacagaaagaattctccttgttgattagatcataaaagcttgatccaggttattgtatatattaaaatcagtccattaattcattttgtcatataacagttgattccattttccaccaaaaatatagcattgagattaggtttctttctccatgactccctggcctgctctatttctcctgttccctttcctcccatcttccattccctttgccccctttcttcttcctttaaaaattgccaattcttcattcagtccctctgtgtcccattctcctagaaattagtgcaatgcagtaatcaccattgaattgacaatagttgataatgttgtgtcttttatctgttttaccatgttacttagaattgtaacttactcagttttttagtgaagaatcctttaaaaactcacttgatggctggatttgatagtgtagatattgtttcaagctaatccattagatatttatttcaaaggaaaaagaatactgatagcctatcatgcacattcactttcaagactgtcccttaaagaaaactgattttaaaagagataaggcaaaaagctttattcaatacttatgatctataataagatacactctagttccatattcttaaccaattaagaatattatgtattaataacatacacaatttggagagatagaagacatttcttttttcactcatttagttatttttactctttctagtgatgactgcttatttcccctctctatcagagttgtttagcatatattatatgtaaactctcggttgttaaattctgaaaggggtattttattctgtttgtattatttttcttagcctcccaaaaatgtaacaaggaaaatctattcttcaaaagattatttcatcatttaaaaaagtcctttcccacattctattctttctttgttagtgtaatgatcaaatttttttatccttatgtttatttaactcctcccttacttgtgtcattcaggtttgacccaagagcaagcagttgaagtacttctaatctatcattgttagaaactctgcatctcaaaattaatgcttgtaggagtgtgagggaaa

SEQ ID NO: 37012 - DNA, 1571 bp, Bovine  19866880943007
  misc_feature (1)..(1): n is a, c, g, or t
ntgttggctaaagcaaggattatacattggctatggaaaatctttctacctgtgatttggccaatcatgccagggtggcttgtaagtgtatcctaaaaataccaagagtatataaacctggaaactctgacctagtggttctgtttctgagaagttatcttaaagaaataagcccaaatgtacaaaaatattattttaaaagattaaaaatactaacaaataggatctatcagtatgttaaaaaataatcctctataataggaacaggaaaagttatgtatttggaaataatataattctccaaaatggaagatcaagagagaaaaatctttgtgtataagcctcattatggtgttatttatactgaatataaaaacaatctgtatatccaacaacagagaaatggaacaaatctatagcagtggttctcaaccaggagagaaagacatctggcaatgtctagagacatttgcggtcgtcacaactgatgtgggggagaagacaagcctggcatctagttagaagaggccaggaaggctgcaaaacgtcctgtgctgcagaaagccttgcagcaaagaacagctcagatgtcaacggtgctgaggctaacaggccttcgtctacaggacgaagtaccatacagtcgcgtcagcaaaggactggggggcaacatatttacaatttaaggaaaaaacagcacactatatttaagctatttgattttaaaggcaattaaagaatcccataagaattcaatccttcaccctctcccacacccttctaaataaagcacctgaagcaggagaggagtagatacatcaggctagtttcagtcttccaaagcgcaatgcacagggaagtggcactgtgtcagatttcaaggaagcaggcatgacagaagtgttttatctttaactaaactgttgttctttcaaacatgtgaagggatgcaaatttcatcccagtggcataaaaattattttgagacatttgaaaatcaacagatgcagaaagaggatttgtctaaatcccattccccatatctatctaaagagcagagtctaaaagaattatctagacaaaaatgcttctttcaagggagatttccaataacagagtagactaacgcctatcacctgagatgagaaatcaatagtcacaaaactatcataactgccatctactttcctaaagacgtatttgtctttcctaaaagtctcttgttttgtaagtggaataacacaacaccacagcacataagtaaaacctaccagtaacacaaaggtaaagaaccagaaacaacagagcaacattaattcaccactctttgtctatggtagatcaaattttttttttctggacaaagctggaataatctgagcaataaaataaagtcgtattggattataaaacaaagtataaatactcaagtccatactgataaaaatcagtgattgaaaaaaatgaaagaatagacaaacctccagtgcaaattccaagtattttatgtagatgactatacgaataagtagaaactttccacccttctaagtgtaaactgagcacgggga

SEQ ID NO: 37013 - DNA, 1801 bp, Bovine  19866880973385
  misc_feature (1)..(1): n is a, c, g, or t
naatcttcctgatagcttagcctgctgctgctactgctgctaagtcgcttcagtcgtgtctgactctgtgcaaccccatagacggcagcccacgaggctcccccatccctgggactctccaggcaagaacactggagtgggttgccatttctttctccaatgcataaaagtgaaaagtgaaagtgaagtcactgagtcttgtccgactctcagcgacctcatggactgcagcccaccaggctcctccatccatgggattttccaggcaagagtgctggagtggggtgccattgccttccttaaatgtgctcagaatatttatggcagcttacagttgagccaagttacctagcacacagcctattttataataaagtgttgaatatcttgtgcagttagtttattgaataacatactgaaagtgaaaaacaacggttgtaagtgtactgcttgttcccctcatgatcgaggggctgactgggagctgcagctcactgctgctgcccaccatcacaggaagagtttattagtacgtatcgctagcccgggaaaaggacagtttctactgagtgtatatcaattttgcactttcataaagtcaaaacatcataaatggaactatcctaagttggggactatcttattttatgatatatataatcttacatatatataatagagatagttgttgtatatatgatactattttatttttgtgcttcatgtgtctacctaagggcatgttaaaggcatgataacagaagttagtcaggaactaacttctgtgtcaatgaggctacatctttaccaggtggcgtcagtgcccaggtagccagagcagccttctgtgtctgccctgtgtcccagaaggatacatggactttggaggcctctcagtaaagctgaaaaaagtaaagttccgaaaaaagtgcttagagaatgtgttgtttgtgcatgtgattttggaagtggtacagtttccagtagtgaaatgattcaagatagaaccccgaaagtgacatgtggcagaagtggagtgaaggaaagagtctcttgaggcaaagggcacctggaggtcggggtcataggtgggttgcccatgcccatgtagggggtgaggtgaacaagactaatgacagtagctgagaggggaaggtagcctgaggaagagataaccaagagggtgggctgatacaagcctcttaagattcctgcaagaggagagaagtagagtagttgcctctaggtggcactggagagcagggagggccctgaagtgtgtgggggtgatgaagaataaatagccttctttaataggaccacagaggaagttcaaaagatagtcatatgttagtgcaggccagcaaatagaatgttccgaagaagaagttgaggattcagggcagctggattttagaagggaggagattattatgcccgatgaagggatatgtagaggattatggaattagagttgcaaggatgacaagtcagagggaggctggacttctgctgtgatggacgtaacggaagggagtgtgggttcattctgatagtcactcagtgaacttgcactgtgtcagtgcttcttggactcggaaacccaggagtctgtggatgccttctcaaatggccacagtttactagtgaatttttaaaatttggattgttattttaatgataatctaaaagctgatttcagtgccccgagtcgagtttatttttatttgaaattccaccaggtactcttatacattaatatgacattataataaaaataatttaaatcactgctgggaac

SEQ ID NO: 37014 - DNA, 833 bp, Bovine  19866881007768
  misc_feature (1)..(1): n is a, c, g, or t
nttgaaaatgcattctaataggtcttgaaacgtgaacagtttctctttttttaaaacactttttatggatttgaaatggtagtatatatagctgaatgatagcagtgataaaaaccagtctaaactgtgaggccatcctaaaacaagggctatgacaagagtaagccaagaggcagttatttggttcccttcaaggtggaagtaattcatttaaatgtgatttcattcaattattcattcaaacaaatatttactgaaccttactattagaaattgagaccacatttcctactctcaacaaggtcactcttcaggggaaaagatggaacacaaaaatataagtcaaacaatgcagttagcacagggattcacataagcattttttctattaccttgttatttttcaaacattcaaatggacctagaacatggcagaaactaaacatacaaattaaaaatcaaatactgtctcctctgttatatagtcacacattttgttagacacacctttaaaaaaagacaacctgatgtaaaaaaattgaattatgtttccacacatgtcaaacggtttactagcatagctaagaattatcacactttggagtgaaagttttaggattttaaattttgtttggacagcctctaatttcacagtacccattagacactttcacatgatacaccacatggaaagcctaatagaaaacaaagcttggaagcaacttacagtgtggtacagtactctttggcctggaaacaacgcaaagagatgattctattttattttactgctcagggcatttccccaaagtcagataatcctaaatcctcct

SEQ ID NO: 37015 - DNA, 4106 bp, Bovine  19866881025325
  misc_feature (1)..(1): n is a, c, g, or t
ntagtctttggggggcccatatattttggaatatgagcattgttagtttcttttgaacaactgtacaccagctcatgaatttgcatacataaatactactagtgaaaatttgtttattatcttgcatttcagtgctatttactaacagatttcaagacaatagacaattttataaccttagttttataaaaaccactagtatttttggtccctagcaaccatttagtatgtaaattaggtattctcaggcttaatgtacttcatttttataaaacaaatacatcattaatctgattaagttcttagatgggagtgctgtcctcagatcattgtggatcatttattgttgggcatgcatccaaaaaaaattcaagcgtggcacttacagtctaggtttaggagaattgttgaaacctcctaaatgacattttccagaagaatagaaaggcactgcttacttacaattgcaagcattacctaaaatttaatgatgttcttacccttaattgcaactcagtttgatgatgattcagtgcctgaaattatgctgtgttttgctttgatgttaaaaaatgtgaaataaaggtgatccaagtgaatcaaaaatagatcctggctttccagtagtgacttaatcactatgtttctgaattcagaaggttgcttgactgtcatggctattatttggcatgtctttagcttttagtcaaatttactacttttaagaactgagaatgtttaatattaaggttaaagaaagttcatgatgttttaatttatatagcagaagaaccttttaaagaaaatttacaacatagtttactgaattctaccttacttccttttacaaagttgtataccctctgtttgtaggtagtctttgtctaatgaagcatgatgataataatggcttttgtttattgaatggacctcgttcattctcctagaaatcttgtgaagttgttttgtttattcccatcttacagatgattaaacagaggctcagagagattaagttagtgcccaaaggcatacagatagcatgtggttaatctgggactcaaacatagttcttattccagagcctctgcctcctcagataggcgagagaaaggaagagaacagattaatatacaaaggtcattggggttgtcgaactttttctataaagggtcagatagtaaatgtttttgggcttccctcgtgactcagatggtgaagcaatgcaggagacccaggttcagtccctgggtcaggaagagccgctggagaagagaatggctacccactccaatattctttcctggagaattccatgggcagaggagcctggtgggctacaatccatggggttgcaaagggtccgacacaacggaacaacgaacacttgtacatgttttaggcgttgaagaccacacatacatggtctttagcacatattcttgttttcactttttttaagaaaccttaaaaaatttaaaagctgttagaaaaaagcaagtggaaggccaaatttgacctagagtttttagtttgccaatctctaatttagggcagtgtcagtaagccctaaatattttctctggattatgttaattatagtcagtaaaataatttataatagtgactttaaaacatcaagaaaatggacaagttatgttctgtataccctatttgagaaggcatgaaaacatgacatcttagattttcattaaagaaatcaaaataaagtgttaatatttttagtgatttctggatatctggaagactcaactttttgaaactattcattttatagcagcaaaaacaaaaggttatattgcaagtagatttgacagttacagaatgcataacatataattttaatttcatccttgagtgtttaattttatttaaaaaaaaaaatcttaccttcttgatacgtgagtgcttagcattttgtccctatatttttgatattgcagattactgattccccttttttatagtacacatcttactgaggaatactaaagtatggctgagaaaattttttttcatttcttaaggaaatagcagcttgtatgtgtggatacaaggtatccaagatttttgttgatagtttatatttacctagatgtgaatgttttcttcaactcctttattaacattctagtgttttttttaatgtatttaaatttttttattttgttttgttattgttattatttgttactattatgatgatgttggactgcgctgggtcctgtcgctatgtgcgggtatctctagtcctggaggacaggggctactctctagctgtggtacttgggtttttctttgtggtggcttctcttgttgtggagcaccgggctctagaatgttcgggcttcagtatttgtggttcatgtgcccagctgccccatggcatgtgggatcttcccagaccagggattgaactggtgtctcttgcattcattacaaggcggattcttaacctttggaccactagggaagcccatgttaaagttttagctggcttaagggacacagctgctgctaagtcactgcagtcatgtccaactctgttcgaccctatagacggcagcccatcaggatcccccgtccctaggattcccaaggcaagaaccctggggtgggttgccatttccttctccaatgcatgaaagtgaaaagtgaaagtgaagtcactcagtcatgtccaactcttagtgaccccatggactgcagcctaccaggctccttcgtccatgggattttccaggcaagagtactggagtaggttgccactgccttctccgaagggacacagactccagcccttttcctaaagaggccccaagcagtatgggggggggaagggagaaagcgggaggcaggaggggaggggtagttgtcctcctaatggggcatgaggaatagctggagccctgggactttcaaaccatgtggctagtattgtgtttttgttcagctcacttgggtaccatgtgtttacatttttctatttttcttcaagccattagtgatattccttttgagaaactcagtacatattgttttggttgaactaagaaggtaaagagatatttatatctcttagcaggctagaacatgcctgctgaatggatgggtgtgctgctaagcctaggagccgcagtggcctaccagtcctttctttttggagggtagtcttctcaaagctttcctcccagtgttcagttagctgcaaggacaaaatcagctcccaaagcctcataaatgacattacaaaagaccaaaaaaaaaaaaaaaagttaaatattattatctgtattatcaaattatagagcaaagattctgagtcattgtttaggtagtgagggtggcttttgtttgtcatacttgcccttccttttaaaaaaagtagtacgtagtggaccaaacacacagtcctgcaacagaggggatattgaatggtttgctgtgtaggtcagtcactaagccaaactgccaaagtctgacgtatgggcagttttcagatgacgtttcctgagcatttattgtatactagattctatccaaaatgatttccattccttatctcatttagtctttgcaaatttttcaagaggaaactgaggtttagagaagttgagttacttgtttacagtaacatgactagtaaattacagaggcagaatgtgaatatgaacaacatgacactaaacctatgcccgtctaagggcgtaagaaatgttttatccttcagtataacagtcttcatttgaaggaatcaagttcttcagaatggaactgaaaagaggacattgtagctacaaatggaggctataaaaatctgaaacaatgtatgggcaatccttggagcaatctaaagaataaacaaataaaaataaaggtctctgagtttaaagtggatccccaactaattagaattacttatatgtattctgatgtgactgcctttagcttgcatgtgatgggtttttgtttcatgtgaacatgaagcaatatcatgtgaaaattggtcgtttggaaaaatgtagggaagattaagcctaagtgaaagattaattcagcaaatatttggttgagtgcatcttatg

SEQ ID NO: 37016 - DNA, 959 bp, Bovine  19866881049871
  misc_feature (1)..(1): n is a, c, g, or t
ntagcatagcatatatattatatatattctgcctgaaatccggagacctgggttcaaatcctgggtcaggaaaatcctctggaaaagggaatggctatccactccagtattcttgcctggagaattccatggacagaggagcctggtaggctacagtccatggagttgcaaacagttggacatgatcaagtgactaacacatacacacacacacacacatatcaggcccccagcaacttcatatacatgatggagaatgtctttgtcatcatctcttgttctctctaaggccatcacattattaaattattaataataattttaaaaaacaacctagacctggaaatactgtgtcatggtcagaatttaacaaatacttccacaccttaaaattttagaaagatttaaaaaaataagaacttaaatgatttcttaaaatacatcagatacccttccctttccttttctctaatatataagacaggagcattgggaaggaacatcacccatgaccatcaaaaacactaaatcattcatcaagtgaaatgtgtcctgtagtgatattgcatggactttggccctttaagaacattaaaatattgagttggagaaaatacattgactgaacactgacaaagtacaatgcggttagaatcattcacatcaaacacatcatcagggatcttctagataaaatgccaataatgtagctaatctttttggttaaacaatgcttttagaagtgtcttaagagctaaaatgaacatctagaaattctttcaaatgctataaggccattagtagaccagcacatttgtcaacaatttaattcaatatttttaagtcatctcaaagtcacatagtgggtggatttttttgttttccaagcatcacacttgttattgatatgctatgtaacagataatacattccgcatttttctttgtttattaacaagc

SEQ ID NO: 37017 - DNA, 1610 bp, Bovine  19866881073769
  misc_feature (1)..(1): n is a, c, g, or t
ntgtagcgaatgtaagtgatatagtctatatcacaaagagtctatatcacaaagagtataatctaaaattaaagaataaaacagaaaaatcaccaaagcaaattaaatggaaaattaaccattttcacaaagttttaagactttttgggatgctttatgatttggattagattcaccctagccataatgatcgttacctgagttatttactctctacttcaataatataattaatgtgcttgagtaccaagttcaaatactagaggctcatatgtttactttttttttttttaaagtatctctacaaaatctagtgttgatctttagtgagacaaaatatctataccaataatttcctattatcacctagagcatgaaacagatcactagaaatctttcttgaaactataacttagtgattagttagttcagtcactcagtcgtgtccgactctttgcgaccccatgaatcacagcacaccaggcctccctgtccatcaccaactcccgaagttcacccaaactcatgtccatcgagttggtgatgccatccagccatctcatcctctgtcgtccccttctcctcccgcccgcaaaccctcccagcatcggggtcttttccaatgagttaactcttcacatgaggcataggagctgattttttatttccagatatatgcttatctgttctgttaattcctattagaattagagtcaggagagctacaaagagagtaccttgcagcccccagcacatcccagaccaggagctgagctctgccacttttcaacactggttctttctgattgagagccgtggttaatgcaggactaaaggcaacagggctgggcccaatacctatcctcctacacttaccttacagtcttaattttttttctgtgtcacaaatccagttgattttatctgaaccaaaaagcctgaaatcaacaggattttgaactgccttaataaagtagaagtagagttcaagcattttgtaaatgattcctcaaaaggaaatactcccagggaaactgagattttatataatattcacaaagtactccaagttggttttggtttaagttctgtcctcaacaatactcactggatgttccaagctttcatttcaatgctagctagcattatcattagggtatgcagccaaacctatcgatcttagccaagcatcttaatacattaatagttcattggttttaagggcataaactgcctaatggagctgagatgaggagagctttaactttaaattttaagagcttacatgtacagtgtcactttattaatggaaaaaagaaccagtcttcctcatcttctgggtggcctactacaaaaccattttagtaatgaaaacccttaagatagaaaaatggaatatgtaaactttattagagcaacatcattgaactctaaagacagaaaaatcacacaacagaagaacactgggcagctttgagtaaagatggtgccattaataaatggctaattccaagtctgggacagggagagtaaaaagtaggcttaaggacgtttttgtgttagaaagcaagaaagtgttaaaggcttatgggagatgtgtgaaaagaaca

SEQ ID NO: 37018 - DNA, 1703 bp, Bovine  19866881076156
  misc_feature (1)..(1): n is a, c, g, or t
ntaactgttaaccctaatttatttttactcttcagtgacattacttttaactggctacatttggataataaaagccatggatttcaaaccacttagtaatttggtttcatttttaacacaaataacaccttttcatccatttttatataaacttcaaacaacgtatgttttaacttactgccaaataagaaatgtgttacattaaagtgcacgttgtttgcttgcgcatttggaaataccattcattttatagcaattttgagttatttttctgtcactttgtattcctattcaaagagacatacagaaaccctcactcaaaacaactcccttagggtttactcctggatgtcagtagacaggagcgggaggaacagtatgcaacaagcttaggtcatgaaaatgtcatctcttggtgacttgcatttattattattctttgaattgtgtcctcttgaaattctgtgcagggtattttaatatatttttgtgtgtgtgtttaggtaggtaagacatagataccacttcacatttttcctccttccctcttctgatatataaaacagagacactcattttctaggatttggtccaaatttttaaaatgtattgccaaaggataatgtgtacagaaggtgaaatgttaataacgtaaaagactaggacataaaacttgaaacttcaacattaagatgcagtgtaaagtgttagattgtttttaatctaatgaagtgaatcagatgttagagaaattcagagcaaaatacgttttgttgcattcttgctgtaacttcttgggactagagatggggtttcttttcttttctttttttttttggttgagaattcaaaggaataaagggatgagccagccataggcactaatacctcttttgcctctaatgagctgtgtgaccctgggcaagccgttttattttctgaggcatgtgaactcaggttctctctaactgtaaagtctaaagttctaatgtgacagccaaggcagtacacaattgctgcagatggtgtggtgatatctgggtgctggcagggatgaggggtttgaatactgcctcagatttagtctctttcgatagcataaaaacatctggggaaagggagttattaaaaacagctgataaggacttccctagtggtccagtgtttaagactgtgcccttccagtgcaaggggtgtgggtttgatccctggtcagggaactaggatcccacatgccatgcagccccccaaaaagttgataatatagtccatcttttttcttttatatcccttaataatggcatcaaattcaatttagtaggcatccacaaaagatgggctaatatttttctcaaagaaaaatgagcatagctcttaatagttatgtatgtgcatacatacatacacatacacaccaagaaagagagggagagagagagattgagtagttgctgtattttcttacagtttgaaaagtttgttagagtgacctgaattttttctaggatcctgcagcagattctgtggcaagctctctggaaagggtgggaagagttttgttacctgaacggcgagtttgccagtttactctccgtacttgtctgtctgccgtatttaacatgattgaagagcaccacaggataagatgtggaggaataatagaaaaaggctctttggacattcattgggttctaagccaatag

SEQ ID NO: 37019 - DNA, 1645 bp, Bovine  19866881219273
  misc_feature (1)..(1): n is a, c, g, or t
ntggagaagagagaaatggcacaagggaagcttcaagggtcctattccttgcctaaagtgggtggtggttatgtgggtgtgttcactttgagataagtctttcagtgatgattttatttctttgtttttctgttacataggttgtacttcaacaaacaagtttcacaaaaaaaaacaggttgtttttttttttaagctcttcaaatagagagcagaggaaaaactggccagaaggtggtaaggggctctggagaccctttttctgatttgggggagctggttcaacagaggagcttaattaaactgttcactcagctgcaggctcataacatgtgctgatgttgttcatagagtgtcatggtgctgcaagattctgtggactttggttctttgcctacctgcaattgtgtttatggacctgaatgttgtcaaggccaggaacttgagtcatagaacttacagccattgagcttttcagcacagatgccacttcctcctgaaagcctttccggagctgtgagtttgggccaggtgctcttcttctatgctccaccacatgaatctttagcatatatacccctgccccctccagacactgtaaggtgctgctgctgcttttttaaaaaaaaatttggctgggcaggtctcagttgcagcatttgggatctcagttccctgatcagggatggaaccttgggcaccctgcgttgggagtagagagcccaaaccgctggaccaccagggaagtcccacttcttaaggataactttgtcttgtttatgatttaaatctcagtgctagcatcactgactcaatgggcatgaatctgagcaaactctgggagatagttaaggacagggatgcctgctgccgccaatggggttgcaaagagtcggacacgactgagcaactgaacatcaacatgtaagtcaggtgttcatagcatgaaaagtgcctgtgttcagccattaaatttatttatttatggccacaccacttggcttctggaattttagttcccagaccagggctcgaactcaggcccccttcagtggaagctcggagtcctaaccactggaccagcagggaattcctctgtatgtagacattttatagatagatttgataattttgaaatatataattcttaatagcactgaaaattaggatgaagaatttaagacccttttccaggtacttttgttgttgtagttaagttttacagttaattaaagactgaaaagatatttctggttctagaacatagcactttcctcagagtagtagagtgctcttctggaaagtctctgattaccctataatatgtgaaataatttctttttcctgataacatagagttcagtgttattttcaaattgctcttgaatcatttaaaactagaaaagactttataacaaagttattatagataatagtgtctcaaaagttttgagtttttggtatttcctttattatacaaagttgaaatatgaactgtggttataattataatcaaatagagaagccaggtttgaatttcgtattttttactattggaatgctttctgtcaaattaactctgtttttaaaaagtgaaatttgacatgggagtcctaagaacagaggtttatgtcacactacaaat

SEQ ID NO: 37020 - DNA, 760 bp, Bovine  19866881222897
  misc_feature (1)..(1): n is a, c, g, or t
nttcgcctttttaggttttagtttcttcagtaccaaagctatttgctatctcagggactttgcaagtgctctgccagctgtctagaacattatgccccactcttttgctagtgtatcatttaagtttatgcttttttaaaaaaataaatttttattgaagtatagttgctttataatgttatgttagtttctactatatagcaaaataaatcagccatacaggattgcattccttaaccatcctagtcccaccatagcaaagttggatctccttattataaattctaacagcaacttttatcacacttgcaaataaacaattaacctctccagggctttcttgtaaactactacatgagggcaggaatagtattttgtctcatttaccagtttcctcagggctaagtaagcactcagtaaatgaataattctagatgcatggaaagcagtgaacatcaacactgaaaccagcttctaggctgtgctgttgaagttaatgcctggcttggctcccaaattctgtattctgccaaaagttgtacaagcagggttgtgccaaaacagtagacttaactacagaagaaacttgacccaggaaagcatctctttttatcttctttcaattctcatccctcccacatctgtctctgcctaatagcaatcttttccttccagaaaacaagctgagccctaaattgagcttcatccaaaaggaaccccattttcattagtatactcgcctatacaatgttactcaaaa

SEQ ID NO: 37021 - DNA, 1031 bp, Bovine  19866881230545
  misc_feature (1)..(1): n is a, c, g, or t
ntttatatcaacatgcagctttagaaaggatccctccttttctccagcaatcttgtttggaatgataaaggtaaaatggacataaattttactttttaaaagaaattagaaatatatgaagttataattaggaaaagagtgagcttcagctctgttcatctttgactcagaactaattcctgcttttcctgtgaactcgtgggagaggtaggtaacagataaatcaaagatgttaccctctgtggcagctacatttttgggatttgactttgctatgggagctcagggattagtagcagcccaaggaatgcaaaagcaccccactttatgtaaaggtaagattcataaaatcacactgttcgtgctcaccaataaaggttatgggactgttcatcagggggagactgaaagctggggagaaagagttaacagtgaaggctgtggggtgctgtggtgctgccccctcctcatgcctgccttttttttttttttaatgtggatgaatgtttaagtatggtgctgtggttgaaggcaactcttttaataatgcaacacacagcttcctgaggggacagcagttgatttggaaactgaatatggtgcactctaaattctcctcctcgaggagggctgactaactgataagtgccatgagcgagcgtggggactcattctgtcaaatcagcttgctccagaggccccgtgcggaaccctctccagtctctgggagctaatacgagcagacacttgtgacattagacagtgcagcaggcctggcataaaggaaaagttcaccatccgctgacaaggtggtctttagatgacaaggataaagaaatcagtgcgaatttgttaatgtaacaacttggaaaagtatgcttaaagaaaaaaagccaccctatggagagagacgatcaaaagaaaaagaaggcaagtgtagtacttggaagcttttcttgggctttctgcaccttcagggccattgacttttctcttggtccttcttctaggctggggtaccttcagttgag

SEQ ID NO: 37022 - DNA, 1625 bp, Bovine  19866881282344
  misc_feature (1)..(1): n is a, c, g, or t
naaactgtgcactgcagggtgttgagcagtatccctggcctcacacactagatgtgtgtgcatcccactcttctggtcatgacaaccaaaaaacgtgtcttctgtagctcatcaaagattcaggcttagtctgtattattaactctgcagcaaagaacatctaaacagtgattaagatttaatataccactctgcatctgataaccgagaacatgtgaagtgagacgtttctccctaaagtataattaggctatgtaaattacctatgcattttgaaatccagaataaaactgaaaatgaaaagaatcccattaggacaccctgatacactggtcagaacttcctctgaccttgggaggggcatcttgcccccaacatcttcagaatctctgcttcaactgagtttgcttcagctttcaagaaacctggggcagaactcagaaaggttttctgtgggcaaaaggcgctccagtgaggattccctggccagaatgaggaggactgaatctgggacataaatacccgcttcatcatcaaagcctcctgcccaagagaaggctttcatgagaactctgggctcattgtgtgaaaattcagatgactgaactataattagctcgattagtcaacattttaattcataggattctggctttgaagtgttcctttctcacagaatcaaagctaataattctggaattgtaattgggagctgagtgccagcttgaagctcagggagctccctcacctccttggcaagctctacttccaagactgctgcttcctggccatgaatgaacctggcccaggcacctcagccttgccttttcctgaacacctcctctctgtgagtcaagggctctagcatttaggttctaaattcgtggtggttgacataaaaccatgctatgagtacctccaaagcctgtgcacgtaatagaatgctgacaaatttttttttttttttggatgttgctaaacaaacagtgaagcaggtaattggctgattgtctaggtaacaaccatccttccagctttaggaataaaatctgactgaaacaaccaattgtggtgattggattgacctaatggttactgaagatggatgtttcttcaccctaggcactatgaagaaccaataaatgaattaatccctgtataccacacaccccgagggctctcaggtagcaatcttgccaccattgcatgctaacaagtttgaagaggaaagaggagatccaggggaaacctatggaagccaaggcaggaagatacgtcgacatgaagcgtgtcatcccactgggccaaatgtggcttagaggccaaggacaacagaaaggtgaccattatctgaagcgaagtggagctaactggatgaccatgagaaaagtagtttgggagaagtggtaggaagtgagaaatagcagcggattgtgttgaagacagaagaggaggggaagcaatatcaacagacaactctttgaagttttgctgtaaatgggatcagagaaatggaatcggatatgaaatcaaaggagagtttcagataggagatattagagcatctttacatgcttttgggagcagtcctttagagacagagaaatggtgatgcagaagagaga

SEQ ID NO: 37023 - DNA, 1628 bp, Bovine  19866881291326
  misc_feature (1)..(1): n is a, c, g, or t
nctatacaggtgtgagtgccagcaactctcacctgggtgctgcaggaggtctgagcatcatcagaccacagagcatcatctctggctcagcaagtgtccctatgacagcattcacagccccacagcatcagccctcaccctcatttttacacccaaactccccaaccctgtccctcacttcactgaagtgcactgatagtgttgccacatggaatacaggacaaccagttaagctttaatttaagataaaccatgaactaattttttagtagaagaaagtatcaaatattgcactagtcattgtttaactgaaattaaaatttaatcaaacatcttgaaatttcacttgctgtgccttggcagttctgcgcagcagcccccaggtcatttctgaaatacatggagctcagtctcccccagaaaattttgcatttgctcttctctctgcctgaagttctctttccctagctgttcacatggctcccttgcaaacatcaggttttgtgcaaatgggacctcaacataggggtgtctctgagcccacttctcactggcactgtgaagctctctaagccttcatcaccacctgacatgttaaatatttagctgttgtctgccttcccctaaggatactgggaattccttgagggtgggggtttttgattcactgttgcattcccactgcttagaaccagaactgacatggaacagataataagccgatatttactgagtgaatacagaaatgttgtgcgtgggttataccaactcatgttccaaaaagcccctctgagacaaacactgcaccatcaatcgtgtctcatagacaaaggatccaagacacagaaaactaaataattcacgcagaagctccctgaagccaatgatgaggccaggtccagacccaggagctgtgccagcttagcgcaggcagagaggcatctcatagctaaggtaacaggtgtttctgccttccacccatttcaattatttggggttagaggaaggaaagagccactgacatatctgagagtctgtatttgcatcagacaccttaatcccagaactgaattgcactgcttgattttgctcatacaattactatttaacacaaagggtagcaaataaccacctaagcacccatgaaatggagaagtttacgtggatgtctgtactcacttttatttcttcttgaacatcaggattacggaaatttaaatcaggttgctctttcataaactgatgaaaatagcattgttttcgtacttcatcaaagtgccaactggagtttccatatacacttaactagcaaacagaaaatagcagatcagttccttagcatggtttctatgatggtatcgcccacaaagaaatgatcattgtcatcgtcagccccatgcagaccaagtgcacaagtccccagaattttccttctagtgagagcactagttaaattaattccctgaaattccacttgctggcctagtgccccacaaaagtggttgtgatgtgtttgtacagtagaaactgttcacaacaaccacaacatcaaaacaatgctctcaatgtaaggagcaggcatttctaatctattttctgaaacttctgtccaggccctggactcctgt

SEQ ID NO: 37024 - DNA, 1096 bp, Bovine  19866881324032
  misc_feature (1)..(1): n is a, c, g, or t
natctgccaattttacttctgtaaatcaagcatgttgggacttacccagttgttgggtggtatggttgtaccattttcatggttacagtcatgccagatataataatcggtatattttcctgtccggttccgactccattgaaaccaagcatgtttatcactggtgtggtttggtatgaaatcgatgattaattttaaacctagtgcgtgaaaacatttcaaatggtaagataatattatattatataatatcatattagaataatacaatagtgaggaagaaaatgctctaagccaagaaaagactctgatgctgggagggattgggggcaggcggagaaggggatgacagaggatgagatggctggatggcatcactgactcgatggacgtgagtctcagtgaactctgggagttggtgatggacagggaggcctggcgtgctgcgattcatggggtcgcaaagaatcggacacaactgagtgactgatctgatctgatctgatctgaagcatttggagaaatgctttccttaaaccatcccacccaccttccattaaatttacctttatcatgtatggctgcaaccagattctcaaaatctttcattgttccaaaaatgggatcaatttctcggaaatcttcaacaccatgtcggaaatctttaagggatgatttataaaatgaagtaatccaaacagtttttatatttaaagttgtgatgtaatccaatttatcttgaatacctgaaggcaaaagtcaaagccatgaaaaatagtttgttttttcagttgaacgattaaaaataaaacgaataggcttaagacagaaatatttggggttgttttgaatttgggtaaaattcaaatagcaaggtctagttctacaaccaacagcaaattagtcttctagcaataacctttgaactttaacatcagtgcataatatttaaaaaatctgtctgtggtttgttcatattttatacttaaaaccaaaactacactattgttaatttattctacacatggtttcaagcatctaatccaagccagatgctgctaagtaccaagatacaaagaagaatagcgtatgcact

SEQ ID NO: 37025 - DNA, 1461 bp, Bovine  19866881358991
  misc_feature (1)..(1): n is a, c, g, or t
naagtattctatttaaatacctctatacgttacttgagtccacaggaggcctggctagttgagatacatagcactaagcaaaagaccattcccagtttatacacgtgcatcctaagagttggtaagagataaataattaacaacttaaaagctgagcttaaaacataaccttatacggggaaggggagctaaattaggagtttgggattaatatatacatattactatatataaagtaggtgaacaacaaggactcaatgtgtcgcacagggaattatactctatatcatgtaataacctacgaaagaggaaaagtgttagctgctcagtagtgtctgactctttgcgagccccatggagacagcctgccaggctcctctgtccacagaattctccaggcaaaaatactggagtgggtagccattccctcctccaggggatcttcctgatccagggattgaacccaggtctcctgcattgcaggcagattctttaccatcttagtcaccagagaaggctgtaataaactataatggaaaagaatctgaaaaaagaatgcatatatatatatatacatacatatagacatgctgctcagttgcttcagtcatgttggactctgtgcgaccctatggactgcagcctgccaggtatctaaatcactttgctgtgtacttgaaactaagaaaacattttaaattaactatacttcaataaaaaaacatagccttataaaatactatttctatttactattggcaatggtgaaaaagatattaacatcacagctcactagaaaatgcagcttaacacacagcacacattcaaaacccagttatttgaaagctaattctgtctactccatcactccaagtcacatttcccaaaagtaattcttatagttctctaataggtctttattccaagcaagctcacatttctagttagctccggtgcagaatttataacactttgtaggatacatcctatgagcaatttcaatgtgctttagtgggagtgatacataatctcctgaaaattcaccccttaaataagtcctaatgggctcagagaacagcagtagcttaagtggatctattaaaaaaaggttgagtggggtcagtgattgggatgaagataccatttcaactctcccttcagttactgatcaaaatacattgacaaccagtctagtttggccattaaacacacacacacacacacacacacacacctctctataattcacttgtggaatcaacgcttgctttgttccattgatctgaatcatagattgtacgacaaaggaaaggtgccaggccattttcattgcctcccttagaatcagtcagggttttctgcagagcgcagagcagcttcatctcctggcatagggaaattaattagtacagagaacaaggagacatttctgccagcattctcagagaagaagacctctgt

SEQ ID NO: 37026 - DNA, 926 bp, Bovine  19866881410997
  misc_feature (1)..(1): n is a, c, g, or t
nccaagggatacctgagaaatggacagaattctgtttacactacagtacagaaaggggaatatttaacaagctttatataatagttacaacatcactgttgtgatatgcagttgtataatcaagaggaaaaaaatcttggcttcaaggaatagaatgtcttatcacacttaaacaaagactccttgctgaaaacaagccataattaatcaaagagtattacagtatgaaatttcaaaagcactcacaaaagagaatttttaaactttacattatatgagagtggtattcactctacatgagccatcaaggactatatagcagcataaatgctgatgatttgtttcagtgccagggtactcacaattctcgtttcaggttcaatgcatcttctgcattatcatgtcgacagcacaaatttattaaagctgcatagccaccgacaaccatatctgattcatattttgccttcaattcaagagctttttgcatgttctaaaataaaggaaggaaatgaaaaagaagaaattaatatacaagtgtaaaatttctagcttccatgttcagagtgtagaagttaacactacttttaaaataaatggatacacattattaacttcatcttgctccctggtatttttaatccaccttctaaaaggcaggaaagatatatatgaaggattcaaaagatttgttatctgcgctgcaaaactgatcactatgctaaatttgatgttttaggtttaggtactgtattatgaaaaaagacttccagattaaatatgtaccaggtgagtccaatttccatgcacagaaatatatatttctgttcctcacagtctgtaatgtgcaggacacattttagaatttaatagcgccatattataaccttaaagtcagctgtattttttccccctaaaaacacagg

SEQ ID NO: 37027 - DNA, 1404 bp, Bovine  19866881458220
  misc_feature (1)..(1): n is a, c, g, or t
nctgtttcattctgtactccaaaggccaaatttgcctgttactccaggtgtttcttgacttcctacttttgcattccagtcccctataatgaaaaggacatattttttggatgttagttctaaaaggtcttataggtcttcatagaaccattcaacttcagcttcttcagcattactagttgggcatagacttcaattaccatgatgttgaatggtttgccttggaaatgaacagaccctcattctgtcgttttggagattgcatccaagtactgcatttcagactctcttgttgaccatgatggctgctccatttcttctacgggattcctgcccacagtagtagatataatgatcatctgagttaaattcacccattccagtccattttagttggttgattcctagaatgtcgatgttcactcttgccatctcccttttgaccacttccaattgtaccttcctctaaatgcagcctgcagcctttgctttattctgacagtatataacagtccaccataaagactgggacggacgtttccctcagcttccaacacagaagagaaaatgttaaaaagacaatcccttagtgctttgagaaatcagaaggtaaatggttacgtagaggcctgcatgaaaagcaccacaaaaggagatgaagaaactgaattaattgtccagggttaggacctgtatcctgaatccaataattttaggagtaagattaaattttcttaatgtttgtgccaggtaatataaccagaaatagttttggccagactttggtgactagttagatagagagattgatagaaggatgaacttgatgatgggaaacatttttagggttgttgttcatttgctaagttgtgtctgactctttgcgaccccacgtactatagtatgccaggcttccctgtccttcactgtctcccagagtttgtttaaattcatgtccattgagtaggtgatacttcctaactatttttatggtagcatgccatagatggcccagaatgtccaaatatatccacggtctgccctcgaaggactaaacaaatctagtgctgccttgttctgagagcaagtgagtactggtttatgggagttgctaatttgtgctaggtagaaagtcaaaaggagtgctgtgcagattaatcaaaggtgtctaactccaaagcaaaggatgtcaagatgataagaaaggcaaaggaagcgctaataaagattgtaaatgtagtgagagtagggactttttctgtcttatttatcgccctgtttttagctcttagattaaggccagatacatggtacatgctcaataaatagatttgaatgattgtaggagaaccttctgacagtgcaagttcagctatatccaaggattatgctttatcgatcaat

SEQ ID NO: 37028 - DNA, 1660 bp, Bovine  19866881496516
  misc_feature (1)..(1): n is a, c, g, or t
ntactaaagatctagtgaacacagtgagttctgtatcacgccagttactctccatcctcctcctggcgtagctgggggaccagcccagttctgtcactttacagcttccagaagggagaaactacgagcacagcatctcagagcaatgccctcaccattaccattggtaaaaaaaaaataataattcagcacttcccaattaaaggcaaagtttgtggtaactgattactgtttattctttatgagctaacaatccttgaaaccataagttacaggtaagataactggtgaactgagttaatgtcattaaaattaaaccaagctataaagactactttggagttaatactatggaaaaaattttcttcaaagtcattatagtgttttgaaactttcaacatttaaatttcaatgacttagaatatatgtacgaaagagatcatctgccatttttctgaaaatgagagtgcagttttcttttcctcgcaactatgaacttcagttacattaggcaaagggcagggattgccttatcttgcagagtaaccactttttgcttatctgaaacaatgatacactttgtacacttagacactgaacaacatggaagaagccaaaagacaatccccttagatggtcccttttgcatgttagttgtctcatgaaggttttcccacctccactcaagtttatctttgttttatgaattgtaaaagtaacatatactcaatggtgaaaaaaatcaagacacataagtatataatatagaaaatgggagtgtcctgccctctctccacctagctgcctttctcatttggcacatacagcactattatttttgttggctgcctacaaagtcaggcatcagtgagcactgaggtatttaatcagtccttaccgtgagatgtctaagccatttccgattgcatgccagtagacagtgcagtgaatatccttctgctcttctctattgtgctatatgatggatgtctaaaggtataatcactgggtcaaaggatatgtacattttaaatattgatattttcctaacttcaaccacaatttgacaagagttgaacagcaaatgtttaaaaataagatcatttttgtattcttaaagcatccatgaatgtgaaagtcattcagtcatgtctgactctttgtgaccccatggactatacagtgcatggaattcctccagccagaatactgcagtgggtagctgttcccttctccaagggatctcccaatccgggaatcaaacccaggtctcctgcattgcaggcatattctgtaccagctgagtcaccagggagcccaaagcatgcatataacaatgcctaattttgttacttgaaaaacaatgtggatgcactatttagaatataattttgtctaaaattttaattcatctccaagtgctacttaggctacatagatatactctgaagactacatttctagaagatacctcccgagtatagtcatttataaagtagttgtcaagaaattttgagagtgataatacttttataaaggatacactgttacaccccaaaaatgctaaggcagttttaaggctcctagtttaaattttcaagttttttactagtaaaacatgtttttgttttaggaacggaacagtacaaaagaagttctt

SEQ ID NO: 37029 - DNA, 839 bp, Bovine  19866881566695
  misc_feature (1)..(1): n is a, c, g, or t
nctttgaattaatgtacagagatatggagaatgcagaaaatattctcacagtaatgaaagaggctggaattgagcctggtccagacacatacctagcactattgaatgcatatgccgagaagggtgatattgaccatgttaaacaggtgtgacttacataaataaacactacttttaaatcactttgtataaactcttgaattttgcgtgatatggaaaagtatagtgtatatctgtttttaatgatatctcttatagatagtcttgaaggagaattcttactgtagttcagtactttgctgctgatgtaacaattattgctgaaacagaatattttctgttttacaaaagaagtcttaaacctttagatggtgtgtgtcctcagtctctcagttgtttctggctctttgtaactccatggactgtagcctgatagggtcctctgtccatgggattttccaggcaagaatactagagcgagttgccatttcctactctaggggatcttcccgacccagggattgaacccatgcctctttgagtctcctgcattggcaggcaggttctttaccactgtaccatatatataaaattttaaaatcttggtattttaatttatttagattcagtttaaaaaattttgcatctcacttgttcttttaatttctggacctttctttagaccctggagaaagtggagaagtctgatctttaccttatggatcgtgatttattgcaaattatcttgagtttcagtaaagctgggtatcctcaatatgtcccagaaattttggaaaaaattacatatgaaagaagatatattccaggtagttttaaag

SEQ ID NO: 37030 - DNA, 1758 bp, Bovine  19866881884558
  misc_feature (1)..(1): n is a, c, g, or t
ntgaagttatatgtgtgaaggaggtagagaaaagattagcttcctaatgaaaatggagacccgaatgatttctttaaaactaaaggaacattgagaaaatcctatttaaaaaaaaaaaaaaaatggataataagaaaaccaaaaagcattcagtgaaaaaaaattctcctgacagactaataaggactttaatatgataatctggtgtttatctacaccttgcttgtacaactgcagttttctcagctattatgcaagggctgcaaaatgaagaatacctaattgcctcctggagaaaagtattactattgaaatgacttaagcaaacacattctgaactaacaaagtattttaaaaataatttgaactgaaaaatgaatgacagctaaatgactgccattaactctcctacaggttcccctggccacagcccattttggttttagagaacactcactaaccttaggccagcttcagctgcactatttcacatagtttggtaatttgaatttttccctctaacctgccaaaatcacctgtcaacttgtagtactactctgttgccaggtgaacttgtaatagagaatgtcctcggcttctgtttctattaacagtaacatgcctcagctgtttgaaataggttaggtaagatggagcaagagataggcatgttggcctcaacaatatgtaggcgggacacaaaatcaacgctgggggagaagttggaaagggcaactgaactcgctcctacctgccattaggattgactatatccatctatgtacactttgctcttaaactatggaggaggtatacatagacggatatagtcaatacattctcatataatttaagaagaacttctttcattctatgagataatgctttttaaaaccataaatagaagtgttgagagcttgaaaggagagaataggaatgttctgaccagaggataaatctggggcacactgacttcttccgagccacgtttctttcagcctttgtgtctcactagagccaggttttcggttccacctaggcagcctgcctcagtgactgcacagagattctgtgcagtgaagaaggccacctcttcaggcactcagcttttccttgggggctggttgttcgcatccaccctccaagctcttacagacctcatggttcctaaatctggtaattctaatttgctggtttggaggcaccaggtcctaattctggtaactctgtcttccagaggtgactatatccatctatgtatacttcctctgtagtttaagagcaaaatgtacgtagacggatatagtcaggactaatggcaggcagtaactctgtcttctggtaactctggtaacttctggttactatcctgtcaaccacctggcttctcattctgcctgccgtcttcagctgctctgacttcagctttactgctagcccgtactgctatatctgggatctccaatgctactgttttgtttccaaggtccaacttcttatctaggatgccaagcttttatttctccacttctggacataatacaggttcagccaaaactaatttgccgaagtgtaaagtgatggcttgcatgtaacaaattcagttccactgaggggaatgccagctccacactgggtattctactattttaaggcacttggctagtctactgtattgtatctgaataatgccacaaataaccatggtctaacctagacttttaacctcttctaagaagaaaccccagctacataatc

SEQ ID NO: 37031 - DNA, 1352 bp, Bovine  19866881974275
  misc_feature (1)..(1): n is a, c, g, or t
ntctatgacccagctctctctgatataatgtgtaaaatgtataaaaactgctctattaacctcagtaataagtcacctggataataataatagttatgatatagtttatacattcatttgttatatgctagggggtttatattggagtaggaaatggcaacccactccagtgttcttgcctggagaatctcagggacggcggagcctggtgggctgccatctatggggtcgcgcagagtcagacacgactgaagtgacttagcaacagcatcagcagcagggggtttatattcataagcattgatccttgaaacagccctgtgagatattatacccattttacagatgaggaaactaaaggacaaggaaattacatgacttatccaaggtcagccagcctgtggattacaaattaagtgtattttaatttaattaatctattaaattaatctatttaatctattaaatctattaatttaattcaattgaaaacaaaaattattgagtaactgctacatggtacacaccatgctaatgtatttttctacaagacagtgtattttacaaaattgggtcacttgaaattcttaaaaacgcataaagcactataaaatccgaatgacatatactatcacacaataatctcactgcaaaaaaaaaaaaaaaggattcctcagttttatagcaaatgctacaaagtcattattaatcccattacaatatacaaacctattagtgttagtcactcagttgtgtctgactctttgcaaccccatggaatgtagcccaccaggctcctctgtccatggaattctccaggcaagaataccagagtgggtagccattctgttctcctgggggatttttctgacccagggattgaacccaggtctcctgccttgcaggcagattctttaccatctgagccaacagggaagcccataaacctgtaaagggaccccatgttgataatgagtgggatcatttgaatttacaatattcttggatcttcaaggaattaatcatctcctacctcatttttcccccaacatttacctttgtcacttttgcagtgtcttcattgtgaaagcacttgcaataaacagtttaaaagctgtaattttctttgtaggtgcagtattaaatcgcaactcaagcaccaaggaattatagtattaccctgaggacaaaaggcattttagatgtcttaaataatatatattaagaggaagcctttttttaaccataaataaagtcatctcattccttttaaaaatattttaaatcatttttggccacactgtgcggcatgtgggatcataggaccccgaccagggatagaacccacaccc

SEQ ID NO: 37032 - DNA, 744 bp, Bovine  19866882063231
  misc_feature (1)..(1): n is a, c, g, or t
ntcctttggggcgaatttggaatttctttccgtctatgtgctggaccctatgtaagctattgtttgactcacataggggcagtcctaaagacctatgcaccacaaggcccccgtaggggcttctagttgatggtggaaggatcaagtgaccgtcttctccacagcagtgaaatatgatgttaaagtgattttttaaaaaatatcaaccataggaaaggaggttaagaggttgtggtgaatcaaaacaaatctaggcctttgaactgacaatcagaaatttatttaatgttgatgaggagatgcagtttgaggagttgtataagaatgatcaggtaagggtgctttgaattgaaacagtttaaggcaaacagaaagcatgcatgttaaaacatcacagttgatactgccctccatgcttataacaaggattgatgtgaatgtatattcaagagtggggccctgatttgtaaataattctcagggagacaagattaccgctaggattaaacacctagtgatagcagaaagcagaattggaatgtcactatatagccacagtctataaggaagcttaagggagaaggatagctaccgtgggaaccagtattccagaagtaaatttaccagacgtaaattctgcttgggagagttaccactagaccagaaagattccagtgtgggtctgtaaagagtgtcaaatctatggttctcagtatggaattattaggatgatttaatggagga

SEQ ID NO: 37033 - DNA, 1852 bp, Bovine  19866880397543
  misc_feature (1)..(1): n is a, c, g, or t
ngggaagccctatgccttagtactgttcttttaaaaggcattgagggaagcctttcaacctggaaagtttattctttagcttataatatgcaaataataccaaataatatgactattttttctttgataatttcctctttgcatgttttctgttccttttggaataaagtcctaaaagtcagactttgaaacttctggattgattttctacatctcatcttttctttcatactttttaccttctactttttaaaaggttttcttctaacctattattgatcttttaaaattttggaaaccatgttcttaatttccaagagttctgtttttgttttttgagtagccttttaaataacatccatttcttgttttatggatacaatacttttgcaaatttctatggaaatactggctcagatggtgaagtattctcctgcaacgcaagagacctgggttcggtccctggatcgagaagattccctggaggagggaatggaaatccactctaatattcttgcctggaaaatcccatgaacagggagtttagcgggctacagtccatgggatcacaaagagttggatgcaaccgagtggttaacattttccctttttttttcattgaaatattagaacttactgaaaattttcttctgttccctgcattacctctgttaaagctttcttaaaaccttcttacttttattttggtctttctctcatttgaagacatgttacattaagtatgaaaacctctgtgcactgaaggctgactggtacctccgtgtacatgcaattgccagattggctataggttaattaaattttgagttaggtattaggatgtggaaactcccaactgtcaaaacataaaggtctcttctctgacatcatacaatttctgtagaaaagcctttctgttttggcctagggagtaacatttcattctgaatggtcacccagcagaggggtgtgtgtttgtgtgttttctgttccttattcagacttttagttaaccctctgttttctgtcatgcatttcgccccttccctctgtatcctctgcatcagcccgctaagcctcggctttatcctgctgcatcagttactattcatcttctgtctacatttcaccttccagagagatgtggaaatctctcatcctccaatggactctgctgctcttggtgtgagtttatattttctttttactcttttaccatcattttggtggagtcttgagaaggagaggagataaatacatgtattcaatttgccacctttaattggactgcttaatttttaaagtgtttgtgttacaaacttccctctcctataaatctggtcttgtgaataatgtaaatttcctaccaagaagattaaagaagtgattctctatatgattatgggagtaaggttcaggtaactttgggtggtttaaggtttcttattgagtaatctggaaagtactaaagatactgctcagggcagtgtgagataaactctcccttcatgacttcaaaagtctggttatttatttacaactggggtaagataaacagtcaagcaactagagagctgctacaaaccacttgtacatttaagtttttatcctgctaccaaaaccatgttctgtccaaatctttgatttccctagcttcccaacgttgggaggagaacaagctgcagtgtcacacaggcaggcccctcctaagtcctactcactcacaaagaatttcccctttgagcttctatgacactggctggttactcacaccgtagattcctcaggattggctgggactgcaaataaaacattgtttgcccataatcaagtcgataagctacaacataaa

SEQ ID NO: 37034 - DNA, 825 bp, Bovine  19866880402345
  misc_feature (1)..(1): n is a, c, g, or t
nttgtggaaactgaatacctgtaacagctggaaacagtctgaaagaagtctgactctattagcagcttaaactttgttctagtagttacataaaaataataaggcaagattttatttgttcccaaatatgattatttggaatcatcaaacatgcacaaaattgtaacattttcattcacaattatcattaccacatagtttgctaaagtgcttggcccaaaataacaattttctagatattattctgagtttaatggaatttaggtgaaataacatttcaggaaaagtttgtcaacttgacaatttgcttttcttatttggcctgggaaaaaaaaattaccctttcaacttcatcagcatctgttcctccacttggacctcagtgctgcttgaagaatgctaaagtgtctcctcttgatttcatgtggcttttcacaaatccagttaacttctggaacccctccattagcccgtccccagtgacggcacagcagggctgcacgcaccagttccggtcactgcagagttgcttcactttgaacatcctggtgatgtcctcggcacttagagctccaggcatatcttgtttgttggctaacaggaccacaggcacatttttaatgtactcattcttcaagatgtgctcaaactctttcctggagtcttcaagtcgctgtgtgtctgtactgtccacaacatacactagcccatcagtgttctcacagtagaggccccacgtggctctcattttctcttgtcctccaacgtcccagaccgtgagcgagacaccttttgccaactcaatcatctccacattgaaaccta

SEQ ID NO: 37035 - DNA, 1512 bp, Bovine  19866880466880
  misc_feature (1)..(1): n is a, c, g, or t
nttgatgcttttgaactgtggtgttggagaagactcttgaaagtcccttggattgcaaggagatacaacccgtccaccctaaaggagatcagccctgggtgttctttggaaggactgatgctaaagctgaaactccaatactttggccacctcatgtgaagagttgactcattggaaaagactctgatgctgggagggattgagggcaggaggagaaggggacgacagaggatgagatggctggatggcatcactgactcgatggacatgagtttgagtgaactccaggagttggtgatggacagggaggcctggcgtgctgcaattcatggggtcgcaaagaatcggacatgactgagcgactgaactgaactgaactgaacaaaaaaaactttttgttaaagctattcataggaaataaaacgaggcttagatgaattgagttaaattgtcttgtatttcttaacctcaagctccaatcagtgtgttgtaagcagtggaaatgcacttaaaaaaaaaaaaggcagagactctggataagtcatgaaagaattcagtcactggatagataagaaaggactggctggcggtgtaaggcaatgaggttaaggtgctaggaaataaagcaagtcgaagtcacctggggtccagagtccaaattcgccccggaaatgagccccagataaatcaactaatcttatctgtgctcatctgtggctcagttgtactagtaaattaacattaaaaaatactggacaaagagatctagatcacctccacttcctttctcgatgaggtaggcccacttggggctccaaagccagatccaaaattgttatggagaagtccaaaccagaacctaggacttctatgttcatcaaaatttggtttaaaaaattcttttcctcctccagttctatattggttcaaaaatacggaaccagttaggagaaaaatattttgttgacaaagtcatccttttctctttaagacttatcaacattcattagcccaatgtttttatgaaaaaaaaattagggataggtaagttttctaggatgatctacactaaaatatacagcctttgcacatagttaaaatctctctccagttagccttaatatttcatatttgtgattttcagtcagggagggacaggcttgacctgtgtactatagtttggaaaatataccacagtgatttgaatatatcaagtcagtatctatccaactctaatgaacactttcatgcgcaagcacgaaaatcagggtctgtgtcagactttatcattccattcctttacagtgccttctcacagttgaataagtcatccacaactgaacagattttatcaaacctaattctctaaggttgtattaggaaaacagtagtagtcatattcaatacactttaaaaaattacacatgctctctcactctgagaataattggtctaagtttacccttcaattatgctgctaacagcaccctttcttaaatatatttctcacac

SEQ ID NO: 37036 - DNA, 1104 bp, Bovine  19866880538293
  misc_feature (1)..(1): n is a, c, g, or t
ncatgtagaatcttcctggaccagggatcaaaccccatgttccctccattggctggcagagtcttagtcactgtgccatcagggaagtcctgaatttatcttcactgagctcactgaagacagaggccataccttatttacaaaacaacatcacggcaattaacagcataggctttgaagtgcctatttccctctaggcagttatgaaccttaaatgaatagatgtgtgaaagtgtttaacacagttcctggcacacacagtattcaaccaatggtaactgtaattaaagatatgtctactttattacttgaatccctgccatgcaacacaggaggatttgtcgccaaacaacaaatcagggctagggtgagagaaaactacagaaggaatccaggagcaagcactgtaccttactgtacaattattgctttactgtacctttattttcctttgtgaccttaaagtttggactccctgaggctgcagtgggggcttgaggcctgcttctaacccaaatgagccttgttggtggtagggtagagggaaagagtgtcttctgttagttccagggcctctctgggacttctgagcctctcgggggaattccagttcaatctccagttctttctcccctcttcccctctccaacaatgtctctggagaatctccaactgatgggaccttccagtgactaacctgtaccttcaacggggtcccctggagttgaggacttaacaccacctcctgcatgaagcacttcttgtttccccaggtcagaatgaggctctcctgttacagcacttagtacttattgccgtatcctatctgctggctttattttgtttgtctcccctgtgaattgccaggtctctgagagcaaagtatggctctggttcctgcttgatcagtacagtgagctgtacatacgttcccaagttataactgttatattgaattctaccaaagccagtcttggaattgcagcctccagctgaacgataagtccagaccttaccctaagctctaagattctctcttaatccccagagctctaagatacaaacttctgctccctataggagaacacagccactgggcaattg

SEQ ID NO: 37037 - DNA, 1202 bp, Bovine  19866880550371
  misc_feature (1)..(1): n is a, c, g, or t
naatgctttactctcagggatagaggtgaagtacaaaccaaaacaatagcttattcatagctgatatttggagatatttcttaagtccagaaaggtcagagggaaatccagcaaatgtcaacactgtttgtcaggtgggaagactcacagtgtctcctgaggaatttaatttatattaatgaggagtgagacctgccttgggctctctcagacatggctgtggtgccaatttaaatgatctaacttcacgaaaaggattcctaacaaattattcagcgaaacagcctcacatgagattgctttttaatcctgaggcctcagttactctgacctctgctgaaccacaggcacaaactgggacagagtctcgagacctggcctcactaaattgatagcttgctgtcatttctctttcttgttgggttatcaggggaccaggctaacccaagtgccctgtgatgtgcatattcagtcgtgtctgactcttggtgaccctgtggactatagcctgccaggctcctttattctcgggattttctaagcaggaatactgaagtgggttgccatttccttctccagtggatcttcctgaccctgggattaaacccatgtcttttgtgtctcctgcattggcagacagattcttttccaacagtgccacctggtaggacagcaaagtgagattctgacaataaagttctaattcagttcagcagtccttcatgaagactcacaattgaggctatgtgggagtaatgacaagagtcactatttatgtgcacttattatctgccagactccctactaactgtcttgtatttccagtttctaatctttacaacagttgtacagaattacagacatggggaagaagactcagcagaatcagatttggtaggtctgtttagttcctccctgtccatcaccaactcctggaattcacccaaactcatgtacatcgagtcggtgatgccatccagccatctcatcctctgtcgtccccttctcctcctgcccccaatccctcccagcatcagagtcttttccaatgagtcaactcttcgcatgaggtggccaaagtattggagtttcagctttaccatcagtccttccaaagaacacccaggatctatctgctttaggatggactggttggatctccttgcagtccaagggactctcaagagtcttctccaacaccg

SEQ ID NO: 37038 - DNA, 1942 bp, Bovine  19866880593621
  misc_feature (1)..(1): n is a, c, g, or t
nttccactacattccattagtccaccagatttaaggcatgagaacacagggtccccacttctcatggaaggactgtgaaattatcctgtaagagcattatgttgctgtttagtcactaagtcatgtctgactctttggcgaccccatgggctgtatgtagacttgccaggctcccctatccataagatttcccaagcaagaatactggagtgggctgccatctccaggggatcttcccaacccagagatcaaactcatgtcccctgcattggcaggtggattctttaccactgagtcacgtgggcttcccaagacaacattatgaatcaattatattttaataaaaagaaagaaaagcagacagtttgctccacctgatataagaacataacacaatctataaagcaatcctgcagggagggaagaaaattttaaaccattaagcctcggagaaggcaatggcaccccactccagtactcttgcttggagaatcccagggacggggaagcctgttgggctgccgtcaatggggtcgcacagagttggacacgactgaagtgacttagcagcaagcctatagagtcaactgtgaacttgcagaaaatacaaagagaatagaagaacatgttaaactatactataggaatgcaatcagtaaaatccagactgggaaattacaggactaacaatcctttgagacatacctaatcatcccacatcaatttaaaagctatccaggaagattcaacattctacagtctagtcagattaatagggtagaattatcggtattcttagtcttgtttaaatggttgaggtacttagttaaacaaacaagtatttctacaggattccttgtctaatcttaacctctttgtatttcagttttaacacagtttccttttattttgcccttagcagagatgaagaacaactgatcctcaaaggctaaaatcaaaacacttcatgcgtatgaaagcttttatgataacatatcacctttgtacttttgctcttctggtataaatcagatgtgtcccttcaacctctttctgttttggttttttagaccccattgataaatacttcttgattctttcaaactgccttctcccactcaagctcaaatccaaaaaagaataagaacagtgtcaattataagaaaacagtttagagaagtataacagcagatgttgaaactgaagccttaatatttacatatatttttaaatatatatatttaaagctgaggtaaaatgggatagaatttttaaagcatcccagaagagatctttggatttcaaaccaattactcttaagttacctatttaaatttccagctctggattcaatcaaagggtcatgctatttaatttctgagaaattacaaagatgtgctcaacacatgagtaggcaagacccactcatatactgagatttaaaaataactactctttaacatacctgccttcactttttttttattattattattattattattattactacaagatttgccaagaactaaaaccatgctacaacacttgtttaaatgaaatattacaaatataaatttaaataatctctattattctgtttttataaactgagtgtaaatgcctgtcttatgtgggaggacctcaggaagtctaattatcagcttcagaccacaaattataaccttaagcctttagattcaatggctataaagctaccattacctgcctaaacatggaaatgacacaaaaatgtcacagttcatgaattactgtgaagacacagcagtgttctgtatgtgtccaccaccatgtctgtctgtattgtggaccttaggccactatgacatcatcagctaatgatttgttagtagttactatggcctgtgccagagcatgtggcttttaattattataatggcatgattttttttttaatgta

SEQ ID NO: 37039 - DNA, 1540 bp, Bovine  19866880723826
  misc_feature (1)..(1): n is a, c, g, or t
nttttaaaacacaggtcagctttggcagattattataggagccacactgttgttcacatgcactgaaatttttttaagtgattgtgactaacatactgtcattttatgtcttataacagttttagtcaacacagtatttgttatactgcttgaaaatgcacccccaagtccacttgatgaatatactaaaaaccaccaaactgtgtatactttaacgggggggggagttttatggtatgtgaattatatctcaatttaaaagaaaactaaataaatctcaagaaataaaatagtagccaaaaatgaggaatgacattctgaaatgcatgaacaatattttagcagagctcttagctaggcccagtaagttaaacaagacgcacacagcaaggctaacatgctggtgatttcagagttaatgtgtttctgtactttgatttcaaaaagaaaataaagaaagagcctcagactcaacccctgaatttttattcttcttctgagaagcttccatgtgaaaaattactattggttttctaaatgtgaccagacaaaagcagggtaaacatgctacagtccattacttgcagaactagccagcccgtcagcctaaccatgtggggcaatggcaggagatgaggacatacaagtgcaccctgctttgtacagccttccttcaccacaggatatctttcatgtcccctgaactctattgaatgtggaatgcttttagagaagacatctaagaggtctgtgtggccgagctattttccttttcttttagtacaatggactcctttttggtttcaatggacttttacagtatagacaaataaaagcaaagaatacatcactcatttgcagagggagagctacaagatgactcagtctatccatgtccaaatataacaatacccaggtctgaaatccctttccagaagatgtgctttttaaagcaaaagaaaataaaagcatataataaggtcatccctaaggctagaagtgtcagtcacacctattaagagtttacataaagccatatgtagctttgaatgtcactaaagggaaaaaaaaaattttttttttttctgttaaaaactaaaggataatggccagaagggaacaagagtacagtaatggtaatattctgttaagtgctaactgcatgagtgggttcaatttgtggaaattcattaagctatcaaattatgaggtgtacttttctgaatgtgtgtatgttcataagagtatttttaaaaataaaaaataaagtaaaagggaaattgagttgcttaaaagtaaagagtttatttctaaactgaactaaaacataaaatttaagagtaatgatgagtataatgatgatgactatgatgacatcagctaactcttgttaataataaagctctacaataagagctaaaccctgtgtatatactttaccttgcatttataaataaaatgcatatattcttgcatttataaaggactgcaccatgtgtgacctataaacatgtccatctaaaaccccatacctgcagga

SEQ ID NO: 37040 - DNA, 1522 bp, Bovine  19866880779244
  misc_feature (1)..(1): n is a, c, g, or t
nctatacaagcaaaaataatctacaacttatgacctccttaatattttctttagatattaaaacttgcatctaggacttgctctcagaccatccttagcatatgcaagccacgtgccctgtcagttgttggctggctgacctctgccttggtctgggcaatgcaagcttagtgcccgctccaagagtctctggttaaaatattttcaactatgctgattcatgcccagctgtttgggagctacaaagtagaaacagaagatggccaccaggggccaatttaacagcaacaaatgttattttctctgctgaactaaacaagttggaaacccaagactccagattccaaaagctggcacctaatttcaaagagggcatgtggaaccacacagcccagtccacaggtaaatatatacaggccaattttgatcacagagacaaccagcaaattagggtaggaatgagagcaatgaaagcagctcccttctcgaattttgccccttttgtccagttgcataatcccctcttatgaaacccaagactgtcaggaaaaagacctggcccaagacctactaacagattaaacaggactagaaaaaactgaccaactgcaaaagccaattaattacaaagtgcaaacaaacatggaaagtgcttccttgtgtacaaagggcatggcaacctcagtcatgatgaagatccagcaccccaaggcttgaaggtatgtattttacattcagtatatcacatgatcatcataaacttgtaagagaggaaacagcacccccaatttagagatgataaactgaggctggggaaaacatatccaaaatcacacaagtaagaaagccaagctggggaattccaactgtgtccgtctgggatcaaacttgccctttcatttcatcaggctttatctcccacaagaaaaataacaaaacagagcatagaatagagaacattcaggagttatacagacaggtggtattagtaagcagcagggctccaagctcaggccagactctatcattccatcagagagacagcaagagcaagccagaatgcaaaggccatagttacaaatgacatcatacttggcaacaaccatcttcccaaagtcagttccctacacccagcactgtcaacatgaagctagaaaccaggtacaaagtgtggagagctgggactcagttggcaccatgggattccagggtagggggttgtcacctgccaggaaaggtaacctggaccccatccaccaagaggctgaagctgtttaaatactgtctgtcttggctctgctgctgctgctgctaagtcgcttcagtcatgtccgactctgtgcgaccccatagacggcagcccaccaggcttccccgtccctgtcttggctctaaggtagttcaaaaactaaagttgagccttcaggggagaaactcaatgtggagagggaaagggcaggagttttaagacaggactgacaattttttaacctcaggaccagggcaaatacaatcaactttc

SEQ ID NO: 37041 - DNA, 1645 bp, Bovine  19866880811506
  misc_feature (1)..(1): n is a, c, g, or t
nctgatgattgatctatccaaattcatagcaggagcacaaataaggatttgttgagataaattactgtttggcagggagattacataaggcaatgaatttgcctttgggtgacagagtatgtcgggggaaaaaaataaaaacaataacaatgttttaaaatactatttatgttacatattaagtccaacttcttgtgaagtgttaaacacacaaggtaagcttcagagcctacacactcactgttctctgtttcctgggaaaacaaagtgtgtgtaacctgacctcatttatactgtgtgggtggcttgggtttgtttttgtttttttccattttccctttcactagtgagtgctatctattattcactaaggctccagacttttctgcaagatactctttattcctgattaactattcatatagtagaagatggtttgcttggccttttacaactttttccagtccattatcaatatcaaatcatgttccaatagccacatcactctagcaaataatactacatatgaaggaaacagtatagtgaggagatagtatcgaactattttaaaactacagtgatgatacatatatatacattaaatatcctaaaatgaatttgctacaagttacccttagtagaatgaaaatatggtaagttcaaagatgctaaatccattattaaggtagttgctaggcaacagctgaatccaacttatttaagtactagttcatgtaaattatatattctttctagatacttctaacctaaagtaagtataagattctcttccaaatcccttttttggtacttaaaaaacttaactgctagagccatctttacctgtaaggttatttctgtggtcctatacctgatgcccatgaacgaagttctaaaattaagcatctctacatttctcctgggaaactgcaaaagacatcgcagaacactaggagtattcaagagtgaaaaaggaaatacggtagagaaatgctcaagtgaacactgcaataaaatatgcgtattgttttgtgtaataaaatacgtaaaagtttgtttcacaagtaaaaagcagagacattcaatatggggggggaaggctctagtgattccagtcaacctcagaatcttgacaactccactatttaatttctatacatagtatataataaataccattcttttcctgaggattactaaaaagtgtgctctacaaccaaatcaccataatgaaatatctgtacttgaagatatgcagacaagaatttggcagtcatttggtcctgaaggctttggataaaagctgctctgagagatgaggcctcttaaagagttcttaaagagttcatgcagccttctttgatgataaacagacccagctttggaagtatgtgtatttccatagtttctcaaaagttccactggaccatgaacaaaccaaagtaatttttaagaaatattaaaggtttggggtttttttaagcaatcactactttgaaagaaaaagttttaaaccttcccagaaacctaaaagcagtacgcaattatagaacacaactcaacttccacaactgcactcccactgtatatttaaaacttaagtaaaaattggaatatgatcaataatctataatgactttgtata

SEQ ID NO: 37042 - DNA, 824 bp, Bovine  19866880815542
  misc_feature (1)..(1): n is a, c, g, or t
nttattgggggatggacaacaggggataatcttggtccatcagtttgacataggaaactctataaataaaaacaatttcatccactttcaccttcatattttgacatctggaggctggttttgaaatcaggaaaacaacagataagactgaagaggaaatgctatttggttcatgtcctagggatattatttaacaaaagggctgagtgagctatttcaatagctcagcaagagagaaggcaaatgcactatatgctacttacgatgcttttagaaacatcccaggaggtatccattttggcaacttatacacattcctttaggcattttcctgtattggttccctgacttctatatagagaaaagttttatccattgcaagaaagagaggcagcaagaagtatatgcattttgatgatgacaagaaagcaagtgcaatatattttgagatacatggtcaggaagtgaagatatcttgcttctgtgaattactgaacacagccttctttgatctgctatgtgatattttacatgcattgattatatatatacatattttatagctttatacactatatattatattattacatagttttacttgaaaactattaagaaaaaattatgaggatctttttcaaaataccaaaaacttagattaaaaaatatatatagtgatacagcaaaaaaaaatttgatttctactgaaatgactgatatttattatcctactataaataaatttcaggaatctaattgtaatctcccctgtttccagaaatgaagatatatgggtaaaaaacctaaattctatttctaatctc

SEQ ID NO: 37043 - DNA, 877 bp, Bovine  19866881049489
  misc_feature (1)..(1): n is a, c, g, or t
nctgtttcttgcattttctacttattcctgtccaacaagtttcactatttatttatcttctaccgaataaagtccaaattcctttgtctggaattcaaacactttctgatttgaattcaaacctacctttccaactttatttcccattattcttcattactcccctattagatccaaacaagtctactcactgttgaaaaggcaggcacattccagtccagccacctttagtaatgccatcatccctcctacccttgttctcctggctgaatccttcctatttccaaggatcaactcaaggcccagctcttgtatgagtcgtcaccagccacaccaggatgcataaaaagtctctctccctttgaagtcctgaattaggttatgtaatattcaaaaccactcatttggggctcaatataaattctctcatactaatatttcttcatcttatttctatgtcttaagtcctcaaataaatcttaagttccccaagggaacagatttcagtcttctttatcactatattttatattacctctaaccagtaacaaattaatattacatgagcttcagctaataggattttaaagcattcatgccaggatgcttaagcaagttactatttgtaagccaaacaggggagtatatatcatcagaaaatttcattatttcattgttttcacatgtcataatataggacaacaatttctttaaataaaactatagaagtcccaatgtgttctcaagccaggaaaggataactactaaagacaaaacaatttccacctgctgaaaaaagcagcaataagtttaatcacagcaaggtagtttctctgcttgactccacataaaatatgactgtgctgcaccctgcagt

SEQ ID NO: 37044 - DNA, 1939 bp, Bovine  19866881933498
  misc_feature (1)..(1): n is a, c, g, or t
ncaaaactaataaaatattgtaaagtttaaaaaaaaaagggggtcttttaaatttgcagtattgaaaagatttactatacatttggaaaccagatatactgttcataaagaaattccagacattaagaatctaaacttaaaaagcagaatgataaaaaaaaaaaaaaaatcagaccatcgttaggatgaggtagttattcacactatttgccaagctgatctggtttgctcccttgctgggtgcacagtgggacagcacttcctgcctccctgtggtcacatgaggccatggaactcattttggctcatgaattgtgagcagaagtggaaggggtgcctgtggcccagaacatttaattggctatgtaagatccctcagatagtgaccggcagtgttcatggcagtggctgctccataagcctgcatcccagaatgaggaaagaaatcttgcatcttgtttatttgttgatgtatttatctccccgctcccaccttgcattgggcttcccttgtagctcaactggtaaagaatctgcctgcaatgcaggagacctgggttcgatccctggatcagcagacctgggtttgatctctgggttgggaagatcccctggagaagggataggctacccactccaatattctggcctggagaattccagggactgtgtatagtccatggactgtgtatagttgcaaagagttggaaacgactgagcaactttcactttcacccaccttgcattagaatgtaaacgtgagagcagagatgctgtgtcaatcatcactgtacctccaatgcttaaaatagtaactgactcataattaaatgttatacaaatatttgttactggttgatttcgactgaggccgaatttaatttacagattactttaggagtgaactggcatttttacagtgttatatctctttctttatttggctgattttttaaagaccagcagtaaagatttaatattttcttcatgcaggccttgtgtacatattaccgagtttactgctcaatattttacagtttttattgctattgagaatggggtttttctcagttactgctggctatgaggaatgctactatctttgtatgttcatcttgtgtcttggccagaatgtcttcgtttgtcattcagttctctgagttttgtaggtatgcagtcacattgtctacaaatttccttgcctttccccgtgacttgggattcttgggtgactggcttataatttgggggctccctgaacattatttaaattagtatttcatgctatttctatactacaaatgtacttatttggtgttctggatcacagctgagaggttatgcccctcctctttccttatgaaactgatgtttgttattcataggctgtgtcagatactggattattgtgagcctgtaacaaggattctggagaccatgtatatgtgggtgggagcgaacatcatcagtaaacatttgaggaaaagcaagaagctaataaccccagctggggacaagcttggtcaggtcatcgaactggttgatgttggccagctagctccaacacatgatctgaggaatggaggcagttctccaacctgaaatagaaactctggagggtagctgacatagagaaggtatcaagattctgttcagggccctttttgcccaaacctctagggaagcaactctccataggaggaatattttgatggaaaagaaagctgtggctttcaagaaaggaagccccccacaagctgaactctccaagaaaggtccaagtcttggagaatattggattaccatttgtctctaatatgcatgatgcactgggcctcagactcagcacgatgcagcagccctggggaaggttcccttgacctgagacagagtcacagattcttccactaggcttcttagtagccctctgtgcccgctt

SEQ ID NO: 37045 - DNA, 864 bp, Bovine  19866880452466
  misc_feature (1)..(1): n is a, c, g, or t
nttgaagagttgtgggactgacccgtgtgagaccagggtctgccggttgggcttgtttaatccacaggccagttttgccagaacctggagcatgggaagcataaaaacctcattactgtcaatacccacacacggtgaatattaatatacacacatacccacattcacacacaaggcacagcttaagggctgtaactagtggtttccacattaaaaacaaaaacagaaccagaaactcgagacatctccaaacctgggtgtccaaaacatccacagtggaaaacatgacccactatcattatcctcattgttcttcccacatcttccattctgtttttctttagtagtttttcccacccatctgttccttaaggttctcctacttcaagagggtaaagaacaaagaagctacagaagagacttaagaggcatttcttagtgtgtccatatgaaaatgctgaaacaaactcattttgccctaccccacttagagacagacatttcttgattaatggtcagtccatttttcagtcccagtttaatacagattaccatcatttagtatctgtgacaaagactgggctcaaaatcatcatccaatagcaaacatctcatactattaaataagacttcaaaatgaaaaacacccatgagaagtcttttcaaagaataaggtacttcagtggtatcatttcacaaattataattggtaggaaaaaatataaaatcacttcacattcatgggagaaattctctgaaactttctactaggtcatatttagtttaaattactacattgagatttttgtttcctttccctccacctcccaaaactctactgggtaatttggcaactttcctctc

SEQ ID NO: 37046 - DNA, 1561 bp, Bovine  19866880471251
  misc_feature (1)..(1): n is a, c, g, or t
ntctttgtggaaatgcgccatcgttcttataagaagctgagggtcccctccaggcctgtgtcgcaggcccttcgggggacaaattacccacaggttagctccaaagtgcagaacctttcactgaagggggtaaggccagagagggagcaggtacaaagtaaactaagcagctgacaccaacaaggagcaaccagactccgtgagagacctgtccagggcgccagtggtgtggaggcagggggagccctgtgggcaaggagagcagacagctatcaggtcagcctttaatcgttaggcaggtagctttgcattgagctgttcactcctgcagatgttctgagctgtggaatatctcggggtgctggtggtacaagaggttctctctgaagccaagggttcaggtttacctgtgaggtcccaccagtgaccttgacctctgcaatccagagctccattgcaggcactgagagcctgcacacgctcagtgctttgggctgtagcggatggttcatagcctcctctaggcaactgcaggtgttttcagtggacccgcctctgccacgccttggagatgctcaggggctgcccacaggcagtgaagctgatagaagcagtaggagctagtgctcctctctgctggctccctaggaagttgggtggctcctgattgtgcagagcccagtctgcctgccacccctgggtgacccctcttctatatcatgagccacagttcaagggtgctttaaaatctttgcacctgatgtcgggaatattatccctcctaactcagaagatcagcagatggaatgtcctggggctggtcatttgttccctatggctaagaccacgaagttcctctatatttgttctcttcttttatggtgataaaagttttacttcagaacaacactctccaccaaggactacattctcccatttcctttgctggtagatgtggctggtgactgggtcctagccaatggaatggaaaggaaagagtgctccctttcctttttccctttccccctggctggaatgcagatgcaatagcaggagctggagcaggcattttggaccatatgatgaaggctgcccattgaggaagacagagcaacaagattgaaggaagctggatacctatagcaattaagtcaccacatcctctgtggactatatacttggatgtacatatgtgggagagatcaaattcaaccctgttaagtctctatatttcggagtttctgtgttccaacagctaaactatatatactcattattgttgtctctcaatgaaatggcatcatctggggctacatggttatgtctggtcactggagcggctggggctccattctttggcagactactacttttatggtctccaacagatcatccctcccactatttatacccttgtgtggtctctgctcacagtgactctggatctagccatgtgacttgttttggccaatggcacattagcaagagtgatgcaaggagacactgggtagtacctacataacaggacttgtactatgagaattctggctctcgggacacc

SEQ ID NO: 37047 - DNA, 1427 bp, Bovine  19866880478509
  misc_feature (1)..(1): n is a, c, g, or t
nggaatggctacccactccagtattctggcctgggaaattccatggaaggaggagcccggtgggctacagtctatgaggttgcaaagagtcagaccccactgaataactaacactttcactctctgttcacctcaactctcaacaccagttccatggaccttgtacccctcatctagccctcagtccctgtgctcccactcctttccttctacaagtaagctttcactggccccacagccctcaagctgttgaagcacaggcacatgggcggcccctcctcagtcctctgggagggctcaggtggatcctgccccgacccctgccagagagaagctcagagtctggggagcaggtcggcaccgggcaggtgccctgctctgctcctgtggctcctgcccaggagggcgtggcccctgagctcaggtctataaataaggtatctgggaggaacggctttaatttgcactttacctattggtgtttactttgctatttccaatatggcaatttaattctgtagggcgcctggctgggggtgggggggcacccgggccatgcggttccctgaccgcaccaggactgactccgggtccctgtgcagctccggacacagatgccgccgggacagccaaggtctgtggaggccccgggtgtgggcacggagtggagggccttgtcgggacatcgagacccctctgtacctagacgcccggtcctctgggctctgtccagctcctcctcgggacagcactgtcagtgtttctcttccctcctgcccaccttccacatctcttcccgccttaggtcaaggcctccctctctgctgagatgaccaccctcttgccacccattggggagctctctctagagttctctcatagatatgcggctaattaagggacagtctgagatttttctctgcctcgatagtttgctgttttaaatttttgtattttgtttctccgatgagactgtgggctccctgagggcagggctgtgtctcccccagacttgggctccttgaaggcagggactgtgcttttccctcagattaggggtcttaaaggccttggtcctgctgtactccctctggtcagggttgtccaccagggccacccagagcacccttcccctcactggccggaaggaccacactaagacttttgcgggccacgggcacctttgcctctgtgggccctttcctccatagacttcactggcacaaagacaacttcactggaataaagacaaacctgtttgtattatatatgaaaaccttttctttggcttaaaagaccatctttttccttttaaccttaaaataaaataaacatattcgtgggccctaagcaattatattccaagttcttaaaaaaaaaaagaaacaagaaccaaaactgtaattgaaaaataaatttcttaaata

SEQ ID NO: 37048 - DNA, 1467 bp, Bovine  19866880498101
  misc_feature (1)..(1): n is a, c, g, or t
ntggcctctattgcatctcttcttgaggtcagatattctgcagctttggagagttaattccatgttgtgagaagctgatgtgatcctcttagaatgtattaaatcctagtgttgtaaaaaagctttcctgctaaaagcaagtgtgtgggaggccattaatgctgggtggacaaatgagaagtaatggggaagagtgggctcttggagtgcatggttcaggcaaggatggacaggcagacccatatttgtaaagggcctgaaatgccagtctcgagtcacatgatctgtccagagcaatgagcttatagctgcagaggctgatgggatgggaggagtccgctggaaagctctcggcagagtgagagctctgggagagtgaattgaggccctggcacagtaagggtagtgcctcctctaatctacctcatctttcttcctggccgcaggacaatccacgggctgatctacaatgccctgaagctgtttatggagatgaatcagaagctgtttgatgactgtacgcaacagtacaaggctgagaagcagaagtgagtctctcctggggggtgtttctctcccacaccagcccccgggcttctctctcaagcccatccaaatcttgtctttgcttcctccctaggggcaggtttcgcatgaaggagagagaagagatgtggcaaaagattgaggagttggcccgacttaatccccaggtgagctggttctgccatcaccctgcactgagaggtccccgctgggggtgggggagggacgtttgaggagggcagggaagcggacagggccacacaccacccgggtggccacttgtctgcctcctttcctcccagtatcccatgttccgagcgcctccccctctgcctcccgtgtactcgatggagaccgagacccccacggcagaggacatccagcttctgaagaggacggtggagacagaggccgtgcaggtaggagcggggagcacaaagacaagccggccctgggagggagaggaggctggagccgcagagccggggactaaggggaggaagacggtggggttactcggggtactcgggtcgtcatccccccaccctctgcacacgcacacacagatgctgaaggacatcaagaaggagaaagtgctgctccggcggaagtccgagctgccccaggacgtgtacaccatcaaggcgctggaggcgcacaagcgggcggaagagttcttaactgccagccaggaggccctctgacctcctcacctcccacagcagggcaacggcccactcggccctgggacactgccccagccctcctccaccctctgctccccactgttgacttggggcaaggcagggcctctctgctctggggagggggggacgcggccctggaagcaggggcacccagagagtggcccctcttctcccccaaaggtgttcatgcctccctgcgcctagtacagacagg

SEQ ID NO: 37049 - DNA, 1878 bp, Bovine  19866880499676
  misc_feature (1)..(1): n is a, c, g, or t
natcgcacctgcgtctcttatgtctcccgcactggcaggcagcaatgagccacgggtgtcacttctctccctttaccatgtgtgatattagcagagaagcacccacgttttcagacgcctgatccaatcaatgtctttccatcattctgattggtcacagcggactacagataccagcaaagtgaatcctctctcctctccgaagccctcccactcccccatttgcttctgcgtggtgaactcaccttcctaaacactctggaacgttcttccatctattgcacccttgaccaagtgttgtctctcatacttcatctgattttcatcatcttgtctccttcctgcctcctacccaacctgagacacctccatagaagataccctgaaactgaattgagcccatcctaagtccctcagcattaacaccaacctcttttttatcaccacacctccactttatcttgtttttaatatttatttatttggatgcgccaggtcttagctgcgggatctttagttgtggcattcaaactcttagttgcagcatgtgggatctagttccctaaccagggcccccagcatcgggagtgcagagtcatagccactggaccaccaccagggaagtccccccacctccactttagactgacaaattctccttgtggctatgcactggttctcaaacttgagtttaggtaagaatctcctggaaagcttttaaaatgcaatttccttttgagacttgagctatgtgactggactggtcattcaaaaaacacaatgtaggggacatccctgttccctgaaggcccagtggttaagaccctgtgcttccaatgcaggggggcatgggttcgatccctagtcagggaattaggatcccatatgttgctcagtgtggccaaaagatttttttttttaatgtaatctaacaaatgagaaagtaaactacatgttctggctcccccaccacaacgattctgatgggcaaacctgcagtaaggctcaggcaactcaaattttaagcagtacctctggttacctgccctcccactatattccccaatggactctggactgcatttttgagaaacacacacaaatgcccatcttcttaacatgtgattcccaatccctacccccatgactcaggacccagttatcataagttacctacacacctaagccagcaggtgcatgtccggtgcattagggtctaagcttctggcaggagacctggagtctgcaggttgcagacctgggacctgggagactgtgtcccactcacctgtgcgttcactcggagttaatgcacacagggacacgagagctcggggactccaaaccgagctgcaagaggggagaaggcacccgcataggttagccctttggacagggcctcctccctgccccacagctgccccacagtgtagcattactgggagggaaatggcctgaactccgagaagaaaagaggatggaaaaagtgacatactacagagggcttcctcaaaccactgattagctggagcagcgcctgcgccagccagctccaccaaagtgccagggggctcggcagggctgactgagcattgagctgtgaactcagagaagcccaaggcaggacctgcccccagccaccatggcagaagccccacaccctcgggacaaaggaccagacagctggggggcagggagtggcacaggactcaaggagggagagagacaaaccggcagcttgtgggcgaggccagcgcctgcgcccgcggccccaccacgtggctccgccagggccacagagcagagaggtatgtactgaggttagggagagctgagggaggctcagggacacaggccaaggatacccaacccggttta

SEQ ID NO: 37050 - DNA, 1967 bp, Bovine  19866880533375
  misc_feature (1)..(1): n is a, c, g, or t
nttgcggttgctgaggtctcagcctgtttctgggctccttcccccgctggaggattttgctgccttgcaggcttctagcctgatgtgatagttgatgcagaaggctggctgtcttcggggaagaaatgctgctgagttgatttctcgtttcatgaaggagctccatgcttacctttcttttcatgtcctctgtcccaggggaccctggggcctcccacagccgcaggtaaagtgtgtgggcattcctgattgagaggaattcctgcagtagaagtgatatcactttatttgcaaagatggaccctaggtcttgctgggctttagttctgggtccctgggggtgttcccccttcctaggctgagacacttgttaggaacaccagggtggcacccaggaggtgtggaccctgccccacatttgcctcagattgctcgtgtgaccttgggcacatcccacctacctctctggcctcaacttgacaagcccttgctggaccttgctgtggtgacctttgaggccagcacagccttgccatctaccactccttgtgcttctgccacacagtgtagaattgtcctcctcgcctttggtgttgggagagtgctttcatccgagggttgcgttttattcaggagtgtctagtgcgtgggcaccgatgcgtctagactcgatcgactggaattagggtgtaattgcctgggtgccaaagggaatgagaggtttggggagagagttcgtatgagaaaaaaaaaaagtgagagttcttaatctgagtatgggaaggcagcagtccttacctggttgtctcagtatttgagggacaagtgtccgggtggggggctgcttttcttttgcacagaaggggagggctactggagggaggcttggagctgggaagagggttggggtgtgctttgggagcgcccccttgtgtgataaccaacggctgtacccagttctgcagtttacagaatgctttcacccacactgacagtccatcctatcaagaaggctcagagccaggatgagggcgattgggtttttgtttgtttctcaaagagtggaggtgggaggcatttgacaagtaaagaaactgaggcacaaaatgtgatcccctcaggacttcagagctgataagtaatagagctgttcccaggctctcatatgtccttgtgtgaacctcatcactggaagctatgaaatgctgcacatgtgccttgaaaccaggtaaatgttggggagtggattttgcagccaggataactctctgggtgggtttagaggcagtcccgcatagaatcagagggagtgtgtcaataacggaaacctagttctgggtacctgggggtgttcccccctcctaggcggagacacttgttaggaacaccagggtggcacctgccccacatttgcctcagattgctcgtgtgaccttgggcacatcccacttacctctctggcctcaacttgagaagcccttaccgaacagtgagagttgttgggccacagcattcaggattgctggtctccacccccaactcccgcccccttttggattacaaaacagccaggttaaagtgttcttttttaaaaaaaaattatttagttttggctgcgctaggtctttgttgctgcatgcaggttttctccagttacagagatccgggactactctctagtttcagtgcacaggcttctcatcgcaatgacttctctcgtggtggagcctgagctccggggagcgcaggcttcaatagttgcagtgtgtgggctcggtagttgtggctctaggactccagagcacaggctcagtactcatggtgcatgggcttagttgccccatggcttgtgggattttcctggaccagggattgaacctgtgtccctggcattgcaaggcggattcttaaccactggaccaccagggaagccccaggtaaagttttcagggcccattcagagattt

SEQ ID NO: 37051 - DNA, 1313 bp, Bovine  19866880600226
  misc_feature (1)..(1): n is a, c, g, or t
ngggatcttccagacccagggattgaacccaggtctcccgcattgcaggtagacgctttaatctctgagccaccagggaagtaggttaaaatgattacccctcaaacaagtgatccaattactttaatctaattaatgtagttaatacagtatatgctgttatccagataattctataattccctttaacactataagagatgggtgataggtgacatcaagtatagaaaagcaagatctacttaatcagattacttagcaaacagggacgcagctcagccatcatgaatttctggcggatctgccataaactgaaaaggtcattaccataaatcctaatgataattatctctccagattttccgattcaaggcttctatctattcaaggcctccctgtaattgttatcctgcttgtggtttactgtactgtcaggcttatcttattatgtaaaaatgaacactaaaccctgcagggcttaagagtcagagagacctacctggtcccaactctgctatttcttaactatttgaccttgaatacgttattcaccttctctgaatctcagtttcctcttctgtgagatgcacattcacatattttcctatctccctaccagctttaaaaagatcaaaattattatgcaaccagcgtgggaaacaagcacttacttctttgtctagcgttcgaaacatctggttgatcacactttccaaaaaaaaggtcatggcttcccactgcacaaatgatggtgagaatatggagcagaggctgctttctccagttccagctgtgggagaagaggattttaaagacacatacacacacacacacacacaagcactataggatcacagaagacatcgagccagtggggcctcagaaaccactaggtaatttcacagttgaaggaacaggataatctaaccctgctcagccagggaaaagaaaacgatgaaaagcagaaaggggtccttatcctgcttccacctctaaaaataagctatctagatttacctctgtgagccttgtctgcaaaaccagtttgactactgaatgagaatatacacataatcatcaaaaccagtgcctggccaattagacaattgagaaatattaatttccccttccttcccctttataatctgtccatgggaatctaaataaagatatctaaaccataaggaatccctccagcaaggaactgataattaagatacaaaactctgcttcacatccagcagtctcatgacaactacaagggctgtgtgcagataatggtgccccctccaaattcacaagtatcatcgaag

SEQ ID NO: 37052 - DNA, 1673 bp, Bovine  19866880635135
  misc_feature (1)..(1): n is a, c, g, or t
nactgatttccttaggatggactggtttgatccccttcttgtccaagggactctcaagagtcttttccaacaccacagttcaaaagcatcaattcttcggcactcagctttcttcaaagtccaactctcacatccatacatgaccactggaaaaaccatagctttgactagacagacctttgtgggcaaagtggtatctctgcttttttatacgttgtctaggtttgtcatagtttttcttccaaggagcaagcgtcttttaatttcatggctgcaaaagggctcttttgagtagatacttttgtaaaagtgaaaactcaccccttagaggttatctgtaggaaatttaggttgaggtgaggtgtgtgtgtgtgttttatttgtttgttttataattagggtcttcatgttcagtacaaccttaactcagaactgtttttatttctgtggtgaaagaatgatcagaaatggtagagaaatgagaaaatggattaggttaatccaggaagatttcctgggagaaaagaccatgagttccaggataaaatgggatgaaaataaggtatacaaggcaggaaagggaattgattccctccgtgagtgagttgctggaggtctctctgggccctaagtcagctgtgatgtgccttcttttctctttcccccctttgtccccaggtatccagattacactccacgctgcagtcccggctggcgcctccgactcacagcctctgtcctgctcgccgtctttccactgctcgacctgcttccagtcattttgccaccaggggcaggcccagggcccacagggctcgaggtgctggcagggggcgtggcagctatggcctggatcagccacagcctggccctgtgggtgttggttcataccccatatggccactcccgggggcccctggccttggctctggctgccttcctcccagccccggccctggtgctgaccctgctgtggcactgccagcgaggcacactcctgcctccacttctcgcagggcccctctcccgcctgtgtctcctcatcctgcagctggctgctctcttggcctatggactgggctgggcagtccctgggcagccacgggaaccctgggcccatgagcccctcctctctgagggccaggagcccgaggtggctgaagatggggagagctggctgtcccgcttttcctacgcctggctggcaccgttgctggcccgcggggcccggggagagctccggcagccccaggacacttgccgcctcccccacaggctgcacccaacctacctagcccgtgtcttccaggcgcaatggcaggagggggcccggctgtggaggaccctgcatggggcctttgggcactgctacctggctcttgggctgctcaagttggtggggaccatgctggggttctcagggcccttgttgctgtccctcctggtgggcttcctggaggaggggcgagagccactaagccacggcctgctatatgccctggggcttaccggaggagctgttctgggagctgtgctgcagaatcagtatgggtatgaggttcggaaggtggctcttcaggcacggggtgctgtgctgaacatcctgtaccgaaaggctttacaactggggcccagacgccctcctgccggggaggtcctgaacttactaggca

SEQ ID NO: 37053 - DNA, 1408 bp, Bovine  19866880635436
  misc_feature (1)..(1): n is a, c, g, or t
ncggcagctgcccgcctggcaatgaatcgtcccaaagtttgctgccttgtctcaataacttcgcttctgaaatgggcttgtgacaaagggtacattgatgtcctccatgggatgaggagggctgctcacatgtgcaggggaagcccctttggggaggcggcgggaagcggcagcatggacccagccacggagcaacattctccccggaatcggtctggtgggtgtggctggtctgaaagggctcagacccgggtgtatgaggtgatggaagacctccttgtttggctgagctggggtgggggccccggagggggtggggctgagctggtgcaggcagagcacttggctgtttggttgaggttgtgagatgcagctgtcctttgctggacactcccctctgctggggtcttcacagtcaagaggctccccagacctcctcaagaccccatcccaggaatctgtacttttagaggttggggtctccatgctgcctgtcgggggcccctgtggcttctggcaagctgagcggcctagggtggaggcccctggagctcatggttctggatttgattaggattttgtttgttcaaaagttactaggaacagtcttttttgttgattcaatttaatatgcatacgcatgtgcctatttggttttctccaccagaaatctggctctgcagagctgcgttggtttgtggccccacctttaggcctgaggtgatccgtgtatttaatcagtggattttttatgagtgtggggtgagccaggtagtggtcacacatctgtaggcccacgggctgccctcactagatggcctgcctgtgcccagccctctgaatgtgagagaaggattggacaagaaatagccctgaggcggcccttgttgagcccaacagggacaaactaatcatggcttgatggggtgtctgccctgggtcttcagccacgccatattacgggacatcctccaaatgtctgctcactgccaggcacaggatccacagaggtttggcccatgagccctacaggcttgcatcatcaaaatatgtgtgtgtacgtgtggtgtatgtatgagcatctgtatgtgtgtgcatgccttaccaaaatgggtattaataatcctgactctgccacttacctgtatgaagtcaacaatagtaactctatggcaactgacttattctccgcatacagtacctttgtttcctcatctgtgaaatggggacaatggggataactacttcattgggttgttgtgaggttaatatggcaaaacccttaagacaatattttgcacacagtaggcactggcctggagaatcccggagatgggggagcctggtgggctgccgtctatggggtcacacagagtcggacagactgaagcgacttagcagcagcagc

SEQ ID NO: 37054 - DNA, 1035 bp, Bovine  19866880653031
  misc_feature (1)..(1): n is a, c, g, or t
naggtgtgggatggggggagtggtaggaaggaggctcaagacggaggagatatatgtatacctatagctgattcatgttgtcatacagcagacaccaacacgacattgtaaagcaagtatcctgcaattcaaaataaataaaaataaaggccagctctcaattaaagtcagtattcttattcttacagggtctggtgcgggatgccaaccctgccttcatcacctggcgcctgttatctgcctaggcaggatggctgtcccctctgcacagatggagagactgagccctgaaggggaaaagtgacctcttcaagatcgcacagctggggatggcagaacccaggtcctcttggggcccttcccaggccatcagctgtctcttgatctgtaaccactagagccctcccccagcctgacccctcaccaaagcgataatgagtcccgctggtcaaccccagcaagggaaggtgagggccctgacaggtgtgcgtgcagcaggagcctggctgagcctgtccccagggcctgccgcttggctggtgcctccagccagcccactcaggacagtggctatttttagcaagtgctgtttgcccggtggtgggaatatttgcgaagggtcagtccagtggcatcccttggctttcaactagaaacagctctcggatgtacagtcgattggctgagagcatgaggctttggcgagccttttccctttacagaatgtggctgtttctccttcctgtccaccctgttgccaagcccacagcttctgttcctggctccctgccgccaagatggtgacagccttcccaggtctgatgggatgagcaaattgggcaaagtgtggtttcctggccctggccgggcatctcccctccgctaataaacctgtggctaaccagccacggcctcgtgctccgtgggttagagcatcacgccagcgaggccaaggtcaggctctacgcgggccagctggcttcgcgggggggtgcgttctgccccacgcctcagcctgcagccctcgcgggtgca

SEQ ID NO: 37055 - DNA, 1134 bp, Bovine  19866880670041
  misc_feature (1)..(1): n is a, c, g, or t
nataattgttttacagaattttgctattttctgtcaaccctccaaccatgaatgccatgtttaactggaggatgaactccagaatttattagaccaaataatccttggtgggttttttgttttttttttttgctgaataattgccaagcacaggctctctagttgccctgtggcatatgggaatcttagtttcctaagcaggaatcaagctctcctcctgtgcgttagaatgtggattctaactactggaccactagggaagtccccagtcctcagtcttgtcattattttcagcacagcaaaagcttactacctgccatgccaccacatgagtattttaggattttagttgctaacttctggatgcttcagtacactgtctttgctgttctgagtgcggaagaattataattttgtacaaagaatctgttttcctttttgacacattttcctgtgataaaacccagggtcttgagtgtggcggttcactgaactggagttccagtcctgtgagtctgctctgtcccagcatggttcttcaaagggcattagctttcgtctatcttgcagaccttctctgtcaccattctttgtcctcacaggcagaggacgtggtgaagaagaaacctcgggccactgctgaggtgagcagcaggaaatgccagcaaactctggcagaactggagagtgtcctcagccacctggagggactctttgcccggacactagtccctcgagtgctgatcctccttgggggcaatgccctcagccccaaggagttctatgagcttgacttgtcccgattagcccccaacagcatggacccgagcctgagcacagcagcttgtttgcgccgcctcttccgagccattttcctggctgatgccttcagtgagctgcaggtccctccactcatgggcaccatcgtcatggcacagggtcaccgcgactgtggagaagattggtttcgacccaagctcaactacagagtgcccagccggggccacaagctgactgtgaccttgtcctgtggccgacccgccatcccagctacaacctgggaggattacatttggttccaggccccattgacactgaaaggcttccacgaggaatggaatgctcatcgtgcac

SEQ ID NO: 37056 - DNA, 1603 bp, Bovine  19866880678430
  misc_feature (1)..(1): n is a, c, g, or t
ncggtcacccttgaggggcagagaaggactgagaggcactgggtaaggctgtttattgatgtaggtgctgattacatggaggtgtccactttgtcaaaattcatctgcctgcactcacaattcgtgtccttttcttatgtgtatctgtaccattaacattatacttcaagatcaaatttattacaaaaataaggcgaaacttttaacagctccagaggcacacttctcaagcaatctcgctactttgtaactacagtcaacatttttcaaataccttttgattgacttcgggattttccaaaagcactgaactctctgacaactgtcttgtttccttgcccgaccaggggtgcaccctgttttcaagtctaggttcctaccacagggactctggccacaggcctgagaagtcagtgagtcttctgccgcctgacttcatcaccttcttatttctctaagctatagaagatgcttctggtcttagaaacatatatatggtaacaaacctttccttgactaaatattctactaccctctcaacttgcaagccatacttctttgaaatctcttttctccttttgaaatcagaacaaaatattatctatttccacagacatgtccataatgacaacttgttcagacactccagccctccaatttggtcaacattaacttaaaaccttggattctgttgccagcagagcatccctaagacatgagtaatttggtctgcccaattgcgactgtggtcttacaccacagggtaagaggccaaaacacagcggaacagagctctcacctgaactcagaaacactctaacatgtaaaaaagcaatcacattttgctttggtcagtaagaactgcttctctccagaagctctcttgcgctgaagagactattcttggatcatcaaacatatatcaagtaatcagtaagtctagattttgtgtgtctgggggtgaaaccctaattctacattttaaccaagctctcaggtgactgctgatgctgctggtctgaggactcagctttgagaaataaaaactgaggaccctgccgtggaagaggtgccatgcctgcctttggcatgactggtccagttgagagcatagtcactactaataaatctagatgagctcatgtgaacatctaacccagaaaagcaccaccacggaaagcaactgccccgctcccaatgaacaattcccttagcggcaacattttagactaaagaaaacttggtagggaatgaagttcaaagaagtaaaagaactcagggggcgctcaaaatgagaaaagccattttgagattagaacccatggatgtgttcacttggaacgcaggactcagacaagggagagccaatgttatttttaaaaaagaaaagcccttccagaaagaaccaagacttaatctctcatttaccaccaaattgtctgaagaaatataaacaaattaagctttggagatttgtcaggtaaagaggcttaaatacaacagagaaaaacccttagtctgactcaccttataagggcaagcaaattgtcaagaagtttcaggcatctgttctgtgcaggggttacggaatatgggttcccag

SEQ ID NO: 37057 - DNA, 2568 bp, Bovine  19866880689035
  misc_feature (1)..(1): n is a, c, g, or t
ngaggcggacaggtgtgccaggagggagatgtggcttagggcggtgactctgactgaagggcctcctcctgtcccccaggtgggtgcctgaatctgcccgctggcttctgacccagggccgtgtggaagaggcccacaggtacctgctccgctgtgccaggctcaatgggccgcctgtgggtgaggacagcctgagccgggaggtgagagtgaatgcatgatgtgcttgtgtgcaagtgcatgtttgtgtgtgagcgtgggggtcagcaggttgtgtcaagggtccccttcctggggtccacactgtgcaagaaaagctcctggacccccgtagaacatcccaaactcttcaggatgtcctactggcccttggtgggccacaccctttgcttcagggcccaccctactcagctcccaccggcatcccctccccacctactgcagcagaggacagagatccagggagaacaaggtaccttgctcaggcctcacagccaactctggcatcacaaaccctcctcctctcccaccaggccctgaacaaagtagctgccgcggagcggatggtccgaagaccctcgtatttagacctgttccggacaccacggctgcgatacatctcactgtgctgcatggtggtgtggtgagggagcctgacctggcccaggcggggtgggggaggggcgggctccagctggtgctgagtgtgagaggacacgggacaagtgaaactgtaactgcgggtgtcgggagggtcagcttctggagggattggactctggaaggtcaggatggagccggcgtcagagatatgcgggtcaaatgcaagctctgctgcttccttactgtaagcccttggacaggtaggtcacttagcaccctgagcctcagtgcttctgctgtacgacaggacgctattagttcctatctcacggggttgttgtgaagattaggtaaaggcgtttgggccaccagaagagattatggggactgggaaggtcatgggcagtgggctccgaaggtggggagagatggtccctctgaaaggcctaaggctcctgagaggacaatggggcgcgaaggaggacccctgagcggcatcgcgaccccctcaggtttggagtgaacttctcttactacggcgtgagcctggacttgtcaggactaggcctgaacgtgtacctgacacagctggtgttcggggccgtggagctgccctccaagctgctggtctatctgtcggtgcgccacgcgggacgccgcctcacgatggcgggaacgctgcttggcgccgcgctcgccgtgggcctcaggatactggtgtcccccggtgagccccgcccattcccgtaggccccgccccctggccgagaacccgccccatcccatcccggaagccccgactcaaggccagttaagtcccgccctctcccgagactgcacctcctatcctgggagaacctcggttatccggcaaggccggctcactgcctgaacccctttccctccagagatgaagtcctggagcactgccctggcggtgatggggaaagctttttctgaagctgccttcaccactgcctacctgttcacgtcggagttgtaccctaccgtcctcaggtgaggggtcccagacaagccacctggagggagggcttgttagtcacatctcttactaacatcctagacacgtacactgtaccccggtccctgtcatccattccttacagacctaatctgaaccgtctgagtttgtctaaatctgggaagaggtggggcatttaatctttacaaagtgaacctgagcaaagtcagacaacttctctggggctcctttaaaagaaaacagtcgcagaaggccccatctgtccaacccatcccatcctactcaccacagcctaagcagagctgcccttggggggttgtctctggacataaggctcttctttcaggtagctattgacaggtggagaggaggtgggcagacagctgggcatgttcagaaagccctctgtcttctctagcacagcagtctgttccagctgctgacctcttcctttcacaccatcctctccccatcctctttctaatgacttctttattttccttctgcagtacctgattggtactatcagaacaggagcccatcctcctgtgggtgctggcttgggggcccctgggcttgggcgggtggtgggtgggaagaccacctgaaagaatccccagtattcgtagctgtctggggagaagggggcaacagggcctgccagcccagaaggggagccccgtgaggcatgactgcaagtaatttcaggtaccagccctctcctccgtcctttttctgaacagacagacggggatggggttgactgcactggtgggccggctaggggggtctttggccccactggcagccttgctggatggagtatggctgtcattgcccaagctcgcttatggggggatcgccctgctggctgcctgcactgccctcctgctaccagagacaaagcaggcacagttgccagagaccatccaagatgggagaggaagaggtgtgtgcacagg

SEQ ID NO: 37058 - DNA, 1714 bp, Bovine  19866880703532
  misc_feature (1)..(1): n is a, c, g, or t
natcagagtctgggtttggttttcctcctcgtgtaatgagggcgtgtcttgagagtcctcgctgtgatctggggacacttcactctcttcccacactggagctacaggaacccctgtttgctgtagctcttctagagctgtcgtttcacggagagatgatgagggcaaacaacagtaggggcataattcactttgtttccacaatatcccggtgaagtaggtactgctttcatccttgttttacagaggaggcaatttgaggcatggcaaagttaatgcacccgcctcagatcacacagctagaaagtagcagagctgggatgcactctggggtatgaaacccaggcagagccgccagtcccagctgctgttctgcatcatgtctggagatggggcaggcctgggggatggacacagccctggagaaatacatatttgtccttcagagttctggtgacattaagcaccctatttttaggtttcaggtgatgcaggctttgggccagtttgacctgcacgttgtccctgtacccctctgtggaatgggatgactaagggcagagatcccggtcaggtggtgagagcaggaaaggccacatgcccatgggatctgaacagaacaactcaactaatctcctgggctgggagccttggcctcacgccaccccagggtcgggggtggaggtgttctttcaccctgtccccgcccttttgctgatggccacttggagtaacagggaacttgcaggccacaggcagtgctctcagcttctttgacatggaagtttgtagggtcctggccatacctagaatcccagctgtggatggggaggggaacccacacctgcgtgaccactgcggggtactcttcctaccagccgtttccaggaaatggacttggctctgtttatgaagcagaagaaatccaatcccctccaaggtaaaggccggagaagttgttttccttttcacccctttctgctcaggacagcgccactctaagctgcagagagctgtcagcctccttggcagcctgcagtgggggcagtgctggggctgtgagccccgtgtattatccccagataatccagtccaagttcttttcatcagattctgaggattacaggggtgggaattgggggcctgggtcccccaggagctgaccagtgattaaagcaaatctacagttatacagcgaggcgcctgccagggcagcgaatccgtgtgaggaccaggactgtggagacaggcatatcaggcccctgggggtggtgtgggagactttttctttaacccctgccatcctgtgagagttgggagtggacttggtctctctggatgctggctttgtttatcattatttccttgactcatccaaagcagtctgatggttcaaaggaagcccaggaatccattcacatctggggacagggggcgtagaagatgtgggatttaactttacaacttgacctcatcctcctcagcttattgctgcctggcgcttcgttcagagggcatggcagaaggtggaggggctctctgcatgtcttctgggctgtggtgtgtagcctgtcatatgtagactttgggggcggaaatggtacaggtcttccctcctgtgtgtaaatacataacataccccctacgtcacccaaagaggataacacactttcatcaccaggagagatactgtgggtgcatgatagcttgttaa

SEQ ID NO: 37059 - DNA, 868 bp, Bovine  19866880729404
  misc_feature (1)..(1): n is a, c, g, or t
ncccaccaggctctcccatccttgggattctccaggcaagaacactggaatgggttgccatttccttctccagtgcatgaaagtgaaaagtgaaagagaagtcgctcagttgcatccaactcttcgtgaccccgtggactacagcctaccaggctcctccatccatgggattttccaggcaagactactggagcggtgaggtgtaagaaaggacttcccaatagtggaggttgagggaaagagcccattggctgaggtaggagccaaggttctcctgcctaaagcttagggggctttgagaaaagaatcatttgaatttatcttcggcttccaagttttaaaagtgtttgcctaatcctcatcttacttcatccgcatagtaagctcttaatatgtggcgagagtgtcatttataacataggtggggcaggcactgtggctccctcccatgcagggaggggaggtccccgaggcctcgagatggcccaaggtcgtctggcagagggtcaggaaactggggtgagagctctcgcacgagtgagcccaggttactggctttctctcatcctttccagggcttagtaagtctggcattgttttttgaagctgaggttttttctttttcaaaaaagcatttatttatttatttgactgcttcgggccctagctgtggcatgccggatcctcgctgcggcacgcgggatctgttattgtggcccaggctcaagagctctggctcagtggttgtagcacgtgtgcttagctgccctgcggcatgtggtatctcagttccctgaccagggatggaacttgagtcccctgcattggaaggcggatttttaaccgccggaccaccagggaagtcctg

SEQ ID NO: 37060 - DNA, 1086 bp, Bovine  19866880754087
  misc_feature (1)..(1): n is a, c, g, or t
ntctctgagaggctatacagcagggaaaggtctcacagcaaagcagagagccctaagaaatccaaatgcctcggggttgggtcgcgggctctgagcggcccctgccctatggcaacagtagttctagggggtgacaccatgggtcctgaacgtatcttccccaatcagactgaggaactggggccacatcagggccccatggaaggcactggggattggagcagtgaggaaccagaggaagaacaagaggaaacaggggcaggaccagctggctactcctaccagcccctgaaccaagatcctaaacaagaggaggtggaactggcaccagtgggggatggagaagatgtagttgctgatccaggccctggggcttcatttgccggacccaccactagaaagtgaggacgaagatgagcagggagctacagaattgaaccaccacagctctattcccatggacccagaacatgtagagctggtgaaaaggacaatggctggtataagcctgcctgcaccaggggttcctgcctgggctcgcgagatatcagatgcccagtgggaagatgtggtacagaaggccctccaagcccggcaggccgcccctgcctggaagtgaccatcctgagagctgccctaactccctgcattccaggccagaaccagcacaggactgaacatatcctggtgtcacattcatctccatcctccccagctcccctccacatcaagacttcttctcagagacccactttattcagttctgtagatatggggacatcggcccaagcccaacccaccgtagcatgtatcactttgtggagaataatagcaccctatgtacacagccaaaaaaaaaagaaatccaaatgcctgagtttaagacaagcgtttacgttccacatacctgttttcttatctgtaaaataacggtggtaataatagcaacaggttgatgagggaaatagggaaatttatatttgtaaagcacttacaacaattcttggctgctaacaatttggctcttaggtacatcttacctcccaataataataataatattactactactactattattataaa

SEQ ID NO: 37061 - DNA, 2931 bp, Bovine  19866880790775
  misc_feature (1)..(1): n is a, c, g, or t
natggatgtgacagctctgaagcagctaagtgttagaaaaatgacatcctgagataaaatctcatcacctctccaattcaagcctgcccaccaaaacctctctggtcttccccttggtaataagagccacagggactggctgctatgactggctctgtccttgtctatccgtcactgagcttccctgtctttctttagtctggagactctcctagggcgtttgaccaacgaacctttttcacttcgaggtgactgatgaaggtctcctggctggttccaactgggtcccaggagaacagagcttcgtgtagctccagggctgtagatggctctgttgggggatctgtacaaggaagaagccacttaccttgggcttctagtccacaacctacctgcccagggatagtttggcctcagtcttggtctgaggattcaccccggggaaatgaccacctgccccacctagactcttctcctctggcttctcttggcagcatctgtgtaccacaactgaggggctacagatctctgctcccctgtgccaggttctgtccactagcttcccattacctgggctgtagtaggcctgggggtcatggttgggaaggtcgaggaaacactggatccggtccagggacactttggcctcaaggaggccattgatcacccaagggaagttgttgaggggaagaatgagcatgcgcaccaatgccagggcggtgaacacctaagtggggtcagaggttggggggggaggggttgaaagccatacctaaagcttaggaattatctgaaggcctgctctataggtggccctgcaaacaggtctgtggaggggagaacaggcagcaacagaactgagggcttagctggctgatatttgggttatagatggtagaggtggccactccaagaatatcagaaatcccagatatcctccagggacccaggtcactccctgataaacacacatgcccaactcacgctcatgagaccttctcagaatttctaaggggcaacatctcctggctagacccagcattcgatccatcctgcacaggatcatgagttttccccccagggccatcagaatgaggctaaggggacctaaccagaagttggggaggaagaggtggggaaaagaagtaattccttcgcagagggaagggtcatatatccgaggccccagatgaaaggtcccttcagagaactttccttcagtaggggaagaaggcagacagggaccctccactcctccttcccagcagcacgagggccctggcccaccccctactgcattgcagtctctctgctgctgcttccgtctcacatctccctgcagccatccccccatttctggccctcaccttggtggcagtgagctggtgccccatgaggacataggtgataaagatgacaatggagatgacgaccggcagggcagcccagaggtacacacaggctgcatccaggtacttgatgacccggagtcgccccagctctcgagctcggcaggcctccacgcgggtccccagcgcctgctcccacccgaagaacttgatgacacgcatgccactcagcagctctgtcacgagctagggacagggacaagagagcagtgagaagtggagatgctgctcacgtgcgttctcctctgcccagcctcccccaggctcctggcacgggatgtcaaggacttggagctcccctatgccccagctgggggcaggctggagctggaatcccccaccttcttagaagatgaagtggtggaaagtacaggggcagtggggggaggtcaccacactggggtaaaagcactccatccattagatgagggacaaagaaccattcccaaagccagaagatgtgggtttcaggggctgatcaacagcttgggtataggaaccatttctgtagaagtacacaccacagcccagggttgggcaggctgatagacccaagtaagataggctagggccagagaagctccttggatcctaacattcaaacatctccagactgcaagccagggaggcactgggagccttccaaggaggccctagagactggtcagtagctgtcatgggtagggaaaaagaccatgccataccagctatcagggacaccccctcaccattagcacttggagctatgccagtgagagatggacaactatgctatatggacccaaagcccatcatcccctctgaaaaggtaccacaatcactgtacattccagaactgactcagccagaccctcacacctagagttggcccaggcagaggagacagctgctcctttccccatagcccatcccgaagaggcagctggggttctcctaggcctccacatgcggctatggggcactccatacctgagatgaggaggaggctggagacttggatcctggctctaacactaaaatcccatttgggcccagacagctcagttcccacctctctcagggttgcaattagggctgcagaagctaatactatattactaacaggccacattaacttagtgtttactttgtaactggcactgtgatgagcagcatcttgcacgatcctcccaactgtgctatgaggcaagctatgattaccctcatttcacagatgaggaaacgggagtctcaatgaggtgaagtgacttgtctgatgtgattgaactagtaagtggtagaatcaggatgtgaaccccatctgtctttctctagtctgagctcctaacttttagagcacacactcactctctcaggtactgtgcatgggagacctgggcaccagaaggctgggtggggtctctggatggctgagggaccccaggcagcccctcaccttaactcgtgcgtctttgtgctgtagcatctcctggttgctggccatgatgcgggtggcaatcactttgttgacgggtaccagcag

SEQ ID NO: 37062 - DNA, 962 bp, Bovine  19866880809488
  misc_feature (1)..(1): n is a, c, g, or t
nagacggctgtttgagtgttagacaggaacctgttcctacaccagagggggccaccctgctcaggctgaaaggcagattgattgattctaggatctaaaggcctttctctcctgttccataaaacctcaggatctcatgggatgccatacgcagctgagcaggttgttaactgtacaactctagggagaacattcacaatctagtctacatggatgctgccttcaagttttacagtatatgatctgatagctctatacggtggccctaccccagagagccctcccatttctatttctaaagtctcattttgccctttaataaccccagtgctattactgaaagtttgtagaactgctctgacattcccatagcaacccagtatgatgtcataaacagaggattagcacattctaatgcccaaccagcagatcttcttacccttgttacccatgggctaagtgccctgctggggagggacaaggaaggacgctgaggctggcagagggagagtaacagaggcgtgcacagcggtgggactgatggggtggtggggtggcgttcaggctggaagggacggagcgctccagctttcctgagctgcaggatgagctccaggagctggcctccctagcccaggtctgtgtacctgttgagtcggggtttggtctttggaacaaatccttcaggaagcttgggcctgtgatttgggagcagacctgaatggagggaaaagcatttaagaggatggtctctgcactccctctgcagctctgggggctgaacagaaagcccaagggggtaggaggctggcactggggggtgagtataatgcagtctctggacacacactgcccttttaggaggggcttggaggtgtggaaggtgtaatggtgcccacagccccctgccccctctgcccgaggccctttacctgctcggtgggccatcttcacacactcct

SEQ ID NO: 37063 - DNA, 807 bp, Bovine  19866880811941
  misc_feature (1)..(1): n is a, c, g, or t
ngacaaggaggggctgaggaagatctcctggggaaagtcataaagagaccaagaagtggaaatgccaggcctggctgagacttcgtctccaccttttgttcctgtgtttttgccttcccgcccccaggcttcctgttacctgaaacaaggcaaatatgctgaagctgagactctctacaaggagatcctgacgcgtgcccatgtgcaggagtttggctctgtggatggtgagtggtgagggcctgggtggggcgctgcagggaggaaaggaaatgcagaccaaaggttggtggggggagggttgaccacagtggttccagggggagccagacccctgtagtcccatgctattggcctctgggtcctggatccctgcttagtgtccagctctgttctctaacctcgccaccccatcccgtgtatcacccccagatgaccacaagcccatctggatgcatgcagaggagcgggaggaaatgagcaaagtgagttaggggcccaggctggggaggcggggactttcggggcctctgacttattactgcaccagccctagctgcatggcgccttcccacacccagcctgtaccccatccctgtgccagcttgtatcccagcatctctgtacattcacctctggctttccctcccgctctgtcctgcagatccggcaccgtgagggcagcacaccctatgctgagtatggaggctggtacaaggcctgcaaagtgagcaggtgagaagccggcatgggcttgggcgtgtgggcttcacgccctctattggccccagatcccccctcctggcc

SEQ ID NO: 37064 - DNA, 762 bp, Bovine  19866880819002
  misc_feature (1)..(1): n is a, c, g, or t
ngcccgggaggaagggatgtgggagctccacaggcactgggtccgcccgataaggcccccgggaccaacagaaggacggagagtaagggggagcccgggcacggggtccccaccgtattgagctctgtgttgatgcagctggcgctgtcacccccaaacaccaccacccgggctggcatgtaactcgagtcctcactggccaccagaagagtcagctgcctgggagaggagaaaggactcagtcagaaccaagggccctgatcttggtgcaaaacgacctctgcccaccacatcctcttcagaatcctgtcctctgcttaagcgttggtcttccccaggctccctgctcttcccgtaaccttcccccaaagcgatttcacttaaacccatggtttcagctgaaagttaacacctgaaggactccaaattcacgtctctaccctagaccgctctcctgagcttgcatgctgcgcatccgacaggtccatgccgtgcccacaggcacccccaggtccatgtgcccacatggatcggtcatctgtccacagaaacctgctcctcttcccacttctctcttggggaagaatgggcacccatccagctgtccagctaggacacgtgacacctccctcgtggttcccctcacccagccagcggcaggtacccgcagaccacctctcaagctcccctcttccaccgcctcctcaccatctatgcccgttcccgccgcctcactgaacgatcagcactcagtaaaccttc

SEQ ID NO: 37065 - DNA, 1026 bp, Bovine  19866880837480
  misc_feature (1)..(1): n is a, c, g, or t
ntctttaccactagcaccacctgggaagccctggggattaggaaatgggtctaaagaaagaatcactttggagttcctcgagcaatgtcatcacagaactggcagcacgtgtgccgccaagtcctgctgagtctccccagcgggtcccctgactcactcctgggacggtggagcagggggagacctccttcctctggcccctccctgggccactcagttttgtgcttttcacttggatctgagttcgccgactcatcgattataaacatcctccactcaactgagagcattttgaggtcaggggctattaaatttcttctctgagccctacagggcccagagctggggctcaagacctggccatgtgtgatcaccaaactgtgggccccgggggaccctcactcagggatccctgctccccagaaaggtcaagaactccaaataaggatgtccattgcagccccagattgaaggtggagacatggtaggacttcctgggattcaagagccccgcttctgagcatcgagaacaggagagacagtcaggtggcgtccgggtaggaagaggaggagagggttggcttcccaggtgacaccgcagggcaggggtcgtcttccccccgacagggccatcgcccctcctgagactcacccaaacatggctgccgtctgccgggtgttctgctggggcggggtggaggtgctcgtagacaggagggcgtcattgcccgccttctcccagtcaaaggcctcgttctcggcaatgccccgctccttcatgctgttctcaaacactgacatgatcaactgcagggggcgggggtggcgggaggacaaaagcggtgaccccgggggctagccaggagggggtgggcaggtgcttggggtcgcagaggggaagacaggggccttccaggacagggaggggccaagagggggcattggaaggagaagggcacattgattttaaatgaaaacatgcacacaatatgcaaatcagcatgcaaattattgtctggacttcag

SEQ ID NO: 37066 - DNA, 947 bp, Bovine  19866880845079
  misc_feature (1)..(1): n is a, c, g, or t
ntttaggagcaaagatcatgatgtcttgtagcttattttcaaaatggtttagcaaaaacagtgcgtatattgttgacatctattattatcacattgctttatattataaattggaaatagtggtaaatcactgttgtgttttttggttttttttttaactaacagctctttttgttcttttttctttcttttttaatttatttttcttcttttttactaacaactcttgactgtgatgtaaggtgtatggttattcattgtactctttcagcttttctgtatgtttgaaattcttttcagtgacatgaatgattgtcggggtaggggacaggaaggagctgggagaaatggagacagtagaatgagggcccagagaggacagggggcagtgggtcttggagcctactttcacccactgaactctactgctggtctggtgctgactcctttctctgccccaagcatcaactcaacccagtcctgcggaggcgtccccttgggtctcttttgctgggagccggctcccagcaaaaactcagatgcactcagtcggtggtgctgtgtcttctttccccagtgtgtaaatatgttgctgtggagctgaagtcagcctttgaggaaactggcaagaccaaggaggtgatcgacacaggctatggcatcctggaccggaaggcctcaggcgtcaagtatacaaagtcgtaagtagaggggagggagaggggcaccagcctgccctgctttgttccttgaggcatcagcgtcgtgaagttcccttctccctccccactaggcagacccacaaaaaggaggcagctctaactgagacccaggtttgcccactgattctaccctgaactgattgtatggccttccgaaatccccaagtgcccctgggcttcacatccttcatctgtaaaagcaagactattggacctcaccagtga

SEQ ID NO: 37067 - DNA, 2426 bp, Bovine  19866880874022
  misc_feature (1)..(1): n is a, c, g, or t
ntgaaacccagggggcttaacctaccccctggacagcatgacttcagggggcaacgatttttttaaaaatagattacagtaggtttttctatctcattgttaaattgtgtaattagctggagaggtagtgagaccccactgttaataaagtaagagtaagggacctaggttggctaggtttgtggattaggccattttgaagtttgggtaattatgctgtaaagggctgaggagctttctgaactttgagatccccattgtgataaatatggtggaggaggaggaggaaagggcttgatgtttgaaacctgggctgcttctccccaccatcggaatggtcggttgcggtcattacccatccctgttcccaccctggtctctgggttctttcctccaggctcttgtttctttggagagattgagttgttctgtcctgagattatgcagcctgtaattcaggccatttatcagtgacgggcttttctcagatgttgggatgtatggcgggcgggcacgggtaatctctgcccatccttgccaaaggatctagtcagactcctggcattcagagcagggttgagtggtggagagggcccaggccgtggggatgaagtgtttggcagtacggcagctcggatcctttgacaggccctgtggccctggcaggcttcttgacctcacagtttgcctcctctctgaagggacttacttcctggagttgtgctgaggattaaatgtaatgaagtatataaagggcccctttcttgtgcttccctctcctgtggtgtgctgccagcatacctttccagctttacagtcacccccaacaataaacattttccacttactctccgtttcaacccagctagtctctttcccatccccgaaaacaccccgggggttcgcagaccttgctctcctctctggcccatctggtatgtgcccgtccccacgtccacttcctccccgaagctgtccccccatctctcctgctagaaggtgaatgcttggagaacctctggacctttaagccgtcttccatatttttgcccccccttgggtttttaacatactgaagggatttacttactgtagaattcattaccgtatcttatttataatagactcttatctaggtttattaaaaagtgaatgaagcttttgggtacagggcagagtgaccattggcagaggtaagaagccccatttcctgctaggctgtgtgttgggggggtggtctttgtgccttttccccgctttggattggggttgcctgctctactgtgacccagctaagacacctgacagatcttcctccctatcctgagctgtctgttctttgtggcagttttctgagttttgatggcaggatttttctccaggagttctgggtttgggcatccatctctacgtaggaaactgacctgccttggaaaggccacagctcaaccactgtgagcttggtgggggcttgggttacctatacctttgccactcgaaacaaggtccccagagaagtggcattagcattctctgttttaaaaaaaatgtattttatattcaccggggccaagctgtcagttgtggccactcttcgactttcattgtgatgtgtggggcctttcctttgcagcaaagcctttcctttagttgcagcacgtgggatctcgttccctgcccagggatggaacccgggccccctgcgttgggagcatggagtcttagccactggaccacaaggaagccctcagtctgcattttaacaagctcccaggtgaccacaccgaaggttctaggagtctactctcagcgtccctccttgcatagagactcaagggacagagccttcctgttgcaacagtacaaagcatgggccccagatcttgcacggtatttaaagactgaccttaagtaacttttagttcatgtgaacactctccagcgtggtatgtacacttaagaatgacctccctttgggctgagtttgaattaggttttcccaggacgtttgtccattaaaggtgtgactccagagggtttgcaacactaagtgtgaagttcagttccttggggagcctcagtttttcctagaggagcatgtgtaacattttacaacaagagccggtggagaaatcggatttgttcgtcaggagtttggtctgtagaggacttttcaggaacatgtttggttcacaaagggaggcagtgtctctgctaggctgtaacagtcgtagttgttaaaagttttggaggatttcatattttggagtgaggcgggtttgggtgcgttgtgtgtgtgtttaagccagtggcagcttctgtgaaggagagtggccagttcagactctaacatttgagccaagagcagtgtggggccagggcttcagtctttggtgagtccctgaggaagaaagggtcattaaacc

SEQ ID NO: 37068 - DNA, 1730 bp, Bovine  19866880877634
  misc_feature (1)..(1): n is a, c, g, or t
ntgttcccactgcaaaggctcctgggagggccctggagcaggtggtacctggaagggggaaaggcactcacttgagagggtacatgcgaagggccacatccatgcctgggcagtaggacaggaaggccgccagggccgtctcctcaaacaagccaaagatcaggatcttgttcctgcaggcacagtcagggctggacccagagaagcccacccggcatccccaccccatagacacagaggcactcccccggggcaaacggagagagacagacaaggagacacagagggatggaaacagaaagaggcagtgaggcacagatgggtccagggagatggcgacggtgaaatatgaagacagagacacacagacaggccggggtataaaaagataagacagatctggagagggacgcaggaacatcccagcagcgcgcgcgcacgcacgcacacacgcgcgtgcacacacacacacacacgcgcgcgcgcgcgtgcacacacacacacacacacacacacacacgcgcgcgcgcgcgcacacgcacacacacacactttttggaagaagcaaacatttccagaaattgctgggaggtatcaggcccacagggacacttctgtcctcatccaggccctagagagcagagagcaccttggtggtaccaggtgtggctgtggtccttggaggtgtggctccccaggctgggggcggggatcccactcggctgcagccctgaggacgtcacctgtggtctgtctggtacagctgcggggcttctgatgctggagcttctgctctaccagcaggcttatcttggctccctggaaaggtggccccccgtctccacaggcatgtcaactccttgattcctcccactcactgctgctggcctggctgccccaaagccgtgtctcttgtagttaaaatacacactcccacacacatgaacaaatgcatgcacgcacatgcacacacatgcacgcaccagcacggcgtgccggcttccttctctctgccctgttcctggccgattctttcctgcatacctggcctgcacaggtcggggttccatcagctcccttctggagcgaggcccctgggccactccttgccaacatcagtctctcccctccgcagccccccgcacctccgcagagccacagtgtttgccaacgggtccctgcagctgacccaggtccggccgcgcaacgcgggggtctaccgctgcataggccagggccagaggggccctcccgtcgtcctggaggccacactccacctggcaggtgagtctgagggtctgggatgctgaggtaggggctgccttcagcgttgttgcccatgtagaggtttggcttcctgtttcctactcagagcagcttggagggcagagggaggaagaagatgcctggggtcggaagaggaggtgctaggggtcccggggatggctcgtgctgggagcggggaagcgggctacggagaacatcaggtgtcctggatcccatggtaagccggctgtctgctctcgcccctgcagagatcgaagacatgccaccattcgagccacgggtgttcacggccggcagcgaggagcgtgtggcctgcccgcccccccagggtctgccggagcccagtgtgtggtgggagcatgcaggagcccggctgcccgcccacggcagggtctaccagcagggccacgagctggtgtttgccagcactgctgagagcgatg

SEQ ID NO: 37069 - DNA, 1708 bp, Bovine  19866880881824
  misc_feature (1)..(1): n is a, c, g, or t
nctttggtggcccggggacgggggtgggagtgttggcatcccgtggtagcagcagcagggcagaggcccaggttgcgtggggtggagtggggtgcagagtttgaggagaagggcgactcagagcttccgtggttgggatcaggcattagaggaactccagagaggtaggacgaccaggcggacaagaagttacagaactcgagggagaggtttttcaaagggaggagcggctaagtgagatggaagacggcttcaagcaaagtcttgaatatacgttgaggctgtgaaagggctccgtccggaggggacgctgcacacgggtggccacccacccctgcactcatcgagtctcggtcctggcagagagaagctgcaggctcatgttaccccggaaccttgggttttctggttggctttcttttcttttcttccttttttttttttaagcctttgatgtcccatcactgcctctttcatttctatttgcaaacagctcagttgccccagagtttgaggtctggaatgcagcccggctctctctcctgttctgcacagaggccgtgcccactcctgactctgtctccataccccctacacaggcgctgaagatgctggccattgccagctcctcagagatctccacatctgtcaccagccaagattccatccatcctttgtttgacgcccagatgaccagggagatcttcgccagcattgactcagccacccgcccggactccgagagcctgctcctcgctctccctgctgctgtgatcctgatgctgaacacagaggggtcaggacctcccttcccgaatgccagactcctgttaagccccacgccctgccgctcccctgccccgggctcttgtgcttcgcagaagctcccttcccactgtcgtctctggatgaaatgtcctgcttggggtggctagaagagaggctaagtggttgagggtagcgaggttccagagatcagagacccctgtcctttcctggggttgggaggagtgacctgaggtcaagaggccaggtgtctggcctcagagggacccctggaacccctctgtccccagcttcagggctcctccctctgtgccacctccctgcttccatcacattcattctctttcaatttcttccgggaacacctccctcctcccaggtgctcctcagcggtgagaaacggcctcctcctgctcaacctgcttttgtgcaatcaccacacgctgggagaccagatcatcacccgcgagctgagagacaccttgtttagacattcgggcatagcaccggggacagaacccatgcctaccacccggaccatcctcacgatgcttctcaatcgctactcgaagccgccgggcagccccgagcgctcaggtaccgtcgtggaggtagttgggtgtgctgagcagctggtccccacccgcggccggcagggtccaggcttacgtcctagttccttggtagaaagacgtgatgacccttcaggaaatgaatgagggctttcgtgctcaagtttggtctcaagtaggacttcctgaccaggaggagagggggacgtttaggataggtgcagggagattggtcttctctgtataaacatgaaagggctgccatctgtctgagctgagtgcagtccactcttcctggtcactgcagggtcggttgaaatgacttctagagaggctttctgtagaggaat

SEQ ID NO: 37070 - DNA, 1369 bp, Bovine  19866880906384
  misc_feature (1)..(1): n is a, c, g, or t
ncctacccaagccggcccttggttgtttatcgtgcaaagtgtggaccccaggggctgaggcctttcccacaccccaggactgagctgtcccgtccccagctttccaagaacggactctgtagagtgcacacgttgtgaaatgatcctgctgggccctccaagggatgaggccatttatgggctgagtgggctgctgctggctgccaagggtcaggcctgggacctgcatgtgccgggagccaggactcaggccatgcagccttgaggggtggaggggggggggggcccgcctcctccctgtagcagcctttaggagctgggaagcaaggctccaggcagccatcctggccttctctcccctactgaggcttcaccagaggagaagacggagggaaggaaatagaccttccaggctgaggggcaagaccggaaatataatctgtggatccagtgaaaaggaaaacacaggtcctttgttagacatcggagcactgagctgagcaggagggcccgacacacatcctgctggaggtgccctcagggtcctggggccgagctccacctcgtgttgaggaggcgtccgtggcctgagaggggcagagccttggctgctgccctctggaatggagcctgggaccctgctccctgtccaaagcccgttctcaggacctcggaaagtcttctctgtgtcctgggccctcccgctcctcttgtcgtccttgctcgtttctgagcctctggaaatgttttctgtcccccagaatctcttcctccaggaagccttcctttgctatttagaccagtttttacctgctgatcttttctgtgcttcttacccttccccaaaaggctcactcacagagctttgcccttgaacttctgagtctttgtttgtttgttggtatatgttagtgagagcatagcctcctccctagagtcttgcggggagtctccctcatcaaactttgggcttcctgaggacaagcatgacctctcttcagactgggggggctccccggagttggaagcctctcctggggcttcttccctcaggcttgcttctgtaccccagaggctctccatacattgccctcaagaggggactgtgccccatgagatggcctgctgtgtgtgccttgcagggggtcttccttctcatcctccaccaccttcgctgtccttccctgaccaggggcagcagattctgtgagtggggccgggtgggggaaatggagtcggggtgaaaggggggggactctttctccctccaccctcctcctagcagggccccagaggacagtaggccatacaacgtccttcctgtggcctcccgctttgggtgtgcgggaggagggctggtcttgagttg

SEQ ID NO: 37071 - DNA, 1784 bp, Bovine  19866880928512
  misc_feature (1)..(1): n is a, c, g, or t
nctgacttgacgggattctgacttacataaaaacggacttatgtaagatttgccagaacggatggaatactaatgtgattggggattgcatgtgttcgttgactttgtgtgcagatccccagccatcttgagctggaaaacccaaatttaacaccaaaaaccccttcaaaacaccccagaactctcgaggacagttgttgtaagatgggtatccgccatttgaggaaatctgtgaaggcaacaatctatgatgaagttaggaacaatttgaaatgaaatcgcctatcactaatctccatagtgggcttccctggtggctcagcagtaaagaatctgtctgccagtgcaggagacgtgggtttgatcccaggtcaggacgatcccttggagaaggaaacagcaacccactctggtattcttgcctgggaaatcccatggacagaggagcctagcaggctacaatccatggggtcgcgagagtcagacacaacttcaagactaaaccaccgccaccatctccatagtatctacacaagttggaaagaataatagcaaatgtattcaggaatcgtattcacttcactaggtgagcagcaatgttcattgcagcgttattatttaaagtgaaagagctaggatctactgggggacgttgtctataatccgggtagatgatgccactatctaactgcactgtgcagaacggtgggggcactgtaggtgaaaaatgggaagggaagacattagaacatcagaatgttcgcttgtgaaaatccagtggtccttgacaggaggagggggaagggtgggtggcaggaaggagccacactgatggtctcatatctaggtgctggaattccattccgagagcaaataagttagtgtctagccttgagatatgcatgagggtggtggggagaggaggcaggcaacaggtagagcacgcagactcccatgggcgatgctaagcagaagcttcttatccttagagagaagatgcttctctgggtgcgatgtgagagagaactgggaggctcttcccttgtgcgagttgagatccttcttacagtggttcctggtccatcctttctttgtttctctctggtttaattgcccactgagcccagggcagctgagtctagatcttcaaactacagttccagggaccctaattcccaacctccaaatctggacctgaggtctgacaagtcccagaagagctgtggggagatacaataatcaggacctccaggaaacaagagcctgagcagagaagctgggggcccactctcccctcccctactcactgtgtccttctgcctcccccgcctcagggagcagagagccatcagcccaaggcgtccctgggtctccgtagcgtcctccagcccgggtgcttctcccagagcaacgtgctgagaaagcacttgtgaggttgggggcaggggtgggggcggaggtcagggtgctttttaatttctcgttagcaatgacagctgtagaactcaagcaattaaggaggaagactcctccaggatgccagaggccaccccaccccccaagctgcgcacatcttcctcccttcctccttttccattacacccctcatcctccccggtccttcatcctcctggggtcaccctcacccatccccacccccaccctgtacatgcgcacatacatagaggcttcccctctctaggtccgggaagctgtggactgcaactatggggaggcaaggactgcacagggaaccatttctgtgggctttaataacgggaaca

SEQ ID NO: 37072 - DNA, 880 bp, Bovine  19866880956448
  misc_feature (1)..(1): n is a, c, g, or t
ncctttcctttgcccccagatgagtgagcagttcgcccggcacattgaccagcagatccagagtggcctgatgggtggaacccctggagtggaagtgctggggcggctccagtggcacctggagcccatcatggtcctctctggcctggagctcgccacgacttttgagcacttctaccagtgagtgcggatctggagaggcagggtgtgcgaggcctagagtctgagggtgggggagacctgcgtcttagagggaaggcaagggaggtgcagtggggaggtgaggttaagatgcagagatggccgtggccctggggagggggaggatgaggcaggctgcaacagggggacctgtgttctggagcgggaggccctgccgagcgcccacattgaggctcggcctgggctgtgcacgctgcaggcactacatggcggaccgtctcctgagcttgggctcgagctggctggagggggccgtgctggagcagatcggcctttgtttccccaaccgcctcccccagcagatgttgcggagcctgagcacctcggaggagctgcagcgccagttccacgtgtaccagctccagcagctggacaagctgttcttggagcaggaggacgaggaggaacagggcctggaagaagaggaggtaagagcaagggaaagagtgggagaataggcgagcaggagagtctggaccaaagaagggagcccaagagcccttggaatccttctgtctctcaggaggaagaggaggccgagaaggagctctttatcgaagatccaagtccaacagtctctgtactggtcctgtcaccacgctgcggccggtctcccctactctgctacctgtaccatcccagaaagtgccttcccaca

SEQ ID NO: 37073 - DNA, 2070 bp, Bovine  19866880965932
  misc_feature (1)..(1): n is a, c, g, or t
ntcagtcctcaaggaaatcaacccctgaatactcattgaaaggattgatgttgaagctgaagctccaatactttggccaccagatgtgaagtgctaactcattggaaaagaccctgatgttggtaaagattgaggcaggaggagaagaaggtgacagaggatgagatggttgggtggcatcactgacgcaatggacatgagtttgagaaatctccaggagatagtgaaggacagggaagcctggcatgctgcagtccatgaggtcacaaagaattggacatgatggagtgactgaacaaccaccaaaagcaaaaaataatcacagttcacatggaatggacttgagtatttcatgccttgtcacagttttactttttattgtgaaataacaaagaggtattacagtactccatgtgtaaataccagattaggtgctaggttttgagtacctgtgtgtgactgaacacgtaaagtgtctttgaattcctttttcaaattgtgccatatatatatatataatatatgtataatataatatatatttttataataaatacatcttccattttaataaacacaaagttaaaaagactgtctcactactggctttgtgtaattagaagtcatcagtttagaggctatttttttaagggtcatccaggatatcttttattctattatgaaaatagctaaaataatcaggaagttaacatataaaattttaatgtaggcacaaatgctttctacattttggtttctttccctaaacactttattaaaaactaaaattgtatcctgctttataagacataagttaatgaagagacaagttgatataactaaagtttaccaaaaaaatatatgtgtccaatatatgtgataggctaataaaatcacattttatattgttttaatataatctggaaaatttaaataaatttgaattaaattacctgggaacacaatgatacaagaaagcaaggctaatatattcagtgatcaaggtacacccagtgaaggtctatgcagccattaactatcaagatttgggaaactttaaaaaagtaccttgttaggagaaggaaatggcaacccactccagtattcttgcctggagaatcccatggacagaggagcctggcaggctacagtccatggggtcatatggagtcagacatgactgacgcgccttagcaggcatgtacgcctagtctcgaggaatcaggacagcaaactgcagtagggagctggcagggccacaaagcagcaaatctcctaaataaacagagccaggtggtgctgtagcccgcctccaagcctctacccaccggacccacctgagggtactgtggtcccagagcctctacgaaccagagatggagctgggcctatggacgcccccaacctgccggacctctcctgtgcccccgcccaagggtgatgggtggtctccagggctagaggagagggcagccccccaccagccttgcccacggccccctcctggcctccacagggtggtcaacgtgacgccagtgcccggtgacctgctccgggagaacaccgaggacgtgttgcagggcgagcacctgagcgaccaggagaatgcacccccgatcctgcctggtcggccccccgagggactgggtcccagcccccaccttgtcccccaccctgggggtcctgaggctgaagtctgggaggagacggatgtcaaccggaacaaactccggatcaacattggaaaagtaactgcagccagggagggcgacatgggtggccttctccccctgcccccttgctccccacccatgggtccctctccccagccacctgcctggtcgccctgcctccttggcctgacgccctcccgggatcactggcacccagtgctcagacctcctgctccctcctttgccctgagaaaaccacagccccacagccgccccatcagccccagctcatgggactcccctctcctgcagacccccgctgtggtggaggaggagcagacccgtggtgtgggggtccccagctccccggtgcgggctcccccagactcaccgacaa

SEQ ID NO: 37074 - DNA, 1376 bp, Bovine  19866881034829
  misc_feature (1)..(1): n is a, c, g, or t
nccaggaatggcccagagatgcatcgtctcttccaaaggaagctccaggcaccaggccgcattttgtcagtcattctagagctgtcatcctagggcttgctccatcccactgctgctaccacgaggccccgtgaaaccaactctcagacccaactgaccccccccgtcagaccccccaccccctgagagaggaagccaagagccccaaaccaagacaattggtcacggagagggagaagggcgaaaatcgtggccacttacttttcttgccttgctttatctttctttggtctgcagtaggtagagaaagagaaaagaacaaaacagagaggcgttcagatggtgataataacaataacagtatttatgatatatcagtacagttttaatctcttgacatataacaactcacttaatccttgtaacaatgctaggcagtatgtaatactattattgtgcccatttcacagatgtggaaactgaggcacattaaaataaaacctaaatgcccacagttatacagctggagggtgaaaatgagctaacatgcttaactctggaacacgcttaactctggtccacagcaagccccctgaagctgttcactgaatgaatgactccaagactccatcctcacctgcattcacatttgttatgctgtaggaagctcatctctcctatgtgctggctttggtgaggtttgatccgcataatctgaagggaaaggaagcagatcacagaggttagtgacccagccagccatacccaggtgggaaaccccatggctcctgccacttagcacccaggggttctacagagcagaaaagggtggtagaagtgtgggggaccaagggctctatcagaaagagcctcaggcccactccaactcctcccaccctgctgacctcaaggagcccctgcttctcttgagggcagacatgtctgcagggttggccaggctgggaattcaggtcctgggttcttgcctctccccctccctcccctcctgttatcccctccaggcctcacccaacccccaggagccacccaagagccacccactcctccctggggtctcagagctccctccagccccatccaggctgagacacgccctgtgaccaggcagcagcaaaggactggctttttaaactccccacagaccagactcatccagcttcccaaacagagccccagggaggcagggctgtcttcctccaagagaggaagggaggggctcctgtcacaggtgtcagccctctcctgagcccagccggcagaggtcaagaaggaggaggaagtgatcaggggttgttggaaacctgggctcagaaaggcaagcatctttttctccaaagagggtcagatgcccgcat

SEQ ID NO: 37075 - DNA, 972 bp, Bovine  19866881046034
  misc_feature (1)..(1): n is a, c, g, or t
naagctttgtgattacctcttagcactcagagcagttccctgcacccaggagacatgcgagaaatgtctccaaggtagaagcaaatgagaagtggacagaggatgtcccacggtcagtcaaaggtcttcctttccagggatgttccacatctacctggacagggtggtgctgactacagtcctgccggggaaaagtcaggggacaaagctggactctcattccccctaaattcagcattctggatgtagggattctagtgccttgccagacttctctagaatgaccttgactcttccaggaggaggtgggggaaggcctcttgaatcagaaccattagccagatctacagagagctaaacctcatgggaaacccgcccatagtctcagagaccctcagagttcccccggctgctgtgtggagcacctggtcaccagcccccacccttgccaggtgctgcgcagacgtgggacactgcgaggaccatagcctggcggccagtcctgggtaaatgacgcctgagcacaagcaaccccttcccagagaagcaagtctctgacctgcggtgtcagggacatggggaagcgggtggccaggcactcacactgaggtcctcatcgagggcgcaggcctctagcacttccttgtacagctgggcgtcaaacgtcttcccaaagagaatgttgtctcggatggtggcaaactggatccagggttcctgggtggccaggccgaagcctttggacagcccccacactgccacctgccctcggagcctgcagagaccaaggccagcagtgtggggggccggctccctgctggtcccctcccggcccagcccctgcctctcagaagcctctcctgatggctgtcttttgcacgggggcccccttcacgtcacatgactctctagattggcagccactgagatcaaggggtcctgaggaggctggaggccccctgggaccggtag

SEQ ID NO: 37076 - DNA, 2468 bp, Bovine  19866881082580
  misc_feature (1)..(1): n is a, c, g, or t
ntggcctttgttcctgtttctgcccagagcccctaaaacccttggaatttccgactgataaaagtggtaaaagtgtctatatattcacacatgacctgttaatgaggtgactgttggccagcacctaaagatgggggctggttgccagggaaatcaacctcctgagtccttcctgtttcccaggaagcacatcagacggcaaggggtcagttgagcaccgattgctgtaagggtcctgatgggggggaggggcagcctctccctccccgccatagactcacatggtgcagaacacaccctcacgccatcagcctgggcccctgactgctctcagctttctgctctgtgtcacctcttcataatttttgtaaatacttttaggtttatagaagagttgcaaagatggtggggggagtccccgtgtatccttcacccagcgtctgctcatgttagcatcctacggtaacagccgcagtacaatttgtccagcagaaaaattaacgtaagttcagtgctactggcttccctggtggctcatctggtaaagaatccgcctgcaatgcgggagacctgggttcgatccctgggttgggaagatcccctggagaagggaaaggctacctacccactctagcattctgacctggagaattctatggactgtatagtccatggggtcacaaagagtcagacacgactgagtgacttgcactctcacttctcctgcaggctgggtggggggcaaatccagatacccatatcatatcacctctctgagattaagggtcttcccactgtttctgcctttctaagccaagatttatcttggttccatccaaggtacttggcaagatcttgccctattgtggctagcaatcatggcttaagagctgaggggttgggggtggacagaggccataaaaagaccttcaaaagtacccattgtatgtgttctctcatgaagagaaaccagacaaatgtggttcctgaccttgaccagtctgaatctaagatgcagcacccaggggccccacaatgggtaataatgagatcaattcactctgagaacatcttgagagccttgcgttaaaaacctgtacaaaggcagctatctctcctccctgcagggatgcattttgttatccacactggagagggaagagtgacaggaacgatgggcctgcaggtacggggtttgggggtcagggcagaatttcaaaaagaggactgcagagtcatcctgagagggactccctcagctcttcgcctatttaggagtgaggcagtcagaaaagaactcaagggcaaaacaatttcattgcatgcatgtcaggctgtacttatgtcctcttatttaaccaggatgcagaaagacaacttcaaccaatatcctaagggagaaccaagctcataacccacatttggcaaataaaatcaaacagaaggttcttggagattctcacatggtcgcccagtttcttcagaaacagagaagccgtggctttcagcacaggaactggcacactgcagatgctccataaatgctagggagcagaatgctggtcgtgatgcccttctgactgctaattactgtaatagaaaatgtgagtgcacacagctatagctaggctgaaaattgtctccccaaatgctaaaaccatattttaacagcagcttggctaccacaattagttctactcagctctggtcaaggaaagaagcagtacagattagaaagaacctaaggttaactttgtgaatctaatgaaaagttacggacctcgccctagaaacacgtccctcggtgtacacacaattagacatggattacaggaagctcgcagacccctgcagctatgtacctaaatggtaagactggttttccctcagtggtggcaggaggtgattttctaaagtttctaaaataaacatgtacttcttttgcaataaaaaatatgcagtaaaaacagagaggctaagggaaaaaaagtgaggcaattcgaacccacccggaggcccacggcagcatctgtgatcactgagctctgtgactgacaccaaattggacccagactgcctggaactatcccccattcgttttctgggcatggccattcataaagacccattactccaaacaaccaacctgagagcccttcaactgcgactccacacacacaagggagtgacaactggccagaaaggccccgaggctttctccagagaacactacagttactaatcaactcaaagacaaactaagctctccctaagagaaaatgcgtcaccccatgcacggatctacttgttctcaagaagccagcctaaacgggatgtgggtgagactcaacctggtactcagtctggaggccagcatgtctgcagggggatggtcactgcgctgcgtcagcttacaagagcatccgggcaggagggccgagccctagcccagctgggcacccaggaaa

SEQ ID NO: 37077 - DNA, 792 bp, Bovine  19866881085003
  misc_feature (1)..(1): n is a, c, g, or t
nggacaccgcggccggcacgctgggtcccacaggttaatgtttgacctgcagccacgtgtttttccactggttatttttatcctctgtacctggcagtgggcagcgggcgacctcctctgtgggcagaggaggggggcggggtgtgcagctgggactgctctgggcgagcaagggctgcaggcgcggcttgggggtcaggggcaggggagagagagaagggaccggccaggagccgggcagctcactactgctcagccacagcccaggccctgccctggggcctctccaggcccaggtctcctctcccgagaaggaatggcacaagtgaggggaccaaagagctgtaagggggtaggaaagttaaaaatgccctgccccacctccctgacctccttgcgttactgtcaatggtaacgacttactctcagaccctggacatcacaagtgagaggtttctctcttctgagaccccatggtcttatccagatggtaagagaaagtcaaagctgattggtcccaccccctaggccactccgatgggggaacacagccctgctctcaggcaacccccagcctaagggggtgggggctgggtcttcacttatgacaagagcttggctccttggcatccaagaaccccaaaactgaactgaagactcctgctttggcatacagctctgggtttctcaagccctcactctctctccgttttcctcctttgcagtgggtgtccgccctgctctggctttaggactgtttatggcccagtggccaccgagcctttctctccc

SEQ ID NO: 37078 - DNA, 1282 bp, Bovine  19866881132341
  misc_feature (1)..(1): n is a, c, g, or t
nagaaaatggggatagggctttcctggcagtagggtggcggagagtccacctggcaatgcgggagacatgggttccatcactgatcaaggaggattccacatgccacagagcagctgggcccttgctcttgcgccgcaattgcctgtgctctagggcctgggagccgcaactactgaagcccatgcagcctggagcctgtgctaggcagcaagagaaggcaccacagtgagaagcccgagcccggcagccagcgggtagcccctgctctccaaaactagagaaaagccctcgcagcaatgaagacccagcacagccaaaaataaaaaaagaaagaatctattttaaaaaagaaaatggagacaataacactaccaattccacagaactatggcaagaacctaatgaggtgacatgtatgcataaagcacaggggtgactcccctggcggcccaggggttaagaatccacctgtcagtgcaggagactaagatccctcatgccacaaagcaactgtgcccttgctccacaactgctgagcctgtgccacaactaagccctgatacagccaaataaataaataaatatttttaaaaataaagcacaggggttggcatggagtgagtgcttataaacacgtcaggctatggtggtgtcattctgagcagggtagaggttcccggttgccaaccccactctggcctcagggaagcagcttctcccagcgcttcttccctcctgtctactaggatgtgctcccggaaagctgccttctgcactctcttagccagccagtcacacctcagccacccaaagacttagaatcatctttgaaccctgagacctcttcccgtccaactttgttttttctgacttggaaggcaaaaccttctgccacctacacagcttgccccaaatcgtatttgcttccagactacctgcaaaatcctatatatccccaaaatggagctttacacaccttggccaaaaaatcaagtttgctcaaaacactgtggactctatttctttttgtgaattgacctcagacttcattgtacaccaaacaaggaaatcaacctcataatttggtgccacaccttgtcttgaaccaaaaaaaaaaaaaaggtgttgttattacctgttcagtctgctcactcttctgggtcacacatcttggcattaaataacttttggctatttccacatactattcagttcccaaagatgaaatcctgatatcattgaggaaaatttgaacggaataaaggttctgaagccgcttca

SEQ ID NO: 37079 - DNA, 923 bp, Bovine  19866881181043
  misc_feature (1)..(1): n is a, c, g, or t
nttttttgatttgtgggtgtgcacaaaaagatgttgtatacacccacaacagaaagatgttccattgtggcacaaaaagatgttccattatgcctctgttgagtatacctcttcaccagtgcttttaggatttcatatatacactaaggaaagaacatagaatatgacaacttggtgataacagaagagcagagagtgggagaagatgtaatttcttgtttggctttggactttttaggaatgagaagcttagttattaatcctgtgagggttaattcatgagaatctgaagtttgaaataagaaataacatcagatgaacttacggtaaaatgtaaaactcaatggatgtgttggtgaagggtccttaaatcagataaagtcaaatatgtgaataattatttggttctctgaagagaacagccacagaatgcatgtgttacagttacagcatatattaacctttttggaggacacatgcacataaacttgtatatacccttttagggatacatggagtctctctttgaaacctgtccgtagatctttagctaataacccctacctaagagataatgtaatcactcaacctttacttccataggagcatcacctaaaccggcccatgtggagggcaagtctcacctgcttttggatgtttcatggagagacattttatgagcataaagtcttaagaattagtatttatgactgaaaaatggcttgttaattttcctgtgtttctttctgttgacatttgactactcaggggaaatgctgcgtaagaaacgaagggagaaggatggtcacaaagatccactcctagtagaggtgagtcggcttcaggataacattatgaaggacattgcagatcttcgacaagaggcagaagaggcagaaaaaaagcagtctgaactggacaaa

SEQ ID NO: 37080 - DNA, 2000 bp, Bovine  19866881195600
  misc_feature (1)..(1): n is a, c, g, or t
naaatatatatttttaaatttttgatttattttgtatgcatgtgtgctcagttgtgttcaactctgtgacctcatggagttaggctgaggctggtcttagttacagcatgtggggtctttaattgcagcaggtagaaatctagtcccctgaccagggactgaatcccagtcccctgcattgagagcatagtcttttaaaaatatatatatatgtatatatatatatgtacgtatgtatgtgggtgggtgtgtctacaggaatcccagaaataaaactctctaatcttccgggctcagtgacttaacggcaagggaagtaaaatggctatccagttccaagaaggaccgtgctgggtcacccgctcatgaatgtttctgccagagcctcacgctccggaaccaaaggagagtacggagtcttaactgctggaccattagggaagtcccctcgtagagtacatcttacagatttggaagcaagttgaggccgaatgagagcacagaaggccagatagatgggagccaggatgccagttctcagcaagtaggggtctaaaggttggggagatacacagaccacctccagcaagttaaagctaagaatgtggagcaagtgataaagcaggtcaggatccattgaagccaaaattttggagatttttttttttaagttcatatctagcttctgtcgaaatgttcttgcttcctgaagagttggtgtttgtgagcagttccagaattttcagttcttagtttgttcttctaatactcatcacactgcacctggtaccttgaaagtgctcatctcccttactagtctataagcctcctgaggcctgacactatcttgctcatctcacccccattgtctagtgagtgctgtttgcaaagggatgtcaacaaatatctcttgagttgtagttttaaagttgaattgaattagtggaaactactgtgaatttaattttacacatgttgagagtacagacttgcagggcattcagagggaatatcggcaatcagctgaaataaaaagacttgagatctggagggagtggctggatggacagacatatttggatgttctccacatatggatgaaaacctaagaagtgtgtgtagaggtaaaagagctctaagttgaaaattgaatagagggggaatacaaatttatttattaagccaacatttaccaataatctattttaaaattattttaaaaatgttaacatttatttatttttggccatgtcgtacagcttagttccctaaacagggatggaacccaagccccctccagtggaagctcggagtcctaaccactggaccaccagggaatttcttaactaataatttagggcgttccaagcatttaagtcggagaaggcgatggcaccccactccaatactcttgcctggaaaatcccatggacacaggagcttggagagctgcagtccatggggtctcgaagagtcggacatgactgagcgacttccctttcacttttcactttcatgcattggagaaggaaatggcaacccactccagtgttcttgcctggagaatcccagtgacaggggagcctggtgggctgctgtctatggggtcacacagagtcggacactactgaagtgacttagcagcagtagcatgcatttaagtgggtatgattatagaaataccatcaaggatcttcagtcttttagtggtagcaatagactaatgaagagatgattgtaaatatattaatattataaatattgtaaatatattaatattatatataataatatgcaagaaagtgggtatgacagtgatttaaaaatgcttttaaaaattaacacaatagggttttttttttttttttggttgtaatgagatcactgagcatcttataaaattctgcttcagagcagaaatgaggcaaatctgcattaaaatttgacatacttgttatgcggtgacctaaaaaatatatgtacattttaataaattctaa

SEQ ID NO: 37081 - DNA, 948 bp, Bovine  19866881257198
  misc_feature (1)..(1): n is a, c, g, or t
naaagagtgaggctttacacagaatagggctgagactgtcctggcagagagaagagcctttacaaaggcctagaagtgcctgagaaatgaagattcccccaccccacccgcttcgggtgagagagggggcggagctgggctgatccatggaaaaaaagcccctgatgacggatcagggccaatccgcctttgatgtgccagttcgaataactgaggcctggatgcttctaagaggcaggggccaggccggcctcctgggggctgctggaggagggggacttagcagcgtgaccgtcattgcgcaggtgctcaataaatgtcttaatgaaggcattgattcactgattgattcactgattgattgataggggtggcgcttttctgagagactggcaagtgcccccttctaatgcctcagtggagattatataaataccctgcaaattccacccatgggttagtgcctcctccaggtggcctcctcaactctcctggctcctctactcagagacatcagcctctacaacagtacaaaattagcaaaaaggatttccatgtacatataaaatttcgtgtacatataacagcaataataattaacatttagtgatcatttactgcatgccagttgctttatgtgtctgacctcgtaaacctcggaacaacccttgcaagtaaacacaactagatgcaggaaaaaatgtgcgtccaagagaaatgtttttaaatttcttttggttctctgacacacatttttcacattttaacgtctctgaaatcaggattgccctgcaatcaataacaagaaggcactgtgtcagagtttaattagcagtgttcttttcttcttaacggtgcgtaatttgtttgtcttgcttttgatgaaatatagttgattacgtccatggtctacataactgaccacctgcccttttcagtcaagagcga

SEQ ID NO: 37082 - DNA, 1298 bp, Bovine  19866881290103
  misc_feature (1)..(1): n is a, c, g, or t
nctctgtgaagaagtcttgccttgaagaaatctacagatctggtaaggaagagccatgtacatggtaagtactgtcttttattagatacttaacacaaaagtggaaagtatttttggaggaagaactaatttgctagacacagtggttttcaaatattcccccttcaaactgtaggtccccaatttataaataagctaaaataagcctaaaagtactggtttgagtacatgtaccttatgcccccatcactcagttgacctttggttggcttctctgtgtaatcaacatgtcccacatcagaaaagccacagctgacagccacacacataagcaaagtaagtatacagtaatataaacagacaagtgcaaaaagctacaataattcatttaaaaccttaagctaaataaatattcacacttcaataggaaagagctgaacagggcagtgaccctgaaggctcaagcacttccctcttaaatgtgtatttagggtctaaggaaatgacattgcccagaggacagttattattttctcgatcaaattcatttctcaagttcattaatacacagattcagcaggggtggggatgaggctggagaacacattcctttgtgttgctgctggtcctcaaaatcgcactgggagtaacaaggtcctggacaaggtgacttgcttgaggacatattctaagaggcaaagccaggtttggaaccagatctcttaggctccaaggctcaggcattctaaactgacactgcttccctgctgctgctgctgagtcgcttcagtcgtgtccgactctctgagaccccatagacggcagcccatcaggctcccccgtccctgggattctccaggcaggaacactggagcgggttgccatttccttctccaatgcatgaaagtgaaaagtgaaagactaacaattaaaaaaacagttatgatctgaaaaatgagtttttacatccttatcagcaataggatttgaatccatgcctacaaagagatgggagccttaactcaagatctggattatttttcttattaaaaatttcatgcagttataagtctccttgagaagtgaacttattcccacctcccaggttacagataaaatattaccaccctgctgcaagcctgagggcagcactagtgtgttaatggcttaaaaaatgattccagtgtctgcatgccctcaggcctgggccgtttattatgtgaggccagagggctcttgggatttcttttgctttgaggagaactggcaggaacaacctgcgggtttgaggagtgggg

SEQ ID NO: 37083 - DNA, 1358 bp, Bovine  19866881322742
  misc_feature (1)..(1): n is a, c, g, or t
ntggtggctcagctggtaaagaatccgcctgcaatgcaggagacctgggttcaatccctgggttgggaagatcccctggcgaagggaaaggctacccactcccagtattctggcttggagaattccatggactgtacagtccatgggggcacaaagagtcggacacaactgagcgactttcactttcacttcttcagtgtttccaaaggttttggaggtggggaatcctgtttagcattcccaaagtagctgaatttttcaaacacacacaccccagaactgactattgtgggaaagagtgtgtcctttaaagatcatgactcaaaacattttgtcctctgcgggacatctttttatatgccctccgtagtggaggagaaactgtcttataagccataaagctctgagctaaccagaagtggtcttaagaccaggaagtggtcttgatattattaccttttgagggtagctctgacttttggaacatctaaggctatttgaagccacgtgtgctgaagtaagttcatgtgaagctcagcagacccccatgtggtttggaatccagttgcttgtctctgggtcctgggctgggcagggaagctgtgagcccagagtgttgtcaagcttttttcttaagggtttcccaaggaagatgccagagtgtttcaagaaaagatatcctgcctggggcaaacgcatagcctccctgaggtcagctttgaaaaggaacagcactctttatgtattagaagatgctatttttgtactttaaagccacaccctgcatgtagtggtggcttccaattattaattaatttattttatttaacagtcactggcacacagagcttatcatgtgccaggcagtgatctaagcactttacaaaaataactcatttaatcctaatagcctaggaagtagatcccagtattatctgcattaaatggattaatcagaatatctaatttacaaaagcatattaaaaccccccgccaatgccgaataactgaggacttgtttgataggagttttaaagtgtttcagtctgtgttatggtctgtttattatttactgtccttactggttggcccctccttgctctattgaggaagaaggaagttatctatgaatcagactctccttccttctccatcccactgggcatgggatggagttgggggtggatgggtggtcactccagagttctggggttggttgaaatggctggaccctgtctctccagagaccccccaacctctcagtcccacatggccccaagcatgcccagagcagctctggggattaggtgggggagtaagagttccagcgagaaagcagggcttaaacccgtcctcag

SEQ ID NO: 37084 - DNA, 1022 bp, Bovine  19866881340104
  misc_feature (1)..(1): n is a, c, g, or t
ncccgcctgcctggcagggctcttgcattcctcccgccagctgtctccctgctgggggcgggggcgtcgtttagccctgccctcctggctgactgggtcgcccgggaataggaagggagcacttatgggttccagggtcctgggaagccagcactgtcagcaggccggctgattggctacgctggagactaccttactagccagccgcctgccccttcaggatgtccgggcctgcgcacgttagggagtgtattcactcggctgttagggatgccggccctggttacgcctcccccttccttttcccggtaaggagagggggcggggcttcctcctcttactgctctcgggagccccaccttccgggtggcccttcacgaactggccaatcggaggaagcggcactgtttgccttagcaacgccttcgccaatcaggggcttcgagctccactgcttcgccaacgtccggcgctgacccacctccaggatctgaacccccctcagttctctgggcttggttctcagctcgtggctttctccttcttctaagaacaaaggttccctgaggggagagtccgtgttctagactctccaatattttagtggtagggttagtttattcccaggacattttgctgaatgaataaagtctttggtgcttcattgccagacccctcaagatcgctctcaaaccctaagttccctgaaaaactgagaaacctatctcagaagcaggatctgggagaggctcaccactccatctttactctgggtgtaggatacactgaagcccggcgtttaccgtcaccaacctgccgggtaccacctccaccatccagacagcacccagcacctctaccaccatgcaagtcagcagcggcccctcctttcccatcacaaactacctggcaccagtgtctgctagcgtcagccccagcgctgtcagcagtgccaacgggactgtgctgaaaagtacgggcagtggccccgtttcctccggaggcctcatgcagctgcctac

SEQ ID NO: 37085 - DNA, 753 bp, Bovine  19866881370755
  misc_feature (1)..(1): n is a, c, g, or t
nctgcaaagtgcccatttccttcacctctcccaaccccaaatcaaggctatgcgcacaaagtgtggttttggctagtgaatcccatccacccccaagtccactcccgcctcccgccatgcctgactccgactgagtttctttaacttgtagaaagcaagagcaattgggcccagatacctaaggcccctggctggagtaccagtctggacctttaagatcagccagcactagtcccactgcctttcttgtgcaccaagactcaaaaaagagaaaaagtgttgcaaatggaccagacttccaggctctgagggagagtccccacatgacttcaggacggctgccggccctggggctgcgggcagccggagccgtggggccattacctggatgttttcttcgaaccctccccattccgggccggccccgtttcgggcgccgccagtcggcgcggctggagttgccatgtccctcgagggctcccgtcgctgaagcccgcgcttgtcccgcgcgcggaggaggagtgggagagacgtgggcctgagaaagggacaggtctagggacaagaaagaaaggtacgatgggtcggaacgcaaaaaaagagaaacccggatgtttggctcaaactgacttccggtagctggggacgtggacggaggcaaggcacagtctcgcgatatttaagattctaggaggtggtgcgttgctacagaaacagaggcggacgactagtgcgcacgcatcagttaggtac

SEQ ID NO: 37086 - DNA, 681 bp, Bovine  19866881373866
  misc_feature (1)..(1): n is a, c, g, or t
ncgcatgggggctggggtacatcatgtggccgcccacagttgtgggcacagatgacgtcatgatggtggcaggcaacgtcactggcaaacacagacacacgtcagggaggtcaggactggtgctgactgagagcccccatcccacccccaggaactccaggcctccagagccctcctgccattgcccaggtcgaaacctagacaaagctccttcctctgttccctgtcatcgactgagaaaagccttatttttttcttgaacacaaccgcaccaactttcagtgtatcctatcacatcgtgctattcgattatctatctgctttgttccaagaccccaaggccctgggaaaaacaaagattacaatgactgacccaagccaaggagactcagatactcttctctgacagagagcctacatcccatttcacatttgttcttctcctccctcttcctcaacatgcggctaacagaaccagcttttaaacaagcacttctccaacgttaatgtgtgtacagtcactgggggatcttgttaaaagtgcagattctgattcaataggtttggggtgaggcttgagagtctgcatttctatcaagctcccacgtgatgctggtcctccttccacagaccacactttgtgtaacaagggttgtgattaacaagaacttcaaagtaatt

SEQ ID NO: 37087 - DNA, 1394 bp, Bovine  19866881462904
  misc_feature (1)..(1): n is a, c, g, or t
nacctgtgcttgccccccgcctcaggtcctgcaggctcccagtatccaagggtctctgactggtggcagcagtcctgggaggcaggaaagggcaagcagagggagttcctctttctggaaggacctcccagttccagagcagtctagtgacttgtcctaaagtccgagtcaatcaagtgacctgacatctagaaaaagaggtgttgtatttgctttttctggttgggatgtgggaggggctggaaaaaaatcttttaggctggccaggtagtcctgggtggtagaatattccttgtggtcctccccacggtgcctactgctaagacgtgcctactgtgcaccctaccccctccaatctgcccaaggagctggtaagggggagagagcagaatccagaaaggaaggagcgagaggccagaagggggaggccgaaagggaggaaagggcttggggacagagggagctggagaatgagcaaacaaactgtgtcctggaaaacaacttgtttcccctttccaggctccctgcctgccccgctggaggcggtgatttagaataacgagccataatttgattatgttctcttccagcctcgcagggtaaacaagaatctcccgtggaaggaagggacacgctgcccaggctctggcacactccccagggcctgaagaggggttccctctcctcctgggtgcgcctgaaacacgtagttgagcggcttcaccccccctccattttctaccagggtttacattctccggtgtctcctgcccctcctccccttcttcctcttggcctgccccagtaaggtcctcaccctgaagcctgcataccgtgtaaatatttaaacccatctattatttcctgtttattagcagtgtaaatcctgagttcattcattgtgcatctgtctccctgaaccgtctcagaagaaaaggcccgaaggcagggccgtgtgtccacccttccctgggaacagccttgctcaggcctgtggtcaggcatgtcactgattctttaaaaatgcgcttttactttttccacatttaaaaattgtggtcaaatacgcataatataaaatttatcatcctaaccgttttttttaagtgtacagctcaggtgtgtaccgaacatttgtaatgtaccactgtcgccaccgtccatctccagaactctcttcatctgtggatgaaattctgtacccatgaagcactgattgcctgttcctctctctccccagcccctggcaaccatcattctgttgggttggccaaaaagttcattcaactttaagtacaaataaaagataccttttccattttcacttagaactgtattgaacaatgtattcattaagctgaaccaacttttggccaagccaattctttctgtct

SEQ ID NO: 37088 - DNA, 1874 bp, Bovine  19866881502593
  misc_feature (1)..(1): n is a, c, g, or t
nacgtggccaccatgctcaacatcctggtctggtgtatcggtgagtgctgcgtcctctcaggagcctgcctccaggcatcgttccaccttgacccgcctctggctctcattcctcctctccacagggcacctcttttctcccccccaccagggggcttccttgtctcatgcttttacacctgagcccttgacctcagaatcctcacccctcgggcttttggcttctcctgtctctcctctggggagggtctttgtctctgtctcttgtgtcctgtgcctttggcctcctccgggcatggccactctctgggggtggggtgaacccctctcactgctcccaccaggcttcctgtctcctcatggcggggctagcccctaaatgtaccttagctgtcccgaagggaaggaagtacggagatggctcagcggcagagtttgggctaaccccttgtcacttctgtgctcttacagggaccagaataagtacaaggaagctgcgctcctgctcaatgatgccctcagcatccgggagagcaccctgggccgggaccaccccgctgtcagtactccttgccctccttgccctgtgcttcctccgcttgtccctctgctgccctcagcccactccccaggggtctcaggagcgaggcgtggggactcttttctcctactgtccactcatcgcagtggttctcagctctctcagacccaatatcttctttttaaaaaaaattttaatggcaaaataattgctttccagtgttgtgttagtttctgctgtacaaaggcatgaatcagccatatgtatacatatatcccccttcctcttgagcctccttcccacccctttaggtcatcacagaatacacaactgagttccctgtgatgactccctcttataatgaatattttcctgaaatttaactcatataatgtaacctacctacctgtataatttcctcaaaagttgaatgatactctattaatatgagagaaacaaactaaaatataataagatatataatactttacagtaaagcaaaaatatagtaacaggttgtgttgagtacagcaatgttagaagacacagtagtctgatatacaatgaatgaaaaaatttagatatgaaagtcgctcagtcgtgtccaactctttgtgaccccatggcctatgcagtccatgggattctccaggccagaatactggagtgggtagcctttcccttctcctggggatcttccccaacccagggatcgaacccaggtctcctgcattgcagacagattctttaccagctgagccacaagggaagccctttagatgtagaagaagtaaaactagtaagtcttttatgtaaaagtatgtactaggaatgcaaagtcaagtgggccttaggaagcatcactgtgaacaaagctattggaggtgatgaaattccagttgagctatttcaaattctaaaagatgatgctgttaaagtgctgcactcaatatgccagcacatttggaaaactcaacagtggccgcaggactggaaaaggtcagttttcatttccaatcccaaagaaaggcaatgtcaaagaatgttcagagtactgcataactgctctcatcttacaggctagcaaactaatgctcaaaattctccaagccaggcttcaacagtacctgaattgagaacttctagatgttcaagctggatttagaaaaggcagaggaaccagaaatcaaattaccaacatccattggatcatagaaaaagcaagagagttccagaaaaacatccactttattaactatgccaaagcttttgactgtgtggatcacaacaaactgggaaaattcttcaagagatagaaaaccagaccacctta

SEQ ID NO: 37089 - DNA, 593 bp, Bovine  19866881594095
  misc_feature (1)..(1): n is a, c, g, or t
ngctggcttcccctggggaattgaggaggggtggggggcagaaacaagcctcccaggcattcctcctgcattcccggggccatgccctccttcctccctgcctcagcccagcaataaactatttcaggcttgcaaaatctgggctgttactctcctgcttacagcccccagcgaggccaaggcctgggcccgcatcaggaaacccgcagcatccacagagcccagatggttctggtcaagttggatggaggaaaccggttagccttttgggccaccacctataggagccggggaacagggagggtggggtctggcccacttcacaggtcagagccccagagctggggacagggtaaagggaggagaggtgaggaggacaggccagcattgtctggggatccagcaggggctcagtgtattcaaagagatgatttttcagtacaaggctcatctccccttcccccatccccagggtcagtcatcatctccattttcagttcagtcattcagtcgtgtttgactctgtgaccctataaatcgcagcacgcatccctgtccatcaccaactcctggacttcacccagactcacgtc

SEQ ID NO: 37090 - DNA, 1770 bp, Bovine  19866881730068
  misc_feature (1)..(1): n is a, c, g, or t
ncttgcagggtgatatatcagataatctcctctcattctagttttagaaggattcctagaggcctgtcctgtcagaccctccctcgcacctgcgtgggacagcctagccgtggccttgtgagctgggctcagctgaccagactctaccttgggactgggtatcttgagtgtcctaacactagcatggaagaggcctttggaatccagccaagtaatttatgtctcatttccagtcttccagtccaacccctgagctacttcctcaatcttttgctaacaaatgctattggtggtggaggaggggcggggaaccttataaatgccagagctggtttctgttactcacaaataaagaggagccagcaaaggaaaatgagctggacgggacttcagagaggccagaggaaaactaggggagtggagtttcataaaaaataagcaaaagagtatatatatcttgaaggaaggagtagccagtggtgtcaatttttatttaaaaaaatgtccagtgtgtttaaataagcataggaggagcaggcaagaaggagacacagctgttaacaatgattaaccataggtgggaggctcagatagatgctctgttttaaaggaaggaacctaactcatacttgctcaagacaagaacaacaaagaagttacttattggcttattggacctgtctttggcacagcagaaataatgtcatcaggactggtctctgctcccctgcatcggcttccttctcaggcagcttctgacagatgcgcatccagttagcaactccagagcagacaactattaatattctccttcccaggggcttcagtaaaatcccagcattggctctattggcctggtttggttcatatgtgacttcctgaaccaattaggacgtgttggcacttgagtggccaggcctaaatcacatgtctccccctggagatgggggcggaggtgagtcatctccatctaagtcatttctatcgagggctcagaagaaatctagacatgatgatcagaagaaggagtgggtcctgggcagggaaataaaaatctgtagcccaatttaccaggaggaacggtataagaactggttagatttgggttccctgggccatccctggaggtcagggaccaaggcccctggaggcatatttccctaaagcagtgggtactgggcagacctggaacatgaaggtggtcctggtggtggggagacgtgagaataataaaatagcttaatggataagtgaagtcagagacttggatttgaatccaggctctgcagcttgctacctttttacttgtcagtttcatttctggaaactgggttaatgtcagaggtagaaatagtgcctatttcttaggattcttatgcgactcgaagggaataatctacataaaggtttagctgtgttcctggaagatggtgagtgctcagtgaatgtctgccattattacagtgttctttggggtgtcctatgccctcgagagggaggcaggcagtcttggaagcccccttccttgtgccatcagagtctccccagttcagggctcggaattcactcacgcactctatcacaacccagccagatcccagccccagggatggggagacgagtggagtcctggtggcagggtgtagtcagagtacaccccgacagggctgggtggaggcactgggggagatgctggagggtcagagactgggcaggagaaggtgggtgaggagggtgaggggaccaggaaggcaagggataaggggaggg

SEQ ID NO: 37091 - DNA, 1515 bp, Bovine  19866881777674
  misc_feature (1)..(1): n is a, c, g, or t
nactgtagcaccagggaagtccctcattctcttgagtatagtccttttgattttgtcagtggtttaagaagttactacatgcttccctagggatccgaagtccttcctaggtattgctgtcttttcatgcagtttcttatatgcattgttttgtggagtcatgcttagagtttacattactattccaaaataccccagtaccatataataccccaaattagggtgcctcttaaaggatgagattgcattgaaccctcttcctcatcgatctttcagcatttggttggaggtctgggggttgattttttgttttttttcaacagtaacaatcacctgaaatttgaatactggagcacagaccatatacagtccattccaggggaatatctgtggtgctcttgatgtgctgctgatctcactgtcctctcatctcacaggaccgctgatggaggaggcttagtcgaaaaacactatgtcttcctgaagagactctgtcaggtgctgcgtgccctgggcaatcagctgtgtgcattgttggtgagcactttctggagcgtttcaaggccatctgaggacaggatttagaaagttgtatttgtgtaaggggtaacacgtgtccttgactttagcttgagggaacattgccctacagattatttcttataattctgtagattaaattatcttagttgaatttgaatgatagagatttatttaatgtcagttattaatatctatagtaaatgttcacatctgttattccataaaatcagtgttgcttctcttcattttggtacttgtaaaatttgagtctacctgttgccttaccctttaaaaagtcctattagatcatgaaacatggattcaaataaagaacccttttcccaaattaaaggatatattattgaatcattttaaaaaaatctttagtctgattgacctgaaaataactcccttacatgttcaaagatcgaatgttggtacagacttttgtacttgatatcagtgccttttttggtggcttgaatggcttgaggggatagaagtttcaggcataagatgtgtaccatcaagggattatttaataggttgagtcacagatatgtgactagaccaggtctgaagaaataagtgatttctgaaatgaatattcctttttttttttttttaatttttattcatttacttgtggctgtgctgggtcttcattgctgtgcaagggtcttctctagtagtggtgagcgggctactcttcattgcggtggtttctcttgttgcagagcacaggctctaggcgagtgggctcagtagttgtggtgcacgggtttagttgccctgaggcatatagaatcttcttggaccagggatcgaacctgtgtcccctgcactggcaggtggattcttaaccactgaaccaatagactttaatgatgattgagcagcttttctggggttttgcccttgaaatgatgtcttccttaggccacaaggaagtataataaagtcctttcaaaa

SEQ ID NO: 37092 - DNA, 1273 bp, Bovine  19866881898618
  misc_feature (1)..(1): n is a, c, g, or t
ntactgcataccccttgtttggaaagagtgtccaattctactagcatgtcaggccagtgctgtggccactcccgcttgatcatttctactacaattcgagacagaacatctttaatatggttctcctcttccaaaatgttcagtgttccctgcaaaagaataagtgacatcaagaggtttgcaagactgaattcaaaggaaaaaactgggctgtaagagtgtagaaaacttaggagcaggcctactttcaaactaaaccaaccaacctgttctccatgtctgagtcacctgtcctgcattctcactgatcattcttccctcttaaagcttaacagagggttgcatcagctaataaaatggctgtcacatggagcaaggaagacatcactgttctttacaaactgaagagactttcttattgtttcattttgtatgagggccagagtagaagagtatggaaataaggaatacattgaaagactgataaagtgagagattcaggagcaactgaatattttcctaacagttctaggtttagaagacacaggaagaccattattgggactctcttctcaagtctggtatcaagtttaatggattaagatttctatcacatctccccagaactaacaaaatataaattctaggtagctaagttaataattttgaagagagttttttttttctatcaaagacactagactctgggggatgaaaaggacatgaattccccttttcatgtcctttgttaaaaagaacataaaggctgtggattctaaatgtgtttgtacagttatagtcgaactcccaaaataaactcatttagcctatttttttattgctagtaacataaaataattcagtttaaaataaaaggaaacagcaaagtgcaatctaatctataactgattaatctaagacttttattcatttgttaaaaatgtttacttatctctaccctgtcttcataatttaaaaaacagaagtcaacacataaaggattaattaaaccaagtaaatgggatgaactgtgatttccagtgatgctggttctttttaatttgaaggtaacatttaatattatataaatatttaatattatgtagaacccgtgaattgttacacaaatgctacactggaaaagtcacactttgtctaaactacctcgtaaacccaagtcttccaatcaaccattccttacatttgcgatcagctccatgacactgttcttcagatagaccttctccaatcgagacatgttgttccatcgaaa

SEQ ID NO: 37093 - DNA, 2000 bp, Bovine  19866880518607
  misc_feature (1)..(1): n is a, c, g, or t
nactgacaggccccatgctggggtctctctcttgctgccccccaggagagagccaggcgaacagatgcctcgggctcggagcctttgtctgtctcctgacacccgggacggatgtgctggggtctctctcccactgccccccaagaaaacgccaggcagacgaacgcctcatgctcagagccttcgtctgtcccccaatacgcaggacggcaatgggtacatcagcgccgcagagctgcgccacgtcatgacgaacctgggcgagaagctgaccgacgaggaggtggacgagatgatcagggaggccgacattgacggggacggccaggtcaattatgaaggtgagctgccggccccgtctgcgtgcccgcaggggctgggggagcccgctgtctgctgacctccctgtctttctctccacagagtttgtacagatgatgactgcaaagtgaaggcccccgggcagctggtgatgcccgttctctcgatctctctctccccgcgcgcgcactctcttcaacactccctgcctatcccggttttagcaaacaccagttgatggactgagaatctgataaagcaacaaaagatttgtcccaagctgcatgattgctctttctcttcctcccgagtctccttgcaggcccccgccatctcttctttcggccctcccgccttccattcacaccttccaaggcctgatgcattcataagatgagccccccagtccccttcagggggcctctgccctcctcctccagcccgggtggctcttgtccgttttggtttgttcctgttcgtttgtcatcttgttttggggtgccggggtggccgccggcgctgtcctaggacctgatggggaggggcccgaggccctcaggagggccaggcgcgagaggcacgccttttgctgttgcatgcaaccagcctgtgataccctgtgcccatcccagagcctgtcggggcaggagtgcccagtgcggcgttccagaaggactgagggtggtgggggagggcccggagctgcggtgttgcctggatgtggcccaggaggaggccagggggcgagggaggcttggcagctggcatgctcttagcacgtgaggaggccggccaggctgggtagcgctcagatcccattggctgctcttgtgaagcatcagactggctccttgaggcggggtgagtggggccagctcccctggtgcccctgcacgctgcccccatcccgtgttcctgaagcgatctcaagctgtcctggtgctaacgtcccacgcccacccgcatcccagtcccctcgagggaacgcatgtggagttggccgctttgtcacatgctactcatccttccattttttctttatactccttaaaactcttaattttgtctgaaaccatgccgggctagctgaggggcggggattgggaggatgtgccccaccaagcgctcaagagaacataacctgcaataaaacagccctgccgggccgctggcccctcccgcttcccgtggtggctcggcagctccccagccccatctgtgctgtctgcgcgcccgcctgcctgcccccacactccccagcggagagcatgatccgcaacctggcttctgactttcgcctctgggacaagtaagtcaacacgggcagttcggtcgtctggatttttttttttttcctgttcatttcatctgcccccaaccctttcatcccaccccacccctcaggtcgatcaagtggcttttcctgggacctgcccagctttgagaatcttctcgtccaccctgtggcaccagcctccagggaagagggggtggggcatagcgggagacccagccaagagctgagggtaagggcaggtaggcgtgaagctgtggacgttttcggagtgttttggtttttcttttttttttttttcaaaccgggcaatatttgtgttcaagctgtgaagaaaaatatatatcaatgttttccaataaaatacagtgactacctgactgct

SEQ ID NO: 37094 - DNA, 1017 bp, Bovine  19866880592497
  misc_feature (1)..(1): n is a, c, g, or t
nttgtccctgtcgccatcctccctgtccttctcccagtcctggctgtgttgcccccctctccagccctttctctggctgctaatgagcagaggagcctttgaggtggccagggttgggatggggggctccccgaggggggcggagggggcaagctgctgctaaggccctaatgaggccccctctgtgcccctcccgccgtgatcttaattccttcttctccctggagccactgctaattggcctggggagggccccctcctggttcttgcgctctccccgggaggtgaggacacctggatctctggatccaacacctgtgttcctgtccttctgtccctccctccacctgcctctcggcctcccatctgtgcttcccctcgccttccctctcttccctgtgttccttccttcacctgcctctaggtaccccatctgtgcacccctccaagccttctcttggccctctggtccctgttcattggtccctctttcggccggcttcttggtcccccatctacgcagatctccatctctccccttttcttctgtttttctgtctcttcctccactctgtgcaccgcatcggtgagcccttccacgcacgccgctattactgggttccaccaccaccgccaaccctatctagggacccacctttgccctagcctactccttcgcccccactcccaccggcttttaacctttccccgccgcagccatgtccaacaacatggccaagatcgcggaggcccggaagaccgttgagcagctgaagctggaggtgaacatcgaccgcatgaaggtgctgggtcggggtggggaggaaggccgcgggcttcggggctggagtctggactggtcagacttgggagtggagccgggagcccgggtggaaagatccccttcggaaccggactgggctccaaggaagcggggtggggggtgaggagcggctggacaagggggagggaccgagaaggggcagggccacacctggggtggggcctaagggcggg

SEQ ID NO: 37095 - DNA, 1259 bp, Bovine  19866880632235
  misc_feature (1)..(1): n is a, c, g, or t
nctttcctgcattggagaaggaaatggcaacccactccagtgttcttgcctggagaatcccagggacgggggagcctggtgggctgctgtctctggggtcgcacacagtcggacacgactgaagcgacttaccagcagcagtggcagcagcaggcaacataaaaactcaaataaattcagagaattcatcagaattcttttcatcaaatgaacagaaatgaacaaaaatgaaccaaaaccttaaagtcaataatggtgaaaacaaatgtcaaagataatttaccagattctgcttgtcacaaaatttaaagtcctgagaacttaggcgaaaggagccataaggatctactgttcattccctctcactgtctcatatacaaatgccctaatgtttgatgagtcagtggtctaattctgtagatgacaacgaatggtttttatttcacatgtattcatacagaactatttctaaatttaagtggtgaagtaaacaaagtttgatcatagctcagttaagaaagtccttccagtaaatgctccttcacagctggatggctgctttaatatgcaattgccctaggccacaggggggaaaaaataatcaggcttttgatctacttaagaaataaaataaataaacctagaacatgcaaaaggttccctctcccaagttaaggaaggagaatgcttggacggttttctgtgaaaccacctcttcctctggatgaatttcctatattccacctccaacagaagatcactggagaaaacagctcagggaaaggcagcaaaggcacatttttcaggtaataaaccaaaaacccaatcatatcagcccattcctggcactcatttctctatcaaatcagggcagtcaaaaggcctgggagtgtcagggcccacccacatactcctggttcaccaatgagttccctccttctccccaagcatggagctacctagagaaattcagcttctgcagctggaagcgcctgcaataccagagggcagaaatctgagtgacacttggcactctttgtttcaacaaacaaccgcaaagagctttccaaagccaggccctcaccattttgaagactaggaagctgaatccttcctggggcagaggtgaaaaagaaacaagcccaccttccttcaacccttcccaaaggtcacacagcaaaccaaaggccatcaaggaagccaagcaagactggcagcttctgcagacccagaacagtaaacaccaagcgggccatacc

SEQ ID NO: 37096 - DNA, 1148 bp, Bovine  19866880767627
  misc_feature (1)..(1): n is a, c, g, or t
ntctacggagaaggagcccggtccacaaagtcgccattaaatatctgccctgctaaggaaaacaagggggagtgctccctccctagcccctccaaccctgctcctgttggcactaccctggggccaagaacgccagcagggctcggggcacctgggctctcctcactttttgggtctgacccagtagtttggcccctctgagcctcaggaggtaccaaggtccccaatctcgcctgcttcttagggaaactgacggcagagggaaagaccctaggcggttagccggcttcagctctccctgcaatacaggcccaaagccacagggcaatcgggacatgggcctggtagccccgcccagtggccattcatggaacaattatcctaacatgagcaaatacttatacaatgaggaccggggcccccgagcctgtgctcatcccaggtatgaacacgctacccgtctcagtagcctgatgaggcagatccattttacaaacgacaaacctgaggaactgagaggtgaagagacctgcccaagttgcacagccggaaaagggcacggccaagagggaagccaggcgtgggcagggctgccccaccctcacgtactcactcttcagcaggacacacatccagccctgtttcaagacgaggagaagccagggctcggacgcactggcttcatgcccaggtcacagcaggcgcgcaccagcccgggcctgtctggccctggagcctggagagcaaggccggcggctgctccagcccggcttggggccagggtgctcatcaggcctctcccttctcaggttcaggcagggagtcctctccctcctgtactccacacttgggaggagaggccggggaggaggagctggcccttctgaggaaggatacgtaggggttggtctccgagggtaaaccgttgagctcaaatatgttcaggaggtcatagaactggccgtgggtgtccccgcacactgtaatcttctctgtctggaagaaaagaggccgccggagagggaggggcccagagagagacgtgtggagggggcagaggggagaggaggggtgagaggtcacagtggagtgagaagaaccatggaacagacacaggcggggaccggaaaatgcaaaggggaggagag

SEQ ID NO: 37097 - DNA, 1376 bp, Bovine  19866880781930
  misc_feature (1)..(1): n is a, c, g, or t
nggaaccagtgcaggtgcagctgggccggggctggctccagagccctgactctgcttggagaccctggggtcgggggtgtcatcgggtcctgggtctccagcctcccgaatcaccagacttgattcccagtcctggctctggcatgaccgcccttgcccaggtacatggactgccatgtggagctggccgcaccagcgggggccgggctgagcaaggaaagatgtgccaacctgtgactaactttctccttcctgcttttccaggctgaccagctgaccgaggagcagatcgcaggtgagcttgcttccctccttccctcccccattcccccttcctgccctcaccctgccgcacgaatgcctctgcacccccagctgagtcttaactgcagccaggagggcatctgacagagaagctcccgtgtatgagagcgcgccagtgacaccagagcccacagtcctgagccgggccctcatcaggtggcagggctgtgctcccctcccgccagggatcactgggccttttaatcagtggctgcagggcgagcctggccatctgtcctggctcttgccagttaggctcagaaggtgaactcccctcgggggtcctggcccacttcaggagccacccaggagagggcttgtcacacccacctctgcattgcccttcgcgcatgcttgcactcgcttcttcctgggccggaagtgccttcccccagctctttgcaccaggcagctccttctcctcctttgggtcttgattcaaatgtcatcttggaaaggccttccctggtcccatctcaaataaacagccttccactactctctgtttccttaatagcctttctcaccatctgaaattaatctctgatgtctgccggctgcatctgcctgtcactagacaagtcccttactgggggcttttctgtgtgttggtccctgctgtgcctttggtgcctgcagcataatggttgctgcgtacatttttgttgactaaataactaaatgaacaagggagccatcacgtatcttccagtaagtttgaagaagtccttgagtcccatgtcattcatttttgtagactcccctaaagcccagtaagccacagctacaggaagtactgtgtgctgagaaggtttctgtgtcctgtctcccccgcccccccagactgtgagctactctaaaggacagggaccagctcccagttaagtcccacagccatgggccagcacaaagtagcccttggacctggctttactgtcagggtcaacaggctgcatgtgacaagcatagaaagcccagcttctgaagtccaggaggcaggagtggacttgccttctcttctttcttcccctcccttcccccctccaccgaca

SEQ ID NO: 37098 - DNA, 1039 bp, Bovine  19866880796307
  misc_feature (1)..(1): n is a, c, g, or t
naaacgacataaccctcaaccactgaagattccaaaggcaaggcttaagcaacatcccccaccttgccttgggtaccagcggttcctaagtcctagccacatcctcttccacctgaccaccagctaccagcctggtgggtacccttgtacccacctgtcaaactccacagagtagatgaggatcaggtagcgcttggagttgagctgggcagacctcgaaggccaaggggcctgggcggcccccccatctttcggttccgcagggactccagatctgtgtaggtcagcaggtcaagggtgaccgacttcactgctctgttggagagaatggaggagttgccaaaagactcaacatggccacacccaagagcacacaacccacacgcccaggccatgccctgatcatctgttgggctagctgggcttgcctacccagccgtggtaggctgtgggtcaagatggccctctggtgcaggaaatcatcagagggacaaactggaaagaaccgcaaactctcagccacaggagacagcttagtggtgtgacttccaagtgttgtctgcgcacccctgggggtccccaagacccttttaggggagtacatgcagtcaaaacaacttgcggaataataactaagatgtcatctgccttttctttctgtgctgacatgcgcactgatggtacaaaagtcatggtgggtaaaactgctggtgcccattagcagaattcaagccaggggcgtcgaatgtactagcaactgctatatattccacggctgctatacagtctccacgggggaggggaggcagggagaaacacacaaagaaatagataaataaaaacaaaatgaaacctatgaatgtccctgatgaacctgcaaaacttattaatttttttgaatcttgacccttgagcacacagatgtttactactctgtgtgacaaaacagaaagtccacatttggctgcatatccaagtatgacactttctaagaaaagcacttgtggggctgaatttggagctaaattagccacttttt

SEQ ID NO: 37099 - DNA, 1352 bp, Bovine  19866880801446
  misc_feature (1)..(1): n is a, c, g, or t
naactaagatcccacatgctgaggagtaactaagactgagagccacacctactgagccaggaaggccacaaccagagagtccatgtgccacaacgaaagatccctcatgatgcaactaagacctgacgcagataaataaattttcttttttaaagagtgggataacaaggcaggggaaaggaatagatgccaactgtggagctcatctgacatgactgacgtgacttagcagcagcagcagtgcagctcatctatgtgatataagaaaaaaaacagtagccatctcctgggactgggtgtaagatgagctgaaattagttctactccctaagcctcttggctccccatccccgggcccctcatcctactcctcttctcccatttgggaccccacatccaccattttatggagtttccagcctctaggttcactctctccaattctatctctgtgcagtagctagagggatctttctaaaatgaaaatctgattgcacctttctgacacaatctctcctctgcttaaaatccttccatgactccctagtgccctggagacaaaccttctatttcagtcctaaattttgacctccagcctttctgtcactttctctccctgcactctgcacctaactcggagaaatgtccccaaaggttctgcttttatctcacatctgtgtcttggcatattgtttccttggccatgtacattcctagcctttggtggtcccaaccattcaccataccctttgactgggtaagtccttcaggttttagctcagatgtcttttccaggaagcccttgattccctcccagtctggttcaggtaccagcgtccaccccaggcttgtacagcccctttagctgtcccaccccagccctacccattccaaattttcctgtctggtgacatatttgcctcccctttgcactgtgggccttgtaaaagcagggctaaggtggttctggtgccatccgtatcccagcatcgcctgcacaaagtaggagtccctcttacctgactgaggcccaggtgtttgctgacattttctgacaggtaagccatgtctccctcggcggtgagcaccataacaaagccctccagggccttcaggtagcaggcatccagcggttcgccccctgctcccacctggttccactcccctggtgtccgggccaggatggatggggtgtgtccagtcagccgtgagcccgccctggctagcctccctctgctttccttcactcagagggacttacaggtacccccaggtgagtggggcacatcccagtgacttggagtcccaaggaagagggaaggaccaaggaggacggaattctaagagaacaa

SEQ ID NO: 37100 - DNA, 783 bp, Bovine  19866880956158
  misc_feature (1)..(1): n is a, c, g, or t
ntggcttcccaaattcattcatccatccatctatctattgattatctatttatcaactgttgctctttcatctatctatatttctatctcatatttatcctatttatctagctattgatcattcatctatcaactatccacctatactatctattgatcatcttatcaactatctatctgtatctatcctgcttatctattttattttatctatctatctatttaggttagacctcatccttgaattcagactcatcagttcagctaccctctcaacactttaacttagaaatctattaggtacctcaacacatctaaagccaaactcccgatccccgttcgcccccctgtctcccccacctgttattcatctaaactcgataaatgggaacttcatcttggcagcttctctgctcaaaaaccttgcaatcatttctgactcctctttatctctctcccaacacccaatccatcagcaaattctgtcagctctacctttagaatagatgcagattctaaccacatctttccacctccactgctaccaccctcggaaaagccacctctcatgtgaatgatttttttgtaatcttttgcttaaaaattgttaaaaattgttttattgagatgaaagccacataccattaaattaaccacttaaaaaggcacagacaagaggcttttcatacattcacagtgtggtgaaagcatcatctctatttagttccaaagcattttcatcatcccccaaagagacctcacacccataaaggactccccatt

SEQ ID NO: 37101 - DNA, 1533 bp, Bovine  19866881092245
  misc_feature (1)..(1): n is a, c, g, or t
ncatctgccctccacccaaatcaaagcttgttaacagatggcagggacctccaccactccacatcgcgctgtaataatcctctgtcttaaaacctcccaataaattgcaagtctgtcctacaagggcatttctacgtttcaccatctgctgtatcctactttacacactttccccgttcaagagcctcatgcgaaacagaaagcagcccccgactcacatactaccctctgtctcacaacctctcacgaaagcgcctacccgtgttaaaggcaacccctcccgattctcacactactaggtcagatgcctgctcagccccttctccccccagagcaccccctcgcccccaggatcgctactccgacccacgcacccgcaaccctagccgtctctcaccttctccagggacgcccctcctcgcgagcggttcaactgccgaagctccaaccccgccccaggatccggccttctcgctgctgattggttctggcttactcgcagccaagttctcattagtcaaaacagacgcccgtcacttcagtcccctccagagcttgcaattggtcaactcggaagagaagttccaaaatgtgtcggagcgtcagtttcctctccaatcactattggctggaaactactgccaatcatagaaagaaggttgcacctcggagagggaggaaatcccggaagtagctctttgactccgcccacaaccccctgcggcagagcagaccacgcccatatggagggacgggggcgggacgggaaagtgtccgacgcacatgcgcagagcgaggtcttcgcctcgggttaagacgctaaggaaatgttcttagcgtgaagactggttgagatttatcgtcggtcggtgtgttccaagcctgcacttagcagtttgcaggccttggcttatttaaaattagcaaaaaccctgcactgtgggagctattataattcccatcttgtcactaaggaaataggttcagagaagtacagccactggcccgggatcacacagcttgaaaactacccctattttggtttaagagttatcaacagggtgatatagcttacagaatttaataggggagtaagggaggggagcgttctttaagaaaaggaatacaaaatcgctaacacaaaattcagtatgggtatgaaaatttacttagaatgtgaaataataacatattacatatttaaaagagctggcaaataccacaaacattgcaaaatcccagaagataattgtcacgcgagtgtatgttcctcggttctttgtctcatcacaacagatttggagcaacggacattaaagccctcggcacatcacagctctcgggtcttggacaaactgtgttacagctcttaggcaattcagtgttacagctccattttatttagaagatagagagagagagatataaagaaaagagcgcaggcacgtgggagagagagtctgaaagaaagcgctttggctcctccttttatatgttttttcctccacctgggcctgccctatgcaaattggg

SEQ ID NO: 37102 - DNA, 1033 bp, Bovine  19866881124229
  misc_feature (1)..(1): n is a, c, g, or t
ncaatggcaccccactccagtactcttgcctggaaaatcccatggacggaggagcctggtgggctgcagtccatggggtcactaagagtcgggcatgactgagcgacttcactttcacttttcactttcatgcattggagaagaaaatggcaagccactccagtgttcttgcctggagaatcccagggacgggggagcctggtgggctgctgtctatggggtcgcacagagttggacacgactgaagcgacttagcagcagcagcagcaggccagaaatacatcctaaaggagaggttggctggtgggatgtggataaacaatgagaacagtggagggagctccagaaggagggcacagcccaggcaaagacatcaagattgaaacaaatgtggcaagtgctggggacaccaagggcctggctggagcagaggtcagggtagggggaacgatgggggatgaggctaaaagtggggggcaggagaaagatggggtcaggggccttctctccacctcccttttatctaccccaaccagggattgaacacgcgccctcagcagtgaaagcacagagtcctaaccaccggactgccagcaagttccctctacactgcctttgtatccctgctcgactgcagctcacctcttccgagccccaaccataggggaggatgctgagggatcccctctggaagggctggagcaactcagccgggggtcactcccccagcggggcagcagggaggtctcaggggttgggggcgacatgccgtggaagctccgagcacggggccgggggacagcccctggaggtctgtggtaggccctgggtagctgctcgctggagttgagctgaaagtcatcatccatggagatgtagggggccagcatctccaaatccagagcatcgacgtcctgcagagggcaggaggcagttaagagcataagctttggccttggggtggacctgggctggagtcccagctccaccacttcagagttatatgtctgaggtcaaggttctgagcctcagt

SEQ ID NO: 37103 - DNA, 1491 bp, Bovine  19866881168146
  misc_feature (1)..(1): n is a, c, g, or t
ngacctctcctgattctaaaattccttcagattttaaacaactgcctggagccctggaccctaaccccagaagaaaaacagatacagacactttttttttttaatgtattgatttatcacatctttgtggccgagtttaacatcttatgtattcttttttaccatcaaaaatacaaaagcaaaattgcaatcattgtatgcctccccccaacacatacacacgcatagactccacccacaccaagtttagcaccgggtggctaaatgtttaaaagcccagacttgaagccagacccatgggttcaaaaccctgatttttcactactggctgaatgaatttggacaaaacccaggtgccttaatgtccttagcaataaatcaagaataataatatcacctgcctcatatattaaagtgaacaaatgtatatatatatatatacatataaagtgcttagaatgatgcccggcaattggtgttatgtaagcaccagctgttattattagatattctttcacggtttaactgagtcccccaaagcccctgtggatcctggttaagaattacaagggggtgtgagatcacagactccctgagctggaaggaagcctcacagagatggagagcagggccacttcagccaggctctccctggggccaccccaccccccaagttcccaccctgacccacaccctttcctatttacacccagacggaggcagcctatgcgctgactcacgcttggctcagaccaagccattgttctggggtggaggggagtaagagtgaggaacagaggcccagaggacatggaggatgtcagctacaccagtgacccaggacggggacacccagacacatggtgagactggcatgccaggctgagcgacggcaagcgagggattggggtgtaacaccagcatgctgcattggtatacccacaggacactggacactcacccccaagtgtcccagacatgcaggcacatggagcctggtgcactcaggacccaatttagatccagggagctaactggtcctgcaaacggagtccttcccagggagacacacacaccacacctagcttgcctgtatcatccaggcactcacagcttcaccccagccagtcctggtggagtcttctttgtctggctgtaattcagaccctcacacatacacacaaatacatgaattctccaaatatcaattcttacatactgacatctgggtctgcctgtcggtttctttctcttcctcatgttcaccctcatcattcacagtgtcttgcctgttacttgtacatgcgcctttgcacgtatatatgcagtccacacaccatttgtccaggtagtcttttgaacacccagaggtgtccggatatctttttcccttacgtaaacacacacacacacagacacgcacacacacaggcgcactgtcatacaatctccaagtgctatgcatttatcgtacaacgtcaacgccacttc

SEQ ID NO: 37104 - DNA, 1646 bp, Bovine  19866881351996
  misc_feature (1)..(1): n is a, c, g, or t
ngaggcctagggaagcgtgagaccctgcacaggtgagccgcctgacagggtgtgtgggacagccgtggggacagaggtggtcaccgtggggagcacgcgagcatttctaacaggagtgcaggggagaggggagtttcccagagggggctgagggagacctgagaaaggagtggaaatctagcagggggcaggagggaccaggtgctctggactcagagacaccctgctcttcctggagccccaaggccagggctccggctccgggcactccgttcccctcagcgtggtcactgagcgcctgacctgcgtgggaccctgtgctaagccatggtgggggccctggatacagagtggaggccaaaacaggcctgacaccagacagggaggacccagggtggtcccggtcaggatggggcagcccagaggagattcctgaccctgtggggagaaggggagcaagggagttcaggtgggaagagctggtcaaggaaagcccctgaggctgtctcctctccctcaggccccccctcatgggttcgtgtacctgcctgtgactacctataagcccactgctggccacaagctcctccctgcagggaccaggccttgatgtctccctgtcctcgctgccagcacagagcctggcccacaaggcctacactgaccggtgagaccaggccctgcctaaggacagcgccgtcaggatggcaggagcactgggctccggcagttcaggagcgggggtgaaatgcggtcggagcccgacctccaggccaagctgagaagacttggactctaccctgtgagcagtgtccctgggcctgggacaccaacagcagaccagacactcgcatcctatgaagtgtcccccagagccccccaacctgacttaaggctacgctgggagctcggccacatcccctaagggtgctggggagggaagagaaaagacccacacagcccctggctcagggagctcactgtctactgcgggagacagagctgggggcacatcagaacatttccaagtcccactgtgattgggctggcaggaaggagaacacgccatgagagggcgtctcggggctggcctggcctggggattcaggataggcctcttggaaacatcagagcccaaggagggaatgtggaaagaatgacgggggtacaggtggagaaggggttgccctaacaaaaacgattaaggtgcctcggaagggaccagaggccacagcatggctggcaggagccgggacgtggggaagggatggagcagccctcagaagagccgagcacgccctggaggccctctgcggaagggggtcctgctgggcgtggccagcgtgctcaccttcactcgctgcttcctgtgctgcgcaccatccagctcatcatcctcgtcactgtcatcgtcctcgcagtgctgcaggaaggggatctgctccagcaccgagccacccaagcgctctctgccgtccttgccggccgcgttcctgcccaggatgggggtggggcaagggggggggggtcagtcctgccgggcgacaaagctcggctgggagtcacggaggcttggggggccggagcctgagcccaggggagcctcgactctgaccgtgcatggggcttggagcccagcctcggca

SEQ ID NO: 37105 - DNA, 1034 bp, Bovine  19866881414187
  misc_feature (1)..(1): n is a, c, g, or t
ncagattggatgtgggtgtgagggaaagaggggacgccaagggcgaatgcaaggttttggcccaagagactgggagagtttggaatttatcccacaggcagtaggaagtcccaggaagatgttgaggctggggcagaggaggagggagagatgtggtcagaaggcgtgatcaccagagaggcacccaggatggggaacacaggtggggatgaactctagccctggctcagcctccaactaaccgtgggctcccagcaagataaagctgttctctggatcttcacttcctcatcctacacacacacacacacacacacacacacacacacacacacacacacagctatgaggaataaaagaccttcaagtctctctcagcacaagaatttttgctctaagtttctctgactcaggtaaacacaaatcccacaagatcagacttcctctcttcatcccacctcccaaagcccatccttgctccactggacaggacacagatcctccctggtccgggaaccttgcagataatgtcggtgacaatggcaggccacgtttgtggtgctgtgctaacggctgtccacactctatcacacggagaccagacaggagccctgagaggtaggtgctttattatcactcccatccgaaaaccgggaaacagaggttctggagagatgtaatgatcagtcgaaagtcacacgggtgaacagggactccagcgttatctccccagctgcgctatctaccgccccggtccagccatcagcacctctcacctggatggtcaccatcgtctcctccctgggctccttacttcttccccagccccccacatagtgtccttcatgtacagccagaaagagcttgtgataaaacctaactcagggacctccctgggtgttcagtggctaagacttgtgcttcccaatgcaaggggcccaggtttgatccctagtcagggaagtagatcccacaagctgcaattgagttcacatgctgcaactaagacccagcacagccaaataaataaattt

SEQ ID NO: 37106 - DNA, 969 bp, Bovine  19866881425700
  misc_feature (1)..(1): n is a, c, g, or t
nttcccaggagtctaagaagattctagaatttgaatatttggggattccagcatgctcctatgataggattcatttctagattccaacaaattattataacgtttagacttaactacctagattagcagtagcctaatattttaatgttgtagggatctgccaaactaggattctaatatttgaatatcttagcctgaaagttttcgacaacccagcgtaccaaaattctaacattttaatgctctaggattctaacaacacgggaatagaatattccaacattttaatgttttagtatttcaaccacctcagggtctaatgtttgaacacttcaataccagaggagtcagttacctagcagttgcatattccaacaatgtagaattctaacatttttaaagtcaaaaattccaacagtagagtagcccactattctaacttttagtgttctagaattcaaacactgtgtcccacccgcttttccccttgacgagattctccaggcctcaaccccagtgaccgtgatgtccaaagcaaagagtggggtggagtggggaaggctcgtgttgacaggccagcctcagagctgaagggtggggacaccgatcaggagcggggacagagacctcagaacctctggggattttgaagaggcgcgcctgcccctccacacacacctctgtcctgggggagggcagaaattggtccctgagacctcacttgcccctggcagttagtccagggtgcgcactcacacccacacccacacatgtcacccgatcgcccaggccggcccggcttcaatttctactgttttcaccaagtcggagggaggctggggtgagcccaggcagagaggtctcccacatctggggctcccgcctgctccttctgggcgcctacacctggctggcccctcccttcctccctgctgtctgcagcaaacaacaacatgcagggacaagcaa

SEQ ID NO: 37107 - DNA, 803 bp, Bovine  19866881485416
  misc_feature (1)..(1): n is a, c, g, or t
nccccaggggctcattcagttccacaaggtgggtgctgggatcctgcccggctccctggggctggtcctcctgtcagaaggaagctctaggggacagagacaaagccaccatcattaccatcatatccaaggaggcaggatggtgcagtgcttaagggcaccgtgggggtcagtggccacttatcagctctttgaccttgggtgagctgctgtcccagacatgctgtgcggctccttccagagccttgttcttccctcctgggccccagcaagctgacctgctcccatggactccatcgaggtgcagccttgctagtccttgtttgtttggttttgctccttgttttcccttgggtttcaaggtttcagctcttacaaggcggaccctactctctcaaggatccgggcaccaccgccttgccctgtgccttcaggctagaggtggtgttgctaatcccagggtcttgcccacacctttacacacagtcctgttactaaattctcctcaataccccatttgagcatgctctctgtgtcctgtccagactgatagagttgttcaacctcttgagtgtaaatgtgaataataataattggggattccctggtggtccagtgtgctttcattgctgagggcccagatttaatcccctgtcagggaactaagatcccacaagctgcctggcatggccaaaaacaaataaataaatttaaagaaaaaaatttaaattaagtattactattcaagagtggctataggaactgaataatttactcatgctaggcatttcatgcagtcagca

SEQ ID NO: 37108 - DNA, 886 bp, Bovine  19866881811260
  misc_feature (1)..(1): n is a, c, g, or t
nccacagcctttgaacatgctctttcatctcccctcatcacactttactgctctttacctagcccactcttttattattctggcttcctcctccaggaagcccttccttgatcatctcagtctgggtcaggtgctctgtctgggctctctccattctttgggcttcccccgtcccagccctgaccaccctaagtcatgattggtattcagtttatcttccctactgggatgtgagatccatgagggttaagctggggtgtctcagtcactgctgtgtccccatctctgtctggcatggggctgacctggagaagatgctcagagaatatgaatgaatggagggtatcaaccagaagcagagaaacacatgcgagagcagtagcatctccatttcctatgttcctctgggtcctgggaagtcccagggataggactgggatgtagggctattcctgcatctctgagccaggagccagcacatgctgtatgacctggaagttcccaatgggggtgggggtggggagcaggactggctgcacatccaggggctggggagagatgcttagctcacggtgcttgtttgaacagtatctggcccaggagcgagtcaatgactggcccatcctttggggttctcagcttcctggccagtggggcgtgtcactgtgttgggaggggatgacgtatgttatgtcacagaatgagatccaggggcaaggaaccaagtgtccttggatgggtgtcctaagcagaggtctcatccgtaccttgtgggctagaagggtgaggggaaaactgggccagggtggaagagaaaagggggttgtgccaggttccctggactgttctctaaacctcttgccaaagctgcttagtgagatgggag

SEQ ID NO: 37109 - DNA, 3281 bp, Bovine  19866880376745
  misc_feature (1)..(1): n is a, c, g, or t
ntgccctgttttctgcctcctcagcggggcaggacgctgctctcaatggggatacagctgctgtgctgccgtctgaaggaaggtgtcccgggcctggggggccggggcagccgtaggtttgcgttctgagagtctcaggcttgtcctgcctgttgttccgatgccacccccacccccacccccccccccccgctttatggttgtgctggcaagagagctagttcagaagctgtcacttcatcatagcttggagcagaaattgagctgattccacatattattatcttaaataataaaagctcagtttcctccaaggcacccattgttacaagccaactgaaagttttaattactttttattttgaggtagtttaatttgttcagtgtttccttatattaagttagataatttatatgattaatatattcacttagaacaaaatgagaaagttagtcactcagttgtgtctgactctgtagcccaccaggctcctctctccaagggattttccaggcaagagtgggttgctatttccttctccagggtattttcctggatcaaattgtagctaaagtattgacagtgtctgataatgctgtcttaattcttgttttaagagaactttctcctacatgaaaatctttgctgtggttttttgtttattttgttttgttttttaggaaactcagaaaaataagatgcttcctggcaaaaggaagaaaccaagaagttacaccacaggtataggaagtgttttatatgtagtcaatcgttcaagaagttcttttttaaaaatatattttttaatttaataaaatagtacattttaagtatataaaatttccactttaaaaagttaaaaaatatatgactttggagtaactgagttttccagcagtctatcatgaaaattttcaatatacaacaaaggataaagaattgaacaatatatattcatataccctactaactagattttaccatcagaatttatttctactttgccctagcacctattcattaatctattttaatttttcatcacgttatcactctcttcagacatcaaactatgcacttttagaagccttttttcattcaatgtaactctgagattcatgcatattattctgcatcatttttattggcacaaagtttattgaaaaatgggaggaaaataaagcattttctctccagttttttaaaagataagttttgtttttctaattataaaaatgtttattttagaaaatttcaaagatatagaaaggatgataacatcacctacaattccatcaccccaaagtaactgccatgttttttggtctgtactcttcagtccttttactgagcttttctcaccctaagtgggctcatatcctgtcattcagtattctacataccattttaatgaatatgtaatatttctttcacaaatgtacaaagttatagttaatctcttatatcagctgtctgaatcaatatatgcaataaccttcctgtgtcctagaagtgatccgtcaggtagattaaaactaacaaaacacagttaacaaagatctgcatcaccagtagcattcagtaacagccggctgttaaaggcgcagcagggtaactaagggacggctgcttttggctgcttcagaagtgggccaaccaaggaggcaggccactagagggcgccctaccgacaggggtttgtgagcctgtcttctcccatgcgtttcttcaaaacctcttactatttttagcaatttggtggaatacttttgttgtaggctttcagatccctggacctagagctaaattgctgataatcagtatattaaattaacctatcctgatgttgtagatacttccgactgtgcacctatttggtgtttaaaagaaaagaaagccagtgacatcatggaattagatgtgtttttgtctgcgttcgagaacattcttctagagtatgagtgagtcttttgatgttgtcatttatgtgcctaataaatttcccttgaaatagcacttctgttcaccccacagcttgatatgtagaactttcattatcatttttatgtacttttaaatttctattatacttttttctttaagcctctgatttagtagtatgttattgtatgtccttgtatgttcctttttaatttgtatttattaatcttctgtcttaaatagttacagtccaatttcatggactggtaatacctatttttgaaatactgaggcttcatttatggcctagcacataatctctgtggaagctctaattattggatctgtgtagaatcagtattactcagtttttcctggtatttctatcaatttatgctatctctatagaggttattttactaggatatcatgtttaaaattgctcttttagattgaacattttatccttatgaagtgactcttttcattcctaaaaatgctttttttggttttaaaatcttttatctcatatgtcactagatttctttagtatttgccagattttacattcttttaacttttacttcctacctttgtctcatgttaaactgttatttattacaaaatcctttttaagtccagtgtccatctttgaatttcactttagtccattacacttaattatccttacctttagaagaatgtatttatccttttttaaatttataactccccaccagtaagattagaactttggcaagctgtgatatcttggtcttctctccctgcccccaccacaaagtgcatcatgtttaacctggagactgtttaattctgggaaaagggcgatcagagttgatatgaaatggctgtttgaatttagggtctagactttgaacttgccagaaccagttaagaactgcagcttcttaatggttcctggagtcctcctcataaggcttttagggctatatgtggttgttggtttccctgtggaggaatgaggtctggggtttcttattccatcttctgatgtcaaaagtgcaggccatctctcctgcttagcgtctgaagaattaggccacgggcctagtccccttctcctgggtgacttttcctcatgtatttgccccaagaaaaaaatggctatatgacaagctctcactcacacaagaggtttattttcaattcagactttaaattctagtgttgttctgtgacgaggccgagcaggggttagctccaccctggcagggtgtgggtcaccatgggtctgtgtccagctgtgagggagggagactgggctcttctgtcccgacaacagggacccaaaccagtt

SEQ ID NO: 37110 - DNA, 2624 bp, Bovine  19866880407621
  misc_feature (1)..(1): n is a, c, g, or t
nggctccttattcctgaaggctcctaaactggcctcattctatcattagtagaaatgcctgagtccctttcaacctctgcatgatgttctccaggtatcagacaatcacaggtgaaatccttctttctctaacaactgacagccctcttcttggctgagggaggggaccctgtgcttgccttctcccctctcagggccctctgggcaaagcgcactgcccagcggtgggcagaagccccatgcaatttggggatgagcctctgctctgtgtgtaacgtgggcagacacctaaccagcaccaccacgtgcattcctctgccctatattttgacctcttcctctcatcgctgctgaagtcctgtctggggagcacatttcagtttgcaaagtgccctggaaaacaaatatttgcttgggattgtgatcctgctggatgtcaccatgatggggcctagaaactggggagagaggcgggaaacctgggggcggccaggttccacttaccggcacctccactgactgcatggccaggtcgcatggaggcttcagggcccgtggccgcgtggcgtaccagaaggtggtgagcgccgcgaacgcgccgaagcccatgagcgtgttggttggaagggtgcgcacgtactgccggaagtcaagcagctctggcagccgaaagtactggaacagctcgtgggcttgcatcatcctgggctggcagcgtcctaagccacagtctgtgggagagaaaaaggtcatgttcattccagggaggagggatgctgtgacaaactccccaaggccgatgaccatcaacttgatggttggctcatcaacgggggcattagagccacgggctgatggctcaggccgtcttctcctggctgccaaactcacttttctaaaagcactttaggaattcattttactctgttggcttgtgtaaagttctcattatccacattcaaaagacttagccactcagaattcttgctgtaaaatgttaacataaggggcatgagttaccattttcttgtcttacattctctccctgttctctgccacctgatcaaatacactcaactctcattatcaaggcagatggggagaaggacaaagaggcagacacacgcccaaaccacccgagggccatcagttttcacgtcttctcacaaaatgcagcacaagctccccagctggtgaaacaggtcacgctgggtttcagggtgtgtgtggggtgtctctcaccttccccacactctttgtagcataaaagcagccacgtagatgtaggggaaactggaatcagttatcctgataaaacagtgtcttttatattcctcaagctattatagctaaataataaaagggtgtgcataaatatctagagagattcattcagcaactatctagagagattacagaatagtatttgaaagaaagtgtaaaatagtacttaagattccagattctagagccaaatcctgcctccctggttcatttgctgaataactggggacaaatcactcccctctctgtcctcagtctcttcatcagtaaaaacagcacctatctcatagggcttttatggttcacataaagaatttagaatggtgcaaggcatcacaatgagttcaattaagctgagcattattattatttcctctactaatattctatatttctcctgcatgaggaacaataagagatacaggtaataaaaactgacacttatctacaaggagtttacatgcaaaattaagaagccaaaatacacagaagaaaatcagatgaacagccacacacacacacacacacacacatatatagaaaagcctctaactgaatattatagacaatttatatacatataatgatataaaaaattaatgtgcagtacagagaacaaataataattctaagtaaaaaatgattgatcagtaactactctcaagtatgtctggcacacatatggcaggaaatcctagtaaactatctgaaagacttctcagaaaactcccccgtaatgcggtaagtggtaacctttatcataaattcagacagtatgtttgagctccttactatatgttcttttaaatagctaggtcccaagactgaaagtagtttttctccccctcagatacagaaatcctcttcaaatttaaatctatattattgtataaatatcttcacagtcacagaataccaagaactttccctggccatcagtacttctagaaggcaatgtcacagccagccttgtgctcccacagcctggggcaggcatacagaaaagacacacacatatacacagacacagacaatttctagctttaacacgacaacagagaagaagcaggttaagtgcatttcttcaggtcaccactgcggagagaacgcactcaccgtctgtgccaccgacagctgactgctgggtgacacaccaacctcagaaagggaccaggacacaggggtgggggcggggctaggggtgtacgcgctcagccgttgcctgcacagcctgccaaggtctctccgggcattcgtcacatgcccagtcctgtgctgctgcccactgggctaaagggtaactagcagacaaaatccatacgtgacttctcaggagaaca

SEQ ID NO: 37111 - DNA, 1022 bp, Bovine  19866880414775
  misc_feature (1)..(1): n is a, c, g, or t
ntcgtgtagttatctcaaaacctttttcaatctaaaactatcaagaacttagtctgttcagatagcagattccagtttgtccacttaaagactcagtctccctttgctgtagcccatctgtgtacaccggagagggcgtaccacggagctgcaggcatttccaatgtggagttttgtgagtgtcccacaaaggcagcaacgatgagcccgtgatgactgcattggagactgtaccgtcccgtgtttggtatctgttgaactgaataccttaatgcagtacagatcaactgtatggtgaaaccatcacacattctgtttgagtaatcggtattttcttcctactctgctctccctcccccttggaactgcaggaagaggagtttacaacagatacaacagcggacactgagaccaagagtcctcatggaccgtcatccagcgtgttgtcgaaaggggcattttccgacgctgactgggataacggcattgatgatacttacattttggaggctacagaagatgctgaattagcagaagctgcagagaacagtcttctggcttataataggatggatgaaattcctgatgaactactaatagaagtgttacaagagtagctaattatggacactgacataactaggctgtaatctacatgaaggcagatttagtaccattaaattatagtaacttattaaataagcctgttatatcagctgttttatttatcactttacttccaaatcttatgtactcaaataaaccagttttattgaaaattagctccagtgtgcttattaaaattcagtagaattctccttatgtgattaactatgttcacatcagcttaattttgcatgtttatttgtagggtagagcttctaagggctgacgaggtgtcaacactgtaaaacatttaaaaacttagtacttgggtgttaactagaaaagttaattatggcctctaaaactactatacttagctatttaattttaatgacaaagcaatattaaattctggt

SEQ ID NO: 37112 - DNA, 1415 bp, Bovine  19866880543224
  misc_feature (1)..(1): n is a, c, g, or t
ngagaaggaaatggcaacccactccagtgttcttgcctggagaatcccagggacgggggagccttgtgggctgctgtctatggggtcacacagagttggacacgactgaagtgacttagcagcagcagcaactagtattaagacccaaggagatgactatattggtatctccaacttacatctgattcaaaagttgtttattaatggtgtagttattgcttgataagtagccactcaaaattccaccttgatgaagaattatttggcaagaacaagaaattcggaagctagagcaaatagtgaggggccacaggaagacagggaggataatagaagcaattttagaattttttaaggtttgtttactggtacctgttttttaagcaaatcctttcatatctggttttactctcccctcttccaaacttagctagattgaaaggcaccttacaataaaaaaattatgagtagcttgtcattgtcaccatgtttgaattaaatgaaaatattaaagaagggcattatgtacctgaatctctgacttaccctgaattttgctattaaatgtaattggtctttagcagaagcaagatctgtgttactctaatgtatcattttactcaagcctcgtggagttctatagctcatgttagtgagcttacatttatgttaacctcaaaagaatgcaagtatatctgttttactatgcttctttaggaagaagtatgtatatatatttattcaatagtaaaagagcattttaacttctaacccagttttttttttttttttatgctattgagagtggggttggaaaactgttgaatgtggggaaatagagaaggatgtagaggagaatgaaatatgaaggaggaaaaaactaaaagaagccaaaaaggattgttcaaagttgccagtatgcaggaggaataacagctcctgattcttcttgctaatcaggaagtctaattaggcactctggagattttgttcctttatctaatgaacatttgctaagcatttactgtcctagcctcatttcttggtagtggagatacaatatgtttatattctagtggggtcagatgtctttagtagtcattgccttattattaatagcatctttctccagctcttttacttcatttcctctttctgagtctgatatcacaaaattggcttactttgaggtcattttctggccctgagtctagctcatggaaaggtctgcacatggaaatcatatatcaagtgatgactgaccatccatggcaagcagcataaactcagatgtctccaggggccacgagggtcacacatatatgaaaatgggccaggtgtcatacgcttgggagttaagggtattttgccaagatggagagtagatgttccatcttaaggcactgacctaaatt

SEQ ID NO: 37113 - DNA, 1305 bp, Bovine  19866880695963
  misc_feature (1)..(1): n is a, c, g, or t
ncacacacaaccgtttcttttatactataaaattaggaaatgaagaacctaaattcctatgagatatcagtattagatagaaagacaacttcatttttcttttctttgcacaatgcttttccaaactcctaccctaggaccactccaccagaatggaataaaggctcccaaacgaagggtgaacatgaaggacactacacctggcttacttttctggctggtgacactccagcctctgactagaaggttcaagaaccctgttgtgaaaatggatattggagatttagagaatggagatttggctcccgttcataagcaaaggcttctttgagaaagaaaagactatgttattttacaaccctatcaagttatacaaccctggctgatttctggaaataagtttgtcattgaaggcatgaggcaagcccctttttaaattattgcaagcaatctgtggaagcataatgccaatccccgctctcaaaggcctcattgtgagcgctggtgctcggagctgctaattgctggccgccttccatcctcctcctgcaaacaccataccatatttgtctttcagctgtcactatttgttaggggcctataaacagagaagatgctttcttagcaaccactgtgaaaacgtagaacactcccttcccccacctccaaaacaagcctgaaatgaggaaagaaaggaaaagggaactgaccaaggtccatgtgaaagtcagaaggacaatccagtacggaaagtttcaaatactgctggctgcctttggcttgggggaaaacaaagaaaaaaatccacaagaagctttcagaagccagctgccaacagattaaagggcgactagaaatgatctcaccgccatttgtagacgtctggtcacacggatatctgcaagataaccaagaataatctggttacgttattcaattttacttctttggagaatgctttcggcttcatcttgctatttttagtctttggtgtcagacaccatggaaagtcatcgccaaggcagttcaaggatgacatgttcctccagaacaggtaaaagttctggaaaccaaaatgaccgaaaaagcagctggagatcaaagcattcaagagattctggaaagaaggagcagggaggagatagggagggtttttgttgataaccacagaacaacatgatggatgctacattttagagagcattacagaaaaccatcatgtctgtaaagaaagcagaaacttaaaaaaaaaaaaaattaccacagagggatctgtgggagcacccctggccattgaagctttca

SEQ ID NO: 37114 - DNA, 1107 bp, Bovine  19866880769733
  misc_feature (1)..(1): n is a, c, g, or t
naaattccctaactataagctatttaaatattgcatatacaaagtatttaaaggggggaaggggaaaaacttatttataaaacagaagtcggatgtagacttaacaattaccaggggatacaggggagtggggtacattggaagattgacactggcatatacacactactatacataaaacagatggagtgggaagtaacaacccactccagtgttcttgcctggagaatcccatggacagaggagcctggcaggctacagtccatgggtttccaaagagttggacgtgactgaaacaacttagcatacataaaacatgtaactaaaaacctgctgtatatcacagggaactggactcaatactgtgttctgtatgacaaaagaacaagtggatatatgtataactcattcactctgctatacacctgaaactaattcaacactgtaaatcaactatactgcaataaaaatataagaaagtattaaaggaaggccagtaccatataaacagcatacacttaaatacaaagatgaatatttaacatacagggtaatgttttttttttttccccactaataagctaaaggtccatttcaagatgtttctttctttagtatggttaatttgttttattagcaagcaaagccctataaaggatggcatcatctagtccttagactcagattcatcttcatcttgtctaatctggaagtaacgaagctcataagtctccttgtcagatgcaaccacaggaagccaatcatgaagactgttctttttaaggtatttcttggtaaagtacttcaaataccttttagagaactgtttctcagaaacaactatgattttattcttgaagtgttcaatgtgaacgacattcccaagatttccagtctttccattcactttaaccttctccagcataaactgttcaacatttccagaatcaaaaactccatcttctactggatgagtaaactccaaattaaacttccaggttgactttttaggcttcttgtctttcttctgcaccatcttgaaggcttcctgcacaattagagcctttttttttttttaagttgactttttcttgtaatttggcatta

SEQ ID NO: 37115 - DNA, 597 bp, Bovine  19866880875661
  misc_feature (1)..(1): n is a, c, g, or t
nttgcttgcttctgagcggggcagcatggcatggtgaggtgagcccaacactactgaggtggagagtgatgctgtagggctattgtaccaccactgggagaaggctggggaaagcggaagcagaggggcaaagccttggcctgcctgtctctggatcccacatctgtggagagctttataaacagagtcactttctgtctggactagcctaactgaaggcaggtacacatttagatgactgccccacctgtttccatccaccagtttgtctgctaaattgaagcacgtttgttaaatacgtattaaattgttcttgtgtgtgctcagtcttgtccaactcttcacgaccccacggactgtagcccttcaggctcctctgtccatggtatttcagcccccccaccccccacccctgcccccgcaagaatactggaatgggttgccattttcttcttcaggggatattcctgatccagggatcgaattcttgtctcctgtgcctcttgcattggcagtgagctcatttactagtgagccacctaggaagccctttaaaatgttcttacagtcaagtttattgggcaatcatttccttgt

SEQ ID NO: 37116 - DNA, 846 bp, Bovine  19866880900181
  misc_feature (1)..(1): n is a, c, g, or t
ncacagaggcagcccttaaagtcggaagacatttttgttagttatttgtttttatttgtttgtctttgtatagcaaagactttgccagtttctgtttggggacctggtttaaaaacaaaatttttttttcttcccccctgctactgctaagtcacttcaggcgtgtccgactctgtgcgaccacatagatggcagcccaccaggctcccctgtccctgggattttccaggcaagaacactggagtgggttgccatttccttctccagtgcatgaaagggaaaagtgaaagtgaagttgctcagtcgtgtccgactcccaacgaccccatggactgcagcccaccaggctcctctgcccatgggattttccaggcaagggtactggagtggggtgccataagaaggacctagtttgggttttcatacatgtaactctctaaggcacaacacagagctatattagtggtgatcagaccacagaatctggtctgaagcagaggcgggggtgaaccctaactgactcttatatcgagaattctctgagctttggttgcccagtgcgtaacggttaatacctcaggtctgttctgagcgaagatgccaataaactggtctggagctgccttgaagcccttgtggagcagtgctgagcccacacactctgccatatcttcaacctacaatggaggagaaaaaaaatcaggaacagcatcaggtccaactcaaggaacacagcttcccgtgacggccgagcctaatatcttcaccaagaagcagttctgcccagagagaaagaacaggggtagacaggtatccccgtagttacaaatttttgtaaagttcaag

SEQ ID NO: 37117 - DNA, 956 bp, Bovine  19866881030046
  misc_feature (1)..(1): n is a, c, g, or t
nctagtttattcatcaaacgcctagatcacactgtatcttaacctacccactgataaatgccttttgagaaacagagaatacaatttttaaaaacctcatctgagacgtagttttctcttaaaagacaaattcgggacacagtgaactggattttcagtgagcaaatgttggtttactacatcaaccttttccgggatgctttttggcccaatgggaagccggcaccgccaaacacaatcccacgccaagaacaaagccgcgcgcgcagccaggaaacaaagcagagagcccagcagaagctgctcgagaacattccaggtgaggcctgggttttgctcctgaaagtcggacagaaagggagtgtcgtcagccccactaaggcatctgccacttaggaaacattatttacagtgaaaaaaagtgatcatacctttttctttcaaatcatgtcttgtcccttgctaagaaattatactgaagagtccccaaaagaacagtactgattataatttcactagaacaatgttttagataacagaattttatactttaaaaccccccgttttgagagctatggttttaattggggtattaaaattatagtctgtataaatgcctgtcaaaaaactattttttcctgaaacactggcaagaacccacccctcacgttcctcagcgcctttatgtgctgggtgcgcagggcagggcctcactggaggtctgtgcacggtgcacttttatcagtagcagcttggaatataaacttaatttttcagatatgcttcagagccttgttggacagcaaaatgcccgttatggtataataaaaatattcaatgcacttcaagaaaagagagccaataagcacctgctatacgtgagtaaagcctcccagaggattcactgtttcttcagttgtacatttctgttcacatatgggggtagattttaattc

SEQ ID NO: 37118 - DNA, 1781 bp, Bovine  19866881169379
  misc_feature (1)..(1): n is a, c, g, or t
ncttaaaagtaactaaacttgaatatgttatttatcaacttggtaattattttccagtaattctctctagccttaacttaaaatctgaattgtctcctacagtttactctgagctctcttaatttgccagcattcctgccaccttcccttaaacttggtgctcgtgctttctttcttaaagaaagtgaaatatatcttacacccatgtctccatcaaacataggaaaacatctgctccccttcttgcatttattttatctggtctccaggcattttgagtttctaagaatcactgtgaagtactttctagtcccagttgatcagttttgcagtaatataaataatgatattccaggtatctttaaatgaaataatttggttacattataataatatatccatgatctcaaataataaaacacacctactagaaaaatcaaggcaaattcatagcatttaatattaagctcaatataatattaggtttaatatttaaattcaatacacaggacttccctgggggtacagtggataagaagccacctgccaatgtagaggaaagggtttcgatccctggtctgggtggattccacatgccatggagtaactaagcccatgtgctgcaactactgagcccaggcacctagaaccagtgctgtgcaacgagaagccaccaaaataagaagcttgtgcacgccaactagagggtagccacccccacttgccacagctagagtaagaccatgcagccaaaagtaaattataaaataaaggccctatctccagatgcagtgatttaaaaaataaattccaaacacagtgtttaaaattaccttttaaaagatgattcaggtccattgtgtcatgtaagactttttgtttgtatctgtggtctaaactggaatccaacgctgttgactttgaggtgagactgggttcatgtttctccttcccttttttggctgatttcaaagatttcgagttatttttcaaatcctcaacattttcatatacttcttgcctcacattttcttgccttttaactttcattttttcggtcgcttgaggcacccagttcgaaagactgaaccgggctgatgtccggggtcgataaaggagtgacgtccgtcacggtgtcttccgattcttcggtgtcatcaccaaccttgggttttgtacctgaagcgtgggctcctggtgatttttctcctggtttatatttcagtttgggtgacaagtgggtggcgccagggagatgcttcttcggtgatggagatgaatcagacaggccgacatcagatccggtatctgaacagcctgtatcggaacttgaagatgagagggacaaagacgaagaggagctgcttctggaatactttttacttaggcttttcttgaagttattcggcagcttagctgacttggacctgacatgatgctttttctcatcatcagtgctctcctctccatctgtatagtagtcgtgctcaccgtctttcacagtttggggaaggctatttggagtgggcaagtgtattttatgttctactctagcattacccagttttgatcttgaagaagtggttgaggacgaggaatttccagtttgtgcattatcaccttctacagggtgttcctctggaggagttttcccactgctctccgttcccttctcagtaagatcatcttcctttctttgtagtccaagtttcaagtttacattttccgtatctttgtctgttctctcttcagcgtcatcatcctgcttgtcaaaaactgag

SEQ ID NO: 37119 - DNA, 648 bp, Bovine  19866881250188
  misc_feature (1)..(1): n is a, c, g, or t
ntaagagggattgatgctgaggactacagatcactaattctcgtcttaattaccagtgaagaagcagcagcatgcattagggccggaagatactactgaaaattcttcaccggctgaagagactgcttcggcaacttttaaacagtctatctgtccatttcttcctttaataaacacactgaaattaaaagtctctccctccattacctaagagactactgatattttcagttgtttaacctcctggtttccttcctatgttgccattatacactgtaaaaaatgaaacctgaaattaagtgaaccaacacaaagcaaggcatgccagtgaaacagagcagactgcatcccagaagtcagcatctaaaactctgtcagaagaacctaagtcatatacttttaaacgggaaaaaggtacaaacaagtacaaaacccgtgtgcgtgtgcttacttagcgagctgtactggctgagagtggacctcactcgtctggagatcggggatgagctgagataacccatgttgcggtgataatccatcagctgttctgagcgtttcatgccaactgttggcttcacagcttcaagccttttcagaaaagcctgcatttaaatgaacaatttaaaagctaacgttagataaaccgca

SEQ ID NO: 37120 - DNA, 1730 bp, Bovine  19866881509302
  misc_feature (1)..(1): n is a, c, g, or t
nttaataattagattgagattctcttaaactctgaatctgagagctggaagaggccttacaggtcactgaacccaatgctttcccataggaaactgttttgcatcttgcctttttaacaatttatcttagagatgttccatatcagcatattcttttttattgttttatttatgactcttctaaaaatctctcaggtatttatttggcacttcattttcaagaaagtgatcatggatggccattttagatgtaaatgtaaatgctatttgtatagtagagtgtcccaactaagcgaaaaaaaaaagccaatggttcagtcccttcatggctgtgattccctttttgggctttccaggtgggatgccagtggtaaagaatctgcctgccaatgcaggagcgacaggagattggggcgattcctgggtccagaagattccctggagaaggaaatggcaactcactctagtattcttgtctgagaaatcccacagacagaggagcctggagggctatagtccatgggcttgcaaaagagttgaacacaacttagcgactagacaacaacaaacaaacaaaaaaaatttctggaagaaaactgccaggcaccttgaaaataaatacaaatacctatgaggagaatatatgaaagtaggatagtccaagaaaacgagcttcctgatcttacaaaaaaaaaagatctcttactgctactaaaatttcacaggtgttttcaactttatacctaaagctttaaaatacagaccattcaaaaagatcatttaacaaacattaaaatcaaaattttatagagggaacatccactcttaggctgtaaagaaaaccaaattatacttacgatcaaactgtgacacatatttatcccccacagtgatatattccatctcactgaagaggccaatcctctccatatccgtcttccctccttccgcaggcatggctgctccctgttggctgggtgctctatgctggtgacttcagtgggtttcttagtgctacttctacagcaaaattctactctacactgaaaaatacaggagaaaatttagggaaaaggtgattctaactttcagtccaaaatagtttcagtccaaactatgagtgttaacatgcacatagttacatcataaaacaacagtcccaagctatacatggggaaagaatctactttgtggggccgagggggaataacagagactcaaaattatcaccacgaaccttccccttgagtctccagctgaaatatccacaaattacaaagaaatgtttatctgtggcactgccattcatccgtcacaaacagtaatattatgacggtacagtgtggtataaatactgtataaacaacatccttcttttgagaagttcaaagctgactgaaagattatataaggcagtcgtttttagtttaaacccttctatctaaacatactacattgtcccttgtattaaaaattataacttacttttacagaatgcacaacacacctaggcattaccctatagttcttgaattttttcaagtttaaatgtatataacaaatgtgccacttggcaaaatcagttcacaacggggacaggaagagaggacaattgactaagcaagataaacacgaagaacagcaagacaaaagctacaaggaattcagagtatttgtgatagagcagactgcaactctgagttcttgaaaatatcactctaaatatgcaa

SEQ ID NO: 37121 - DNA, 1159 bp, Bovine  19866881516949
  misc_feature (1)..(1): n is a, c, g, or t
ntacccagtggtatgaaatacgtgttcatttttcttgaataaatcagtagatgcaccagtgacataagctagcaacctcagatcttcccagaagatgacttttcttctgcacacagagagtaattactaattgcatttttgaaaactttgcaaaccacagagggacatctgtgtgatcaatggaattgttgttattgtcatcatcactagggcagttcctggttgaatgactgttctttgttccaagagactctggtcatggaccacttatgacctgtggggctctaccctcttgggcacggaagactgtgcctgagttaccgcggggagaaggcagaggtggaaaatggctctctctctcgtactgtttacttagacggagtcattccttgttctgaacatttatagatagagatttacctaacatcacattttctagactgctgctgctgctgctaagtcgcttcagtcgtgtccgactctgtgcgaccccagagaccgcagcccaccaggcttccccgtccctgggattctccaggcaagaacactggagtgggttgccatttccttctccaacattttctagactaaacggtagcttttaaactggtctcctcacctctagtatttctctcttgttaccctaaatcgtcttttcagattaatctaactaaaactgaagttctaatcatgttattccattctctctaatcttctgtgatcccctcttacctgcttatttcttgaagagcagtcctagaaaatagatgtacttaagtcataacagcattgaattttttgttggctgttacgcctttagaagaaaagctgtttgcttggcagtgagaataagtgttctttcatttcttactgtggtttgttacattactcatgcatatttcttaatgaagaacataaaatgattttactatcatgaatttctctgtctccttgaattgacacagatgatatattttaaaatattttgggtttttttgtacttgcatgaatgagtgtctgtagttatataacacatagaatcgtgtctttgttttgtacttttgtatttttatgatacttagtttgaagacgggtgctgatgaactattgaaagaagatacacctgtgactagcacatacctttattactaagtacaga

SEQ ID NO: 37122 - DNA, 950 bp, Bovine  19866881856921
  misc_feature (1)..(1): n is a, c, g, or t
natgggcgacaagggactttgccatggcctcttcccgttgttccaagtgttaatgatccccacctgtactgacatcctcattctggctgtttaaagccttctctgccttggactctaattttttttcaatactgcggggagaaatgtctcaagttgtacttttccacctgaaatggatagtacgggccctcaaaagtttccgaaatcatactttaagtcccagtgaaagttttttcattttagacaaattcattttatgcttgcattaatttgagacagagccccgaccctatttgagtggattatagatgaaatcctattaaatagaactctgttggacctgactgcaatatgcaaacaaattggaatacaacttcctggtcattttgaacatgacaaaagctaaaggatttaactttttctgtctagtacttgttccctcctaactctcaggtgagattatcattactctctttttcatatgtaacccaatctagttagttcaaaatttaggacaattagatccatctgagcagggtgaccattgcaatccgcttagcgttttctttctcttctaatgttttcttaaaatctgatttaaaatattctgttaagtgtagtttgttataaaatatttcttgctttccctttcctctttgtgatttgtgggaaggattctctttaagttaaaagcaattagagttgctttttgaaaattacaaaatatagcagaagagttgaagggaataattcaagttaatgaaaatggatcattgaaaaagtattaagtacatcaataggtaaatcatattatggattatgtctgtaaatatagtataataaagaacatctttataatcataactatcatctattaaaagtctatcacttgtcattttaaacctacaaacattttaaaatggaattaaaacctttacttggaatcacca

SEQ ID NO: 37123 - DNA, 866 bp, Bovine  19866880491794
  misc_feature (1)..(1): n is a, c, g, or t
ntttatttattaaggcagcacagtctagactgactggtaaaaagggaattttaaaaataataacatggctttattaagtggagggattgggggaaggctttgtgttttcttaattacactaagaagaaagtaacaatctaataaatgtgaatgttggatggctgttgtggtttggtgattttatgaaagcaaaagcccctatgtgctctcaaacctgtcacaacctgagacgacattaacaaacaacctgaggtcacattaatgaagcccacggaacacccaagccatgtgtgacagcagcttgttcaaatgcaagcacgctcgctgcccaccacgctttgctggcccttcagggccaaagtgatgaatcagtgataaatgactcagggaataattttagacacagagcgctgactaaatgtttctgaaagatgttgaaaagattaaaaaaaaaatgcaccagatgccatctctgaggctgttcctacagaccaactcatgggcctatttccagctggtattttcaagggtcgatagcttcagcaactccccaggagctcagaagcccagccacaaccatccccgttacccgttatcagtgccctcaggagccttgaacaatcagtgcacagtgggaaggcacataggttgatatactcgggggtaaatttagacgcagaactgttttgcatccttatttttctgagtaatctgttctgccaagttttcccctttatagtctgggaccaaccaattaccatgaaaatcagatgaataaatattgaagagaatgtgttcatcgtctattttcgtgtcctcacagcaagcaagcgacattatatttttaattaagtctttatttccat

SEQ ID NO: 37124 - DNA, 948 bp, Bovine  19866880669910
  misc_feature (1)..(1): n is a, c, g, or t
ntacagattcagcattaggggacaaccatctctccccccatacgccctcctccccggggttgggggagggcaaaggtcctctcctgctgagcaggctgtggggacttctgcttgaacaggtctctgctcggtaacatcagtgtccaaaccgaggcccggagggaaaggaagtaaggagtatgtgccaagtcctaggagggaaaggggtcttcaggatctgacctggtgcagcacagtgatcgcagcagaacccgaactgtgcacacacactgagtccacctccaggagggccaatgaaagggctggttcttcaccatgaagaacactcaaaaaacagtcaccttttcatggtttcatcaccagagataaaaacgttgtttctccctctttgggggaaagcataagagaccctgattttatagtgtttctgctgaaaacaggttaggggctagttttccctcaacagagctagagctgtgctgtggtttttcaaaaaaattttaaacagaagatttttatatgggcaagcggtattagaaatgctgaatatttgcaaatgcaataggattgaacctggtctgtgaggctgtttagactgccaaacaattatgcttaatggaatttgataaaataaagtttgtcagaagggtcccagcagagaggctgggtgaaggctaagttccactgagtctgtggagttggtacaaatttaaatttcttaaaatttgaaatcaaatctttgcagattttttgcccattcaatagacagaagtgaggaaaggttcttctgaggggcttttactttagcaaaacaacacgtttcagaaaaactaggatggcttcaagtcagcttgaaagtaagcagctgggacctccctgattaagattctacacttccactgcaggggacgatggttcaatccctggtcagggaagtaagatccttca

SEQ ID NO: 37125 - DNA, 1947 bp, Bovine  19866880769791
  misc_feature (1)..(1): n is a, c, g, or t
nctttggatcttgaataggattcctgttggttttaagtcctgaggacattgtacaagacttgtaaatggagaaaacgtggaaatggatccttatagtggccaataccaggactaatataataggcctatgtaaatatgctgctgctgttgctgctaagttgcttcagtcgtgtccgactctttgcgacctcataaatggcagcccaccaggctcccctgtccctgggattctccaggcaagaacactggagtgggttgccatttccttctccaatgcatgaaagtgaaagtgaagttgctcagtcgtgtccgactcttagcaaccccatggactgcagcctaccaggctcctccgtccatgggattttccaggcaagagtactggagtgggttgccattgccttctctgacgtaaatatagtcctaaataataaaaataatcataaaaatgtatttttgaaccttatccttaatatgataaggattcatataagcactcagtttcttttcatgtcctctgcacctctgcagtcctttccaagtatttctttttatttacttaaatttctttttaaaatcattattatttttgaccataccatgtggtgcaggatgttacttccctgaccagggattgaaccccatgcctcctgcagtggacatgcagagtcttaaacaccgaactgccagggaagtccctcatttgttcctttgcaaacttatgtatataagcttgagatttgtgtatctgttcctttattacccacatgtggctgtgacatgatgctatgacaactgactgaattaggagtcctaaaatgcttatttcaaagacaagcaatattaaatgagagtcaaggccttctagattagtactaaccaggcctgaccctgcttagcttttgagatcagaggagataaggcgcattcagggtggtatggaggtagacaccaaatcgtcttttaatgagttttgctctgattagggaggagattctcctggaaattttaatctgtgttaatcaaagctaaaaagtatcaaacatctaccttccccagcccttctgccagccccttcaagtatgttgttatcaacattatgggttttttagcacaaaaaacccattatagtaaaagagtatgcatgggatatacatatactaaaaaaatgattttgtttagttgaaatttaaattgagttgagtgtcatgtttctttgttcagcctggcaaattgacagctatgcaaaataagaattctatccttactggttttgttaagtgcttcctagcagagcaagacaagctatgatggttagcctccactcccccactccgcccacccctcagacaagactcagtccattcgtgaggaactggaaacattccagctctgaacttcccacctgccaggcaccaggcgggcacccctatgctctaggacctttcacctctccaagggcatctgactcactccgcctcatggggggataaagaagctttgtcaaggccaggcctcatttgccacttcagagcaccatgtctgttgacattgcaaaatagcagaagaattcaacaagaggtcttttcagaatgttcattgtgaatgcacaaaggacagtcccaagtgggtcagcagctggcctggagagctttccgggtgagaaatcacatctaagtattcggcctttgcgttccccgtccatcctgcccgcctcctccggccactcacagggacatggacaaaggcagcagacatctccctctcctcaggcaggcagctcggtccagtgagttcacacttggagggacttcccgtgttgatgtctgatgccctccccaacttcggcattctagcatatacgaagaggtcctggccccatccatccttgcaggaacccccactctccactaaacaccagctacctcatgtttaggggctctcatg

SEQ ID NO: 37126 - DNA, 1276 bp, Bovine  19866880780087
  misc_feature (1)..(1): n is a, c, g, or t
ntttcttgttcatttttgtattgtagtggttggcatatagaaacattaaatacttgttgaattgtgtagttacggcatactcaacagaaaaacacacatgccagttaacatatagacttagagagaaggtagttgactcatagaaaatgtatttatttaaaaattataattagtcactgggaaactctaagcatgtaattcatttggaaaactaccaactactgaccttttagaaaatgcacctgttataccaattgaatgttacctgtatcaatttccaggatactgctccatatggggaaaaactggcacggaggtaaactgagagaaaatgttgaagtttatagcaatagtgttatagtctgcttttttctattcctgaatttttaagcatctttttattttgaaataattacagaatattgttgcaaatatttattgtgctttttactcttctcctcctttgctaggatcggcattcccatctcctactgtgttttccttattgttctttaacttaaaatacacactgtcagacactcacttggattaatatagctaagtgaaaaggcctatttaacagttaaatatctaaattccagaataatttcagggaaacacaatcagtgaatgttcgagtatgttacatatcacaaaccagggtaaactgctgctaataagtgaaataaaaagttaattaaaaattatgattcatgagattcccacattatcaaatgaagtgttataagctttctggttctattgctggagagatgctgaaagcatctttaacttcattagcctttagtgaatatattcaccaaatgtttactttgtacccatttcattgaggcattaggaatgcaaagaggaataaagacacaggcctgtggattcttccagctgacaaagtgtgtgagtgggtgctggagcctgcactgggtttggggatgagggtgcagggcaaaaacgggatattttggagacaagctgagatattggggaattgagagggagggagggcatggaaatgtcagagaaacttaaaggtttaaattttcttcattttgaattttggcagcatcactttgttacattctctgtgtaaagcatcatgccacactaaaatggtgaaaaaggatcatgcaaacaggcagaggtcatggctgcagaacacaagaagtgctcttgcaagataagggatattaccacttgaggagggagggcactttactgggtgtctgatatttgacacaaatcatgaaggattggaagt

SEQ ID NO: 37127 - DNA, 1161 bp, Bovine  19866881106950
  misc_feature (1)..(1): n is a, c, g, or t
nttgtgtcattgcctccgctgcttccaaggctgtgggtcagctctgttttcatagcttgcagacatttgtgaacccacagagtaactggatttcaggcagataattttggatgaaggctcaacttgatgcgctagcctgtgtttcaatcagcccagggcagacatagaggaccaggcaggctccaaaattttgcaaacaggaatgcttttatagtcacatggtacttgaccagcagttctcagggttccctcacgatcctcttgacaaaagtgggggaagcaatttctattttgaggctccactctggtatacttaatcagaatctcctgggtgggcctcaggcatctctgtttttaaatagctctggcaggggattcaaaaatagtgcctgcctggttaagaactagtatgcattggcatcttagaagagggcatgttctaatctgaaagggaaggatggtggggcagttggtccctgtgccaaggacaattctggaggactgtttaatgcaccagttggagcagaactgggtctgtccgtccttgtgctggccccagacccaacagttttaactggaccatttgattgttcatcagccccatgagctggcccatttagtctagtcctgagtagtttcctggtgggatgaaaccagtttctgaggctgcaaaacttgtggcccgtgatgcttttctgaggcttatgagtgacccccatgagactgcatcccagacgagctgcctggtgtactgacacctctgaccttcctgcagggtcctcatctcagtgtgtgcatgttaggtgttttagtttgcatactgcatactctagaattgatgtgttagggtcagatctcaccctcccagctcatttctgtgacattgccttcatgggcctgatgagaggggatggtggaggttgggaaggtgtggcagatagaacagcgtgggggccctgacagtgtggcctccctagaatggaaagctaaaataatgcttcttcatttcacagcctccgagcaaaatgttgtctagcatcttgggcaagagcaacctccagtttgcaggcatgagcatttccctgaccatttccaccgccagcctgaacctgcggacgccggactccaaacaggtctgtaggtgcccaggccctgccgtgc

SEQ ID NO: 37128 - DNA, 826 bp, Bovine  19866881200368
  misc_feature (1)..(1): n is a, c, g, or t
naaagagttgtggactcactgatgcagagctcagtgccagtttgaatactgttattaccataggtgaaccacacattgggttttctcagtcagaaaactttcactttgggcctgctagtctaggcgctctagtctcctgacaccaaggatccaaaacgcaaaatcagcccttaagatacagatgcaatgattcctcgaccaatattcatctctgaaaatgctgctttcctctttatatttgtgaattccattaaaatgcatgactctcctaattttctaccatatgtggatactgaagctaccatttcctgtacaaggcctaccttatgatttggcctaatgactttatgtctcaaaatttagggactgattttcctttaccaggaaatgatgacactaatttgattccatggtatctcttcgactccctaaaaatgtttcaagacctactgtctatgcatatatttttgttacaaagacatgggaatttgagcataaaataatcttgaaacatttgttgttgcccaactggagaaaccctttttctctgccaggacttgggactatgactctggggctgatacagctggcatggcagccttgggcaatctactgtgttggccagttagccgagactgagctgcccccgggctatacaaggctttctgtttcctcacatttggtttcgtgattcctttcttatcagttttcgagccattttgtattattcccttgccatatgttttctgtaaaattggttaattaccttaagcgcattgaaatatacacattaccatatgtaaaattaaataaccaggaagatttg

SEQ ID NO: 37129 - DNA, 1598 bp, Bovine  19866881218604
  misc_feature (1)..(1): n is a, c, g, or t
ntgacctctctcctcagctctagcccctcccagctgctaggagcttctagtgctgtccccatcatttcatggcctgatgtcctgcatgtcctttctccagcccacctcctgccttgtgcctcttccttgccgcactgcttcccacctcaggaccttttgcacgtgttgctctcacaccctcctcatctcagtagatcctcgtcacactctggctttcagatgaagaggctcttcttgcaggaagtcctgcttgatgcacctaattgtctctctgtttcctcttggccactaaagagataatgctcctctacttcttcctcccctcacctttcgtctgtattccacatctgcctccagaccctaaactctattatcaggagagccggggtctctattatctttggaaagcaacactttctagagggttttgcatcatttcagccagtctcaatgtagaatggcaggaattctgttttcccatgtagcagaaatacaatttacatttactctgctggcttgctaagaagtatgcacagttcctcatccttttttaacgtgaatttttgaattttttgaattcatgtaattaaaatatacatgtaacataggttgacattgcaggatgtgagaagtatttttgttctcacactgacatgccacagccgccccatgctggggcctggcttgctgcagccccaggaagcacctggggatcctgatcccctccagccaggtggctgcttacctgggggtaaaacccccgaggtggccaggtgtgcagaggagatttcatttaatttacagccttccagggtcaaggggttttcattcactaaattaaaatgtttgacagttgattgcttaatataagtgggcaggagggaaatctacacttgggaccagggctcaggaaaacagacctcccctttggacgtattccaaacccagagactagagaaatgttggctcagcaactctgtggtctaaagtccagtgtgactctgggaaaagtgtggagtgtgcgtgtgtatacgtgagtgtctgcatgtatgtacgtgagtgtctgcatgtgtgtacgtgagtgtctgcatgtgtgtacgtgaatgtctgcatgtgtgtacgtgtgtgtctgcatgtgtgtacgtgtgcatctgggcacttgtggggcagagatctcaggcccagacagcacttctcctcaggctgactttggagtagccaccctgttgtctcactagctcctcgcttagcagttgtcctgcagggctggtggctctgacagtgacttctgaatttcatgtcaattaccactttggtgtgtagtattcttactctgttttctgttgactacactgaaagacaatttaacatgaaattattcttatttctctgttattttcttccccacactcaaccttatgtgacttggattacaatgaggcaacgtgaacctgtgttcaccttgaattttaaatattcctgctggtccttatagcacgttcacctgaatgtgcaggatagtaaccatgccatgagtttccacccagttgattagatccacccacttaatcagtgactatactcatgtcaccttgaat

SEQ ID NO: 37130 - DNA, 1612 bp, Bovine  19866880356998
  misc_feature (1)..(1): n is a, c, g, or t
naccttttatagtgttccataatcttctatattcttcttttttactcctttaccctatatgtggtttcagtcttgatattttctactagttgaccgaacttccacttcactaaatacttcatctgttgtgtctaatgtctcatgtaataatttactatatattttatttctaggatttcttaattataacaactaatttaatcaaaattagataatgattatccatgaatgctaaaaacatagggttgggaaaaagaattttcacgtgatcacaaagaatcatccacagattattcactaattactatagtctaatgtatctttatcttaagagacttggtggttgctcgatgaccagatgaccaccttagcatcagcagttgtacaattggctatcgcatgtcttcagatatgatacaataaaaaacaaggctatatcatgtattctttccacaaatgtgtagttgaatctgatgagagaacagtcagacaagtttagaccatcagatgtcttgcaagacaaatggccaggtctctttgagaaacaaagaaagggcaacaaattccagatgaaaagagattaaagagacataacgaacacattcaactatgtaaaaacactatgtcacttcatacataattagatcccagaatgggaaaaattcaacatggaatgtttatatagacattactgaattgttaattttcttaggtattatacatataagagaatgtattcatttataggaaacacatactgaagtaatcagagataaaacataaagtcatctatagcttatttttgcgtgcttcagcaacagatacacacatatacacatacatatgtgtatatatttatatatataaggtaaattaatatacatataaatgtaactaaatatatatatttaacaagtaagttaaattccccaataataaaataaatataagataataaaccaataaagtattttccttctgaatcaatagagaagataaattaagcttcttcacagaatttactaaagcagataatgtgaaatatattctaaatagcttttcttgaaatattgaaaagtaaatatttgaaatctaaaggaataattgctacatgacttgaaaatatgaacaatcagaacattcaccagctatcagaaacaaaatcttaatgttattatatattaagagagagctgctactttttttctataagcaatatgtccagccctgtggagtctcttaattcttccagggtagtaatatataatttgacaaattatatttctgcctgtcctttatagtcagagttcctccattccattttattgcaagtagttttactccaaaaaagtaattttaccttcacaagaagagattcaagacttttattttgctagcctgagaatgggacttctgggtacactttcttaatggattatgtgttactagctttgcctgtgctttctaggctagcaatggcacaaagatatttctatattacttttttttcacagtgtaatagattctagtacgattcccatgagttagattctgtggaaacattttccttactgagaaaaaaatgcatgtgaaattaacttgcttctaaatc

SEQ ID NO: 37131 - DNA, 877 bp, Bovine  19866880424728
  misc_feature (1)..(1): n is a, c, g, or t
nattctccaggcaagaagtcgctcagtcgtgtctgactcttcacgacccccatggactgcagcccaccaggcttcctccatccatgggattttccaggcaagagtactggagtataactagtacgtacaaataaatagaaatgctatattcttagcagtggttatgtttgagtgtaagagtgtggccttgagtgagtgtgttgctaatggagaatcataactgattttataaatgaaagccaagtttacatttatcacaaaaattttaattatgttttaagttttaattttaaaacaaaactcaaagaaaataatgaccaaaagaggattaaacctggatcttcattcttgatgaccattaagcttattttatttgtccatagaaattatacattggcagtttgtaatttttcttcttttccacagcatctgaaactcagcagatgctcttaatcatgtctgtatgcagatcccatacactagctttgccatgttgttcaaagaactgtggtctctagggagagaagtttctttcattagtcagtctatcctcaagggccaaccaaacagcccagtgtctgctggctccatgcagagttgacaatcactttgacttcttaagccagtaaaatcagtttctcttcatccaagtttattattaagaagcagtttcacatacattactgcatttatggtacagaattaggttgaagaaagctgatcacctaacgtgattactaaactcagaaatcagggaagaagattaagctagaggtaaggcgatggcaccccactccagtactcttgcctggaaaatcccatggatggaggagcctggtgggctgcagtccatggggtggctaagagtcagacacga

SEQ ID NO: 37132 - DNA, 2992 bp, Bovine  19866880513819
  misc_feature (1)..(1): n is a, c, g, or t
ngaggcctggcgtgctccatttctggggtcacaaggagttgaacacaactgagcgactaaactgaagtgaactgaactgtcaatatttagattcatcaattatctattcaccattgtcatgaataattggaagttgatgatatgctccatatataaaaatatataaattctgctacctttatgattaagtacatttttacttttaattattgccaatatttattcagcattatttataaaaagatttctggtgcaaaaagaatgctagtcatggaaaagatacaagcccttggttataacattttgttgatctacaaaatcagtgaggactcagaaaaaaaaatgtcttcagtagtagaaacttgcacatcaattattgctgggtggcagtacattttgctgagaacaaacggcatctgtagaaaatcaaataaggcaaggcaacaactcaggaattgccatttgagttttcagccatttcctaatgtcatgtttttcaaattgcatcatgttctcattcctgctatatgttgctactttggaaatagaaaccaaaaattaaactacaagttgaaaattaaactacatcttttctcagttgagaaaagatgttatcattatcctcatggtaagcatggctatttatcaatgcatttgattttgtgagccaggcactaaagaaccatattttcaggagcattaatggatcttcgctgctcccatagaggaaagcatcctcacccatcttctgtagtcttgacattgtccataaacttcataaatgtctatgcaaatgactttgcagaaatgacttggagaaagatgaaaaccaaagactcaatgtatcgaattccaggcttgctgtgtgcgtgtgtactcagccgctccattgtgtcactttgctatcctatgggctgtagtcccccaggctcctctgtctgtgggattttccagacaagaatactggagtgggctgccatttaattctccaggggattttcctgactagagctataataatcaagagggcatgactttggtgtaaggtaaacatatgcagaagtaaaatacacgtcttaaaaattcttcagccatcaaaccaacacaatttccatagattgtgtttcagtgtcttgtaaggtaaacattttaagctttgttatttttcctttattgttaaacatccattttgccataatgtgcattctccttctgacttattctacagactaaccataatatattgttaggtttctatggatttcttattctaaaagagtctttatcttcaagacctgtcctgttgtaacctgacttttgttaactacaaattggcactagccatgggcacttgccacctacctctacgaggattaaatcagtgttgctgcaactgctgaccttcaacaccccctgaacggagctcagggtggagagcagaagtttaggcactctgagcccagggaaaaactggcaggacaggtcctcagagagttaagtatttttaggagacgatttcatgagcccaattcttgtatcgcctcatatctagaaaaacactaaaatccttcatggtgacaactgttactcatgactagcaaaagcttcttgaaactaatagaaaacttctgggaaaatatgttcttaattgtatttactcctccttcaccaaaatcacatgtgtactgaccatccccctgctgctttgcagcagtttcaaagctctccgggttgctgtctcctgcgccacagacctcattttgcccccaataaaacttaaccagcaagtttgtgcttttttctcacattgtgcattttttttaaattgacactttgaagctgtaattgttttacagtctgcataatattatcttagtgttctaggtaaagtacattaaaggctatccaatcatattttatactcaggagcaaatgtgggcagagctttcactgtatccagtaagcctgagcaaagagctattattaccgttctctcaaattttccctgtggctaaggcaatcaaagagaggaattcagtctacaggaggaaaaacagtcattaatttcttctttgagattcttttaagctctgcacaaaatctcatgttacaatcctggaaatacctaactaagatctaagatgaaatcagctctgcttcatgccttataaagagctccctggttaaaaggtgcccctgccactagcaaagtggctctgatggtagggaattcttgcctgcaatgcaggagacctgggtttgatccctgggtcaggaaaatcccctggagaaggaaatggcaaccgaccccagtattcttgcctgggaaatcccatggacagaggagcctggggggctacaagtccttagggtcacaaaagagttggacgcaacagagcactgcctctagcaaagacaaaagacaatcctatgtagtcactcttcactgactagggctctgcactagaatttgagactaaagtcttattatattctatccttagctttggggaccttgtgggataaggtgaaaggtcaggggtactattatgacatccctgtatctttaggtcaaatattgtttatttcttgtctcattgactcccagcattaataatctggtttatgtattttcatgtcatcctttactcacatacttcacatgggcaggtggtggcttaattttccaagaaatatcctcctatgttaacaaacctgacatgatctcctagcactatcttaaaacctatagtatgttattgccttgggaaactgagatagtgtttgagaaggaaccctgaggctttcgagtgcatggaggtcctggaaaattgtggggtcctcagtcatgagtgagggtgaaagtggcacctgaaagggcaggcaggtgaagtgaagggaagtgaaagcctctcagtcgtgtccgactctttgcgaccctatacatggactatacgtggactgtatagtcctggaattctccaggccagaa

SEQ ID NO: 37133 - DNA, 1449 bp, Bovine  19866880656972
  misc_feature (1)..(1): n is a, c, g, or t
ncttttgtccacatttcttttttctatttatttttggctctgcattttgagttgtcttttctcaaatgtccagttattatcagcactcgttcaagtgtgaaaatgagaagctgattggaggacgtgcctaggtgtgggttggtggaaggtataaacccgggctgtctaacaaagcagaagcagcttcctagtccagcattttaatatgtagatgtttatataacaccactgctcttagcaccaacagatactttatcctgtatctgttgtcgctgaatccagagctctgtggcgtagtttctccagactgcacctgttgccccgaaggatggatatgttgaggtagttccctgacttctcagggaagtgcaggggagcaggcaagttcaaccaattgacgtacaggtactaaaccaatcaggtcttgttctaggcgttctgcaaggcaaattagatcaattcttgtaggtacttcacctcctgtaggcatttggatttctatttcttctacccaagtccatcaaatcttccccatcattttgttatctaaacatttttcgaaatctttcatccatagttttctccttatgttgtctttatccttgtggttaatccttttttgattcttcactggtattttagtgaagtttttggagggagagctaatggacaagagtgggcaatccgctaaacttaactggaagggctcagtagttagcagtcaatatttctgaaacattggacagtatgacagcatgcatatggatgggttggaggtcatacatattgttatatatcatttgcagcattagaatattatttatgactctaccttcaaagtatgatcaaaatttgaacactccagaagctgtcatcctaatccagtgatgtcattttaaaccaggacaccaccatctgtcatgtggactgaaacaatgtagcaaatgagaaaagccaatctggatttattctgactgcctgaaatcagtccaatagctgacttcagctccaagttatgcctgctagccttcagaggagaggtcctagctaaggcttgaactgttcaatgagtacaatgcctagcagtcgtttcacagaataggctttcaatttccccccagatttaaatctgacctaacattcatttcctgccttaatatgtgctcaccagccccttaactccctttcatttctgccttctatagaagggatatagaccattgacaaccgtgtattctatggcaagagaaagagtgtggaatataaagtagaaaaaatctctttaatgcaagaaaagatctgtaatacatgagccttcactgacaagaacaatctcggttgatgttttgtagttttgtcaaaatacatgcagtaaactttcattgagtaaccagccttctcttgctgattgtgtaaataccattcctcagcaaacccataaagaaagat

SEQ ID NO: 37134 - DNA, 1275 bp, Bovine  19866880687112
  misc_feature (1)..(1): n is a, c, g, or t
ncaaggccagaggcaaagcatccggaacacagattttgtagaaaaatccaataaagcagcagcataagactgagaaaatattgtttcagcaatagacttcttcgctaactaatatagttgtctctggcttttctgtgattcctggtaaaaccaacagatattgaaaagtacattactcctagcttatcgatcctgcttttctcatctgtacttgtttttcaaccaggaactgtctcgtttatccattcagcatccatttattgaggtccaagtatgagttttagcctctggaagtttctcaaggtgttcacaattgttttagagactaatggacagaaagacctattctagtgtgaaaatgggtatagaatggtgggttgaagagcaaagacaacttaacctagagaagctgagttacagacacaacaacctatttgcattcaataatgcaaattcatatgctggaactcagaacaaatcttttcaagagtctttgttcaatcctctattttgagaaactctggtaatatatttgagaaacctgatttttgtggacttcaggttttggaagttggtgataggacttcaagaactctcatagttgcctcttgtgaaattgggaatacaataagtcctctatataaaaccttcaagttctgaacttgcaaagatgcaaacatgagttcatatgtccagccatgtaagttagttcacatgtctggtgtacatcatcatgtgcagcatcccctacaaatggtggtgcttttgtgtacattactgtacaggactgtatagagtagagaagtgtctttatttcaaacctagatgactggaagcaagcataaaagtaacagtgatatagctggtactgctaagcagcaccaagctgataatgacagaaacaaaagtgaaaataattgagacattggagcaaggataagagaaaagctggtagacatcattcgttcttataacatgaattgtttaaccatcagcacaattctaagaaacaaggataagatcatggaacagatgaagtcagctgtgctgatgatgttgacaataaataatattaaggaagcctggaaaagtgatggaggagatggagaaacatttcagtgtgtggattcaggatcagtattagcgtcctgcttagctgattccaaagaaagctaaaagcctttatgaagacgtgaagaagaaacacagcaaagaatcaagggtatatcttttaatcccagccatggcggtttcatcgattcaaagctaagccaa

SEQ ID NO: 37135 - DNA, 2397 bp, Bovine  19866880770978
  misc_feature (1)..(1): n is a, c, g, or t
ntttcactttcatatatataaatacatatatatccctccctcttgagactcccttcccctcccactgcacccatctaggtcatcacagagcactagccaggctgggctccctgcattatgtagcaccttcccgctagctagctattttctacatgatagcacatatatgtcaatgctactttctcagttcttcctactctccccttccctggctgtatccacaagtatgttctctacttctgcctctccattccttccctgcaaataggttcatcagtactatttttctagagtcatatatatatatagttaatataggacatttgtttttctcttttggtgcaatccgttagtgtctggtacttattttttagcatagtatcaaatggtccaatccagtcttgctaaagtgcttaaagtttctaagatgtaacactttttttactttgtttctttgtaaatattgttccctttatctggaataacctttccatcttctccctctgaccagtgcctgtctatcctctaagattcaactcaggtaatttatcatctgctcagtttctctccaactggcttccatctctgtgcatttgaacatggaggacacttctctaatagctctttagtgtttggtcattgcccgattgtgtcttttccccctggactttgtgacacttaagaacagaactttgggtttattttttaattatccttatataaagatacatgttttccaataaatgttcagtaaacatttcttaattttaataaacacttaacatttaagaaaatgaatttctttgtattttgagacatgcaatgcatgcttgttatagctgtgagtagtttctctctgtaaatcaaaatgtgactctcaagcctgaaacactggagataaggtagagtgaggggttagaatggcagagaatagaaacactgttggtcaccaagactgcaaggctctcagtgactgactgaatcaggactccagtccaaggctgctgctgctgctgctaagtcgcttcagtcatgtccgactctgtgcgaccccatagacggcagcccaccaggctcccccgtccctgggattctccgggcaagaatactggagtgggttgccatttccttctccaatgtatgaaagtgaaaagtgaaagtgaagtcactcagtagtgtccgactcttagcgaccccatggactgcagcctaccaggctcctgcatccatgggattttccaggcaagagtacccgagtggggtgccattgccttctccgcagtccaaggctgctaacaacaaattcaatctctttccactggttcctggtttccttttagtcctattaatcaatcttattactccagcttttcttcccaatgctaaaagttcctgcacatgttttaccttcttcctaaaggcactgggattcaataaataatgtagatatctaattttataacttaacaccttaaatttctacttaggagtccatttctgccttccctggactacctcacagacatctcttatcatcttatcattgagatttattggtgtcatttcatttaccaactgccgttttcaatttcgatcagaagcagatgttcaatctggcatcttccccagctgcaatcagtgtacataatgccacagctccttgattggcttcaaaacatcttcctgtgtgcagtcaggaagacagttttaggtttctgatggcacatctcaagatgctgcttaatttgtctccagttctcaatatcttagttgtttcacactgatctttaaaaatagactctctgttgttgtaagctgagaagtggtcctaaagaagaggagattaaaattattatagtgcaatatagattccagatatcctattgcactatggatattaaaaggaatatgctggagaaaaatgtagatgtattgaacatgagcagttagataacccctgttagttgataaagttatttactgtgattattgttgctttcctagtcagtttttttttttttttttcaacttctcttgatatgaaaagaagactcttgagatccccttggactgcagtaagactaaaccagtcaatcctaaaagaaattaaccctgaatattcaatggaagaactgatgctgaagctgaagctccaatcctttggccacctgatgccaacagttgactctggaaaagaccctgactctgggaaaggttatgggcaggaggagaaaggggtgacataggatgagatggttagatggcatcatcgactcaatggacgcgagtctgagcaaactttgggaggtagtggagaataggggagccataggccatgaggtagcaaagagttggacatgactcagcaactgaacaacaatataaaaaaagtagtaa

SEQ ID NO: 37136 - DNA, 1694 bp, Bovine  19866880772009
  misc_feature (1)..(1): n is a, c, g, or t
naagttgtatgaaagccagaagagaaaaaagtacagaaatatgttggtccaataacatttgaatgaaaatggtattaaattccaccctttctccagctctgagatcacagaaatgacctctggcaaggacccaaccatctttgttgttgttctggcagtgatgtccctggacagctggagaagttatctatctctatttgaacactaactgcttcaaaaattagagcaagtgctacagtagacaatgcgcagcaccatgaatatattcagttcgaaaatctgtgtttggaactaaacgtaaaacagtgagaaagactgcaaaatacaagcaccaaaaatttatttctgcattctctttaaaatgctatgcagcattgccagattcagcaagtaaaaattatagggtgtctatttaatttggaatgtcagataagaaacagaatgcttttagtgtaagtatgacccataatctggtacacacatttatcctaaaagcacttactttttgtttatctgtaatcaaaattatctaggtgtcatattttatctgtcaaacctacagtcataaaaacatatgatataatacaatacctgagaaaacttgaggacaaaaactcacaacatgccaggatccaggaaagtttatactaattaaagtatttactgatgagaatagttaagaattgatgttcatagcagcttttgctcaaactcttaaagcaaatgaaacaactgacaaaggatcaatttccaaaatatacaagcagctcttacaagtcaatatcagaaaaacaaacaacacaatcaaaaagtgggaaaaagacctaaacagacattacaggaaagaagacatgttagcagatggctaacaaacacctgaaaagatgctcaagatgactcattattagagaaatgcaaatcaaaactacaattatacatcacctcataaaggtcagaatggccatcatcaaaaagtctgcaaaaaacaaatgctggagagggtgtggagaatagggaatcctcctactctgttggtgggaatgcaaatcgatacaaccactatgtaagacagtataaagactccttaaaaaaactaggaataaaaccaccatatgatcctgcaatcccactactaggcacataccctgaggaaaccaaaattttaaaagacacatgtatcccatctgtcactgcagcactgtttacaatagctagaacatggaagcaacgtagacgtccattgacaaatgaatggatagaggagctatggcacatataaacagtggactattactcagtcataaaagggaacacatttgagccagttctaatgggatggatgaacctagagcctattctacagagtgaagtcagtcagaaaaacaaatatggtatactaacatatatatatatatggaatctagagagacggcactgatgaaatgtgcagggcagcaatggagacagagacacagagaacagacttatggacacggagatggggaggaatgagggggtggggtgcatggcaagagtaacacggcaacttacattaccatgtgaaattagatagccaataggaatttgctgtatgactcagggaactcaaactggacctctgtagcaacctagaggggtgggatggggagggaggttaaagaaggaagggagatatatatatgtatacacccagg

SEQ ID NO: 37137 - DNA, 1735 bp, Bovine  19866880854839
  misc_feature (1)..(1): n is a, c, g, or t
ngcggcatcgggaaactaggaaattgaggacagtaccaccaatgattaaggattaaagaatgattaaaaaaaacaactaagattagttttaagatgtcaggaggaataccgtctttgtcatttaaaaggtagcaactaaaaataataaaaacaaaaatctaaaacaaaaagcaataataatactaataggtaaaattcagtgagggtatctgtcctcaaaaataattagtatctgttttaattctgcaaccatattgcaagtacattccattaacccattttaaagaaaagttgcagagactaaggtcaaagctctctgttttctaacatgaattgattctctgaatttctctcttattaaaacaagaatcttcaactataccgaacacaaatatttagaaaataagtattataatattccaacaaatagcattttatacaaatatatatgtacaaacactcatgcacagacacatgctaaactttggtcatcaatagtgcaaaagtagctaagccacaaaaatgaaattcctaagctttattcctgatttctcttacgggtctttatatatagtactttttcaaggtccttataaaataaatagaataataaccaaatgctgattcttcataagcaaaaataactaagcaaagaggcatcaggctagaaagcaactgtgtgttcattactcggacaaaccatacattttgctcctaaagtatctttaaaaagtctgaagcttgcatgagtggacaagtatgagctaggttcttctcctttacatatttgttaaaaatctattttctagctagagaaagatatggttgttttcacaggttatttagctcatttagactttccagagcaaggtttgcaggacttgcccttgatagagagacaatgaagggaagcttctgaatatttaatagagctagaaaatcctacagttaatattctcttgagcttgcacagtgctgacttagaaagaaacccaaagtgtatcttttccacattgtagaatcttaaaaatgctgtgtgctttaaaatgacactcacaacttgaattggtttcattcttaaaggtaaaacatttcttttaaactatgtgctaaaagtctttagttaatcaggaaaaggtaactttgacctttaccttatgtttctgttaatgtctcattttttatcactttatttcttgtttttagaacttcaaaatctggcaacagctcaagttttatccaggttttattttgttctgctttgtcacttttgttttgctttatttgaatcagggacacattttaggaatgctaagcaaatcagccatctaatgccattttaacagcttttgtacatccaacatgctttgttgattttgactttataaatgtgaaaatttctttaagacagtaagttttgaaagaactaggactggagaaggaacccccatacaaaaaaagtccttcttaaatggttacagtaatccttcactgaatatatttaatgacctactgttttgtttcttctctgttctgcagttttattaattgtgcaagagtctaattcaattcagtaaatgtttcttgttcgactattaagttgaagcttctctgcctgagattctggagaaaccaagacaagttctcatatacaaagagcatggtatttgtggggggggatataaaaaaataaatgcctcagatagagataaaaaatagttcattcaataagaaa

SEQ ID NO: 37138 - DNA, 1110 bp, Bovine  19866880988323
  misc_feature (1)..(1): n is a, c, g, or t
nacatgaccctggaaaaacctagccttgactaggtggatctttgttgacaaagtaatgtctctgctttttaatatgctgtccaggttggtcataactttccttccaaggagtaagcgtcctttaatttcatggctgcagtcaccatctgcagtgattttggagcccagaaaaataaagtccactgtttttactgtttccccgtctatttcccatgaagtgatgggaccggatgccatgatcttagttttctgaatgttgagctttaagccaactttttcactctcctctctcactttcatcaagaggctcttcagttcctcttccctttctgccatcagggtggtgttgttcacataactgagattactgatatttctcccagcaatcctgctgttctttatactattctcttaatcatagggagaagcagacaagactcaacacatagctcagccttgacatttccaatccaggaatagaaaaccagaatgccaactggagtctatcccagtaattttatttcacatgacctggaatattgatttcaaaaaagagaaatcacaggaagttgtatatgtgtcctggataatatgtttaacactaatttcttcattcactcctgacacttagagtaccatttgttgcccttcacatgtaactgaattattaaaaaatactgaagaattttgaagttccaggaccaagttccatagaccactacatttatcctgggctatcccaggttgtttttacacatatgacttagagctaactagttacaagatgcagaatcaaaaagttccctttgcatttttattttactccagcctctcctccttcatcagcagtcatcacttttcttaacttgtcgccttaacacctcatccttaagtggtgactctcttaactcacttatcttttttttcttttaattaaagaaatgtgtttatttatttgcctgcatcgggtctcagttgcagcacatgggatctttgttgcatcatgcaggattggtgtcaccgtacattagactctctagctgtgtctcatgggcttagctgctccacagagtggggggatcttatctccctgaccaagtatcaaacccg

SEQ ID NO: 37139 - DNA, 740 bp, Bovine  19866881015536
  misc_feature (1)..(1): n is a, c, g, or t
ntattaaaggaagatgataaaattgtctttttgtacttcacacaaggtcgaatttgtatatgtcccacaagataagttcaatctcttgatatgcttcattaacattctctataaacaaaaataactctccactgtgaaagtatgatgtgtctttatcttgggtcagtcctgtgcttcacactaaagagagactttagccttacctaaatatctaaattcaataaaatattattctaagcctaaaataaatatctccatataataagttgtctcccacctacagaaacttacacccttgttataattacttcagcactaacaactcctcctcttaacactcaaagtgtgttctgagaaggcagtacacaaacctggtaattttaaaaagagtctaataataacacgtaatgtttttcttcttccagatggccacgtatcatcatttacttttattttttcttgtttcactgaattttccatttaaaattaagtatgtctatatcacttattctgaactaaatctacacatatggaatttattcatttgctttgccatttattcaaatttgtaaggatgcaaatataagaaatataagacccagatgactgcacataggtttaaaaatgtgccacaaatgtgattcttacgaaatcaacaaaaatctccccaagttttgtgagcttttgcatttctgtgaaatacgggaatgctaaaggtgatgattatgatttattgagtg

SEQ ID NO: 37140 - DNA, 1538 bp, Bovine  19866881077149
  misc_feature (1)..(1): n is a, c, g, or t
nttcaggctgagtttactggttacacccataatgtctctctcaacctcatatccatttcagctttcagtattctagttctatagcaaaagtttgtgttttctgactttatgcttttccctaattattaatcagtcaacaacatgtatttgtatgcagaagaactagagtacttcactaaaggtgaagataaacaggaacaaaataacaattcacagatctataaaacagtcagatttccccatttagttaaggagcaaacattataaagattttctttttcctggtagtttactgatattgattcaatgctttataaaatttcaaagcacatcctctatctcattgttcacctttctgtacagtgtgtgtatatatatgtgtgtatatatatatatagagagagagacagagagagagagacacagagagagcccctggctgtgttaggtctaatttaggttctaaacttgctggtttggtactaaacctgaattctttatgaagaagggagctgtgccaaatggagacatttgaagatgctgaaactcctaagatgctgtgcatgtggtctgtaagccatgttcattagagacactttacagcagcattttatcagtcaagtgaagtgttagttgctcagtcatgtccaattctttgagaccccatagactgtagcctgcaaggctcctctgtccatggaattctccaggcaagaataccggagtgggtccccacgcccttcaccagggatatttctggcccagggattgaaaccaggtctcccacattgcaggcagattctttactgttaaagctacccaggaaccaactatttttatcagattccaacaaactgacaaaggttaagagctgggttgccatgtttatttattaatacaaactcaaatctactcattgccctaagtaaatattcattccagcttgtaaagaattatttctgattaaaagcacattcctaacatgatgtagaagtgataaatgttttatttctttagagaaaaatgttgaaatatttccccatccatctctatgtctaaatatttagcagaaatttttatgatgcaacttagttcttcacactgtcctaaaatccttcatctgcactaatttttacccttcggtaatgtgccattggattctctgtcatgcttaaaatagaattgcactgaaaagaaacaaacatgggtagttacagttaatgatctattacttgggtatctgagcataaagaaacttcatgactcaagggaataaagagaagcacaaatgaacacttttaatcacagcctaattatacttgtccagaaatattgtattgtttatagaaagcttcttgaatgccacattattgtttgaaaattaaggccctttttcagatatatcttatatttcgttttctggcagtgctaagcatttacctctcttcatgttggaatgcatgactctcagtagaccaacagaccacatgcgcaataatcattagaagtccatgaagtaaaagaaatgaactttcaca

SEQ ID NO: 37141 - DNA, 1210 bp, Bovine  19866881194531
  misc_feature (1)..(1): n is a, c, g, or t
ngctgaggattgagtaatgaccccttggggaggtagcagggccatctgcaactatgcacgatctttcaaactgcaggattcttaactggatgtattacgctgtggacagcagttcagtggggcattttcctactcttgagtcactagttaccttgccagtctatgggtctgacttggttattatgccaggtcactacctgcctcccacttttcagggcagaagtgaactacggaagagcatcatggctagccaggaggctgagctttcaaagttgagcccagaggggaccttttccaactgtagtcagtaatgtgctgggagccaaggagcaatactgggtcatctctcatctgactgtgcagtatcctatcgaacacccctgttccttgggttgggcagtcacaggggttttgttgtggtgaatatctacacggtcaccacctgcctctcacatggggcagtgctttcccctcagtcccctttggactttcctgacaactagagctgtccttttgttgcttgaaggatgggacctttcaaggaaaggccccccagaaaccccctggttttagagaatggggtaggggaggatgggaactgtgagctgtgtatcaaaactactctccacttgactccctgattgaagtttatgctgtgtagaggggtgggagcccccaaggtgagcaggaacggtgctgctttatttgaaatgttttcttacctcattctgtgctccagtagggggcccagcctcatttttctggctcggccccacatcctccagtccctgctccactgcctatctggtgcagctcatcacccagggtgctgcctgccactcttcattaatgctgaccagttttaatttatctcttgattctcctgcttctgaagcctgcccagtttccctttccttgacttcttttaagtttgttttgttttcttgtgtttgtgagagagagcagaatctttcttatggctccctctattggggttgggatgggaggagaaagtaacttttttttgtatatgataagcagtgtcatacctaagcatttctcctgtaggactgccttgctggtatggcttcctgctgtgtcttactttctgagaagttttatcttcccacctccacttggatactgcctctaggacctgagcagaacagcagtaaaggactgacacacaggaatgggagtaggtcctgat

SEQ ID NO: 37142 - DNA, 1128 bp, Bovine  19866881230742
  misc_feature (1)..(1): n is a, c, g, or t
nttcttgcctggaaaattcctggacgaaggaacctggtgggttacagtctatggggtcacaaagatatgattgagtgagcgcacacacacacacacacacatttctttgtttagctaactacttatctctcttattttctctagagagaactttaggacactaatgataggaaactgcacattgagtttccacgcagtaaacgtttgcatgtgtgattgaaataacgcaacctgcctggtagtaaagaggacacattaattaactgccaccatgaccgcgttcacacagaactgtgcgtacgtaatagtcagggattcactggcacttttttcttacagttttgccagaaacaaacacctggcctggtgcctaatgaacccagccattctccatctgttttatcctggacttattcccagtcactatgtcactgtgtgtagggattctaaggaggacagatatttgtgacccgaggtcataagaatcagtataatcttgatttagtgactggggctgtgtaacatttgagagagcaaataggaaagtattttgtatttatttagagaaaaatggcctgatactggttatgaataagtttactagaaacaattatttttgtgagtgtaattataattgtatgaaacctagttaatcagactaagtagagagaactctagtttaaatctgtatttcagaacatttaaagcaaatgtgattttgttacttgcaaatgaacattgcatttaatattagattgaaagtgttttctaagagtaggctttaagaaatgccctctattataaaatgattataattgtatccattaattatctgtgaatagttgtttctggaaagactgatactttaaaagaatttataatcttagtgccttgcataatccattctgaatctaactcaaaacattggattgatctatgaaaagagaataacaatgccgtttatggtctatggatgggttggggctggcagtgttacaaacatgtatagtacatgtttatgtgcatcacaacagcctccaacatgagcttagatggtgaattgtttttttaagtcatcataaagatagccatacctatttttctgtcattctaacatcatgtttaaaa

SEQ ID NO: 37143 - DNA, 1714 bp, Bovine  19866881270084
  misc_feature (1)..(1): n is a, c, g, or t
nttgatcgatactaggagcactgttacagtttccggcaaagtgctctaactttggaatatgaactggaataaatttaaaaaaaaatctctgaattaatctaaaaaacaaaattacagacctaaacacttggagtaaaatgaaaagtattagaaaaacattaacttttagaaaggctgactcattgttaccatcaattatttgcctctgagaccaagaatatgtatatattaagatacctctactgctgctgctgaagtcgcttcagtcatgtccgactctgtgcgaccccatagacggcagcccatcggggtgccattgccttctctgaagatacctctgctgctgctgctgctgctaagtcgcttcagtcgtgtccaactctgtgaccctatagaccacagcctaccaggctcccctgtccctgggattctccaggcaagaacactggagtgggttgctatttccttctccagtgcgtgaaagtgaaaaaataaagtgaagttgctcagtcgtgtccaactcctagcaaccccatggactgcagcccaccaggcccctctgtccatgggattttccaggcaagagtactggagtggggtgccattgccttctctggaagatacctctagtacaatttaaattgaactatccttcacactggacttatttagtgacaggactggattatattttaccaccttcttacttattatggtagattgtatagtttctctctctcactggctgttgcagaaagctaaatgtgaactaccagatgaagcaataaaattcctcttctgataaaactcctattcaggagaaagtgactaaaggtcaagggtcaacagtggttcaatatttacttcaccatgtgaaaacacaagaaacatgtacaatctttaaagatgaagatagagtccaaataaaatcatttttaaaatcttgtttattgtcatcgtttaccatgaggagatgcagtttatttacaccagcagccataggggcaaggggaatacacagttagttagcaatctgtataggatggactacttatgcaaaaataagactctccaaaacaaaggacaatgagtttcactatacttccccaatgatcccagcatgcgacaatgccaggcaatggcccctgggcatgcggtgatgggaactaatgtatggaagaaaaagtcacaaaccacagaaatttgtaaagaacccctccccccccatacatacacactcagatacataatagaattacagggtgagcaatacacttatgaggagattaggacaggaattctgctgttaagaggaaagataggtaagcaaagggagagttcctaaccactgtcaactatatggtagggagaattctctccctcaaaacgaaaatagtctatcccctcagggcacctgttagacctagcccacctcatactcaatcagggggccactgccctaataatgggggggcaaaaaaaaaaaaataacacaaaccaagagggaggtaatatgaaccaaccactactcaaaactatttccaattcttccttctaaccaggagaaaaggccagaaaggaaacagtaatgtcacaatctgagctccctctctgaagtaagagtggaccatgaccttaagtttagcctgtttcccagacattattataggtaggccagagtctcgcttagaccctcctttccttctgcatctcc

SEQ ID NO: 37144 - DNA, 667 bp, Bovine  19866881312521
  misc_feature (1)..(1): n is a, c, g, or t
ntagtatctataatcttagttacatttgcaaaatccctgttgttatgtaaagttacatattttacaagtctgactgtgttaaggatttcactctgcctgccgcaatcacagttatatgccattgctttcagtagtcctattttaaaaaaagagttcctgattatcaaaaattttattaagagtaaattataaagaatttaattaatatttgagggtaaaatctgtgagaaattattgtaatatttatatttaccttttgatttctggatatatgttgaaaaccaaatgtttcaagataacaataaaaattatggtccttttccctgtgaaatattctctttcataggctgtgagtcattctgtttttatttgaggcattctagctgacttgttgcattgcatatctgaaaatttataatcatctagtcttatttattttcatggaaatatataaaatgacacaactgcttggaagctttaggtcttttctcaacatatgtttgttctagttatatcctgaagggtattccacacatcattgcattggtgcatccaagcagcaaaaattcagaggacacaacagatggaattgcttttatctgtgaatggcagatattggtcattcattcagaattgccaggaactaaagtagattctagggtagata

SEQ ID NO: 37145 - DNA, 737 bp, Bovine  19866881654122
  misc_feature (1)..(1): n is a, c, g, or t
ngctggtgtctttgacaggccttttaaatggaaataaaactgagattacctaatcagttacccttgtgggtggatggctatacacctgcactgaatcttagacttagaaaatgacagagccgatcatctttatgggtttcatgacagagcggacagcaaaatgattcctgagatcaatatgtggttgaaagaaagctgttttcaatggaaacaggaagctaggagccaacctgtttctatggtaaccagagcagcagctacccaacagctgtaggaaaagaaaagggcagcaagttaaaattcaaaaaaaaaaaaaaaaaaacaagagaaatccatgctagtttaccttaatagtgtgatggtccctagaggacaatcaaaatgagtgcagacatgctcttttcctacccagggattttcagcgtcactatccttgttttttcctctaaacttcaaaatcttggagctggaaagaagtttgaatacttatctaatccagtgtgtcatccccattttttctttcaaaataaagccaaaggaaatcaagaattagaaagatgaagtaaattctcaaaggtcacacagctagctgtgaaagcagagttagtgcctaggactcatggattccaactcaggcatttttccaatgcactttccatgtactctctactctactctcttctcctcccaacacctacaggtttagtcacttttctgtgaaaatattgactacacag

SEQ ID NO: 37146 - DNA, 708 bp, Bovine  19866881752351
  misc_feature (1)..(1): n is a, c, g, or t
naaatccatatggttggttacatacttcctgtcttttattcagaagtcgtcggcacagtgtctttttgtttaaagaatagtaagaggaagacctgaagctccaaatcctctcagaaatttcgatttatttttagataatacttatggaaaaagagatagataagaatattcacttgtatgatgtttttaattattaaatttgttcatttaatatctgatagatcattcattctgccagtagtataaattggcatttgtatatggatttttccaactgcttataaatatgtgaatactagagcatttcattataatatttaattgtcagactgttgtgttttcctgtatagggctgtaatcagtgatccagagcaaaatttaacctctgagaagccagaaatttctcatatccttccagattcaaagctggcacctattcgatttaggaaaagaacactgcatgaaacgaagtaagaaggcttttatataaaataaggatgtagtatgttatatttttcaaatgtacttttgtatctaatggaaattttttcctttgtgtttttatcttttctgtataaaggaaagtggaattttttggagttcagatcccagttctgtcactttaagatactgggataaactttgccctccagatcttctatttataatttaggagtgacagccagaaactcaggcagcaatacatgt

SEQ ID NO: 37147 - DNA, 682 bp, Bovine  19866881874390
  misc_feature (1)..(1): n is a, c, g, or t
ntttgtacttgccaaaataagggtaaacccaggaccccatccccagcaattcaggttcacgaagttctctgtgctctgtccatagggaaactttctaagaattttgtggttttcaacaaggtctctgactgtaatatcacaagggcattctttctcccattgatctttttctctcacgcatactcagttacacattacgttagtaagagtccatcttggtggcttttctattttaagctactgtatgaatgacatacaggatagaattaaaatttaaaaaaaaaattttactgagggggggaatatattcccagaacagatttttttttaaattttagtttataatagttttagatatacagaaaaattgagacagtagtaaagagagtgtccatatagccataccctcttttcactattaatagcatcatacattattagggacatttatcacaatgaactaacaatgattattattattaactaaagtctatattttattcatatttccttagcttttaactaacgtcttttttgttgcaggattctatccagaatgccaattatatttagttgttatattcacttaaattcattgtgactgatatttcttaagttttcctattttttcatgactttgacacttttgaggagtacaggtcagatattttgtaaaacgtct

SEQ ID NO: 37148 - DNA, 2176 bp, Bovine  19866880413483
  misc_feature (1)..(1): n is a, c, g, or t
nacggaggagcctggtaggctgcagtccatggggtcatgaagagtcggacatgactgaacgacttcactttcacttttcactttcatgcattggagaaggcaatggcaacccactccagtgttcttgcctggagaatcccagggatgggggagcctggtgggctgctgtctatggggtcgcacagggtcagacacgactgaagcgacttagcagcagcagcagcgggcatcaaggatcccttccttttccaggtcttttgcctaatgactttgcattagtttgtatctgcctcttccatttttgctgaggttggttacaactcagacttccctagcgattttagggttcagctagctcaccatagaactttcagaattatactcagtgctgagaagttagctgtgacttgtccccacagccttcccctggttgagcactccttttcaatgaccctggggagagagagaagtgtggcaaaatcatacaggagatttgctaaaagtctctctactgtgttcttagcagattcctttcaagtaggaactaaacctgggtttgaagttcctcttctgtgttgtagaagagttgcttgggtgtgttccttccttggggcttcccaggtggctcagtggtaaagaatctgcttgccaatgcaggagacacaggttcgatccctgagtcaggaagatcccctggggaaggaaatgacaacccactctagtattcttgcctggagaattccatgcatagaggagactggtggaatacagtccctggggtcacaaagaatcagacacgactgggcaactgagcacacgctctttcctcgtgtacgtgctttcattccctgcaaactttgttttggaaaagtaacttctgaaaggttttgtcaccaataagaattttatttcatgagattttttttccccaaaacaaccacaaaagatcatgtcttaaagatgtatacttaccatctttaatcatgaatggatttgcctgatcttcgtggctctgcaaaagaggcattctttctatcctgttttgcaaagctttcctgcattcagcttaagctttctaataagaaaaagttgaattcagtgtgtgtctctgaggcaaatcaatttagtgccagagctgagacggtggagatgtaaacgtgtgataacgtggagagcaggagtttgcttcagtgggatttgttaatgaaaataaatccagaaaatttggctttctgaagtgaacaaggagggcaaacggctggcacggctgtgatggagtgtgccaaatagattccaagagaaagctagtgcattcttttccctggaggcaaaatccaggaggctttcaaggctcaattcttgccctgctggcctcggaggggaatctgctagataatcctcctccagcctaccaaagcaaggtctgtgagggcttcatacaagttaccctgcagctcctcccctcccccgcgtagaggacttgggcctgttgaggaacgtgtgaattatacccttaagcctctggggtgaagtttgctgtaagttacatcttccagtctccctgggtgcgtcccgccctggattgctgttttccagaagctattctgagagagtggccaggaagctagacgcccctccttctgtatcccgtggctccaagcggacggcaagcccgtggaaggagctgtggatgagacccgagtttctgagtcactccttgccagcccagtcgggggcctgtgcaggcccaccccaccctccctatcctccccatcgtcgggagaccaagcgttgtcagggatcccttccaagtttacaattatggaattctaaggcaaatgatacgcccaggtcattgagggggaaaaaaggaaaactgggtcctggagttagaggagcaatgtgccagagaggggccctggagagacccactgtccccatttgctgggcggggcaccccgagggcacggaactttttgtttaaaaaccaggaaagttgtgaaccaaactgtgaccctgagtgcacttactgtgccctctgtcacactttaaaatagacgtcgatgggaaagtccagcctaaagggggtttctgagtccatcgggccctgatggagcctgtggaggcaatgagcgggtaggtgccaacctcattcctcaaaagataacaccttcaa

SEQ ID NO: 37149 - DNA, 3575 bp, Bovine  19866880436557
  misc_feature (1)..(1): n is a, c, g, or t
naatgaatgtttaattgattgaatacaaccctcattgagtacccagttctccttcctcccccaggccccaaacatctacctacaaatataccgtaccctctccatacagctcacagttcatgggcttcacatactcttcaccccaccacacacctgctttctacatgcaccacacaagcacccatgtgactcacactactgaattctgcaagggcttgaattacaattatcttaaaaacagctgaacatctggagaaagtccaaccttgttgctatgcaaaggaatgcaaatgaaacacaatgaagtaacagtttaaacctgtgatgaatgtatcagaagtaaagaagtgaaattagtcatatactgatcgaggtatgaggaaaacagtaccctcattgcttgtagtaatgcagattgactccatcttttagaaatattatccaactaggaagagttaccagaagcctcacaagtgtccacaacctttcacttggcgatcctacatttggaaatgtgactccaggaaagtatcacaggagaatagagcaatatgcttaaagactctccctcaagtgttattttttataacaaacaaatggaaagaacccaaaggtcagttgttttatgtgtcataatgtattgatgcatctgtttgatacattaaaaatggcaaatatgaagactatgtagcatctctcaaatattcatgacatagtgtgaaaagaaaacagaaaacacaatttgatcactgattaaaaccatctaatcccggagaaggcaatggcaccccactccagtactcttgcctggaaaatcccatggatggaggagcctggtggctgcagtccatggggtcgtgaagagtcggacacgactgagcgacttcactttcacttttcactttcatgcattggagaaggaaatggcaacccactccagtgttcttgcctggagagtcccagggatgggggagcctggtgggctgccatccctggggtcgcacagagtcggacacgactgaagcgacttagcagcagcaatcatgatagataaaatcaatgcaagaacacgaagctacaatcattgtaaatttgagaaataaatgcccacaaattaacaaataaatatttaataaataaatgagtactctctttatgccaacagctccatttcaaatgcctacttcagcccagttctcttttccaaacaccagattcctacattaaactgaccaacatctcctctcagatggataacaggcatggaagatgtgacccatcccagtaaacccttgttcttccttcctaaacacatcactcctcttacagctttctccatccaatggatggcaattccatcctgtcacctgctcagagaggctcacttattcctttttcttccacaccacacatgtaatctatcaggaagctttgttggctttatcttgaaaacacctccagcctcaggccacttttcaccacctccgccactacagccttggtccgggccagtgtcctttgtcacctggactactgcaacattctttcacaggtttccctatgtctgtccttgttccatggtctactctcaggaaagcagccaatgaccctttttaagacataaaacagatcacaccactcatctgtttaaaattctccatgctaagttgcttcagtcatgagcgaatcttggtgaccctatggactgtagcccactaggctcctctgtccatgggattctccaggcaaagatactggagtgggttgccatttcctcctctgggggatcttcaatggctcccatcacgtggaataaaagcttgagcccttcagatggatcactgccccatccaggccctgctaccacctggcctgatgccctcctccctacttccttacaaattctgctaaatgcatacctgcctccttgtcaccccttgagaagtaaaatgtgatcacatattggcattttcgctcggtcaaccctctctgcttgaaacactctccccacctccttcaagtcttagctcagagagcattttctcaacactgcccctcccctgccacccacaaatgcacacagcacacctcagccccacgctctgcttcccacttttctcataaccctgataatttaaaaatacactacataattggcttacttattctgtttatcctctgctgcttctgccaaaatgaaagctctatgaaggcaagggtcattgccgtcttgcactctcatgtaccccatgctcccagtacagtgcctagaacattgtagggggtcgataaatatttgctgaatgaatgaatgcttgatggtggatttaatttgttgttcaattctattatctctatgacagtaatttcaggggctttccctggtggttcagtggtaaagaatctgcctgccagtgcaggggacacaggcttggttcctggtccaggaagatcccacgtgccatggagcaactaagcccatgtgccataactactgagcctgtgctctagaccccaggagctgcaactaccgaagcctgtaaacctagagcctgtgctccgcacaagagaagccgcctcaacgagaagcccgtttaccacaaccagagagtagcccctgctcaccacaattagagaaaagcccctgcagcagtgaagacccagcacagccacaaataaatacatcaaattcgtaaacaaaaccaaaccataattgcagtcactcacagaggattggtctgagtccacagctctgaatgagtgggccttgtgcataccaccatttgtatcactggctccatcctctagaagtggtaccctccatccaatgagagcacctttcagccaaaagaaaccctgcagcctgactgctggcagaactaccagagagaattcttccttttgtggttttcatttactcaccttcctatacacaccctcgtttctgctaccatcccctcaagaatatactctaccattgcatgacacgccttccatctctccaacgactcccagaagcaccagaaaatcccactcctgccatcagatttcaatgagggggattcactcagcaatgagagacaggaaaggactagtgcaggttcctgtacaccagtgtttaacccaatatactgtgcagccctccaagcattagcctccttccccatacacactcaattaggcacattttacgtctcattatccaatatgcaatcatgagtgctaataaaaaccgttgctaccctcaacaatgcaatcagtgccattagctgtctctcagaaactctcctctgctttggtgccaagtctgctcactcacccatttatttagccatgcattcatgcacgtgtaaccttttctaggtagcaaaggtcaagtgcacacctactatgtgccttgccaggcaaaaaaatctggggaacctgccctgacaggtaaatggttatactacagaatgtgaggggcacagcagagatttgaccaggtgctacagaaacccagagaaggaagtggatggagaagcccaacttcactcccagggacgagttcaaatcccagccctgccatgctttgg

SEQ ID NO: 37150 - DNA, 920 bp, Bovine  19866880449404
  misc_feature (1)..(1): n is a, c, g, or t
nactgtttttcactttcagtacacccttcaataaattatatgagatattcaacactttattataaaataggtgttatgttacatgattttgcccaaccataggctagtgtaagtgttctgagcacatttaaggtaggtttggctaagctattaattgtgatatgaggtaggttgaaagaaagtgaaagtgaaagtcactcatttgtgtccaattctttgcaaccccatggactatacagtctgtggaattctccagatcagaatactggagtaggtagtcttttccttctccaggggatcatccccaacccagggatcgatcccaggtctcctgcattgctggtggattctttaccagctgagccacaagggaagcccaagaacactggagtgggtagcctatcccttctccaggagatcttcccgacccaggaatcaaaccagggtctcctgcattttaggcagattctttaccaactgagctatcagggaaaccctgataattatgttgttcagtaggtcagacgtattaaatgtattttcaacttacaatattttcaacttaacaatcagtctattaggacataaccccatcctaagtcaaggaaaatctctctctttgtgtgcttacgtgtgtgtgtgtgtagagagaaagagagagagcaggcaaccagatatacatatacttgggcaaactgatcgcaaagagttggtcacgacttaaattgattttaaagagaatgccaataagcctcatggatatggtaatttagagactaagacctaactcacaaaccctccaaaatgaaggtgttcaggctattgagaaaccaagttcctctgttagctacccagacactgcactgaacagagaaggaatgtaaaaggaaaatctagttcagagccagacttgatccaga

SEQ ID NO: 37151 - DNA, 1895 bp, Bovine  19866880639156
  misc_feature (1)..(1): n is a, c, g, or t
ntttggttctccgggcagtagccaatatctttgaaaatgtgcccactcattgtgacactccatacataaatctctgcagtggctgccactttgagtcaattccaagccccactcttctggtcctgctcgtggggtcagccagcctcatctctttgcgagtccccaaacaagccagcacacttgtcgcttcgtattgtctagacaaccctgttcatgtgacagcagtgtcctccctctccaccttgctgaaaaccgagcttcagtgctacctccaaggagtggaactccttaccccccagtgggataagacccctccttgtccctctttcctgcagcagacagatctttccttcgtggctcttactgtgactcagaactgcttattgatatgttgctacatgaaggcagaggtggaatcatcccgtatttttctcagactagaatgtctcagcacagaagtaagtgcatagtggctgctcaacaaatattgctgagttaactaaccgagtaggaaaggcacataggtggcttcccctctgaggacagggtaagttttcactgcctacatggagagcaggccaggacaaagtgcctgcaaggatctggggactgatcaaggccacctgccactgtattatcctgacgctgctgtctgcacctcacagctactatattggaaaggagaaactgccagtggttcccagctgctttttaagggaaggagtattctaagttaactctcaagtgctatgcccagtgagagttgcctggtggctcagatggtaaagaatatgccagcaacacaggatacctgggttcgatccttaagttgggaagatcccccggagaagggaatggctaccaactcacatattcttgcccagaaaatcgcatggacagaggagcctagcgggctatagtccattgggtcgcaaagagttagacacagttgaatgactaacactttcatggtttttactttgcacaatacccaaagccctgcctctctgtgacttccccagaagttcctgaggcagcacataggaaccctagggctctcaggaacacaaattcaaaaccacacatccagtagataaacacagccccagaaatcgaaaatcagcattctcttcccatcgatgctactttctacttctgagtcagtaagttgcttttattgaccaaactttgtttttcttaccattaaaataggtataatattactcatcctacttaattcattgggctattttgtagacaggataagattaatgcaaacattttgaataggtagaagcgttttacattattatttgagccccagttacacatatatgacatcttcttctccttaagggcttttaaatgaaggaagataccctgatgttcatagatacaaagacattccaaagacataaacagagtgaaagaatgactgtataattcattagctttatggatttaggtgggtggtcagaaagacacagtgttctatagcaggaagatcttcatctgcagatcaggagacctgggtttgaacctaccttgtcatccagttactaactgtgggagtttgatgggtcatgtaacccttggaaacctcagtggcccccatctgtaaactgcagggagtgggtgtgggtggggaagtggagaatggtaatgacattatggtggtttgcaggatcaaatgaaacagccacagggtaaggcctttggaaacagccaaatgccttagtgaaggcatttatatgatccaggcacttgcctaatttaaccaaagggcagtcaggagttctcagggagggctgcccgaaacagcaagactgacttgaatgatggcaggaactgggcaggtttagccggagcatgtgtgctccaggcagaggtgcatc

SEQ ID NO: 37152 - DNA, 1610 bp, Bovine  19866880771175
  misc_feature (1)..(1): n is a, c, g, or t
nctgtgtttgactcttcgtgatccctgtgatctctggactggtactgccaggcttccctgtctttcattatctcctggagtttgctcaaactcatgtccgttgagtcgatgatgccatccaaccatctcatcctctgtcgcccctttctcctcctgctctcaacctttcccagcatcagggtcttttccaatgagttggctcttcacatcagatggccaaagtaatggagcttcagcttcagcatcagttcttccaacgaatatagttgctttgtgatgcgaccatagtttgagagatggagagagaagaaaaaacacaaaacccttgcagaaagctttcaagtcaaaggaaaggaaatttctcagactagcagggtgttctaatcagagccttatcggaatgtctccagtctaacaaggagaaagccaatctactgagggcggaatgctacattagatccaatcagaatctgctttctaattgctcaacaccaggtcagagcccagtgacagctacagttgctggttctttctggaaagtgaggaacttgagttgtgtcaactcttggtctcaagggaagggaaaagctttgtcttcactcccagatattcagctccatcagctcaaaataatgagacacaaccagagttttttcctggcccatgcaaagctctagtcatcttacgactgctgtcagctgggagctggaatctatttccttttttaaaaaacatgcattcaggacttccttgatggtccagtggttaagaatctgctttccaatgcaggggacgggggtttgatccatgatcagggaactaagaccccacatgctgtggggcaaccaagctcaggcgccacgaccagagagaagcctacacactgcaacgaaactccttagtgctgcacccaagagctgacacagccggataaaacagcagatacataaacagagcgaacggcaagaaacacggcccccgagcgtgcgtttatgatactgttgctgtatgccctgcaccgtgctaggcactttgatgcgtgctatgtttctccctaatgcctacaagggcatatagcattcaacaatcaaaacatgactgttacaggatatctaccccagcccagtgaaacacaacacctccgaatctccctctaggccatcctattgttgtcttctggcaggggattaataggtacagtcaactggccttctggtggcagttataccttacattttctttgctccaagcaaagaataccatctgtgaaaccccccagctcactgcagagccctgacatgtccttctaacaaatagccacaaaggcccaccgagggctgcgacccttgaacactgataggtacacagagccacacagagagagacagacacggagacagaggtgtgcagggctggacaaagaggaagcagagaaaaagacactgaattttctttctctggctttcctcttcactgaaacaagccttcccggtgctgtgatggatgtcctgtctgaaaactagctggccacctcatccaggcgtgattcatgtgctgctactgtgtgaggagactctgtccagggctgagtcttacagggcacagaaagg

SEQ ID NO: 37153 - DNA, 798 bp, Bovine  19866880783734
  misc_feature (1)..(1): n is a, c, g, or t
nactgccatgctgtcctccaggggatcttcctggcccggggatggagcctgtgtctctaagtctacctgccgtggcaggcgggttccttaccactactgccactcgccacagtggagtaaactggccctgctgtcttagagttgtcgggggctgtaagggggcagagctcggagacagctgagcttagcctggcacacagtacacactcaatgggcacaaccctcggggctgtaactactgctgttgtgactgacgaggaagtctgcagctccgccctcctctcctcaggtctagaaacagagccctgggtagcatcagcagctgacaactgcagctcagttcacatgagaagctgagctccagatctggaaagtctcaaatcaggagtcccctagaggcctgacccacccagcacagcccctggtcctgtttcctggtgccacatgccatgagcgatgtgccttctggtcaataacttgtgggcttttgggtccaggaaagatgtaacatcttctgtcagaggataaatgatgaaatccacagggagcctgcaaagcctcctggaatctcccaggctgagcatggctctgcctccctcgctgcaaatgccatctcctgcccggactgctgacagccagcctgggcctgatgccctccatgcccatggcagggacagcctggaaaaccctcgctaattgtgtcactggtgtcgcccatgattcgccaggaagaaacacaggcatcagttaaattccccagagcaagtcagagcagcagctgaaaaggtgccccctgaa

SEQ ID NO: 37154 - DNA, 1434 bp, Bovine  19866880788086
  misc_feature (1)..(1): n is a, c, g, or t
nctgggaaggctgctgggcacttaatcaataaaaataatgcatttgggttgtagaaatattccccaagatcaatttcccctgaagaaatatttgtttcttttaccaggttgccacaagtgtgtaagggaacataaaaccttgataaacaccgcctggaaaatatgaatgcatccctctcccactcccaccccacatgcctctgctccccacttacagtgacgtgagcgacttcagaccctggaaggcatctggagcaatgtctgagatctgattcttgctgatgtctctgaaaaattaacagggaagtctgagaacacaggtcaaaggtatgatatggccatatctgaggggtggaccaagcattgcaggtatgcaaaatggtgaggatgaattcatctatttatttatttatagtgcgagagcaggtcttaaagatcattcaattcaaatgcctcatgatacaatgcgctatatatgtgtatccctcttcttggctttcaaagcacgcttactcgtggcatcttgactttgacatacggccatgcacatggcagccttcgctctgcaggtgggaaatggcacccagttcgatgagggccttatcgtaggttgcagaaccaggcaattatagcataaaggaagcaaaagccagcttcgcccaaacatagcccaggggttcctgtgagcctcaccttcttgtgtaatgtcttggcaaatgcttatttttctcccccaaagtcctgagtcattttgcctccccagtgacttctccctgacctatggaggttttgagcagtgactgcagtctctgtctggttcagtgcatcttcagccgtgtggtataaagacatcatgagagcctcacggtgactttcagacatgtgattgccactggcagtactccttggacggaagcaagcccagggtggtgaagaccagaaacaatgtgagtgagaaggatgctgtgtgttagaagcagctaacccagccttggggcattgggatctccccgatcgggaggttgctcactccgcagtaccccaagtgacttctgaacacccacatctagttctcactaacgacatttccctgagtgcagagatgtctcttaggagtcattagctcagagacagcctctgggctcctgtccctggatgtggagatgctccaatttccagctacaatgaactctggtgcctcttctttaacaaaataaatcaacgggtctttgcttttgtgaaaaagaggggaagttgggggccttggagggtcaacaaggaggagacgggaatattgagaagaaagcatgtctaagcaactgcttccagcgaggtcagacgcccggctctcctagcctcttaagtgcattccttgagcctgtttctctacgccttctgcatgtgtgtgctaagacacttcggttgtgtccgact

SEQ ID NO: 37155 - DNA, 1465 bp, Bovine  19866880811805
  misc_feature (1)..(1): n is a, c, g, or t
nctgaaaagatctggtgtcctttctcgctggggagactcacatgcgcttcagtttcttgtactgggtgaaggctccagcagggatggatttgatggagttctgttccaggcgtctgggaaacacgagcagagaagagtcgatcaaccatttattaatcaaccagtggttgccgggggccttgagaacaggatggtttctcccatcaacggcacacattcttggacaagagagactcggtaaacgctgtccaaaagccagagactcatgttctggtgtttgggagtgcccagcccagggtctaactcccctgggagaaagctaggaaagatgacttctccttgagcacatttggttcttgctgatgacaagctgtctttgggaagcagttgtcatcttcaggaaaggttgtaggaagtaaccagagggctgaaaaagccaaagcgataaagagaaggatgagcagagagagatggacagatagcattgcctgtctatgcctgaagcaagtcaccattcagttaaaacctcaagtaccctactgctggcatgctgcacaggcagacatgaccaaggctgacttcagttctgggcttttcttttcttattggaggtataattgacatagaacttaatattaatttcaggtgtacacctaatgattcaatatttgtttctgggtttttaactggctgttctaatatgatggagtctaccagtctttaagctcccagcctgacattccccaaactggctcctggacatctggagggccccaggggcccagaatggaccattcccctggggcggctgctgctgcagtctgtggctttactgtcttacagactttgctgaaatgcttcctcctctattactctagaaagaacaagagaagctgcaggctcagggtccacaggttccttggaagagaaggagcatagggagtgagcatgcttctccgtcctttattctttcatctctcaaatgacttcccatcaccaagaacaggtgtggtgggaaacgggcatgagcgggaggcagggccctctattagaggtgatgaatgagggcctggcccaggctgaggactcagcatctcctcctcatccatctcccgtctctccgaggtgcggatcttttcatcacctcctcatttggcatggatgagcccccaacccttcgctgggaagacacacaaaaagatatgtgtgtgtgtggaggggaaggctgggggaagcagaaggaagagacaggaggagctggctcccttggaggctacatctagaggaagcacatttctggctgggatgaacccattcatcttgaagagtaatccccactgcagaaaaggggagacagtcatattaatttgtgcccctgcaatctcatcttcattgggggaaagagagtatttgttactggaaccactaatggagcagtttgccagcaattttcccatttcaaaca

SEQ ID NO: 37156 - DNA, 903 bp, Bovine  19866880833202
  misc_feature (1)..(1): n is a, c, g, or t
ncagaactttgagatgtgcattctcttttctttgaccagattaaaacagggatccccaactgccagggctcatggcgtgttaggaaccagggagcacagccgtgtgggggcgagcaagcggcgcttcatctgtattgacagcttctccccatcactcacgttaccagctgagctccacctccgtcagatcagcggcagcatctgattctcataggagcgtgacccctactgtgaactgtgcatgcgagggatctaggttgcaaactccttaggagaatctaatacctgatgatctgaggtggagctgaggcggtgatgctagtgctggggagcagctgcaaatacagattaccattagcacaataagtgtagcaggcgtgactcatcctgaaactgtccccctgccactcagtgtgaaaactgtctcccacgaaactggtccctagcactaaaaagggtggggaccactgcttaaaaatactttgatatttccctagttctgtgacattcagagcgtgtctcagaagccccaccatcagtgttactgggaaacttgccagaaacacaagcttgggggacctccttaggcccagcgaatcagagactcaggcttggacccagagacatgtttgcacagggtctgcagggaattcttaggcacatccgactttgagaactgctaattttagtcgccggtatgatagagaaacctagcaaggaaagagggcttgcaaaaaccttcagaaacctgagtccctggaatacttttccttcggtatgaaataaattggaactagcttagtaatctggtttctcttgtgttttgcaaacaagagctcttggagggaagtggaaaataaatttcaaggcctttcatctcagttacaatgacatgttcatttt

SEQ ID NO: 37157 - DNA, 857 bp, Bovine  19866880839990
  misc_feature (1)..(1): n is a, c, g, or t
natagacatttttaaaaaatattcttttccattatggtttattccaggagattggatatagtttcctgtgctatacagtaggaccttattatttatccattctacatgaataatttgtatctaccaacctgatcctcacttttgtcatctgtaaaatgagattaataatggtctgtacctaacagtgttatccagaggatttgattagttaaaacctataaagcttttaccacactgctggtaaacactccagaaaggtcaggtaatgttgctgtgttcttccgaaaccttattctgcctctgttgtcagcctgtggtttgggctgaagtgggttaggccaacccctgtggtctttctgttcctctgcccataaacctctgctgggcagggcctgaggttgacctgattcctatctgcctgtgtccctggggaatgtgtcctctagcggccctagcgtgtttgctgatctactcaggagaggaattcagggcccattccaatatttatgttggcttggggcctaatcttgtctgtcgtgaactgtaagtccaagaagatgggcctgatctagttcaagtgctctgcagggtgagtgataaatacatgcatctggggagggtggctggcttgtggggaggttcatcttagctttcccaattcattcctcagagaacatcttgttacctaaagaatggccgattggatcgtcattctgccttctgtcttgggtgctgggtttttaataacctggcattaattgggcactaaccagttataagctctgtgctaaccacttccatatgtgtattcttgggtcagcctcagaaccacttgatgagtcagcttgattgttttt

SEQ ID NO: 37158 - DNA, 1376 bp, Bovine  19866880878013
  misc_feature (1)..(1): n is a, c, g, or t
ncctgtgataggaaatcgcggaggcaggatgttgaccccagagtctgcctccagagcctggttctaaaccactggggttattggaagcctctctatcagtaacagctcccttccccccactcccacccttttctccccttcttgtctttttggctctgcttcctttcatccagggtggccacctcctccgcccctgcccagaccaccatccgccctgaggacactcccctccctgagaaggatgctcttgggtccccgaggccagcagtgggcctccaggtaggtctgtctggaaccctcctctacatccacagctgcacaaagcctggtgagagttacacccagacagccaatgctcccatccaggcaaaagtcctgaaatctggcccaccacagcctgcagtaaggagggtattgagtgtgctcaaagctcaaaaccagagttgaagctaaaaataaaaccagcttggctctgaggctccaggaagggaaggaatcattttcagttctttgctggtatttgcagccggacaaaaataaaaacacaaccaaatttagccaattgtgtgctgcctgctgcttcgtaaaccctgaatgaggattccagggcggttgggctgggctctccttcctttaaaagcctcagggtctttctgctttggcttgggcgggccgcacgccgtttctctgttatcgaggggcgcttgatacatttctagttcatcccatcctgggatttattcattcttatttagagatccgagttggtccgaaaggtcttacttgaagagctgatgaagcctccaggctgcataaggtgcacttctcacgtggctgctttaagagcagctcctgaacaggaaaatgaacagagggaaacaggtctttctcctgccagagggacagataagcgctgggctgcagacagcggctattggcctccgtgccctccatcactcacgccatctgctgctctgtcacctggatccagaggtagaaatctgccacagttcaaattggaaataaacctgtgatgcctgcatggaaaaaaggaccgaatgggacccacatgagggcaggcctgaggaggtcaacagacaagacatgggcctggccagtgataagtcaagtccacctggatgtcttctcttcctgtaagatcaactctcctttttagctttcctgctggaacagtcggagcatcagggtcaagaagtccacgggctgccagctgcaaggtcattctgtttttcagcctgaactgtgaagccccaagagacagagtcttggctttgtggtatcactgatggccttcttggaggaacctgggcgtaagatctaattagagattttttccaccttattaattctttcat

SEQ ID NO: 37159 - DNA, 1485 bp, Bovine  19866880934767
  misc_feature (1)..(1): n is a, c, g, or t
naatgactccaacagcgcctgctcaaccttcaaatgtcaccagggacagtgccatgtctcagatcgaggggagccctactgcctgtgccggcctggctttagtggggagcactgtgaacaaggtgggtccagtgtgcgcaggggaggggcctcagagggatgcaggggtcagggtcagactccaccttcatcccgcggcctgagttccaggtctagctgcgccacttagaggctgcgcgaccctcactgggtcacctactgagcctcagattccttcactttgaatatgggagcaacgctgtaccttcctgtatgagctatccattgctgcataataaattagcaccagaacatagcagttcagaactgcactaaacgtgctctatcccacatggttcctgtaggtcaaagattcagaaacagcttggcaaccttgagggacccaaactgaaactgtctaacaaacagccaggactaggtgagctgtctggtcaccctttctcccctctcccctccctttatcctgttccagttgccagcccttgagctgccagcgtagccctctaagcagcaccactggctcaccggggacttattagcaatgcagacgcccaggtcctgcccagacctttcgaatcagaacctgcattttaataagagcccgtggtgactcttacacacactaatatttcagctgttgctctgcagtgtcctttcaatcctcctgccattattgggtcaacagaagacagctccttggtctgatcccattttgaaaacatcaaattacttacctcccttagtggcccctttagtgcgttaatcaaaaaagcaaagttgaaattatgttacagttgaaatgggttctgtctcctcttggaggtttttctctggcacggaacctgagtctgtttccctccctgtcaccagaatcccaggcaggtcacccccccactagaggactctttcacattttataccttgttaaaataccattcttaactaactgtgttaaataatgtattttgaaataatttcagatctaccagaaaagttgccagaacaatacaaacagcacccctgttcccttcaactcgacggcccagtgtgcggagtttgcgttccacccctccccacatcacacacacctgtgatcatgagtctcttttctatccttttaacaatctcataattttgaaaaactacatcaagcttagcaaaattcacatgacatcacattaaccacctaaagctttaaaatgcactcacaatccctctgatgctcataagagcccatgaagaagcgggaaggaccaggaaatgtgtcactattttgcagacaaggaaactgagggtcgggatggcaagggactggtccaaggccgagaggccgaagaccccgtgtggccaaggtgcattactccctttttcactgccttgctccacatgccctcccagtggattgaggacagcagcagggtcaag

SEQ ID NO: 37160 - DNA, 1641 bp, Bovine  19866880935024
  misc_feature (1)..(1): n is a, c, g, or t
nggcatatagctagctgtaggaggctattgcctggtgacggatccacttctgttctatcaggcttcgtgtccctcagggcaaggacactgcctctaccccccttccctgctgagccaggattggcatgtggtaggcatcgcgtgtgtttgttagataaaaatctgttcttgagaccacacgctgatcaaaaggaatccagtcagggtcaaagaggatgctctgagagtggcagtgctcctcgaaccatgtaaccttggcaacacagtctgtcccgctgctcctgggttgccgctgagcacaccggtcagtgctcaccctcttggcccacaggattgccaacctgaagatccagctcgccaagctggacagcgaggcctggcctggagtgctcgactctgagagggaccggctgatcctcatcaacgagaaggaggagctactgaaggagatgcgcttcatcagcccccggaagtggacccaaggggaggtggagcagctggagatggcccgcaagcggctggagaaggacctgcaggcggcccgggacacccagagcaaggcgctgaccgagaggtggggctgggctgggggcacggggcccttgcctgctgctggtcatccctccaagcccctcagcgagagggacaacctgggacgcccgggctccactctgagagcacagtttagagaactcatcactttccagaatagcaaatgtagggaagtgactcaccaaccaaccatcccaaaattttaccagagggaatcgcattactaaaacgtctgctcacatgcagattttcagaaatgctcttctgagataagctctatgtaatttacagcagttgttctccagctttgtgacagtgactcacgcattattaccgaatagacaaaagtttcatgaaacagtgcgtagtctttctgtgcgagagtcctccgatactttcttttatattgcgtctctcttcacaccggtcgtggcccactaaattggttttgccccgtgctaaggaattgcaatttgcagtttgaaaaacactggtttagatggggcttgcaaactgagatgcttataggggtcaagcaggtgatataaatgccagaggccacttggccatgggccatgttagactgcggtgcacagaccccaggtgttgtctgcagcctccaggaggtgagtacaggccccaggctgctagaggccccatttttcaagaaaagagtttttttgattttttttcaatattggcaactaatccaaaacaatttttaataccctagaggctaaattagcttcatctgtgggcttgatttaacatgaaagccactggtttacattctccggtttagactgtatagtgaaagtcgctcagtcgtgtccgactctttgcaaccccatagacagtccatgaaattctccaggccagaatactggagtgggtagcctttcccttttccgggagatcttcccaatccagggatcaaacccaggcctcctgcattgcaggcagattctttaccagctgagccacaacagactttaatcttttagtgtctcaccagcctccacacccatactacacagagcacatctctgtgttcacagtcctgcaggtgggtccttcaatccccagctt

SEQ ID NO: 37161 - DNA, 755 bp, Bovine  19866880945111
  misc_feature (1)..(1): n is a, c, g, or t
nagttccctctaaaaattaaaagggattccactgtttgctaacattttaagccactctggctacctaagacttattctgatttaaacttactgatcaaagagaggccaacttttgtgcagagggaagaagggcatatgctcatcctgtgggaaggaggaaaatcaactgtttggcagtgaacttccacagcacaccaaggggagatctccacgtgtggcttttgagcttatgagccaggctgttctatagagctggggtggggtgggggaggtgggggagagagaaagagagagcgagcttagacactagtcctctgggctcttgtccttttcaagctgttgtcccctaagcaacctacagaatccaccatctgtgacccgggtcttcccagagggtggcgcaaagaaaacctcacaggagcagaaggggcgaaggcacaccaacagcaccttccactgaccggacatcctcaggcctcttcagaaagacgcctccctgccagacactgtctgcgcagaaatgcatgtgcatttttatgcctccttcaaaacttgaaagggaattcacgtccccccaccagcacccctccctccccctgtgcacgcgcgcgcacagacacacacacacacacacacacacacacacacgccacccatttgcttaaagacaaagaagggctccttcacccacatggcaacatgaaaagaaaatgaaattctgtcccagggcttgtgagtttttttttttttccttc

SEQ ID NO: 37162 - DNA, 2243 bp, Bovine  19866881089851
  misc_feature (1)..(1): n is a, c, g, or t
ntgttccactcaaagcaattacagttattgctaataactcacacctgtgggtgtcctggtattgatgaaagcagaacagatgctgttctctggcttatttatgtaaaaatggatgcagttcaatagatttacaccaagtttgaagttaacactaatatttaatcccagacctgcttctggctatttagcttgaaaggcaccagatgagggatgcaagtgcggggagagcccagcgaagcacaaagatgaaattaatttgtgccgagcgtgagactgccgccactagtctcgtgccagatgcaacaacctcccctgtcccaggcgaagaggacaggatctccatggtaagaggtggggcagagagaagggagagaggggacacatctccctggcccctctgagactgtgcattgattgcagcctgagttatacttttccggacaatcaactccgttcccagcatatctgagcccagaagtcctgcatacagtcaaggccccaggagacagtgaagtactatatcaaacacatggctcaggagcctggaagaccctggagtgaataccagctttgcctctggctagctctgtgactttgtatgagtaattaccttgtctgagcctcagtctcctcatctataaaatggggatgatgaaaacacttgtgtcaggggattattacaaaatggataatgagttcagagcatcatgttatgtggctcatcataagcacttaagtattcatcattatgagtgctgcctacatctgttcaagtcttcaatcaaacactctgaatagaagacaagaaaatccctgcctctctgtcccacagaatatcacatagaaactctaaaattgtaaaacagcaactcaaggtcaagtttaatatcaaaggaagcaaaattgggttccactcagcctgctgtgtctcaaagcttccgcaggtcctgcagggagacttgacctcttggaatctcccaggctcccctgatgatggagagggtgggtggggtatagagagagacacataagttaaagctgcacaactctctaacccctgcggaagctggctggacatggtctgcagtcactgccgtgccggggggaaggcagcaggagacttctattaagaaggagaagaagggcagccagaaggcagctggtgctccagcagggaagagcagggagatcacagccccggcagccttcagactgggaagcagcctcaacatgacaccgttctgggctgagagcagactgctgatccagccacatgtacgcggactcagaacaagccaaagtagttctccgtcttcccgaggaagctgggggcttgtgtgagcttccaaagggtccagagccatgtggggaatggccctcagaggaaagcctgagatggggcaaggtggggagtccagctgactttgctactaaagcaaatttctggctgtggttagtctccagagaacagactccttgccgtcccggggcttacatttcaatgaagggtcaccattagtaggatgactacgatgttctcagggagtcaggtgctgcaggtcagagctaagtaaatgaggagacacggtccctggaagacgccatggcacagcaagtatgatgtcacctcttaggaaagctcggtcccctgaggagacagagccggctgctccaggaaagactgctttcctatcccaaagtggaggaggctgcttgaggattgaggggtggaaccagagaggcagcctctgttatgctggtgtggaaactgttagaggctctacctcagtgaatgaaagaccacctttagagtcaatggttgggcaggagaacccacgcatagcgagatagagacagatgtacgtatttatgtgtggatggatgggtggataaattgtgagccagagacacaggacagagggaaagagagagagactggcaggcagagagacaaaaaccaagagggacagaggaagagagcgacacagtgagacagagtaaaactagagaaaacaaaaggaaaagaaagccagagagaaacacataagcacagagacagtcatcgcatggaagagaccctgagaggcagagacgcacagaggaagagggctgcatgggtgtgaggccaagagacgcaggatgcagacaggtccacacacaaaaggagagacacagaaagacgggcttgggagagctagagacgacagaacgagaaggaagaggctcagtggaggcccccatag

SEQ ID NO: 37163 - DNA, 1115 bp, Bovine  19866881155613
  misc_feature (1)..(1): n is a, c, g, or t
natagagacataagagtcgtcataagacacccagcacatttgcctgtcgcttgtgaaaatgtttctcttagaggaaaggactaagctcattctctgtcatcagatggtgctgataaaagacttcacacatggaggtgtgtttgaggggtggggggagctgctacatgtctgacttagtcaagttaaagacaccttccctgaactctggagtcactgcgcaaaggctgaagatgaggcagagtgagagggtgggagaggcaggtagtctgtgtagaaggaccctagggcaagccgcagaggcgtgctgacccgcagacccccagacgcctagcctctgatgagtcaaggtctgtgtgcttgtaactcagtctgaaacctacggaaaaagctggggccaggtggtgcttgccatcacccagcctctcccctggatgtcactgttgtgctatgtgaacaaggctggggagacttccaggaccataaggaaccctcctggaagcagctgctcctggtggggaggcccagtaggaagagggaggaccagacctatgagcaggcgtttgggaagcgaggtgctcagagtcccagcagaccttgctgccccacgatagcgcctgcggtgacaccaaggccctctggtcccaccaggcctgaggtggaatggttctctagtgcagagaggctggggtagctgagagaactgggctcagccaagcccccgcccctcttcctcgaggctctcagggcagagctcgccaagtcagaagccaagggagaggcttccaggccagcatgtgcatgggtcaaacccaaacctggcctccctctaaacagccaggcgtatttggccaaactgtctcacgtctccaagcttctggttcatcacctgctttgaatgggactcctctcagctctgtaagaattaaatgggcgtagtgtacataaaacttaatatatatagtgcagctatcattataacaagaagtttagcaaagaatctcccaaggccttagcctgggaggaaaatcttgtctccaatccaatcgaatactagtgcagagattagcggggcttcccctggggctcagcaggtaaagaatctgcctgccaatgca

SEQ ID NO: 37164 - DNA, 796 bp, Bovine  19866881163263
  misc_feature (1)..(1): n is a, c, g, or t
ntgaatcataaaagttgtttgatttttctacccaagaatgtgcatctatgtatctgtttaaagaagaacaacagaatccactttcctggcaccaagcagaatggaaaggtgttcatctgtaatggactggtttcgtgcttaaacctttcccttatgaaaataatttaccctgctaattacatcacattaagcagctactcccggtatagattaaaggacagccttttcaaatcattccataaattaaaagcagtcctccctgatacatgatttcatggataaatactgcatttgtgttgtcaggatttatattgagaggaaatggaggaaatgtatccttaaagaaatattttgcagtagttgttaacacctttctctctctctgcttgctgcttctagtaccataatataaatgtgcaagctgttagcgtgagatgaacattctttaggcaggggccacctgcgtgcgtggctggcttgttatttaaattgcctttgcatttcacagatttaaatactgccagggccctgatttatggtgtctacatcacacacataaaacttccactcggatcactctctttctcacgcatgggaaggaagtcacttgtggccacaggtggagtggactggggagctcgtcatcaccagcagtgggtaaaaaccaggagagagcatccagaagccagtggcacgtggaggtgtttgggagcccttggtcctgacaaggtctgtccctactccttccgtcagccaccaaagaattaagagagcgtggggaggacggaaggaacag

SEQ ID NO: 37165 - DNA, 1607 bp, Bovine  19866881184851
  misc_feature (1)..(1): n is a, c, g, or t
ntaaacccttgcttgttgctccccacccccgtcagtgactcataaagcctgctgtgacttggagctctatgctgcttctcacatctgtttgacaccttgggtggggtggagaggaagagtaattcagaacaacactggaaagaatgaaacagtaatgttctagggcagaccactgtccttatcttggcacgtgtacatccatccttcttttgattaaccctgtggcattcttgcagcactttctttttgtcatttgggggatgaagaaaggagcaaaacccaaccccagcacaggggtggagaaacagggcttcagctgtaaattcaggagaggagcgtttgagtcctcgctttctcacttccgggctatgtgactttgagaaagtcacttgaccttactgggcctcagttgttggtactgttgttgagacgtttataaagtatgacccaaagtgccagctctacagggttactatgagattcaagagacaaagtatgtgaggaagtgctttctacacagtatttggagtggttaagttttcatccacaccatcgatgggtcggagaggatgcagaggtataggttaggactggcttcaccaaagatgttcatctgtgatggtgaaacatacagaatcagagaatacaccatcagttcagaccagactttaagactaccagccctctgtatgggcttcccaggtggctcaggggtaacgaacttgcctgacaatgcaggcgatgttgttcaatccctgggttggaaagatcccctggaggaaaaaatggcaacccactccgggattcttgcccaggaaatcccgtggacagagaagcttggcaggctacagttcacggggtcacaaaaggctagacaccgctgagggacagagcacgcacacaggcgagcatgccatctgcgtgatcaggacacgcacagtgccgccttctgcgtgccaggagagaaaataaggcctcaacacagggcaagcgttgtaagtgccaccctacaacagagtggctccccatcacaggggcacacaagtgggagatcagctgttgactcgtgttggaaatgatgcccagagggtatctgtgatgggtaggaagcaagactcaagatctagaataccctgacaatttggagacctataattctatttgggggtccagaaccaagtgggcttaaaagttatgccttggtccttgtctttagagagcttgcagtctagcttaggagacggactaagacttatgagatacatagagaatgatgtaagaatatgaaaaactaaatgttgagagatgtaatctattaatagattctgtggagagtgggcaatcagagatctgaaagaactgttagagcaggaactcagagagaagacccctggagcagacggtgatggagtgtattgggggttgggcacatggtgacagcaggggccatgacgggggccacagagaagtggaaggtctgaggccagagagggcccataggctcacgagccttcagaggggtgatgcgctcacattgagacccatggcccagacttccctggggtccagggttaaaatccacctgctagctagggacaagggttcca

SEQ ID NO: 37166 - DNA, 1493 bp, Bovine  19866881195588
  misc_feature (1)..(1): n is a, c, g, or t
ntgggcttttggcaaagatgtcatgagacacgggagtgcaccacttggggtttggaagaacttacaaaatgtggggacagacaggaagagcatcacgcaggaggggctggggtgatctgagacgagtggaagaggagttacatgatgggcaggaggatggctggggccagctggcttgcggggggccttgaacatcaagccattgtcaccacaccagagccaggggaaatgaagtgatgaaagccctgcagctggtggaatcctgacacacaccaggctccctccggccctagatccccttgtcctaaagatggaaactgcccttagttagcaggatcatgggccatacactgcatcgttgttaactttcaatgccaccaccagcctgcgctcaagaaggaataggttttttatgttttatttttttcttactagccatttattttccaagaaggagcatgtttgcagtcctagctggaagtgtgggttctggctctgccatctagccttgtgcctttggaagagtgcctggttgctctgcgcatgagcttctctgcgctgtaaagctgagggacagtgcattgctggcacagttggcataagagccgaagggcctggcgtgcagtaggtcctcggcgtgtgttaggtgattctgtggttgtcactgtcatcttcaactttgagacatgagcattattccagagcctagagaatgccagagacgcaccatctcagagcatgcaggtttaaacctctcagcttctcaactgtctaatctaaggacattagctcttctaaagggtgataggaaacgcaaccaacgtggcctggccgtttggttacaaagagtttctttgcggctgcccgggtcaccaggctgagaaggcatgtgtgcttccttttatgtggagaaactcagctcagcctgcgctgtgggcccttccagcgtctgcacatccctgccttaggagccatgtgacgggccagagggaagtccacttatcctcagcggacctcagggggcatcgagaggtaataaattgtatttcctcttgagtacaggagacaggaagctccaaattggactctaattaactctgaaggaacaatgggtttctccagagcctggcagttccaatggtgtctaaggaggtgtcacgcagccttggaaaataattacaaacgtaatgacgatgcctccgaagtcggtctcctgacgatacacctcgaacaaatgtgtttctccttcctcacaaggttcgctgcctttaattgctaccctgctttattaaggggcaattaattttgccactgggtttaaaaaggcagtaattataaggcgaggacaaaagccccgtggttaaacataatcagctggatgtaaaaggtgctccctggccgatttcagaaggaggggaggggagggggcttgtgttccaggcaggcagcgttttcccttctcgggtgtttcttgcccccgttcacgactgcct

SEQ ID NO: 37167 - DNA, 2134 bp, Bovine  19866881232197
  misc_feature (1)..(1): n is a, c, g, or t
ncagaagcagttcagttaacctgcacattcagtggttcaatgcttgtgtgtgaggatgcacacatgtgcagaagcagcagctcaggctatgtttcccccctgagcagggctcaggggagtggaaggaaacatccccttttaactcaaccaagggaccctaatgagagaatgtacttaaaagttctttgtaaagtataaactaaagactttaaatgtaagatgctactgttattattactgttgttgttgctattaatgacatgccaaaaggccctttagacaagatggctttgccttttcaatttcattgaaaagaaactgagtctcccacttcagaaagatgacagagaggaggaaaagtgggaaagaggcaaggaaagggagggagatcccagagggccagggaaagaggcgaaaatccccaggacaaccctcaggaacatagaggtggccagaatgggaactgagccaaccttgcccttcaccagatacaaagctatcaacagactaaaaacccttaggctgagcagccagccactgcctttgctaggagagaagcccctggcataagtggatctgcccccaaaaacaaaggatcccagatatcagagtgagaggaacccataggggcccttggtggctagaacaccgataatcagagcaatggcacttctagaccagagaccaaggtcatccaggaaatcaacaccaggagcaggtagagactacccaggctaaagttcttcctgcgactccccaggggcatccaggcagcgcaaagcctgaaacactctccaattagtggccaggaaagtgtctgcactttccctcacagccgtctcccggtgtcctcaggtggtccgcaagctggggcgtggtctggtttggtaacgcttaaccacacttcccagtctgggttagacagtgccataggaaacacttggggaaagttgacgagagatgccagctagcagggccagcaaagacagaatggggcatttggcaaagcttatttctctaactcaataagtttctaaaaagaaaacttttaagatttttttttttaaaaacaatgtaatagggccacttcaccagtacgggataaataatgtgcttttttttcaacagactgtcatatgctgatatcattaaaataaatggataagagagccatcagatgctcttgtgaataccagaagcttagccctcctctgtgatgtgtgttttatttttactcctgaccttcgcactccctggggcaaagatgactgcattcatggttggggcaagtctggtgtggaataagtgaaaaaaattggcttcttgcaccatgacgtgggaaaaatagatccagagttccccagagatacggaagagaaaaccgaacacatggccacatggcatagggtctgcagggcgtgtgctcacatactggatgccaagggtcacagaagaggaagccactccagcacagagaacatgatatgaaggaagatttcctcccgggcactccaattaattaaatcccctcctttcatcatttcttccataagcagttactgaagatctgctttgtgccaggttctgatctaggcagtaaggactacaaagatgaccaagataaattcctccctctcctggagcttaactttcaactgagtgtcaaccaacaatcaaaaagggacttccctggtggtccagtggctaagatgctgagctcccaacgcatggagtccaggttcagtccctggtcagggaacgagatcccacatcccacaactaaaagtttgcaagccacaactaaagatcaaagatcccacatgctacaactaagactcagtgcaaacaaacaagtaaataaataaacatataaaacaagaaatcaaccaaaggaaacatcagataatatttaaaaagtagagatgggctggcacattagctggtgggtactttacacagcgaatttgaggaaggcctctctgaagaatgtgaacccagggtggggtaaagaagaaacagaagaagcctagccctgcagccctccctacctgtctgccctcacacaggtctcatttgagggaggtggatagcccaagatccttaggaggccagagctgatgccatgagcaagaga

SEQ ID NO: 37168 - DNA, 849 bp, Bovine  19866881296072
  misc_feature (1)..(1): n is a, c, g, or t
ntgaactgaactgaactgaaagtgccattaatgttaggatttgcctaaccactgacctctttgaactggaaactgtgcagcctataatattaatagcattttttctcagctacataaccgtgctcatattgagtttgatgccaactgtagtgcttagattttctctctcactaggaggaatacacagagtgaagcggatgccactggatcacagtcagatcacatccaccacttctagaagttttcatgtacctgacacataatagacagaaatacacgttgaatgaatctgttggttttatttcttttatgtttcattttagagtcagcatcgttccagccctctactatttttatgaagcctggtttgttatctgacataacttttctcttacttgctttaaaaaaaaaaaaatctgaaaagaccacaaggaagccatcaagatctgcattcaaatcattgggaaaaaatatggaaaagtgaaatctggctataccagaaagttcatgtcaacttttgaacttgtcagaactaatcaagagtagactttgtgggtcctttagaacaggaaaggaaagggaaaccaaacattcatggggtcaatttagattcatgaaaaaatagaaaggaataaaaatgaaagccaacagaattaacgttagtttgatgcaaaaataaatcaccactaaaaaaaaagatctctagcccattttcccccctctacaagacactgtgaggctgtatgtgtgccgtgctaagtcatatataaaaaagtaaatcagagctgtggttgccatgtctcaatctctatttaagtttcctcctgcccaggaggactccaagaagga

SEQ ID NO: 37169 - DNA, 1054 bp, Bovine  19866881427297
  misc_feature (1)..(1): n is a, c, g, or t
ntgccccaggtatgaggctgtgtgacagctgatggagacggcagacagagctaagaacctgtgctcactcagacatcatctgtccaagggcagggccgcttcctaggaactgtgctcagggctttgaaacacgtgattttagctgagcttcaagacagtcctacggagttaacacttttactttcctccctgttatttggcttcccaggtagctctagtagtaaagaattgccttgcaatgcaggagatacaagagacctgggtttgatccatgggttgggaagatctcctggagtaggaaatggcaacctactccaggattcttgcctggaaaatcccatggacagaggagcatggtgggctacagtccatggggtcgcaaaaagtcggacacgattgagtaactaacactttgttttttgttatatggaggcaactgaagctcagagagtgtcagtcctgaacacaggttacccggcagagcgagggttatgaccaaggccagtccttctccacagtccaaggtcttgtctctccatgttcacttgtccaatatgacaaggcttcaggaaggccccagaattgtccatgccctttgatccagtgcttacaaggctacagacttcacttaagaaaataatcatgaaggcagacaaaatgtatttgcaaggatgttcagtaacactatttcaggagaaactggggtgtggggaaatatgctgtgtgctgtgcttagtcgctcagctgtgtctgactctgcaactccatggactgtagccatgggattctccaggcagaaaaaactggagtgggttgccatggcctcctccaggggatcttcccaacccagggatcaaacccaggtctcccgaattgcaggcagattctttaccagctgagccaccaggaagcccagggggaaatatggtattggttaaataaagtattaggttggccaaaaagtttatttgggtttttctgtaccattttatggaaaacccaaacattttggccaactcaatactttatttattactttatttatccatacgag

SEQ ID NO: 37170 - DNA, 673 bp, Bovine  19866881474423
  misc_feature (1)..(1): n is a, c, g, or t
naatgtatttagagggtccatagatggtgggcatcatggactaagacacccctaaattgtacaccaaattcccgatgtggaaaaaggtctgtgtgacccacggaagcttaagaactcatagagcttgtgctgttagacctgaaagtgttgaatcacaaagaccaaagggaagcaagcagcctggaggctgacgggcgggaggcacggccgggcgcccataacctgagggcagcgctgcctctggctctggacaacccacccccatccatgtcccccatccccacagccctgccccggcccgggctggtgatgctgacgcccctctttggccccccaggctcggaggattaccgcagcaggttcagcagcgagtgcttcatggacctcgtgtgcccggacaggtgccgctgcgagggcaccatcgtggactgctccaaccagaagctggcccgcatccccagccacctccccgaatacgtcactgacctgtgagtgctacgggggcaggacccccgcacgtccccacacccatctccctgagccagccagggcaagggggtgggcttctagaagcgaccccctcagctcagtcaccccgggtgctccttgctgtctgctacttcccatctgagtgcagaccctcacgcctccactggggactgtttacttgcaa

SEQ ID NO: 37171 - DNA, 1201 bp, Bovine  19866881532532
  misc_feature (1)..(1): n is a, c, g, or t
ncttgaggccactggcatcttcaagaagttgcccaacctgcggaaaatgtaagtcagcctcaggaccttggtagactggagcagagcatcggggcagcggtgccttcatctccctctgctctggcccatctcagtttcccctgtcacacccaggaagcaggacactgagacagggccacgcagagccagagcatgcgttctccacaagccctgagcctcagcccctctgccctctgctcatccctgccccctactccgcactcatcctctacgcccaagggctggtgggaggcactctactgagcaccagcagtgagataaggggacctaggctgcatgtgttagtcgctgtcatgtcggactttttgcaaccccatgggctgtagtaatttttatgagatgacagttggaaggtctgcttttagatagactctaaaggcctccatgtgggtgtgacccattggagcagaaacaccagctgcctcacctcctccatctgtaatcacactggtacacagctggacgcactccccccgccttcccttccccaggtgccccagtagacgtgccggcatggatagggaccccttcaccatctaattcccttctccttgaccccgctccccacctgcaccacatcctccacatctcccagcccgagtttgggtctgcctctggaagaaaagaaatacggtcatagcctcattattcacagaccctgtatttgctaacatttatttgtaatctcaaaatccatactcaggtgttttcatggtcttcctaaacacagagcagcaaaaaatttgagtcacctacatgcatgccctcagctgaaacagaacaaggccacgctctgagttcttgtttcagctcccagactgtaaacaagtgtccaatccacaatgtatttcgtgccacatttttttgcatatttgtgcttttgtaggtgatttgactgtttaaaatggacctaaagcatagtccagaagggctgtgtgctttacggacaaaatacttgttacataagctttgttcaggcgagacttatagtactattggttgtgagtacagtgtaaacaaatcaacaatatatatccaacaagatgtctttaaacagaaacacgcatcaagcaaggttatgtattgattgactaacaaaaatatcatgaccaggggctcacagggacctaaccctcaattt

SEQ ID NO: 37172 - DNA, 2392 bp, Bovine  19866881628714
  misc_feature (1)..(1): n is a, c, g, or t
ncattttgttatgcacagccctcttgttgggtacatatacacataaattacactttaaatggaatggcacttatttggaacctgatgttttgctaacagtaagtcattgcctttttcctacaccagcagccgtagagcgctggctgtttgtgtgtcatagtcttgcacagtgttctactgtgtggttgcatcaggagtcacccatccacagcagtgggcaggtagctcctgatgcttgcttgtctctacaaagacgcgaccaacattcatgcacttacagcttggtgctcagtccccttcttggccttgcttcttgaagacttcacactggcttggattacagttctcctagaaatggcagagcatatatattgtctgtttcagggttcctttgagacttagcacaattcagcttttaagatgaaaattgggctgctcattccccttagaacagaaggaaatcacgaatgcccattcctgggtcagtccatcaggatgttctagactcctcccctgtgagcactgtctccctggagtcaccacaacatgggtcttggagccatttctgtcaatgtcctgtctgtgaagttactttggacaacccagtaaacccagagtcaaaggctaatgaatgctagcaagggcacagagaaaggtggcaggctggggatttggggattcagggcgtgaccctctccccttgaagtaaatgggctcaagtacatcctggcgagtcccaggtggcagtagctgtgctggtaaccaggcaggtatgaaggtggagccggggggaagtgaggggcaatactgaattaatacagagtgcaggccccgggagccctatttattattaaagcagccaaattaaggcagcttttagattcagattttttttttttttatgagctgtcaccatagtgatggtattggaaattctatttctgacagcattcctattaaaccatttgttgaattatttgcatcccttgattctgggaggccccaagagctgtgtgcttccctcactatgaagaagagagttgatatcaccatctcttggattctttaccacaaagacgttaagtccaggattcctgtatgcctggtctctacccaatatgggatgagtctcctggattctctacaatccctcctgcaaaaggaacttatgagaaaagaaagactataaaacagaagagaagagagaagaatgtactgtctatgccaaggacatggttttgagtctctctgcttcctgttttgaccacttggattggtctcttgcccatcaaatctacaaaacccacccggggcagagatgttggaggaccttccgtaatgagccaggaactcaggggtccaagttgctgcttccgttactaggttggaaccatttctgaattcacccttttttcttccttgagtgatcatttaagattccaggtggattcatggacatttttttttcaaactttaaaatttttattttgtattggggtataaccaattagggcttccctggtagctcaactggtaaagaatctgcctgcaatgcagaagaaacccccccctcccccgatcgattcctgggtcaagaagatcccctggaggagggcatggcaacccactccagtattcttgcctggagaatccccacggacagaggagtctggcaggctacagtccatggggttgcagagagtcggacgtgacaagccactgagcacatggccgattaacagtgttgtgagggttccaggtgaacagtgaaaggactcggccgtacagatgcatgcgttcattctctctgaatacctccccgccccccgacacccccgactgaagctgccgcaggacactgaatcgagttaccatgtgttatataggaggtccttgttggtcttccattttgaatatagcagccaaattccttatatatcccttcgccccagctatgtaagtccattttctaagtccacgagtctctgtttcataagtaagtttttttgtacctttttctttttggattccacatgtgagagacatgtggaatctaaacatctaaacataaacatcatatgatatttcttcaaggacatttttttaattccctctgttaactctccacctgactccagaatcatatccaaacctccttctctgatcttggtccagcagaagacactgcattgaattttcttttttttttttttttttccccaattttattttatttttaaactttacataattgtattagttttagaaaattgatttgccgcatgcgagatcttctgttgcagcgcacaggcttctctagttgggcacgttcccttagttcccgaccagggatcaaacccacatcctctgcatcagaaggcgattctagcca

SEQ ID NO: 37173 - DNA, 1386 bp, Bovine  19866881812694
  misc_feature (1)..(1): n is a, c, g, or t
nttccctctctccagcattcatttttccccatcttatcacattctttcttagagggaatgaagttggtgggagtgtgatcctctgccaactacaagctccagcttctcaccagggatacatatccagagcagcggttttcagcatcagctgtacattagcatcacctggggagttttatgtcctccgagacctgagtttcatggccagatattctgatttaattagtccagggtgggcttgagcatcagtatttaaaacaaaacctaaagtgttgtgatgattcctataatctgctgaggtccagggccattgctccagggctccctgcccccttagcacatggggcatctttcaactaccacttgcccaaggatcccgcttgccctcctggcaaggcagtgaggctgttgagagacaaagctcatggaccagccagcttcccgagcctcactcatgcctagcagccctgctcctcactcaggggttttcctgggttttggcagacgtggagacagtggcaactcccacctgaaggagtctcaatttgaactatctccctgggtcgagaagatgccctggagaaggaaatggcaacccattccagtattcttgcctggaaaatcccatggacagaggagcctgaagggctacagtccatgaagtcacaaaagagatagacatgatttagcgactatacaacaaacaccttagaacattcactgagtaactaaataagtaggaagaagaaaaggcaaatttatgcttttggccatcctgagtgcagccactgcttgcaagaaactgaagactaagggatctcaggaatttaattgggagcctggaaggtcagaggctccgaaggcaaggagggaggtgatgcaggtggctaccgaggctgggctctgggtgcttctgtgcgcagtcctcactgggtgaggcccagcctatctggttggcctgttcttcctagctgtctcctgctgctccaaccaggggtagaagggcaggaatgccccaacggctgcagtgccatcctccccttcctccacacccgtttcttaagctcccctaggagagaaaactaaacatcccactgatgtcccactgatgcggggctccttacatgagtgtcagatgtcggaagctggatagctccttgggcacggctgttaagtggtttccttccaggtacctgaaagagaggtgcagagtcatgctgggcaaagagatgcctgctgtgatttcccaggctggactgggtctctgttttgctctctcatagttatttcccacccacttcaaagcacagactacatttgtcatctaatatttatttgcatgattgttcaactaaggatgcttttccactgggctgctaacctcca

SEQ ID NO: 37174 - DNA, 1313 bp, Bovine  19866881977400
  misc_feature (1)..(1): n is a, c, g, or t
ngaagtcatctaaaaatcagctatgagaatccaacaggaagagaaagctaaaacagacatttgaccgaccagctttagaaaagacttggttaaagcccctccaacaagcagctgcagttttggtggcctagcgtccgtggctggagtttgagctgatcagacctgtgtctgtgagtcagataacgaccagtttacagagtgtatccacatatttgccctgacaaaaggacaatgcgctcaaatcttccctatcaacacagtcagctttcgacattcctgctcagacaaagcgagactgttccaagcagtgtcaacacctcggtgtctgcgacagatagcatcagagccatttctcctggctcaagtcacgtttatgtgatgcaacatcacgaacaatttggatctgaaattaatgtactgaaaactccaatgccccataagctgctacaagtacaaaccttctttctgtccttggaaaaatcaagtgactggagcaaacggcccctcagtgagcaaggatctcaattctaatgtggatccagggctacaactgagagaaggtgagaagaggatatacaccttggtgggcacatcagtgaaatgagcctgcatccccatgtaacgtgggggccttgactctttggaagaaacctaaggcagagttctgggattttccttttcctttaaggatttacaggggacatggatccaagataacactccccaacttcttaagtgacagaggcaagttgtggctgccttttctgaaaacacagagctggacacagataggggagagagtttgcttgtgcactttggttagaggaacattttctctacaaagttatgaaatgctgaatcttgtctcagacagtacttcctacaagacgtctccccaggacactagtctctagcaatgttccatcataaaatggatccatcacatgtatatgtatggctgagtccctttgccgtccacctgaaactatcacattgttaatcagctatacttcagtataaaataaaaagttaaaaatataaaataaattggaagaagaaaaaaaaaaaatagaagcctttttaaaacagttacgatgtgccaggacctatgctgttactttcattaatcccagtcataatgtttttatataaaatgagattctatatactttctgttgaagcaaaatatgctttgagctcaatgaattttcacaaactaagcacacacatgtcaccagcaccgacgtcaagaaaccaagcatggccagtgccccaagtccttcttggggggtcctttccagttactgcactac

SEQ ID NO: 37175 - DNA, 1441 bp, Bovine  19866881993058
  misc_feature (1)..(1): n is a, c, g, or t
ntcatgggaccccactggcccaggaagcagccttccctggaaaggcttcactggttaaacagacttcttttgcccttggctcttgatgaatatgttatcttactcttagaataccctctaacattttgcatcttgtgtgttaccacagtccatacatggttcagattgagtcacatataccctagttgtgtggtctcgggcagattatcaccatcacttagccatagattcttcactggcagaagagggcaggcaatggtatctacctcacaggctggtgaaaggcttagcagacagtatgtgcttggtaggtggaggctaccatttaactgactttggtggagagaacctagccctctcctggtcattcctgttcccctcacccaaccccagatcccaagggaatataaacagagctttatcctgtacacagaggcccctgtgcccaccccacccaagggtctgcacagatgccttctcccctggggaccctagtccacagcaggattccagggaccacatccccttcgacccaggctatttctcaaggcctttggccaataagacctggaagaaatctatttacacaaaggcacagaacctaatacgtttttctccctcccctcatatttcttctgcacctactggcattcttctggcattcttttaggcatatggtattatgataaagtggaatcaacccaatttacattgccagcttcagcccactcagggaattcattaatgcatcaattctgacacctagcattttatgatcttgaacctattctgttgcctgtggcttatcttttctatagatgtgtgtgtgtgttgggggggtctgaatccatcctatcttcatacacccaggaggtgttcagaatacgtcatcagagggcgcaagaacttgtcacttccatcagaccaggctgtcctgccttgacagggagcttccccggagtgagggtcatgctcccctaccccaccctttctccagcagattaggaatgcctccggggtggaagcaatgccttcatctttcttctatccatcccagagttccaggctccacacctgggggagacctaattagaatcgttgactcactaatcagacaaaaatccgtgtcccccttatctctcaaaagcaaagagctcaagaagcctttgcagaaaagaggctgccttccaaacatgcccagccactcgacatcagactgagttcacagccagccctaatttagctgaatatacagtgcagttatacacaggacttggattgtaactgcatccggcaggcgtccggcagtgatgacttattaatgtattactacactgatatttaaatgtgagccgtaatgagggcaataaaacatttatgataatagcaattattccagaactaaaatgactaaacacagtattcagacttccatgatttg

SEQ ID NO: 37176 - DNA, 781 bp, Bovine  19866882061637
  misc_feature (1)..(1): n is a, c, g, or t
ntgcctggagaatcccaggacaggggagcctggtgagatgccgtctatggggtcgcacagagttggacacaactaaagcgacttagcagcagcagcagcatccagcttttttcttgagtcattcaactcacagccttgggccaggtcaaaagtttctttggagatcccctgtgttaacaagctggaagccaagcagcacagtgtggtatagcttttttctgagtagttaattaacgaggggataagctaccttgacaatcactggagcaaacagcctcgctgtgcatttgtcaagagggatgggattagtttccagggagacaatagggaaatgacaaggggggaggctggatgaggccctggcttgcttggcgctgctcccgaccggctctccacctgcccacagtgcagagcggactgtgcacagccttgcgctgataattatatgattaattatatgataattagttgtcactcagtgctatggacggcgtcagagtctgctcaacggcggcctgagacaggtgaagggctttctggaaagcacactgcctgaagctgacagcccaaggaggtgacgtgttccagggaaatcactgagtgacccgggggagtgactcagaggtgggcagggctggtcaggtcatgggttctggctaacccaaagggagaggaggtgaggtgtggcggttgctaagggccaaggaagaggaagagggaccacagtggacctgtgctattttaagttattttcttctactccatttctctctacttcgtt

SEQ ID NO: 37177 - DNA, 2316 bp, Bovine  19866880717547
  misc_feature (1)..(1): n is a, c, g, or t
nacagaggaggctaaggcccaggcaacagcctgactgttctctgtgcaggctttcagggacgaggggtccaccagcgccgtgggcacacagggtccaggctgagtggccagaggtcaagtctcagctcttctcagggtagctgagtgacgcagggcactgcccatcaccgtctgtgtcctcatctgtcgaatggggacaacacgttgctggtgctgtgggtttgttttgagggttaaagaaatgaacatttttaagcgcttaaaagtcaataaagcagagccctcatgccctcttccaagggtaaacttctgctctacagctctgtactggtggcaaagcttggccacaatggacccagagttgggatacttggctcaattaatacaggtgaggagcaaagaacccaatacctaaccctaagtgtgcctttaaaaatctgggatatgttgcctcaaaaagtgcattttctccacccaaggtagaaggcctcatttaattgttagttgctcagttgtacccgactctgtgaccctgccaggttcttctgtccatcggattctccaggcaagaatactggaatgagttgccattcccgtcttcaggggatcttcccgacccagggatcgaactcagatctcccacactgcaggcagattctttaccatctgagccaccagggaagcccttgtttgactaaaacaaatcctttaagccacgatgtgacttaagatcctggcctgaaacagacatggggtgtggagagcttttgtcatgcccatagggcccagacaacctgtgctttactactcagcgggcagacctggtcagaaaagcctcatgactacaaagttctatctggcagaatcccctggatcgtgacaggctgggatgggggctgttggtacattttctgcagactctcagcccactggggaatggaggaagaagacatactataaagcggaccatggtgagtggctcaaacctaatcatcagggacaacagacagggagtgaggccttgggaagggagagggggagcacggagaagccaggccagctcttccctcctacctgagtaagtgctcccggccgggtgtccgggcacctgcagactcccagatgtcagaggtggtggaggaggcaaagcagtgggaggggcaaacatattggggtgatgtgagtgtgcggggggctggagggtgggtgtgaagctgtgcagggggctgtggttgggcagtgacagggggaacggggaggccgaggggtggtgggagatgtgcgggggggccggctgagtcttcgctggagtgctgcttctgctactgctgttggaaccccaaaaaaaaaaaaaaaagaaagaaagggaaaaaaggggtcagtaatcaactttcttgaaaacaaaacaaagccaaacagagccatgtaacacttttgctctcgcttctttgtcttcgcaggtccccaccctgtgcacagagcctctgctgaaatcgcagttcctctaaaccggccccacagctgtgggcacagtgaacagcaactcctgcttcaagctgccccccatcgccctgtccagagagctgcccctcataccctgtgccagccactcttcctacaggggccacgccaatggaaacgaacaagctggtgacctgggctcgccaggtctgtctgctccgtcttctgtgaagaagcacagggaagggggaaccagggaactcgggtgccccgtcacctccacggactggaggccacaaaagatgggcctggccctgcggaggcagcttccttccgctgtcacagacaggaaagagcagggccctcaaaccccagtcaccaggctgtcacaaggaaaacactaccgaagccatgaagcgtgagcacttagaacgactagcccccgggacaggtgcgggtgggcgacgccgggccctgtgcccgggtctccacctcccttttctttgcagggctccttgtgctgcttgtcaaccttccctctataatctgacaaagacaagacacaagaggcctggctccccatggaggaacgcctcccttttcctcaacccagcatctttctcctgtatctctgtgacccacctggcggaagtcaccacggaaactccttgaaccagatcactccttggtctgcatgctcccgccccgccaggagttgcagggagatgttgacagggagggaaatggcttcccttctaagactcccttaacattccgggaatctcccctggtttcccttccctgcctccaacccgggaaccagtggtgggtcccaggcacagcgcctcggactct

SEQ ID NO: 37178 - DNA, 846 bp, Bovine  19866881399721
  misc_feature (1)..(1): n is a, c, g, or t
naagcaacaagccccccccaccctttttttctttacataactatgtacatggccttcccttctcaccccaaagagctctctgcacggtggatggtgtggactcttgtcggcttccccaccccccagttatcaccgcgtgggtgttgtgttgtcatcttcactgttttggttcaaatcaaaaaaagttttatatgacaaaccaagagtggggagacatgagaacgtatgaatcggctaaaagatctgaaaaatttcaacagagaatatacaaaaaacatttcaaaatctgcaccgagtctatacataaatttttttttatacacagggaagcgctgggggctccccaaccgcactggagacgcgggcctggccagcgcgcgcggagggcaggcccgcaagtccggcgccgcgcggcccgcgggcctgtgtgtcccgccgggcgtcctgtccgctccttaccgggcttcgatgtccttcagcgtgtgggagggaggccgctccctgatctcggcggacaggggcgtagtcctgcggggggacacggggcggccccccagcgtggagatgagcgggggaggcgcactcagcgccgccgtcgggggcgtcttgttgagcagtccgttctggtggcccgctgtggggctgatgcgcgggtagtgcatgctcggcagccctggcgtgagcagcccggggtgcggcaggtggccgtccagggaggccgggtgcacggggtgcagccgcgggtgctcgtagtcctcgcggagcacgtgcaggcgctcgcgctcgtccaggtgcgccccacgctcgtgctcccgccgcgggtccaccgtcagcgggtggtggtga

SEQ ID NO: 37179 - DNA, 1621 bp, Bovine  19866881408415
  misc_feature (1)..(1): n is a, c, g, or t
nggtgggggtttaagaatacagggcacacaatgcaaagtgacagaggagagggagaacacggagagccgagaccagggtgttcgagggacagcccgagacagaaagtggtgggggcggagcaggaggcctggggggcccagagggtgaggggtgccccgcagagagaattaaggctgcccctacaaggttctgtttctagacaatgtgcagaggctaagaagaagagcatctttaagaggtaagataaagaaaagtgtatttgaatttcctttcatccaaaaggccactgtgagtccatctagagaaacagagaaaggtgagctgccaagtcctgctcttccttcactgacaggccgtctagagaaggggttccctctcccccagcctggagctggcacccctctgctgtggcctgtcaggaacggggcggcagagccggaggtgagtagcagacaaaactgagaccctctctgcctgcttgccaccgggtccacagagaaacggtcttccacaaaatcggtccctcgtgccaaaatggttggggactgctcatctagagagctcctggtctaggggtggcccctccaggggcacctgctctggcagctcagagctgtatgtcatgatgtcctaaatggccctcccattggctgagagatttttaccatgctctcccaaggaaaaaacttgtctttttataagaaagaaatcacttagcatgatggcctatgatgcaacagctacttaagctgctgcatttagagcctctaaagttaaattcttttagatcgctacaaaacacatacacacacatgcacacaacattcaagaaaaacaaaaacaaaagatttggatcgtactggaaacttcagttcccaaagggaagtgttgttgagtatcttgcgacaggtgtatcttgtgtgagtgaagtcgctcagtcgggtccgactctttgcaaaccccatggactgtagcctaaccaggttcctctgtccatgggattttccaggtaagaatactggagtgggttgccatttccttctccaggagatcttcccgacccagcgattgacccaggtctcccgcactgtaggcagacgctttaccgtctgagccaccagggaagatcctgtagtccgatgtatctcatgtagtccttgctatttcactcaaattgaaaataccctcaagaaagggaggcaagcaggaggaaggccttgtcaagaatgcttatgacattcttcagaaaaaaaactcagatgtttttcctctttaaggctacttctttttgaggcatggactaccacgtaaggaggtaaaatcggttagtaaaataaattatccactggtgacacgaaacccaaattgcttggtgaggtttctttgaatatgggttagcaaaatcttagcggtcatctgtgagcccaggatttgagtttgaacagaatttgagaaaaatatgatgagacgatgcaaaacatggctttctaacagaaaacaaaaagaaaagggggagagagagcgaaaaacctatggatgagtcaatggactgcacgaactcgaaagcaaatatggtctgattcatgccgtgtgtgtctggtccaggctccagctcactac

SEQ ID NO: 37180 - DNA, 686 bp, Bovine  19866881481046
  misc_feature (1)..(1): n is a, c, g, or t
naccttctctgtttctgtccaaaactcttacacagccctgtctcagggcccagatggcatggtaaccaacctttgaacctatccctcgacagaaatgacagaaacctaagaccttagcaaattccatctgccctcaagggtggggtccccttgccttggggacaaggcccattagaatgatggtctcttgcagtgtgtgggtatttctttcttcctgaacagaagagccttgggtccaccaaaaatgagtcttggataaaaagcctaggaaggcggcaggcaggatggatgtgaaacttattcgctcaggactagaaacagggagctgcttgaatatgcatgtccagagaaagacattcaggaggggacggggtcaaccattaggatgcgctcagcactggcacttatgagcatgacccaggggagccctgggtcaggcaccgtgcgctgaaggcagttttaggaaagactttggtagcagtacggtggctctcgtttacccattactcctgatggctgctgccttcgtctgcatgttcctggagcaggactgggcagggacccgatgcagggatgatcagggacccactctggcacacctaagaggcacctgggagcgggtactctcagagcttaataaatgctgtcccctaaatctcctgcatcattacaaccaaccaggcaag

SEQ ID NO: 37181 - DNA, 1400 bp, Bovine  19866880106560
  misc_feature (1)..(1): n is a, c, g, or t
ngaaatagatggggaaacagtggaaacagtgtcagactgtatttttgggggctccccaaatcactgcagatggtgattgcagccatgaaattaaaagacacttactccttggaaggaaagttatgaccaacctagatagcatattaaaaagcagagacattactttgccaacaaaggtccatctagtcaaggctatggtttttccagtggtcatgtatggatgtgagagttggactgtgaagaaagctgagtgtcaaggaattgatgcttttgaactgtggtgttggagaagactcttgagagtcccttggactgcaaggagatccaaccagtccatcctaaaggagaccagtcctgggtgttcattggaaggactgatgctgaggctgaaactccaatactttggccacctcatgcgaagagctgacacattggaaaagaccctgatgctgggagggattgggggctggggagaaggggacgacagaggatgagatggctggatggcgtcaccaagtcgatgcacatgagtttgggtgaactctgggagttggtgatggacagggaggcctggcatgctgtgattcatggggtcacaaagagtcgaacacaactgagcgactgaaatgaactgaaggaatatttgataggaatgattaaagatatcatctaaattgagaattgtgatcactgttgtttatgtctaccttttcccatctcttcctcaccctgggaaaccaggagtcaaccatctgattagtgaaatgtcctgtctttagaattagcccttcttttacttaggccagttttgctcagagaggagcagaaacctctcttttgtgcaaagagaccagggaactttcttcatacaaagttaattcatcttcccttttctgtttcctccttcagtttatttctggcattttggcagctctgagtgctatgatctctctagaaattcctcaagttaacatcatgacgaaaatggatctgctgagtaagaaagctaaaaaggaaattgagaagtgagttcatttccgttatcatcacatctctgttgctgagatgaaccctctaagcttcatttaaatgtgaagctataaaactagtttcctgatttattcttattttatttatctgtcttctttctcacttttaaaggtttctagatccagacatgtattctttattagatgactctacaagtgacttaagaagcaaaaaattcaaaaaattgactaacgctatatgtggactggtaagcttttgaagttgttgagttttgtttttaatggccttgtcaggtgtttatcagcatccattcagtggccactgttttggaaagcacaggccaaccctattcccttgcaaaggtgggagggggggaagtctgtggactg

SEQ ID NO: 37182 - DNA, 1362 bp, Bovine  19866880460338
  misc_feature (1)..(1): n is a, c, g, or t
ntttaaggtgccttataaacgtgaccttcgtggtctgtggttctttagttctttgtatactgttagagactctaatctcacgactttttgcttctaaacagactccagattagagtagtccagttagcattaattttgagacatcttatcgcagggagaagatgaaatttcctgacatgatttaagtattcatgtttctgaggtttttttaggtagattttcagggtagttgtactgaagtatcacttttcatgtgaaatagaactgggcaaggtttagagcattgatggattcttttacaattaaaagcattttatttggtaaagagactaaaaatgtttaatattcagcagtatccagagtctgtgggtgacaaatttaggtgtggggaaaagtccagttttagctggaggagggtgtttgcttctatcatccagtatctggtgacttgatgatgtattcatagtgctgtgttagatcttctgtacaaaataatgacctagctgcagcataattttcaactactagaattttaaacatgagaattaaaatcaatgtatttaaagaataattaagcctaaagaatccagaaaatgttagctttcatttaagcttatcgttggtgaattttccaaattgttttgtaaaattctaaacagagcaacaaaacaaaagggataggcatcaaagtggagagtgagattaagaaaattagaaaagattgtaaatgtgtgtgtgtgtgtggtatttaatagtacagcaaatggttcttttggtattgttttgagcaaagctgatttttaacattttctttcataacactcagaaatcattaacaattgtttgcttattcatttgatgagttttttgttcttttttggtttcttttcgttgctttcttttaacattggtcatgtttcaccctttttttttttcattcccctgtctgcaatcaacttcttcattccactaaggctgggcacagagtaagtttcttctcttagctcctactaacagtggtggtggggtggctgattactgggatttcacccttttacagtctatcaaatagcaagtaaccaaattttctgtgctttgattagattggttctttatttgagtttaacaagactgccatttccagaatcttttgccatcttaaaagactctatgtaatctatgtctaacctgcactgtcaaagtgtggaatttgggcaaagacgctgctcaaagtatgacatttgttatgtgatacttttccccatataacttcattagctgcaggaaaccagagtcctagtaaggatccttattaatctgagataatttctttgggcctttcattgttacatctttaaactg

SEQ ID NO: 37183 - DNA, 1061 bp, Bovine  19866880499536
  misc_feature (1)..(1): n is a, c, g, or t
ntgcagtgggaaacagaatttctcccttcctgaatgtgcaagcttaaattccaccatttactctgcttggggtcatggactgatcatggaattgatccctcaggccagggccctgagattatgcagattggccagggttctggcactatgatcggcccatccagagtcacaggttccaatccggaaatgaccaggagtgagggagggtgtggcttcctactggaaattccaggtattgctacaggagacagaggaatgctggatgccccataagcccacataactattttttatgctgaactgtcatcatatgaaaagacccatatcacaccatatcataacaggtatcatttactgcgttcttactttgtgcctggtttagtgccttacatgctgaacaacctgaaatggcttctagaatttctcctgtttcccagatgaggaaaccaaggcccagaaaactgaaatgacttgtccaaattaacaagtggccacggaggaatttttgctgagatttgatggttgatacagcaatgctttaaagcactgcactgtaggaaccttcagtgggtggcagagctcagagtttctagtttcggaatttagttcctgaagtctggaagttggggtgcagtggatcttacagccctatgggctcgtagtattagcattgttcccgcctctgaatacctaatgcctctccgtaccactggctcctgcttttaaaagcaagggatggttgtcctcacggctgaagctgggtgaatttcgatgtaaccccatcagaggacacactgccttgatgccatttcgcccctcttctttgggaacacagggagcaagggggtaaccaacatgccagaaccatctgcctggctcctaataataaattgtgagaggaacaggtttcaggaaaacattgctttaaaaaaaaaaaaaaaaaaggcctcttctcacacccgggcagccatctgtcgtgtcctcctctggtgccaaactgtgggaggagggagagggtgctgctgggtccagcaccaccagcaggggggctcacaagtttt

SEQ ID NO: 37184 - DNA, 1825 bp, Bovine  19866880551046
  misc_feature (1)..(1): n is a, c, g, or t
nttaacccttcgggtgctctcgtccctcgaccggacagtgttgaggggaaggaaggcagagatgaagaggaggtcacaaacgcactcctcccgatctggaaggggaaaaagagacacactcgggaaaacacaaaacaagcatgaaaccccaccacccaccctggcttcacctgggttcccagttaaaagactcctaaggagcaactcactacgtgggatcagtgctgaaacgcccacgctagccaacgacagatccccagagatgtttaatccctcagtgaaataaatgcctctcggaaattacttggaatctgtaaggctacttttccatgagggaaaagacagtacctagcataatctgtcaattgtgccaatggtttctttttttttttttttaatagtcttaaacaagtatttgctttttaatcaggacagatgatatgaaatgaaaatctatacaaatgatttaaagttggtttatgtatatcagatacagtacagatatggaacttttaaaataagacatttttacattttaaatgtttttaaaatcaaaaagtacactgtgaaaatgaacaaagtggcttttcctaaattttgttctcagttatacaaaaataagattcttagttcaatggcattcccattacaccaaatgtgttgaatcaattgttttagaatgtttagcccaaacaactttaaaagctgaagcagcagattcccaattacaatataacaacactgtaattttatcacactaaaccttgacaaaattgaatagggtataatttccaaggccatattctttactattgactctgagaacttttttggaaattcctataaaagtggactgaagagcaactgacgttcaaaaagaaagtattactctctgaaaaaataaaatcatgtaggttcaaaatgcagacaacattttgtcaaaacataggtttttaaaataaattaatccaaaagatataaaatttgaaaacctcacaacacaatacttcttccatgggaaaagcaagagtgttagcagcctgttacagaataccatctttggaacataaagcaggtaaagttgatacaggagtttttacatctcgttctcatgaaatgaaaaaacaacactttttccccacaagggaggaggaggaggcagcagctaagccggcacactgaccacaggtgcagggctgccgaggcccacatgcttccgaccaggcctgcacccccaggccacagacgccgcccgctccactcggagaagtggagaaggcactctgaattccaagggctctgctgcataagtgggcatgtgcccgcctacctggaagaagatggtactttcttccagtggtaaccttcataaatttttggttttggatatggggaaggaagttcataaccaaaaaagttccaacagtggccacccgggaaatatactatggatatggggcagaaaaagggggagagggggccgagcaagagccagaatccccagacctgctgggacaccttcggccacgggccctgacggcttgtgggaacaccacaagcacctgtcgacatcctaatacagcaaacacaaggacggttctcgtagcccaatttggcaaagcggagactggggatctgcaagctgagaagagggaaggcaggggtcaggctggacagagagtaaagagtggaagcgctggtggtgttacttacgtgcgccgggaaaggctggagtctcgtcctgctctcttcgggatggttcacttctcccattgggagatagggtttctgacccgatcctgtctcgtacatggacatgggccta

SEQ ID NO: 37185 - DNA, 687 bp, Bovine  19866880647422
  misc_feature (1)..(1): n is a, c, g, or t
ntaaatttcgaggtgtgaaccttgaaacatttaggcagcaggtgcttaagagagatttgttaaaacttaagagtcatttctggaaaaagaaagctagtttatttcctcaagatgcaggtgaatcttggtgtattttttggagacaaatacagatttgttccttggtgcttgaaaatgttgctgttaaatgtttaatggaatattgaatggtggtggatgtgtggctgggaaagctgaatggaccactcatcttttagatgttattcatgagtgggaattgtcttttgattgaaatcatagtccagtgtttgtcaaacttgcagccgacactgaccaaagaactcttttttcttctgatggctgcagagtctatatacagagtctataacttggcctttttaaagagaggcataacactcatttactgcgtattggccatgagctgagcactgtaatgaggcaatctttacaccattatccctgttccctcacaccaggacttgatgttcatgagttgattcccatttataggtgaagataatgaggctcaaagtgctacccagggtgcccttagtacacctcatctggaatttgaacccagatctgactctgaagcctgtgcccttgcccagtgtgtttataatgactttgaagccagaaatgatcacttaaaactttaagggattc

SEQ ID NO: 37186 - DNA, 1597 bp, Bovine  19866880772773
  misc_feature (1)..(1): n is a, c, g, or t
ntagcggatgaactgcttcatgttgttgtatatggcccgtccttcctccacggcagccacaatggtggagaagttgtcatcagccaggaccatctcagaggctgttttagctacggcggtgccagagcccatagcaatgccgatctcagatttcttcagagcaggagcatcatttacaccgtctccagtctgaaaggccaagaaacccaccactgatttgcacacctgttacctaatacacacattgccaacaatcacttggccatcccgaagccagggaatgaatggagctgttgggcctctgggcagctaagttttctgggagagtttttgtttttgtaagctggtgtcacagaacacattttaacctgggaaatgtgaaactgccaaatgaacttacaggtgacacttcagaggaagtagaacaaaggggtcttcaaactgttattacttattttaccaaacaaaacaacaaaatacgtgtatccatatggataaatctcaaatagagcaaatgcagacaaatacataaactataatatgccatttatggccaaaaatacttaaatattgtctacagatagaaaactatcattcccgtgtatgttttctatactttcactgaacacccagtactgaatccagaatggtgctttccttggagaaagaatggaaggggaggaaagaggaagacaactagaacagctggtttttagcaacaaaattgttttaaaaactgaaaagtttcatagacaagcagcaaacgcaagcatgacacaatgttaacatcttggtgaaaaatcagatgcaaggaagactatgggagatgcttcatcaacaagctgttctcagagaacacatcaccagtaccatctcacttcaggcgaggttttccaagtgtgtgatagagtacggcgtagttaggtcctaaatcggcttttagaaatgtgagatacaacacatacattttaaccatggcaaatacgtcccctgtgactgacgcaggcttctaggtcttaaacttccccagaatcttgcatgccaatagaatccttgagaaacagcccagatcatgacaaaaaaagaatttccaaatatgggacctattactaaaaatttaatgatcagaattagaatctgctgtgttcgtgcagtttgttacctgtacatgtctacagacactcaccatagctgtaatctcatcaaacgactgaagaaattctacaattttagacttgtgggaaggttcaactcgagcaaaacagcgagcattcaagcaggcttctctctgggctgaaggactgagctcatcaaactcgcgacctgtgaaggccttggctgtcacgtcctcgtcctgcctgaagatgccaatgcggcggcagatggccacagcagtgcccttgttgtcacccgtgatcatgatgactctgatgcctgcctgccggcacagcttcacagaggaggccacttcaattctcggagggtccagcatgcccacacagccaacgaaagtcagattggtctatggtgaaataatcaccttatgtcaatacaggaaattctgtttttccccccttagtgcggagagcaaaggttt

SEQ ID NO: 37187 - DNA, 1569 bp, Bovine  19866880790177
  misc_feature (1)..(1): n is a, c, g, or t
ncactcggtggcctgcgagctgaaactcacgccggccctgctctggacacgacgcatttcttgtccagccacccagttttacctttcatatagaatacagtcctgcctcaaattacctttctagttttacctgttttgcagttatcccaaacttgtttttcattattgccagccaatgggctctttagaatggcacccggaacctgccagaagagagggagcgggcttgggtggctttctagtttatcgtctcacatccagagtaaaaggaagccatctcaaaaacaagagaaaaaatcaagtacattccccccatcttacttcataaagggtcacagattctaaacacagtcaagccttaccttggtcaccgggaacacgtggaaaatggtcccttctctttagatttttcctaagcatgccactcggagaaggcgatggcaccccactccagtactcttgcctggagaatcccagggacaggggagcctggtgggctgccgtctctggggttgcacagagtcggacacaactgaagcgacttagcaggagcagcagcagcaagcatcccactcaacccaaaaggcataacaaaaaggccaataaatctgattacaaacccaaaaaccttctatatgggattgggtgggcatgggaggaaatcccatcaccaatcaaagccaaacagcaaactgattgggagaaagggggtgaccccatgtaacaaatgtcatagaccaaagactattatccctaatatgtaaagagctctaacaaattaataagaaataacctccttatagaaaaatggacaattaaaagacatttaatctcaataatggaaaaaaaagcagtgaaatattttccatctaccaaatttgatgaatgtaccaactttctctctagttcagctatcctggatggaacttatccaaacatatgacaaatgtccctgcatttgtacagcaagccatttgcagtgtactaaacagggccatcatcaaaaataggaattatgataaagatgtgacccagtgatatcagaggccccctcaactgttccctaaatgggtctacatggtatgcttccagggttttaggacagcgttatgtaggttttttttttttttttttgctgtgccctgtggcatgtgaaatcttagttccctaaccagggatggaacccatgcccgctgcagtggcagtggagagtcctagccacagggctgccaggaaagtccccagctttgtgtagtttttaaaaaattcctcttgctttctcggcagtgctttgattctgtgagatactgggagaacaagcagccaactctgtcagcatcactgacagaataagaggaagcagacacccagcaacactgtgacctctgtgacagttctgcccgggtctctgccatggttcagacggttgaggttgtccggagagcagaactccccataagccagcagtccccatgtgccgcacagaatcacattcatttcctgtttttctggcctccatgtagttggaaagcacctgctgttatgctccgagcaagcccccagcacata

SEQ ID NO: 37188 - DNA, 1231 bp, Bovine  19866880798219
  misc_feature (1)..(1): n is a, c, g, or t
nccccctccaccccactcctcatgctgcatagagctctgtgctcagatgcctccactgaagtcggggttgccaggtaggcctgtgaccatggacactcttgggctgggaggctctgggggcggccgaagtatagcaattggcccatctcaaacacgttgacttccttgtcctgcagttaagtctttccagcctgtggcctggaagtcagggcagcttttctgattctcacaggcgctcttttctgccctgggtgggcagggcgtggggcgcggcagatgtgtgcattcactgtcaaggccaaggggcacgtatttgtgtgtttacacaatttaatttcagctttgaaaatgctgctattcatttgcactgttggtgaactggaacatccccccgtggaaatgatactttcattcttaacagtatttattttaagggtgctaggcttatcttactaaattaaaatgcttatcttgttttgtgctccattctagcacagcactgatttttttttttttttaaacaacctgaactaaatgtgaaataactgaagtgggatactgtaactgacctaacgattttgtgtgtaaccctggactgagccgctgacatgtccactgttctgtgcttctgtgcaaaatgtccattaaaactaaagtaacatcttatgtgatgttttatcctagtcattatttcacaagcatttaaaatgcaggtgtgtgtgtgtgttggaatctgatttaatctcttaaggaggcactgtgaagtagacctctaagctactcagaaaactgagccctaagtaatctctcaagctgggccaggggccagaagacctggattcctgttccggctccagttacaaacaggcttaacttctcttagagcctcagttttcttatctataaaccagtgatatacacactttatctttctttattctagtgaggatcaggtgatgtgaaaactaacacaaatggaagtgggatcaccaccgctggcctgtgactggagggcggagtggtggggactctgaggggcagggacagtcacatcacaggagcccacatccttgcctcatctgggatgccctgttgtgttatctgcctaaacatttattgccatttttagcattttaaaaggaaagagtaaaaacttatcagacccataaaccttgtgcccggccttttgccctgtaatcgccagccaagtaaaccaatcatgtttggtttt

SEQ ID NO: 37189 - DNA, 1190 bp, Bovine  19866880820894
  misc_feature (1)..(1): n is a, c, g, or t
nagcccaagttttgataaagcatcatgttttagacatctgatcttgtgactcgtgggaacgacaggatagtgggttgaggccagatggacactcactagccctgctggcggccaataagaggggttcatctggggctgagaacacacttgcgaatctgatttagcgttttctctgggcagggcatagatctgcagttttataaacggctctagaactgaaagtccactctcattctttaagaatgacttcttgtatcataagcatgggatccaggcccagttctgtatgaccgttggcatctcacctctcctgtcctttcagtaaagtcagggtcctgatttgcggggcctaactgttctgccgggccctcaggcttttctcagtagtgcacatctcttctccagtgcccttggtttcccgaatatgcccgaatgacgtctgtcgcatttggaaaagcggtgccaaactgcgtgtggatatcacgctgctgggctttgagaacatgagctggataagagggaggcggagtttcatctttaaaggagaaggtgagtggtttcccttgtagtcgtcactgctgttgctaagtttagagtgatttttcaccatcgaaatgtgttcgtgtgtgtgtgtgtgtgtgtgtgtgtgtgtgtgtgtgaaagatgatgcagttcaatatacgaagcttctttggtttcacatcttccttgcactgtgcttagttacgcccttgtttccgttaacagacaactgggcaggagttgatggaagtcaaccacgatgaccaaagtggtcaccactgaacactttgacctttcccaggaaatggaacggctcactctggacctgatgaaacctaaaagcagggaggttgagaggcggctcacaagccctgtcattaacaccagccttgatactaaaaacattgcttttgaaaggtacggatttaagttctgcattttcatgtctaatcccattactgccatctttatagcatgtatacattaattggaaactatgggtggattagaattttttttctactatggcataagaaacactagtgggctttaaagttgatctctgctccaaccaaatggaaaccacagctgacatcctccaccatatggcatttttatcacacgttggtgaagtcttggagaaatgtcttcatattcttttatgggcc

SEQ ID NO: 37190 - DNA, 1958 bp, Bovine  19866880840087
  misc_feature (1)..(1): n is a, c, g, or t
ngacccctgctgtgccgtatgtgcccggtctacccctcccttcagaacttgacccacatccttcttctcgtctgaaataccttagctcctcttcacacacccaaatccaatccattcttcaaagaccaactaaagacatgacttaatgatctgggccacagtgaagaaatactatgtatgtatccactatggtaatgagttctacattatcttgcctcatttaactcttccacgcatttatgaatcctctcctccatgagagagtaaagtctaggggggcagagttttgtcatttcacttgtcattttcaggttgtcaactgtcattttaccctgtgcagagcatcgttctttgcagttaatcaagttaatttggaaaaagaaggaaagatgatccatcttctgtcatttaaatgatattaaagactaatctacagatttacttttttattttccactacttcacagccaaaattttcaaacgaagaaaaatttaaagaattttatagggagccccgagatgtccactacctaaattctgcaattaatattttactatacttgttgaaccacatatctatccatacaggggcttcccaggcagtgccagtggtaaagaatctgcctgccaatgcaggaaacgtacgttcaattcctgggtcaggaagatcccctggataaggaaatggcaatctactccaggatttttgcctggaaaattccatggagagaggagtctggtgggctgcagtctgccgagttgcaaagagtcagacacgactgagcacacatgcacatccatacagatttgtttctaagttcaagcaatgactaaaagtattcaaaaaaaactgaggagtgggttctgcaactctttatacttgatgtggattccaactatggctcaaataccactatgttacaaaggataaaaaaaaatgaaagattggaagctaaagcacagtggttaatggttctaccttccccaactttgactggctgtaagattatacgcacttgaaatatcttcatctgcaaaataacagaattcatatctttgaaggagctaaatgctacccatgcacaatttagccacttttaacaatgaaaagtggctaaatgattaacaatgaatcatacacaaggtaaataatcccaaacagagaaaggtaaaagagttgagtctctcacctggcatagtcgacaggagttttcccactggagtcctgggtgcctgggtctgctccgtatactgccaacaattctgcctgtagaatctgccctgctttggaggccacatggaggggggtgtttcctttctcctaagaatcattaatacaaaatacacaaaaagaaacaaattaaataacccaaaggctaagcaaatgcaacccatttagtttcaacttaatatctgaaccaatttgggctttcttacagggtgaaaaaagttggcttgtgctcctaaagataacagcctcaaacaggtttcaagattccctgttctcacgcttgaatggagttgctgaaaaatacataaacaagaaaagaatgtttgttaaaagtgtaaagaatgagggagcaaagcagctggcagaccactgcaatctacattatcgcagcactacatcatctttatcttgcttagcaaggtgaatgaagccgtctctcccttgctggtaacagctacccctgggctctaaggcagagtcaggcctacgttactgataagggaactagggctgggaaggctgatgcgcccaaaggcatgatctgtctaagtggcacaaccagtctctgagtgtgagggagtgtgaggaggggttaagcatggctctaaagtctgacagacctgaatttcaaaccatatacccctcaagctgtatgaacttgagaaagtgtttaaagcaacctgaacctgtttccttatctctaaaaggtataaaaatgccacctatt

SEQ ID NO: 37191 - DNA, 1493 bp, Bovine  19866880860574
  misc_feature (1)..(1): n is a, c, g, or t
ncacacggcagggcagaatctgggatgatgaaggggaggcgggagccgacacctaggcgagtcagtctgtatactcagccactattgagagaaggacggtgatgtcatctggctttccacctacaatgaaaatgaaaatgtattcatacattctaaaaggaaaaatcaagaaaaaatataagcctaaataagtaagtactaggaaaaaaataggtttgtcaatatactctagtagaaaaaaagggggaaaaatcgataaaatagttaaaacacaccaagaaattacatctaatttaattgaacctttaaaaaaaaatcctctctgctcctttacaataggagctttgttaaaatggccaccaccacatgctctgtatagcaatcacaataaagacaaaatgttactaagattgattctgcctgacaggaaagatctatgttccaccccctgtaatcctaatttggacaaacagatccaatgttttgaaactagttgatagtcttgtagtctaatctggcaaacagctatggcatgtgcttttttcctatttaatatttcccagacagctaagaaatgctttacgtgtcctaatattatacctgcaagaaactgaccaactctacaagtgctaatatgattgcaccaacatgttatccaagctcaaagctgagctattggcccgctcccaaagttacacattgctcagtaggtaggaagactctaggcaaggagagtcttcccttttcaaaacatcctatagaggcaggtgggatgaattgggagactaggactgacatatacacactgctatgcataaaacagataactaatgagaacctactgcacagcacaggggaactctactcagcgctctgtggtgacctaaataggaaggaaatccaaaaaaggggacatacggctgattcactttcctgtacgacagaaactaacacaacactgtaaagcaattaattacaattaataaaaattaataaaaaacaaaaaactcgctatagcaatttggtaggcaaatactgtgaatgagtcccacaaagccagaggaagggagaagtgaaatgtcagacttgtgaagggcagaatgtttaaaccattagcaatgtccaggccctccaggcagaactcggaggttttctgggctcgggtccaagcagagcattggcggcgataaagggcttcaggttccacctgcccctgcagccaatgaagtgcagttctgaagggcacctctgtagggaacacatgcacttgctgtcctccagtgatcgggcctgctgaccttgttcagagtcaccagctcacagctgggggaggacccctgagcagtctcaccccagtacagcagccggcctcacacacagcccagaatgctcccatcccctaagtccccaattagtccttacgaaggtcccaaagaatgcttacctctcacattcaatccgttgtcacatgcaaactgtgcaaaaggtgacat

SEQ ID NO: 37192 - DNA, 607 bp, Bovine  19866880899597
  misc_feature (1)..(1): n is a, c, g, or t
ncttattaagtgcatgcctggtacgacatttttgtcacatggttttttaaaatgggttttgtgagattaatggggaatgcagagaagccaaaataatatgcaattcatattagttccttggttataattatggcttgaaatatagaatgcacctaacattcttactgggctcaaataataagtatagcatcacttattgagtgcttactgtatgttaggaactttgttaaataattcatgtatgtgtcagaatttattaaaatattaatttatgtgtgtactccttctgtttcccctcctcttgaaacaatctgcatcaccttgagttttacaggccaaaattagaagttgcccttacatctttcataaaggtctgaagtctttaggggagcttatactggttgtcctcagggtgagtgcagacagggaagttcagagtaagaatagagaagtgagatgctgagaagattgggaaagcagcacaggtggtaggtttggggtagctcttaagaaggtggaaatacccgcaaggaggccacttcatccatctggggcttccagtgtacctaagcttacctgtcccaggtcttacaggaagcatcaattc

SEQ ID NO: 37193 - DNA, 1888 bp, Bovine  19866880976516
  misc_feature (1)..(1): n is a, c, g, or t
ngcggcctatggggcaagaaaaatgtttgtaggcctgcccagtctgaagacagatcttgacctggcagcctcaggctaagcttgactcatagacgcagatgattttcctcccggttcggaggactctgagtttgtttatttgccagaagctccttgagcactgtcacagccaggcactgtgtagaccctgcacctggggcagcttttggaccgggagtggttgaggggaggtgtcggagagactggttctgctttcgagtctccggccgtgtccccagatcgcccccttgacccgtgcaaattggttcttccctctgggtagtagtttccccatctgtaggaggagggatctccctccatgctcatccagaacattaccaggtgtgacacctggagatggcaacccactccagtatccttgcctggagaataccatggacagaggagcctggtgggctacagtccatggggttgcaaagagtgggacacgagtttcatttcagcaagcgactttgatttcacctcacagccagggcatgttggtgtactgtaccaacaggtactgtcttgcagtttacagagcttgggcctcatcccagcctaacatgaattagactcccagctcttgtttaaatttcctctgcttccttgctttgtgatcttcagcaagtcattttacctctttgaacttgtttcctcagctgccaaaaaaacagggcgatagtaacaatgaaaaaggtcatataagtcaagggcttggcccacatccatatgccttcagttatcctctctgttaccttaggcagagcacagaaaccccccgtgtgctagtccagtgtctagtccagtgtcgtcaggactggctccctgcctctgcactgcccttaatgatgtcaggctcacagctgggtgcagtccaggcttcttcagctagatgatttgcggtcctggtagcaagtcatttttaaaatgctgatgcctgggagcctgcactgagatttttttttacttaattggtctgccttagggcccaggcgattccagtgtgcagcccaggggtgaggaccgggcctcaaagggatgaggggctgcagcaggctcctgttcttagtgcccctaagaacatgttctcctcagatggcacttcccacgctgccctcctcctggtgcagccggcgactcccagatcagcaggctgcccgacagcgccgccgggagcaggaggcacatcttcggcagcagtgggaccagaacagccgctacttccaggtgtccgacatctgcagctccaaacaggcagagtggagctccagggcctcctaccagcggaggtaactgtgcggtgagcaccttcccttagggctggagggcctcctgctgccaggagatgtgactgactcaaggacctgggggagggtggctggccggcatggatactctcatggaaatgtgatgatttccatggatactcgcatggtgatgtctttccaactggaaacggaaaaaaaggttatcagtgaagtaacacatttgactgaagaagataagatgatgagacatgtatgtagaatccggaagtcccctggtagccccatttccccaggagagaaccaccgtgaactgtctggtccatagcctcctgtacatttcttcatctgtgtttgtgtgtaaatatagatacaagcatacaaccatttttatagagagagatacatacgaaacgacggaagttaaaagcatgggctttggagtcagacagacctagatagcaattctgactatgggctttggagtcggacagatctagatagcaattctgactgtgtcacttgctgtatgaatgagcctcagtttcctcatcagtgaagtagggctcaaacagaaccta

SEQ ID NO: 37194 - DNA, 1110 bp, Bovine  19866881099881
  misc_feature (1)..(1): n is a, c, g, or t
nagatggggctccaacggtaggtgctcggcgccggggctgcagggaccccgcgcggctcggcgcgggcccgagagccaggaaagatggctgaccgggctccacctcgtgggtctcggctccgcgcccgccgagggttgcaggcgacgggttgagcccgcgcgccggccccgcgggagaggggttgcaggcggggggcactgaggtcgggtctgcgcctcatctcgacacccgcgtggctccagcccttgaccttctaccgctcgcagctagctcggcggctcttcaccagcagcagctggccccggcagagggagggatgagcctcctgcatctgggttgagccctgcgagacattttctcgtccctagccggtttatgaggcgtcgctgtagttgagaatgcctctgaccgttctactacccaaagttacacatctggcagaagtgatgacagggctgaaatgactccttgtttcagaaaccctgcttaggtattgataagattccacgtttcagagtagatcagtacagcaagtactgcatatttttttggggtagcattttggtatggtttctattaaatactgttgaatgttcatatatctaggtgcatctttcaaagccagtgataatttagtaattctttttggaaagagtgctaattttttttttcttttccttctcttgacacgttgcctgatgaatttctacagagttaccggctgaagaaggtaagtaagctcaacattttttttctgcccccccccccgtatggtgatcttaagatgacatttacaacaaatatgtttctttctaacaggaaaaaccttgctggaacttgtgattgagcagtttgaagacttactagttagaattttattgttggcagcatgtatatcttttgtaagtataaagcaatttcttctatttccccaaagttgagactataccttagatgaaaaagcaggaagcagctgtctattgagtgagaacattttatttggatatttaagctgcattttcgtgtttctggttttgtgtttttgtgtttttgtgtttttgtttttttttttaatactctaggtattgaaaattataaatagaacacgc

SEQ ID NO: 37195 - DNA, 1779 bp, Bovine  19866881124566
  misc_feature (1)..(1): n is a, c, g, or t
ngtttgatgtaagtcgttaaataaggaaactataccgtatctgcaaaattcagcacgtgtggggcccacggtccctcggagacattccactttattataacccttgagattgcccccagaccagcacacttcctctcctctcacttccctcctcttgtctcccttctggaatgtcattctacttggtctgacattagaagggggcatcgtctggtcttagccagttccagtaccctcaacacataggtcatatgtggaaactaagttgcacttttgagaagacacgaggacaggccttcaggtagtgcaggcattgagggtttatccagtttattcatcccctgctttaaaagtgagttatttaaaaaaaaaaaaaaatgaattattttaaaaatattatttttagttcggattttcttccttttcaggtcctgctgaaatgagtataaaaatagcaaattgtttaaaatcatgcgagtagaggacaaggcctcacaaggggatcttcccccaaatgtcatgttaattacagtggagtcttggctctaattgccacttctgcgccaggcaccggagctagcttgctctccagttagtgggctggtctgggatgccaccaagtgattccaagcagttgaagcgggaaaggatctagtaggaaggccctagggaaggagagagtttattttatacattaattgtacagtaactgaggaaaatgttgtcaggtggcagaactaggtggagccagctaaaagctggaggatgcagaggagggggctgggtacttgagaatggcctcctagggggaaattgtggttagctatttagaacagcttggacatgtaaaagacttctagaatgtgttgatagctaaaatagctttcttttttgtttttcagagtgctcatatgaaaggatgtactgatccctcaatatacatgtgaaaagtgaaaactgtacatttgatgagattaaattttatatatggctagtaattgtccagcttgttcattttcaagcaagagtaaagtgttcaacgtgaggaaaatatagtttatgatacatttgttacacagtgtggggtgggacattctcagtcacaccaaggaagaaatagagcctctaaaaggctgtgtcccccagaatccgagccggcagcagtgaggcaaagccatcaaaccaaatctctccccgacatggccccagaggggcggctgtcttccttgtcacaagcccatgaggcaggtcttccctttgagctggagaaggcgtgcatctagttcacttccccgagaagtccatgctgtctcaatagcttgttaagtctctcaatttcttgttcctgttattacaaaagcagacaaataaccgaatttaccttctgagcctccccaggcacgtggcagtcatgcagtgagccccaggcacatactgggccccagagctgaatgaaaaccacgcttctaatggaaatcactcagtcggggcccagcagtgacagcggaagaggagacactggaagagggggttcctggcggagctgcagggcggagcagtgcctgggctgaatctggaaggacaaggaaggcctgtcccaggggagtggggctctgggctaacggccccacgagagcagaggcctggctgggagggaacaatctgtaaacggggtgttttcccaagcgccttcttaccttctcagagcagctgaattcaaggtgctggatcttggtggccagttgtatgtttatctgttttaaccttaacagttgccgt

SEQ ID NO: 37196 - DNA, 1523 bp, Bovine  19866881133677
  misc_feature (1)..(1): n is a, c, g, or t
ncatgttcttttggagaagcaataggtttataatcatacatgatgcattatcaggttctactcaagaaatactaggctttagtgacatatttcaaatgtcaaattaagtagtaaactgttaaccaaagttaatattttgctgatgcaaaaagtagggaacagcattaatgttttacacttgtgacctgtagggataaagtttaattaacttgtccctttgggttggaagaagtgagctgtgtgtctctgttgcatatgaagtaacattagaaattccttgacattcagtaccttcttttcctttcactttttctttccatcccccttgctcaccaactttgcccttcatataacacatcatgattgcttaattggactgcctgttcttttctcccttcactgctttgttaggaattgagcatcttaggtacatagcatgaacactggggatacagcttggaaggaaatacggtatcctacgtggagctgacattctaatggggacagattaaaaaattaaaatatttaataatctgttggattggagagagtgctgtggagaaaaagtgggtgaggaagggtggtggcggaataaggggccatgtggaaagagtgcagttttcaaattgggaagtcaggaaaggtgtctaaggtgatggtacctgagggaagtgagcgtgaggactatttgtctcatctgtctgactcatgtcctctgtggtaacccaatttgcataattttttctatctttcacccctattaccccatctcggctacttagattgaccctaaaatgctaattaagctttcttagactaagacacttctcaaattttggtttatatttgaataatttgtcttttcctactgaaacctttgaagggactattaattccttttagagcctaggttagtgcttttgttaaaagaaatacctggatgagtttatgttggtagcattttcagaatacatgaaattgatttactttgcttttctcaataagatgtattcaagaagtatttggtaatgtagtgattttaaatttttcctgtggtttaattattttgaaggataaaatgggcagtttactgattgattcaaataatttattttgagcctgtgtttaaaagatggtttgaaaggtgaatgtctgggggttttgttttgtttttaaaaagattatattctcaaatctgaaaatattgagtgttttcacatgaactttggattggaagataatatatagtctaatccataccattcttttttttaaaaattatttattttgagtgtatcgcgttgctcttcagggacttgggggtggggcgctttctctggttgtggtgatccggggttactctctagttgccgtgcaagggcttctcattgcagttatttctcttgttgcggctcccaggctctagagcacagacttagttgctctgtggcgtgtggactcatcccggatcaggattcaaacctccgtctcctgcgttggtaggctgattcttcaccactgag

SEQ ID NO: 37197 - DNA, 1080 bp, Bovine  19866881199354
  misc_feature (1)..(1): n is a, c, g, or t
nttgattagctcatgccctgattgtctggctgtatcacttaagaaacaaagcttcttgatcctctcactcttagaatagatctaaattttcaaagcaaacacagaatatacctaggctttcaaactcacaatagcataagtcttccaaaccagcagactggacatccacagacctcctcaggccagcttgagtttctgaaattagaccaaactatagcgctacaattcacactatcgtatactagactttgccttaccaagtgctgtggaatatgatgctcaaagttgtaactttccctctcctgtaccacctcctccttttaagaagagtgaaatctgtgacaagtattttttgtgcattacaactatccataaaataaatctgtagtacatgacagtaacattaaaaataaattacaaagtcagttgtattcataaagttaaaggtttcaaacacatatggttatgcagcaaattaaatttaatatttttgatacagacaatgctcgcatcctgtctttggttctttaaatagcttttataggttgttaggattttttagaaagaaattattccaataatataagaaaagttacagttaagtagtaccttaatcttaaaatcatgttcaatactcttaaaactcttgatctgacttactacttttgttttagtttatgaggataaaaatatttgttgtaagatactttatttgtaacatagacttaaatagatgtatttgcatgccaggcattgtgtcaaaaatttgctatttatatttaaattatattttcttcattctgttttgttttgctatctgctgttaactttgcttttcttagccataggtgggaagggcagtctttaataagcattttgaatctggcctcagtttagtttagcctcttatttgggcaagtaccgacctctggccttctcacttgtgtccttagatcaactgttagatcaaccctgcatactaaaagaggaaaagatggggatgttcccatgtaatctgtttgtgtctttgcttgtttttctgcgcttcttgggattactgttactctgtgcttccttatg

SEQ ID NO: 37198 - DNA, 1741 bp, Bovine  19866881201580
  misc_feature (1)..(1): n is a, c, g, or t
natatgaatttagtatctttaaggaaaaattaaagacatcttcgataccttgtccagatgaagcagagattggaggcactctgacagtttcttatatttaaaataatgcccagaacctactgtgttagatttttggtgaaaataagcaataatcttaaatttagtacagtactatacatgaatacttactttaaaaagattaaaatttacactatataaattttaaatagccatgatatgtgcaccaagttttatttgcctggaaaacaatacaaatagaacaaatatgtgattcaaaatattaaatgttcttgaattgtacagaagaaaaagaaactgaagtgaaactgtaggaattgctgaacttcagataaatgtttcttcaaaacaagagatattagttcctaaaagatttctctaaagttaaaaaaagattaagaaaaacattaagccactgggttattatgttcaaacaaaaacttacatgtttcttaatggacatgtgtttacatttacagatagtaaactcagtctcttgtcttataaaacagaagacaccactgatgtataaactaagcgaaataataaaagcctctttttcatattagaaccttttaaaacctaaatctaccttagcattattttccatgaaaacttaatagggaatggctaatctgaaagcaaaatgttgaacaaatcactttcaaaaaaaaaagaaacacatcattgggattttacttatagctagcagcatcaactaacgccccaaacaatggcacatgaactcagagtatcagccggtcctctcctccctcctgaattacctgaccaatggaagtttgggtttgttgtttcagaaagcactgtttcttacattccatcaattgttcaaaatcatgccacatttttgcttgtttcatatttggaccatgactttctcgtacagctttttgtttttcccggagtttctagaataaaaaaaataagagtaattaaatatcatatagggatttacttctactgctctaatcagaagaatatggtatgctttgtatatctgataaataatagctaaaccacatgatatatgaaagctaagatgataaaagttaattaaatttacgatagatctaagacaacctgaagctaaaaaggacagaaaaatagaaaagaaggggaaaataaaggaaatcaggaaagtggagcagtatcatggtatataaaaagtgcagattttggaagtcagaagacttgagttccagccttggctttgtcactagccataaggaagacaatttctctggactgtagtttgttcaattgtcaattaaggttaataacaggagtaattataaaagtaactgctttataatactatttttttcacatgacaatagatatagaaataattacaaactatcttgtgttatatatgttattattattaaacattatattctttcctgaatcagtatactctaagggtatgctctatgcccaaataaatcaaattgtatgcaaatattcttcaaggagaaggtccagtgatattttaaaaaggttcagatccttatcataattatttttgttactaatagcccacatatatagttccaccttccaatattgttctacttactggctaaaaccataaacaggaataggaacatttttaagtaaactgtgaactgttctttggctctgtgttatggcaaatcaaggaagagtgacaaagaaaaag

SEQ ID NO: 37199 - DNA, 1886 bp, Bovine  19866881298868
  misc_feature (1)..(1): n is a, c, g, or t
naacgcagtatcagggatggggaggaagtgtgttctcaagcaccgagacaggaccctgagccactgaacaagacttgaagggcaccttggaaatatgtgcgaggtgctctcttcccacctttaaacaccaaaaattctcagtgcagatatcctttaacaagatctaagtcatacctgaattaatttcagaatgcaactttataaggaaggcaggtgactgaggggtaaaaactcatatataagataaatgtgaatcacagttaataatgttgagatattcaaccaggactgagagagagaaacttgtcatcacaacatagtaccaataaaacttaacagggctttacgctgtggtatcgatgactgctttaattatttttataactttaacatgtgtgtgaagttcagaaggccaaagaagcaaacatttagaggtctgaaacagttaccttttgaactagagagagggctgccttgctgtctcctcttggcatcactgagaatgtcgataaccagagtggcaaactcatgggcgttaaaccgagctagtttctgtctgccctgagggtgagaaaataattggaaatattcccagatataaaaatacacacatgttcacataaaattagtcagactattgttagagttcagcaaaggccttccagcatgctcaaagtaccatcaatcacagccataactcaatcaaactttgtttctgtgtatagtttaaaaccatttacataatagaatgatgtaacatttctcacaaggcatatttctttttgtgaactgaaacgaaatggttctacttaatgctttatcaattctgttttgaaataggcctactagttaaaaatcaacttgaagggatagatttttaaatttcaagacagtttagatgctgggactctatcactatatataaacattaatcaataaaaatgaaaagaatttcatcatttattcaacttctctccttttgatggatgcttaggcttggtttctgtgctttatcattacatacaatgcttcaatgaaagtatgcataaagctttgtacttttattttattaggacatattcccaaataaggtatttggatggaagttatttggtatcctgggtgaaaggatgcagttaattttgagacctctgtaaccagttaacaaactgcctttctgcagtctgtagcaatttaaactcttatctgtagcataagaatgccacatccttaccagtgtggagtctcctttatcatatactttattaatttgatggatgaaacactcattaatgacttcaggctgctttctttgattactaatgaggtgaaatatttctttaaaaggtgtttgaaagccatttgtaattcttctgtgaactgtcttatgttctttctcagtcacttattaacttctgttgcttttcttatcaatttgtgatgtgtgtgttggtacataaaggatattaccattttaatcagtcaaaaacattttaaatacctgtcctgggaaaataaaataccacaatatcagtcattcctcaaagatcactactagtgtgtttttggactcggccacttgcctggttccgtgtcgatgagtactcgggattgactggaaggaaggggacgacggttgtctcggtcaccagggtgctgtggttctgcgtggcaagccagactagccagaggaaagagccagagatacaatctcatcaccacaggcgctgctgctcctctgagagccgcggctcccgtgttactagggagacttggggtagtgcactccaaagccaacatacacaagagtcaaagtcgacacacgtgttatcaggacagcaggagttgggcaaggagaaacactgaggcggcagcttgctgctgcc

SEQ ID NO: 37200 - DNA, 1112 bp, Bovine  19866881358902
  misc_feature (1)..(1): n is a, c, g, or t
ncttgaagtcatttaaccaagctcaagctatagcttcctcttctgagattaagtgcctaccccatagagatattgagaggatcagagataatgtctgtgcaacgaatactgtagttgtgggtacagtggatgatagctatcactgctccacactcctctcatcctctcagggaaagaacatacagattcaatgctcaggttttatgttcaaaggtcccatccagaaataccagccttggttgaaaaattctgaaagagagtcatagatatatgattggtagtgggccattaccattttacacacaatttaagaagttacccatatttcaaaagaatgtgggaactctgctgcctgtttggagggtgtgacgtgttacatggtgtccactagggagcgataaacacattcatttaggattagtgtttcttgtaacctatgtgcacctgctagatagtaaatattactttaattttatcattgtaatctgaacttaaaagtgtaaaagtgtttaaaaattttgattttgcacttaaaattattaatggattgctttattatttttaaggtattaaaaagattcataatgtgtgttttcaagaaagtcggcctttgcaagttatttttcaaaagaatatgtgtgctaatacactagtgattcagccaaggtaatgagttctctgttgtttttttcctgaatatagtatggtcacagagtaaagaattaatgccctagaacttttaaatcaagtacattttttaaagctaacattagacttggagaaatcaccttataggatcaagaggaaacctgaagaaagataatagtagataataactgcctaatggtagaaataatcatttattggccaagaaagttctagaactatcccatcagtggcttgctacatcaagtggtattaagagaaaaatattttattagataacactttgcattcatatgatgctttctataagacactgtatgtctcaaaacaggcagcatgaggaaattgtaacagattttatgtgattgattttatccctgtttgttgtttttttcctagaaaatgagtgagatatattgtcagtgagggggaattcaatttttcaa

SEQ ID NO: 37201 - DNA, 895 bp, Bovine  19866881415343
  misc_feature (1)..(1): n is a, c, g, or t
ncctaagcgttttacagatagcttgtaaattctcaacccgttgagagtgggtgggtactgttagtgtcctggttttgtaggcagtaaaccttgtctgtcatgtcacttatccacaggcaacatagcttttgagtggaaaagcctgggctgagcctgggcagtccagacccagaccatcagctttcatgggagacaagattgatttaatggtgtgagtgtgtgaggttaaaggtgagggccatgttgcatggtgtgcttagggacagcaggttctaataattgcttttctccattgattttatccttattcttagggtgcttagttttttcatttttaatataaaatcaaaagggcctagtgtttattatcttaagatgtgaatcatttactattaatgttattaatgtgtgtctcttgtgggttttttttttttaatttatattttaggttagaatgctaaaatttgattcctagggctagaaacatttagcagtggcaggctgtgtttactaatttcttttgttttcttttttacaggaaagaaatgctgaaaatgcaatcgaagcccttaaggaatatgagcctgaaatgggcaaagtgtatcgacaagataggaagagtgtacagcggattaaagctaaagacatagttcctggtgatattgtagaaattgctggtgagttgagttggtcattttttaaggttgtatatttgaatgcagtcctttcctcagggttcatacttagaggttttagaaattaggctcacgtgtatcaattagattaacagatttttagtgctatccaaacaaattacggtttttttgtaaaatttcaaagtgttttaggacctcccttcatgtgagaagatttttctgttttaaaaaaacaaagg

SEQ ID NO: 37202 - DNA, 1296 bp, Bovine  19866881481495
  misc_feature (1)..(1): n is a, c, g, or t
ncctctgaaactcctttcccgtttttgtgtccgttatatatatccagttacataaatgccagtgtttatttacagaacgtggaggccctggatcctcgaggtcgcaccctgttgcatcttgctgtttctttgggacacttggaatctgccagagtcctgctccgacataaagcagatgtgacaaaggaaaaccgtgagggttggacaggcaagtgtacttgcgaaataacgtaaagccttccattttgttttctctctctgaataaagggtagcctcagtcctcattgtcttcagagtcatctttatcttgagctctgtctctcttgggactcggggccggggaaggagctgagagcctcggaggccactggcttgtctgcagcacaatggtcccaattgtgccctgggtcaggcgcccagggtagggggtgactcttcatccagaaagcagctctcagcgcaccagacacgaaggcgagcgcccggtttcccctgaggagcgtggcggtaactccagcaaatccatcatgatggacaatcagaaagaaatgataggcagtttgaatcaccatgtgaagaaggagtaggcggcgggctctcactgggtgtctgactggtcctttttctgccttgcttgtttgaaatggctgacggtaaggctgggaaggactcaggaaaagccaacacaaaggcgctttctcacttgcagagagccagtctgcagttcctgggggaccgtattcatccatacctaaaatctaggaccaccagccatggatgtgtggacgtgactgccgctgtgtgtagcacagccatcctggaggacctcacccgcagaggtacttgaattggcaggaaatgcgtcagaagacttgaaggtaaagtgtattacgcctcgtcacttgcaacttgctattcgtggagatgaagaattggactctctgatcaaggctacagttgctggtggtgatgtgagtccacacatccacaaatctctgggaagagaggacacagaagactgtctaaaagaagcctggattccttcttatctcaggactctaaatacccctacagctatccagtgttggtgattccagtggaccatatctccgggaataagacagatttgccttttttgtaattctgtttgagcaagttggaagcttaattaactttccaacaagccaaatttctgcattcgagtcttaaccatgtttaagtgttactgtggcttcaaagaagctattgattctgaagtagtgggttttgattgagctgactgtttttaaaaactg

SEQ ID NO: 37203 - DNA, 1134 bp, Bovine  19866881740259
  misc_feature (1)..(1): n is a, c, g, or t
naaattcggcctctgtgcctttacattgttcaattgctgtgcagttgcccgagccttcttttcttttcaagtctgcatttgcccatgtcctcgaccccctttcttctccggagtagacaagggagagaaagaagactcatgtcagccaatttcgtaaatcattaggccccgagtagaggagctggtgggggttagaggttcctgtgcagctctgtgttgatgcacagtcgaaagatcctgtctgatgggtttgcctgtcattaccagagataattggctggaaagctggaaaagaaggtctgcaacatcagacagatgccactgagctgctggcaaaagaaaacttgggggctcccaccatgtctaggtaatgggttctgacaggcacagctgcaaattgttctgaggaggaaaaaaaaggtatcactcagagaagggcgcagaacagtggaagttgcagtgaactgggtcagaggtgatgtaagttcaggacctggactacagaccttgtgtgagttccttccaactctctgggttgggaagtacctctctgagtgtcctttcagggtcaaggggcctggagtgtccaatccaggcaaagccaggggttcagagttaatcatgtgctgctttcccaacagcaaggaaatcaagaccctgcaggaggagcaggatgagatcaccctgcttttgaatctcatcaagtcctccaggaacctggatctcaatgagaaaaactacttggaactgcgtttcctgctgcaaactaaggaggactacgaggccctgattaaatcaatgaaactgctgttggctgaactggatgagaaggtgtggtctttctcttaaagggttaaccagaacactgaacaaggggaaggtgtgctccccaccacacgctgcactgctggcctttctaaacctgtctctaccaccattgtaacccctaatctctcagttctgttgatccatttccccactgtggtctccagtgcctccctattacacttagaataaactcccaaatccttactgtatcagtcaggagaggttaggtatgctgcagtaacaaacactccctctccccaactcagtggtttaaaacaacaaaggcttctttttcgtacatgattt

SEQ ID NO: 37204 - DNA, 1100 bp, Bovine  19866882096251
  misc_feature (1)..(1): n is a, c, g, or t
natctatcttcttccttagaaaaacagtttaaaagaatcacattgaactacataaggaaatgagtaactgaattatgataaatctacttactaaagattttagcccctttaaagtgacattttaaaaaacgaataatatggataaatgtcagccacaggtaacaaaaggaggagacaaaattgtctatatattctattgacgaatgcttgggagaaaaagtcccatgcgtgtgggatacgattcgaaggaacacacctacaacagtaagcacctgtgcttaagtaggactgtgggcgactgtcactctcatgtatgcctttcctagatttaaaaaataaatatataacttccataaaagaaaaataagcctatattcaagctaaatgaatttcaagctcacagccactcaccccagctggtgaattcccatttcatctgcacgtaaaaatccggagcctgaaggacaaaggtttaaaagaaatcactcctgctatcagaaactaacacaacattgtaaatttgactatactccgataaaaattaatttaaaaaataaaagaaaataaattacccttggtaccattagcgaaacacacacagtaagggctgatagggttgttcaaaaggcagagggagaaagaacagagaaaataagaagaaacataaattgcaaacccatcagactaaatgcctatttttatattcaggctgttattttatctcactataaaatacgtctagacagttaataaagttaactgcaggcgacaaggttggagggagataaaagtcaaatctgatttaagggttcagttgggttcctagcagtgagggtcacaggctggtctaagcaaggagaaggagtgtggaccccacctgtcctacagggagcttgactgcaaaaggctctgtgtgctgggaaagggtggggtgtttatcagaccactctgaaaccaggagggtgtgagacatcactgtccccaggaagttattttccttcagacttttgcccctcattttcttcttaaacttctagaatttggctttttgaggtttcacaccaccacagcaagcctgtttagaatcattttctgaccca

SEQ ID NO: 37205 - DNA, 2051 bp, Bovine  19866880646640
  misc_feature (1)..(1): n is a, c, g, or t
nattgtaaaaaatccacaaatatctttagaatggtcccattaaaaaaaaaatcttaaaaagatactttagtcgagatttaatggagatactgcatttcttttcagggagcaaatttcaatatgttagagtttaagtagattctgataatggtcacatgatgatccagaaatgcagtaattttagacagaccaaaaacttgaaatttaataaaaatatttttcaataaactaggcagaaatgctataaaaatagttaaattttaacttattggttaaatctttatgactatatgcagatgtgttagaaaaacatggattttttttcataaaaatattctgttttaaagccctgtagacattttcagacacatctttgttccctgttctgattaagctcatagtactccacagtgctggggagtgtttttcattaatttgctattaatcttaccattctgtcattctttcctcaacagaagtctaataaaaatcatttaccattataagataatgttctaacttgcctatttgctttgaaactggatatctttctggtttgaaactagtcagtctttaagttctctggcacaaaggaatcaagtgaggttagtctgtggaaagaagacagcagatcacaccctggcatcatatatgggctttgggagtgagagctttgtcttattctttggggtatgagacagtatcttctactgatgaagcaagaagcagggagaaattttgagaattggtaggagactaggaaagaagatacctgggaaagcctctgtaatttgctactaattagggcttccctgctggctcagatggtaaagaatctacctgcaatgtggtagacctgggtttgatccctgggttgggaagatcccctggaggagggcatggcaacccactccagtattcttgcctggagaatccccatggacagaggagcctggtggactgccgtgcatagtgtcgcaaagagtatttggcaatttacctggaaagtatgtgtgaaaacactgttgctgtgatttcataattcctgctttatcagaccttcaataatgtctctagtagaaggggaaaagcttttctcttagtggaatactcattggtgaacaggaatcttagtgctttgttattcctcagttacatatgcaagtcttgttcacttcactttatatataaatctttctgattctaaatcattatttatttattgcctattaatatgttattacatttatctcctgttccttccttatccttcattagttgtttaacatataattttactatagtatgctagggtatgactttgattagtttgaattttagcatttcaatccaattttgagtgaaccataaattgtacagcaaagctgtaccgtataattgacaaaaagcacttggcaatagttttttgaggacttatgaacttggaaatggctttaagagttcattaatcgtatttccattggtttcaaggcttcaggaactctgaactatattcaaaggagtcctgaggagaaagtgtgtagaaccctgaaaagaaatgtgaagcatcacagattatagtgtgtcatgtttagccagattcaaaatccaaatacagatttcttactattaaagtaagaaattactattaaattaaataaaactattaaattactatttaaacataatttaaaactatatatctagccttaattttgtagaaaatgactatgatgtttatcttttatgcttccccacattagatttctagaaggttatatatattattgcttcccaggtggtgcagtggtaaagaatctacctgccagtgcaggagatgccagagatgcaggtttgattcctaggttgggaagattccctggagtaggaaatggcaactcactccagtattcttgcctgggaaatttcatggacagaggagcctggtggactacagtctgtggggtcgcaaagagtcagacacgactgagcacagaacaacgtcaacagtatatattattattttaaaatttctgtttcttagaatgttt

SEQ ID NO: 37206 - DNA, 1141 bp, Bovine  19866880702643
  misc_feature (1)..(1): n is a, c, g, or t
nggaatcttcccttgtggctcagctggtaaagaatctgcctgcagtgtgagagacctgggttcaattctggggttgggaagatcccctggagaagggaaaggctacccactccagtattcatgcctggagaattccatggacagtatagtccatgggatcacaaagagtcagacaggactgagcaactttcagtttgactttcatgaaggaatcttaagatgaataaaatacatcctgccttcaggcagctcagagtcaaatagataatacagttattatgggacagaatccatttgtttcttgtgttgttataaaaatgtgaaactccatgagaaaagcaaataaaaaatgcaataccaacatgattatttttaaatctgtcatctacaaaatattgtaaacttttcttagaatatctaggaaataaaaaatttataaaaagaaaataaaaatcactctactcagacatgacagcactttggtacatattttttatgtgtatttggaattgtaatattgtatattcatttttttctatcttgcatttttaaactctacattatgattattacaccattaattgaaaattatttacataattatcacatcacagggtataaaagtttatgtaatcattttcccatttgaggacatttgtgttcctttcaaagtttcccctcttataaataattcattgaatatatttatgtgtaagtctcctcatatttctaattttcttaaaatgaacttctagaaatggagttctaggtcaagggccatgcatattttaaagttcttgaaacattttgccagatagctttccacaagcttgtgccatttggaagtcaaaccagcagggcataggagtttttgtctcatgcctgccagccatgagaattactgtattttttaagtataacttttgctattttgataaattaaaaaggcatgtatatttttttcagtttagtagctttaaaatgtagtttttaagtataatatacatacagaaatgcacacatatattaaatgtgcaattttgtgaatttttgtagaaccgacacaccagtgtatttattcagtaccagagaagactaggagcacaaccagctgccctgcagcctccttcatctccctttt

SEQ ID NO: 37207 - DNA, 1649 bp, Bovine  19866880981688
  misc_feature (1)..(1): n is a, c, g, or t
ntaatgagaaagctggggcatgcttggttgtcaactgcagatgcagtaaaacgattccaaacgttatttctaaaaaacactgttttatgataatacgttttcccccaaagtgaatttattgctgaatttataaaaatccaaattctcgattactcactaggaggatgacatggaccgcaatctgtacagaacaagacacaagcttaaggctttacctgacccagtaaaagtgtcaagcgctccatctccagtcgtggctgtggtttcactgctgttcaaaggctctgttttgactgcaaggagagacactacgtagaagaataagtacatgtgagttatatttctaactttacatcaaagatgctgactgttcaactagtagcttttctagctaccatgggcatgcaagagaaaatctgagaagtcgatgaggagttttgttaatttagcttctaaatggacatgcatttatagaggatttaatctaaaaatcttctgtctaagctgcttctctagaatctggcttttcaaggcagttaacctgacacagtgaaacagcagtatacatgtatttgcatttttaactcccctaagcatactctgatattatagtcaaacggcagaagaaaggaatcatcagtcagcctttagcacgctgaatccaaatcacaacagagatttactgcttatgttttattcttcccaaggagacattaaaagaaaagactgcttaagaacaacggtggcatatgcatatacagaaacctgggtgtgtattcatatagtgggtggaaaatcaggcactcaaaaaatttctgctcaacaaaagacaaaagagccataaggtattgttttttttttattctaatagtataatgatctttaatacattatagagacaagcataggagatggtttttacagcaggaagtacagcttttgaaaactctttaatatattatttctcctttgaggtggtatatcttggcaaaatcctctttggcaatgatgtcgccactgaggtacacaatattgccattaatagatgcaacgagtgtggcgggggctacgcaaaagcctccacccattttgtcacaccatattttccctttgtgggcaaagctccatatatcacagcagccagggaatacactaaattattttctacttgacacctcttatgtttcctagtcataaaaggaatgatacagttaaaaacctcagaggcaagcagagaactataaagaaagctgaagactagccaactatggacaaatacagccgaaagaacagtgggctcagagcacacccaccaaccaagcaagtcagcaacgttactctgttagaaaagcaattaatgatggagaaacatgcagtaatgactacgttccctttccacatgaacggaattggctgcaccctccctcagtgagctctggtgttaatttagcatccgtgatttaactatgtcatgaagatttgctggaagattcaaactgcaaaggttggaaagaatccaaactctaaaccatactgcctcacaggcagcactaactaaccaagaattcctttcatctgtatagagatgatccagagcagggtttagaaaggtgtaacagctactctcaatgatgcaatgtcctcatctg

SEQ ID NO: 37208 - DNA, 1393 bp, Bovine  19866881101652
  misc_feature (1)..(1): n is a, c, g, or t
natctgtgggacatgcagaacccaaacataaagtcgaaacataggatttgacccagtatgatgtatgcatctttgagtagaaagtgactaacctatgagagggttagattgcccacatggtgtggagtggggaaaatgaccaaaagatagaactactaaatcccagcatgtgaggactggtaggaagaaaaggagtccgtgtctcctagacagagaaggactcatggaaaaaattctagaagattctagcagagtatcagctactaagtggttctgaagaggtggtgtttaagaggattgatcatgtgtagcacagagatccaggaaggtaaagactgggtctatctattattgtgtgtgtcatttaagtggcttttggagactgtggctaagaatagttttgttcgagttttggtaaactaaagctggattatgacaaatgagatgtcagaaagtagagacaaatgtgagaattcagttctgtagccagcaacttcagtctgtactaactccattgcaggggcctagtaggcacatgtagctactccagatccaagtccgctctaagtggatttcgaagacttagtgtgcaaaacaaattatgtaaaacataccatattcatgtttagtataggttgaaatgataatgttttgaatgtattagagcaattaacatgtaagaaaaaaaataattttacatgttgctttttacatttttttaaatgcagcttctagaacatttaaaattttttgtgtggttacattcatggctcacattatatttctattggacaggactagaatgccctgttcttttaagagacgatcctttaaaaagaaaagatagccagtaaatagtttctatagatgcaaggttaaagggaaggactttttaattttgtctgtgcctgaaccgccccctcaccccaggaaagggagaggttgaagggaagataagagagtttgagcagtggaacatggtttcccagtaggtgaggctcagaagtcatacttgaatgtggaggaatgggatcttctcttctgacataaggagttgcgaacagatctaaatttagataaacatgtaggtggggatagagacacgcaagttgagagcatctggagtacaaaaggtgttcaggtttaatagctcacatatatcgaatctaggagaaagtgatgtgacctgcaaaatttttttactaaattaggatttttgtgtatttgggattatatcttttctttctttcttttttggtcataaggagctttttgttaagataattcataatgaagacttatacctgatctaaaaataaagtgctattcttgaacaatttatgttatttacaggagagtttgatactgttcaaagcccctccacacccatcaa

SEQ ID NO: 37209 - DNA, 1348 bp, Bovine  19866881249936
  misc_feature (1)..(1): n is a, c, g, or t
ntggtaaagaacccgcccgccactgcggttagacgttaaaagacgctggtttgatctctgcgtcgggaagatcccctggaggaagacatggcaacccactccagtattcttgcctgagaatcccatggacatagagggctacagtatatggggtcgcacagagttggacataactgaaatgacttagcacacacacactggtactcagagctcaatgactgtgtcacccagcagactgtgctctgtgaacttctatacggataggtcattatcatctttctgcttctaaagtcccccacattctctcacccaaagtgcacactgaccaaaactctggtgcatgaatgaatgtatcagtgataaccaatacagaaagtataacatggtggataagaacatgaattctgaagaccaatccaaatctcagctccaccacctcctggcttttatattattattatttttaactgaagtatggttgatttacaatatagtttcaggtgtacaacaaaatgattcagttacatacacacatatgcacgtactgaactggccaaaagttcgttcagtttttctggaagctgttatgggaaaatctgcatgaactttctggccaacccaatgcacacagacacatgtgcacacacacacatacacagacataatctttttcagattcttttcattatgggttattacaagatactgagtatagctccctgtgatatatagtaggtccttgttattaaatatccctgagttccagttttcctcatatataaaatcaagataaaaaacagcatctactttataaggttgtatgaagattatgaaaattaaataatacacattaacacattaacattttttaattgaaccatacttgatttacaatattgtgtgcatttcaggagaatatacagaatacttagcacagtgactcacatgagtaagatggctattattatcctatgtacggctattttcatttactttgtattaggatactacctttttctgaaattttttagaaataacctcaaaaggtattcagaaatccactaaaatcctgataatcataaaaggcatatggtgaaccaagggaaaacctggaaattcagaaaacacacaaaggaaaaaagttatcagccaaagacaatggtggttagaattctcatcatgtgttattaatagaatagtataacatttacaagataaacacacccattagtcatgttttccttatggaatttctctttaaagggttttctaatgaatagtttacatatttcatatttaaagtttcttatcaagatggtttaatagacttatgattttaataatcgca

SEQ ID NO: 37210 - DNA, 1231 bp, Bovine  19866881260128
  misc_feature (1)..(1): n is a, c, g, or t
ncagaattggatagcatatactaaaagcaaaggtttttgtttttttttcctcatcctttaccttgtgtgtgttaaaagccacaaagttgaaatatagtctgcaaagtatacttcaaaatatatatgagaagtgtgtgagcaatgctgaaacttaattgatatgctgagaaatatataaaacatacagccactggattgggaaaatgaaaattaatatgtgaatggtttagcgaacactatgctttgcccccagaacctggtgtttattattgtgcactttagtaggagacagaagcagtatcaattggaaaaacatttcttagtgaattgagaactgtatggctttccaattcctaagtgggaaacctggttctttggtttctttgtttcgacttaagcaagtcccaagctatttcagctgaacattttacatactaatggagtctagggaagtgactttggcagctgttcatgggataataatgaaatacactatttaatactgcatgctgctgctgtaaaatgtggggagtattttatagagatcctggtgagtagagctgtatccactttaagtttagcaattgtgtgaaactgaatgaggaagttcttttttcatatgagactaactagtactcttttcttacaggtaaagaaaacgtgcacagaatcagatgttcccgaagcccagaattccaggtacagtaaaacagaggccaagacttcactaagaaaaattgcagctttggagaactaatatgacgttatactccagatacaactgtgatgtaaaacatggggtttaagaacctatctgtatggaaatcatacattagactggctgggatgtcattactcgtgatatttaataaaaggacactgatggaagttaactttaaagaacaatagtggaaacatctctaggaatacttgaaaatatattcccatactatttattaagttcatcctcaattttctttctattctcttcttataatgtattcacatctgaaatttttccagaaacttaataccttttaaatctgtttattgaagatctgcctttttttttcaatcaaatgttgctagattttgagaatttcatcaagttggaacaaccaaaactaactgggcattctctttgtgcttagttacttcattcatgtctgactccttgcgaccctgtgtactgtagcccaccagattcctctgtccattggaattctccagg

SEQ ID NO: 37211 - DNA, 730 bp, Bovine  19866882155752
  misc_feature (1)..(1): n is a, c, g, or t
natgggaagaacaacaagggatgcatgaaaaagaaagtaggttacagaatatgtaggtgtaataaaagttgccaagctcaaaattcttcgagatgtttctgtgagactagctggtttcaattatatgcgtgttttctaagttgactagccaaccatcaacaattagcaaacacaaacaaaacataaccttggctggcccttactgtcaaaaatcaagtgatggtaatttataattccaggaagatggctactatcaaatgaatctgtatatcactaaggacccaaacgcatgtgtgcgtgctcagtcgcttcagtcgtgtctgactctgtgtatccctaagaactgtagcctgctagcctcctctgtccacgggattctccagccaagaatattgaagtgggttagtatgccctcctccagggtatcttcctgacccagggatttaacccgtgtctcttgcgtctcctgcattggcagtcgagttctttaccactagtgccagctgggaaaccataattatcatgaaattcagcttgttatcattttttagcatgagaaattaacctcattatttttaaacattttgtgttaaatggaccattttgcaaaatccatgccctgtcttgtaaacagttcaaaaatagctcagcatctactttttagcttgacttcatttaagggagattgaagccagacattactggtcaccctcgatctgtttattggaca

SEQ ID NO: 37212 - DNA, 1363 bp, Bovine  19866880441661
  misc_feature (1)..(1): n is a, c, g, or t
nagacagagcagagtttcaaagtcccaagtcgctgtttgttgtctgtggctaagtgaaactgaggttaaatttaagtggcttcaaaattagaaagaaatgttgtcttcttcttaaactgatagaaactagtgagagactctggaaatgtgagaataaagtcaataggaacctaagaaaagcaaagcagatgctctagtgaggagaaggagcttttgacagattttcagatgacaaaaagccaatttttatctggaaattgttttttttttttttcaaataaatttgtgtagataagaccttgctggagttaaagaaaaaagaaaaaacccaaacaattagaaaagccaaacaaaactgcttacagcagaactccagatatctgctgcaaaacaattagtattagcattgctggagcattcccgaaatagatgagcttcactattagccttctgtgaattcaagcaaagaggcatcattatccaaattatatgcctggagaagggggcttctgcaccaagatgaacttgtgaaaagaacgtttaaactcaaggcaattttgcctatctgtaatttgtgctattccccttgctatcgttgaagatatttatgcttgagcaaatttctcactctcaatctgatttctcctttttcttaatccaaccatgaagtcataaaatcccctgtttgggacaatatgatttgctgccatggaaacaattacaatatcataaatttatcttgccctgtgatatcaaagaggaaaagcaatgatactaatattttgctgttaaatagtgccattcattccgcagtcactggctggtaaatatcatcgatttgcagatggggaaaactgaagctgggagctctcaggctgggatctaaaactcctgaattttagactgtggcaagaatgtccagctctttttgattcccacccagagcagcagttaaggggccagacttttggtctccatgtctctttttggatgagggtggaaaactgcctcctctcccagtgcctgtactttaccaactgttcccaattatgaaagtattggatggaacctagtttgataaaatatataaacgaaaagcctttggcaattgccacaatagtgaaaacatttatgtacataggaataagaaagaggttctgaaaagtgcattaaaaggtaagcactcataaccagcccagccttggcctgacattccccgagtcttatctatatgctcattctcttggttccttgccatccgtggatttacctagaagctaatggcacttgaacttcagggctcctcacatgtatagactcttctcaaggctctaggaaggggtcctagcattgtgttcactgg

SEQ ID NO: 37213 - DNA, 1383 bp, Bovine  19866880472866
  misc_feature (1)..(1): n is a, c, g, or t
natgggggcttcttgaaggcacacccaagttgacccccatcttatatcaaggaaaagttgtgaggcagagagaaggttatatgtgaactttgtccccaaaaggaaaacagagagtaagcaattctcaagcctagaggagacgtccactgggagaataccaactccacatgccagctggaagggagcggctctcaaatctgcaagtcaagggctgagtttctacagagttatgagatttaaggggagggtgttcctcaccagaaatgaacacaggtcgccatgaagttagggacgaaagagatattctataaaaagtgctaaagaaagaagggcggggcaggaggggaaaaggaaatggggaggaagggagtaatagtcctacagttgtaattcacacgcagctcaggatctggcagcgtttatggtaacagcctgtccaataacacacacaatacacaatgctctaaggacctgtaggatgttgaaatgttttcttgaacgagattcacaaagggaattcttgttgtttgacgttccttcaggtttgttaggccacagtgacctgtgcgaattgctgtgtgccacggggtagtgattagtgtatattcccactggctgtatttattcaagcccaagacttgtctctccagtttggatgctgctatgtatgcctcctacttaattcactcatttacttgggccaggaaaggaggaggggaaagagaatatcatttgtggagatttcgcctaaaattttcttttcaataactctaaggaaattttccaacttgtggttcttttcaaaagcatctcgtcttttaacaaaatctctttaaagttgcatcaaaagaggagagcctgcacttgggaattcatcaagataaagtctgggcttctccacctttagacagcagctccagggaccaaaactattagctgttgaccctgtgaatgtttcctggccgagtggacaaagccagaccgagggtccacagagagagtaaaaggcccccaaggtgttggcccctccgccttatttccgggactacatcctgttgccatgggaatgaaaacccttcaactattgtttccagcggctggctacatgcagggaaacgctagtattattactattattttgcaaatagcatctataatttccaccaacaaattctaaaaacctataaccacttcagagtagaagggaacaaataaattgcttttcagtttcttttccttgcagttgtcctttttgagggaaattagaaattataaagcaggagaatgggcaatgagttctcatcagttgtgagttgcaagctaaacatctatgctgtatccctgctatcaggtactcgaaggtcttcgttgggctgaccgagt

SEQ ID NO: 37214 - DNA, 1996 bp, Bovine  19866880553164
  misc_feature (1)..(1): n is a, c, g, or t
ntggaagaggtaggagaaaagtaaatgctgtctgaaagcacacttaagacatcccagggcctcttgaacaggcagtgatcatgatttcatgaatgggactcctagcctagatcctagttacttttctctacactgtgctccccaagtctgccatggaaggtcggcatctcggagacctaatagtaaaagtaggtgccctcgtatgatctgggtcatggggaaaaacagaggaagggaagggcagcttatgtgataccaaacaggaagcagtcaggaccacaggagaacagtctaccaggaaagaactgcctttctcttgatgagctgagatcttttcagccctgaggacccctcccacaataggactgtacaccaacatccaatctgtgctcagttaggaaaacagaaaagaaaatgtggaggatttataatctcagctgggtaaaggtttgcaataaatgcctctgataaaaactgtgttttggggacttccctggcagtccagtggttaagactctgttcttccagagcaggggatacggttttgatccctggtcagggaactaaaatcccacatgctgcacagcgtggctaaaaaaaaaccaaactgcacttcccatgagaaaattatcaagctatcagtcatttacactataagctaaattactcaatcagctacttcccttctgatgtttacatgaggagggagaaatgtccagtttatatgagaattggggagtttgggtggtgaaggggtaagtggggaaggagaaggaaaggttgtgtagagctttgcacacttcagaagaagtcaggtgtggcaggatgtcacagtggggccctgaagccagaggaagtagtgtgacattcaatatgtgtgtgtgggatgttcacagatgacaaagggaccagacggtcctatttacaaaagtatttcctaggccagagatcctgcatctttaactagtattggctagagtgtttaatctgtgagttgggagtatttgttcagcactgacctgcgtacctgaaaaatgaacactttatttgcaggcagttaggaaaagaaatcttaagaataaaaccgagaaacctccaagatctgagctttatccataaggacagcagcatttttttcctgaaagtgaaatagattatctgcttggggatgtgaactcttttcagtctccaacccaactgctatgaaatctacatggaaaccagagaagctgagtttgtgtccttggagaaccctgatgatatgtagctgagctttcggttaaatgttttgagacctggtaagaactgcaaactcctctttctcctagttcctctgctataaaatggagtaaaataaaaacaagggtcggagggttatttcacttggagaagatcccaggaaggagcaagtcattcatcaggtgcaacagatgtggtccagaaaaaagatgagccagagcaaatccatctgaagggcctgatccttgttgatagctggcctgaacgacatgccaggattcctccaccctctgaaagtgatctatcaccactgcaccatcaccttcttatggtaacaatttctttacttaccaaatacatataaaggacagaaaatttttacattaaaaataacatttattgaactcacctttaatatagagaagtatgaagggataaataaaagataggctataatctctcttttgataaaataaatcaatgaccaaacctatccatggtcacaaaatacagatatatggaaaggcctaattcatgatttatttattcatttcctgattgctggacacattctgtttatccccctaccccaacctcttactttttttttttggtatggcaagaatacacagaagaactgtacaaaaaagatcttcacgacccagataatcatgatggtgtgatcactgacctagagccagacatcctggaatgtgaagtcaagtgggccttagaaagcatcactataacaaagcta

SEQ ID NO: 37215 - DNA, 1013 bp, Bovine  19866880570611
  misc_feature (1)..(1): n is a, c, g, or t
ntaggtgtaataattatcctcaatttcagatgaggggaatgaaaactaaagaggttaaataatttactcaaggtcacaaagctagtaagtgtcagagctgggagttgaatctaggcattctggtgtcaaaatttatgctcttaccccactaccgctaatttgactaacaaaataaaaaagtatgctggaattagttctattaccctttcagctgattatcattgttttaaaaagtatctgttggttgtgatagaagcctattatttagagagggaaaaaacatctcttaaaagcactgttacagtttttgactactgtctgcctttaacttgcttatcagatttacccactagaccaaggaagagaaacagtgcacatgagcatgcttgtgtatttgagtgtgtgtgtgagtatggaaaaatgagcaaaaatgtttgtcagtgagatggaatggtaagggcagaagaaagagggaggaaagaaaggaaaaatggagaacaagagtgtatgagttttcagagaaacccatgaaaacatagcaaactgaagttaaggtaatagtatgtttgctatgttgacttaagtaaccaatgtacagcttaagaaaataagtgtttctcctctatcaatagctttgtacgtagatactagtttttcagtcatttcattttccgctaacctttttcatagatgacagctcctggtttaggatggagcgcatgactctaatcaacttttcataatttccgaggtctagcaatctgtaatataactactggactcagataacaaaagggtaggaggtactaggagtgaccctgtgaaaccagagtgaaaatacacagaaagtaaaccattcctgcatactttgaggaggtagatggtggagttgatttcgttcacgtgcctatgagctgcggcaccagatgacacactcagcaggccggatttgctttcttcaattgagagcgctgctaacccgaaggtcatcagtcagatcccagatgcattta

SEQ ID NO: 37216 - DNA, 800 bp, Bovine  19866880587278
  misc_feature (1)..(1): n is a, c, g, or t
ngaatgaagtactaagccatctatgaatgttatgccaagtagccagtcagaaaagccacatactgtgcagaagaggcaaatccatagagacataaagtagattggtgttgccaagggctaggctgagaacgggatgggaaataattgcttaatgggtacacgtttctttttggggtgatgaaaatgttggaattagatagtggtgatggttcctttgcaaatatattaaaaaccactaaactgtacactttaagagggtgattttatggcatatgaaatatatctcaataaaaataagacaaaattttaaagtgctaaccacaaggaatttttccatggtccaagaagtgatgggggaaggtctgaagaacaatcagtgccctgtttctttctgaaccctttgtttggcatagacagtttaaatctacctttatttttatcaccattcactcttgtcctaaccgtgacatccaaaagtgaagtgagtgtaagaagaaagtgttcttcactccttttggagcttttccacggtttgctattaaaacctcatttgtgcatttgggtttgggaatggttccagcagttagttgactgcagtgttaaatctcaccattggggtctaatgcttccatttctttttattaagtgcttttgggtccctgggcgtcagggaatggaaggttgcacagagggaaagagaatgtgttgccagggtattagctgccgcctagcagcctgagggtcatttgaacaggacaagccagaaagaggaagccagcagatgttctaggtgccaggaa

SEQ ID NO: 37217 - DNA, 2072 bp, Bovine  19866880723604
  misc_feature (1)..(1): n is a, c, g, or t
ngagggggaggacccaagaaaggacacgtcaaggacagggaggaatccccagtttggactatggctctttcaggggaaatagaagcaagcagggcggggactttcagtggttaagattccacgcttccactgctggtggtggtggggggggtggtgtgggggggggccaccggggccatccctggttgaggaaccaagaccccatgtgccacacagcacaggtgaaatgtggtatgagggagggagcagcaggtgtagctcaaatgccgcagacaggtaacctgcacgagccaagtgagccgggaacaagcaaaattaggctgcccccaccctcctgtcttctccatgttgccaaataggttcagaaaaatactcatccattttgtaaaaatcaacactacaaatgtgatcatgaatggcaaccagcactggaggccatagacttcaggtgtatgaacccacaaaaagggcccaggaactgcctacagggggtaggtgttggggtggctaggcagctccagccctagcattgactgtcaagggatgatgctggcccactgtggccagagcatgctatttttaaagagaagtcataagtttgggtttttttaaagtgtgaagtatcctgactttaaaaatgctggcccagacttttacaatacactggactcgggaaaacaggcctgtagtccatctctatagcattgtgactctttgtaagcctggtgttgagggggaaatgtcaactaaaatttctctgtttctcctgaaagagccctttgtctctaggctaagagcatagacctggtagataaaaaaaccattctctatttttacttttaaaaatatccagtatttgaactaaaaactctactttcctataagagtttacatcctcagatactctgctggtaaacatttaatgcaaactcttaatatcatgtccacataaccgacctcagctaactgttacaggtgttaaaatgtgtgtctggatgggaagcacgaattaactggcacaaatttttaaaaggacaaaaaatgaggagggaccaaaaattctcacagaaaatatatgagcatgcaagctgactctcagtttatcaatttcctcaggaaagaacttcccatttgcagatgacttatagtacaacacacccaacagtttcattagaatgctatttgtaatcagttcatcataccactatgcttcaggaagtgaaagcaagaagtatataaaaccaacaactatgcatatagaacattcagaagtcaaatagcgtttctaactgggaaaataactggggaagtgtagcactgccatagaagaaacatagtgaccattgtgactctcaagtgagtgcataagctttgaaaaatcttcattatacacttctgaaaactgaaaaccatgtatcgcaagaggtgaagaatctattccgtaatgactcgtatacgataacatcattgggtggatcactgtcatagaatctatttcaagttcatttcactttgctctgattctcatgtttactaagaactgatgtggataatgataaatattagtgtctctactttcaaatgattttcctcctgatggaacaaatataatctcaggcaggtagaaagagaactcacatgaaagccctctgcacgctaggcttaagtttctactgaaacctaggagaaagccttaacaccgtatgttggagagcatcttgttaacactgggtgacgttcttgcctacggctccctgtgtcttggtctttccttcttgcgttcggtgtcttcagttcacatactcccgcacttgcttgtctgttcatcctgcctcatctactttgcctcatcttctctcactcattactctggattttctctttgtaattgttgagtgtgactgttttgcttctctggtctcctgtccttgcaggtaccctttcccttccttgcctaaattaacgctagctttcaaccaaggtataaactgcgagctagtgttaggtcaccacaaaatgcatccttggataccttacccttgaggtgcttatatcgagttcacagattcaca

SEQ ID NO: 37218 - DNA, 864 bp, Bovine  19866880741740
  misc_feature (1)..(1): n is a, c, g, or t
naatacacagttcttcccgtccgtgactagtgtgaaacgtggaaacagctgcagaccataagttctgttgttcctacatagtgacattccctgcgagaggttcccagctgcagttctgtaaacatcatcagtaacatcaatgctgtcatctgccaagaatggtggatagtcccagatggtgatggggcacttatggaccccccacaattacttttagcctctaaagcagggaccatgaccttttgttgaaagtgtttatttcacacacttcattcagtagggaaacctgaatgataaaggtagcatgagggaaaaaccaagcttttacaactggcatttggtgaggatttaaaggaaaaacttaacatagtttttccttgcatcctaactatactattttagactgacccatgtaaaggcaaataatgctttaaccaacagagtgagaaagattaagcatccagtcttgggtactcacaaaatagtagcaactaagcagtcctctgctttgtaatgtggatttttcaaaatgccagtatagacagtaacaactcactgatacaataggagaccctcagaaagcagtctttctgcttgacttctattatccactcctgtctccattccttagtcctctcctcctgctccaggcttcagttctgaaatactggcaaagaccacattgcacttcatgcaggtacagtgaggaagacgggtgctgtcagtccttccatttctgcacgttgctttcttcctggagatcacaacatagtttacaatattgcaggttcccagaggcctacaggatcaaagtcagcctacatgcaagggcctgattatctctcccaactttgcccccttgct

SEQ ID NO: 37219 - DNA, 1173 bp, Bovine  19866880773323
  misc_feature (1)..(1): n is a, c, g, or t
ncagtaaaatatttccccccaacgtgtcgtttttatagtctcccgtgattctgcttactattacttttggggcattcctccaaattctgtttgtcttaaaaacagcagactgataatgtaacgcccctaaatctctggacttggccatctaaatgagatctttcatccttttcttctccagcttcccagaatgcattttcatagcattcttgcaagaggaaagattatcaggaaaagaaaaatgaaggggagtaaagtcgaaggaaagtaccaaataccaaagctttgggtaagaaaatatttaggcaacaagcacacaaccacaccctttctgggaagatattactggccttgaagttgggttagtggatcccaaaatacacctcacaaaaagcacagttaccctcccaaaataggccctataattaaagtcttttcaagtggattgtcctatatcacaacttgacatatgttgctttaatctccctgcttcggcaaatgtagccatatcgggctacacaagctcacaacgactcccagttaaaccagattgtactgtcactaggaaattgatgcaaataaacagccctgagtaccaaaatacccaatctcaatcatctgtaatgagatctctctcctccctaagcacattctcatcacaccagaatcacacccttgattcaaaaggatgggctaacccagattgaaatactgcctcatctcagaggtcatctgaagacaaacacatctgaagaagccgggctgaaatttaaaacacgagccaatctcttttgtgtgaatgccggaaccaagttgtgtgagtctcgttttcagctttagctgacagtcctcagtatatgtcttcagacacccatctgtctgaattcatttagatctttctggcttggagtctgtggtgatgtagcctcttaggagcactttcagatttgtgattttttgaacaaacttctttatgttttctagttatatatttacatttaattaagtgtcaaaacattaaaaaatttaaaccttcaaaataatgagtaccttagacattgattttttaaaaaatattattatttccatattggtttcacagcctcagaactactaacgtcttgggcaggattgtgtgtgtgtgtatgtgtgtgtgtgtgtgtgtatgtgtgt

SEQ ID NO: 37220 - DNA, 1621 bp, Bovine  19866880878635
  misc_feature (1)..(1): n is a, c, g, or t
ntggttacctgaaggggctctcacctttcacagtcagccatgtcctatcaaagtcattctgtaaacagccatctgctatagttgttgttgttcagtcgctcagtcatgttcgactctttgaaccccatggactgcagcatgccaggctttcctgtccatcaccaactcctggagtttgctcaaactcatgtccattgattcagtgatgccacgcaaccatctcattctctgtcgcccccttctcctcctgcattcaatctttcccagccatcagggtcttttccattgagtcagttctttccatcaggtggccaaagtattggagcttcagcttcagtatcagtccttccaataaatattcaggactgatttcctttaggattgattggattgatctctttgcagtccaaggaactctcaagagtcttctccaacaacacagttctactacagagatcaatcctattccttaaatgacaaaaggagaccatcattttatctgtaaggattcttttctttctgctacatgagaaattaggggaatattaaaaaaaaaattagggaatagtttggtgattcctcaaaaaattaaataaagaattaccaagtgatccagatattccacttctgagtatatactccgaagaactgaaagcagggacttgaacatatatttattcacgaatgttcattgcagtgctattcacagcaatcaaaagatgaaaagagcccacatgtcctcgatggatggatacacaaaacgtgccatagcataagacagagtattattcagccttaagcaggaatgaagtactgatacacgttacaacccaaatgaaccttggaaacatactaagtgaaataagccagacacaaaagaacaaatattacattattccactgatatgagatgcctagacactcaatttcatacagacagacagtagaatagcggttaccaggggttggggagtggggagaatgaggaaatatcatttaatgcgtaccgagtttctgtttgggatgatgaaaaaattctggaaattggcagtggtgacgattgtagaacattgtgaatgtacttaatgccaccaaactggaaatggttaaaatgacacattttatgttatgtatattttagtacaattaaaaaaaaaagcaaattaggagtcttggctctttcatcttccacagcctcaggccaggcatttctcatacaagtcccggaagagccccggaggggacaggtgagggccgagggcagggtgggcttggttgttgcagcacagctgtgcctgtgaagtaggtggggctgtttcacagactctgcttctctttgggattcagcatcgatgcctggctcacaggtaagccttcctcctagagatcccaaatgtttttctgtttgcagttttcacctgtcttttgattgggttgaagccagctccctccctgggattaatattcacaacaagcagcaagcgattaatttaaccagttgaaatttattgtgcactcgccttaactccaagccagcttctgctgggtgtttatttttcatcattgatgcattgcacatgacagcccctaagcatctgaatttaaagcacaccgttgtgca

SEQ ID NO: 37221 - DNA, 1204 bp, Bovine  19866880904235
  misc_feature (1)..(1): n is a, c, g, or t
ncctatgaaaaagaggaaggaaaaaagtcgttatcacttatagattatttggaggatttttcccttttcttctctctctctttaaagaaaaagtcttagactgtagcagtggtaaggggaaattgtctaaatgccaagctaaacaccagtcaggtgagaaagttgacaatggacagggactcaagggagtcacaaaagctgcagagagcctggcctgagatgggacggagccccgctggccacgccccacgggaggcccctctactccagggacacagaatgtaaagctgtcgcctttgctccaggaaccagctgcaggttccttgttattcctttctttttgacagaatcaggttctcagacatttaggcaggaaattatttatgtgtcaatatttcaaaggcattttattgtgtgagggagagaaagaggcaaggggagaagccaatataaaaacaaatctgtctcgagatgcatttttttttttttgagattaaaaagtgtctattgctcctcacatcccttctttccttccagctttatgatgttattaaggtgccctttccaacacaatattttcaaatgatccaagccctggggatccagctgatgtctggctgtaatgaaatatatttaggcatttgagagatccttacaacatgcgggcattttgagcacatcatttaatctcagggagatattttgcttcatttctcctaagtatttcattagaatccacaccaaccaaagtgaccccctcccctaatcaacaagcttgccaagtgttgttaatgctttttcatttgctctttagtgcccaggatcaatagacagatatttcttagtgccattttcaaaaaactgccttttttggtgctaaaaaattatacacacatatttttaaatgaatgagcatagagcaatagtggaagtcaagccatgtagtattttgaagtcttgtcattatcctaaagaataacagaaaatgtacatatgggtcacataaaaacaattgggatatagacctctatctggacatgcatatgtccatccattggtgtgtatatattgacatagtggggttgacttgctaatctaggaaagaaagcaatcattttaacaactacatgtacaatcactctttttaataaaatgtacaaatcacacacctaaacacctaataattatatgtttctaggaacaa

SEQ ID NO: 37222 - DNA, 1020 bp, Bovine  19866880993310
  misc_feature (1)..(1): n is a, c, g, or t
nccagagaaatctaattaggggcacagactgagcaaagctgtgatatacaatcgactcagaggaccatggagatggcgagtggcagaatctgggctaacagaaccaggaatggggtggctggctgaatgggttctcgagaatctctaggtcccaagttcctaggtggctggggaaacccagtaaactcaggatgatgatacttaagtcacccttgaaacccaaccaaggggctctggttatggaggatctgtaggacctctctgtgagcacaggcctgaagaccccacatgggcatggatccaagagggtggaggatgaagcaaagtactgctgttcttgggatgcttgttacaggcaaagggactcgcttggggcaccacacagaaaagttccgaattttgctctcacttgtcctcttgttgccttcaccctttcctgttgggatgttcagccttctgagaccttgacttctgagccacaagccctagcatctggggcaatccaagcagcacatggaataaccaacagaggtttatttgacctgaaggttttcagaaacataaaagttccaacagagatgtttcttcctaatgtaaatctttggggtcaagcctctttccactctccttggccctgttatcgaaaaacaatcacaggaaaacaaaaataaaaacaaaaaagtaggcttctatttgtgaatcagcaaagagagacaggaaagtcagtgtcacatctggggcatggtggcagacactggctttctgggctgaactggccgagggcccgagggtcaggctgtcacctggcagagccacaagaaaacacactagcacaaagcagctgcttgaacaggcgtcatcaacgtcccctccctgccaacccggagaatgaaagccaagggggttcgctctccactgctggacaaaaactagctctgccaatctttccagggtctattagaggttccttgccagatgattctgcaaatggggcctcctcctttcaaaaaacagtgaatt

SEQ ID NO: 37223 - DNA, 1001 bp, Bovine  19866881015132
  misc_feature (1)..(1): n is a, c, g, or t
naaaatgtaatactttttttttttttttttttgtgcatcctcatgaaatgtaaagtagtgcatagttatttcactggaggactcctggacatagagaaagtcatttcattagcagtacagaacattcaaacacttattttacaatgggaaatgtacaacccctccctcaccttcccgtaaggtttagttgtatgagaaaatttagcatgttgccatgactacaatgctatggattttagaccatttaaatgtggttacaaggtttattaaattaaaaaagttggaaacatttcagcattcatgtttttatacaagaagtttgtgtggtatccatcctctagtttccctggtggtactggccacttgcttgctttaaagaggctcacttttaagtttcaagaacaaatcatagtaagttgaagcaaatactggaaaaagaaattgtgaattcagcttgggccctgatgaaaagagtcaaagtaacagccatctacaggcacagtcatgaaccaaaaaagtacaatccaaaaaacaaacaaacaaacaaacacgttttgcaaaagccaaaaagcgaggccactggttttcagaattacaccagtgcttttatgttgattttccagtcaaatcctcattctgggtcctgaagctttgtggccaacgttggccacggtctccatgttagcacccacatggtgtatgcacagggatatatagattatatatattcatatttataaaaaaagaaaaaaaacaaacacctgtcctgattggtttttgttaaaacatgaaaaaaaattttattgttttagacaaagaggccacttttggaaaataatacttttttttttagttgaatcaggtgaagacagagttaaaatcacataggatttgcattttaaaaaaaggaaagcactaggatcgttggcactggagtaactatttacactgaacagaggtttggccttttacataacatcgatacaatgcatttccaaagt

SEQ ID NO: 37224 - DNA, 1986 bp, Bovine  19866881056432
  misc_feature (1)..(1): n is a, c, g, or t
ntgagggctcaaaacctgtgtgtttttttgtgtgtgtgtgttttttttttttttttttttgaagctcctcagtgattcttaatgggtagccaagattcagaggtatacatttagcctagtcaacatagctcatagagcaaaaggaaccaaagaaggccaaccccaattaaagactcaattttactattgctattcattatcctaacagctatatttatgtaattactaaatgcaatattcttgcccatctgccttttcaaagaattctctggcacagcacagatgatacgaaacttttactgacctctccacaggtgtaacacatagcagctaaactgaacaatttcaacaaagctcccattctgacatgctacacagaagcaatacaacaccgtaactagtgccagcagtgataggaaatatcctaacacaacaatcaacattttcactgtggcacaacagggcttgttcttggccccttttctaatttgttttttattcatttatagaccaccatgatttttttaacaaccaaattgtatggttttattttctcaattgcgagttaacctgaacagactattggccctaattatggacagaattaagaactggaaatcaactgttttgtaatgaaggaaattattactgctaaatatacccaactttttaataatatatggtaattagccctacgccacaaatcaccttttagataccttggagaacatttcaaaaaagatttaatgtcagtaaatggcatttccaaagctaggtttctgtgaatgccttctggtactttttatttctatggagtagaatttaggagccttaatcacctaaaaccattttctgaagaaagtcctggcaatgccttggggaacccacacagctccccaaagggagatgctttctaatacagatagatatcttttcaaactctcaatttttacagactttaaccccatatattacttgattatttactaagatgtattgtattcttctcaactggccacataggacagctgcactttaggcacttggaaatataatcgtgaactcactggccatcaatattaactaaattaatattagtcaattgatgtaatatatctaattattcataaatatttgcataatggcatgaatatacacagtccttacacttctgaatattctgaaaatcaccttgaatcagaccaggtcggcatgtcatattgggcctcttagaaatgcattttctgaattgtgcttcattgtgatgcctttctaaggattattataaggaatgtcttaatgaagtcatcattacagttattatgatagagccagacactggaaaacactttatagttaccttgtttcatcctcttaacaaatcttttgtcctcatttaatgatgaggaaactgcaggtttaagtgatttgctcatggttccacagctagtaagtggtagagccagatttcaagacctcatataagacttagaagctgagtctagacccctcccaactgtctaaacatggtctaggatactgctcacagcctcaccagcgctcctcttttgaagaccctagggagaaggtcctagctgtattagaacccaagattagttattattctcctgatcagttagttgttaaatttatgggccttgtgaattgtataacaaagtatcctttcaagctctttagttcactttaaccaaataggtagttcattgtggaattcatatttaccctcattcttagacctactttgttgcctttttgttttgcctttttctttcacctagctttaaatttaagctgtattatcttctttatatcctttctccaacaagataaggacataagtaaacaaaggcttaggaggtcatgagtaaagctcagagaccgcctaagaaatgagggaagcccactgagaaccatgggaaagcactatgcccatttctgtactgctgcgctttaatgaaataattt

SEQ ID NO: 37225 - DNA, 796 bp, Bovine  19866881269257
  misc_feature (1)..(1): n is a, c, g, or t
ncattttcccttttttcccccaggaaaatgattgtcccctgttcttaattagaagccagccctccacatcttccaaaattctcagttaagaatagagaaaataatatgttttcctgtggccttgtccactaattgaagaatggccccataaaaccagataagtacatttcccctgatctcctgcatgctgtcttctttagattttggcctggtgtccatttttcttattcacagaccccctgaaatctgtcatttaaaacactttaggtgtaaggttgcatttagaatcagaacaataagttgcaagggctgtttcttctcattcgactactctcctgtagtgatgctcactttgactcccaaatcacagtcctcttattccctctgatttgaaagtatttctatgtgtttgagtggatagctcatgttcatttcagaatgtcatttagtagctacatttctgctaaataaccagaaattatagttgaccctagccaagaagctgagtacctagattttgcttccaagtatggtgctgagtagaaatgttttcgtttcatcttcaatattaatagtagactgagagtgatggatgggcctggatatgagaaaaagaaaggaaatgtagattgcaatggcagaccatcatctacggaagggtttcttgacctggggtttttatcagaaccacctgagaagctgttaaaaatcctggtgtccaggccttgctgtcagagcccctgaggacatgacccaggcaagtgtacaaggaccatctgctcttcctcagctgcat

SEQ ID NO: 37226 - DNA, 1166 bp, Bovine  19866881276163
  misc_feature (1)..(1): n is a, c, g, or t
ngtcttggctctggccgtgtttcgctacaatggcaaagttgaacagttgcaacagagactctatgacccacagagctgaaaatatttaccacctagcctttcatagaaaaagttagccaactcctgcattaaacaaataaacctccaagtcaggctcctgttgtacccacatccaatcaatcactctgtcagttctgcaggcacacacgccaagctcaactctgagcactccatgagaaccatcttacttaattctcacaacagcctttggaacatactgttaaaatcggaaagcgtggggagaggctggggttggggtgtctgagtagttggtaaagctttaatggagatgaaaatcccaggaggaggagctaagagtaggcagaagctggtggactcggtgtagactcgggtgggtgaggcccccacggacacctgtgagaggctagttttcggtgtagtgtggtggggaagcatgatttcaagtctggcctgatttcagggtcaaatcacaactcttccactattaactgtgtggctttagttacttcacatctctaagcctcttagcttccgtctcctcacaagtcaagtgggctcttgtcaaactcaagtaagggaatatgcatgcagcctcgagcatagggctgggtctgtgggaagatgtcggatccatgtgggcccctccccttcatctttggtctgtcctgtatgtgatggaaaactaccctaaaatctcagctgacattgtggttattctcctcattagaaaacatgatggcttccaccggcccctgctagtgcaaggagacactagtttggaaaggctgcccagcacacgcctccttaaactcctccccgcccctcgcattgcattttctattgaaagtcaagttttcaccatgtaaccctcctgattaccaaaacagctgatgatactggggacagacgcctgataggggaaccagtccattgactggccactagctaatggaaacgtgtccaagaatcaagaggctctggtaatggatgctgggcctacaggttaggttgagtcaggatcagagatggccccatggagagcagagcaaagcagtggctagagaccaccgaccaccaaggagtgagtggctgggaacagctgccgctcagctcctccatcagca

SEQ ID NO: 37227 - DNA, 1339 bp, Bovine  19866881353325
  misc_feature (1)..(1): n is a, c, g, or t
ntcgctggatttcctctctacttccctagatcgatgactgtttttgtttggtcgcctcccctctcttatctctgcggccacaggcggaggggactgagccagaaagaggccaccaagcttgggccccggcggagatttgctgggactgagtgagaagagggataataaaatcacccttcttgcccctcctcccaccaataaatcacacagactcgctgggtgtgtgtgtgtgtatgtgtgtgtgtgacacaaagagccctttcagtgcacagagaggagacgcacaaagtgcccaaggatgggcgcgatgcttcttgtttctgttccctggggcttcccttttgctcagataaagcagttgatcttctctctgagagtctttcctgccacatttaccaaaaaataaaaggccccagatgcagggtggcaggtgctggtgttttgctgtattcatggaccggtagtgttgactggcggctgcagtacttcttagattgaagggggaattgatttcagctgtctgaagagttgctttactctcagggtagcaccctcccttgcccagttttaactccctttcatggtagggggtaggatacatgggtgtgggagagggagaattttgtttccaaaagagagttatattgatgtttgctaggagtgaggcagcctaacttgcttctctcaagtctaaggaagactgaagtcatttgaaatgaagtcttgtccacccagtgatggttgtttcacccttgtatttaaataagctcctggggacattgctaacacagcagtaagtcgggatttggaagaccactggggactgtgtctctcttccctgcttcagggtagccttcagacgcccacttccttcctctcaccgccaagccactgccgtactttccaccctttgtgctctttcttccaagtccctgcccctctgtccctcgggtcctgtgctttcagacgaagggactcacagatttttggaggaagtggttttgttaactgtctcaggtgttggaggcacttagctatgagcgaaagatgtggagagtcttttgcctgatctcttaaaccatctgcttgatgttcctcttgaaaaggaaatgtaaatgtaagtctgggggcttaatgttccattctgtaagccagtgactgttacgtgcttaatcaataatgtcaaaacttaggtcgaacccattgattcctaagagcatggctctttgactattataatagaactgtctcaagttcttcaagaattttattagagaagaattgttaggttcattaaacatttactcctgcactttctaaggacattcatctggaacat

SEQ ID NO: 37228 - DNA, 1890 bp, Bovine  19866881497596
  misc_feature (1)..(1): n is a, c, g, or t
nactttcttaattatgaccaatagtgataagacattttggaggttttaaaataggtccattatttcaaatgttttcaatattttgatagttgctttgctgtctatattatggaggaaattcagaatttaagtttttacttctttttaggggttcttatatcacctctcatttttgccctaggttgatcccttggggatttttgaaatttacgtttgaaagggtctttttttaaatgaatgcagtaatttttattttaaaatttttcaaacattttaattttattgcgaaaaatgtcagacatatgcaaaactaaagcaagttatgtctgagctttaagtgagatgtcaatacagggactatgtttgttaatgcggcaatattcagggactcaggaaatgtttgtgacttaccgcatgcttgaaagaatttgtataaatcaaattttttaaattgttcagtcatttccccatctttaacaggttgtatttcaaatgtttgttggttgttagccaatttggggacctacagatgtgtttctcatagaaacaatcttaaaatggctattagcttttcagcctagctctcagtaattatctaattcatagttaagggaagcccacacatcacttttaacatcgtttcagtgagaaaatacttttacagtcgaagtcctggggaacaccaccccccgcccccatcttcccttcctctaagtatggatgtacagaaggagagtcaggtcctccttaatgaagattcatatccataatgggtcttcaccaaaaggagcaggaactcagaggaccctaggagtatgaggtgggggatgggagtgcacactgtacattccattctgaaattatttactgtttccgttgctaagtggagtttgtttttgtgctttttttttctaaggactttttatttaaaaaaaaagtttcacaaatactctattgtatctaaagttttcattttacaggcttttttaaaggaaggcttctggttattttcttctttaagtttgtggcatagagggaaattatttttactggctgagatatgcctaagacaacaggaaaagattcctgactgctgctgctaagtcgcttcagtcgtgtacgactctgtgcgaccccatagatggtagcccaccaggctcccttgtccctgggattctccaggcaagaacactggagtgggttgccatttccttctccagtgcatgaaagtgaaaagtgaaagtgaagtcgctcagtcgtgtcggactcttagcgaccccatggactgcagcccaccaggctcctccatccatgggattttccaggcaagagtactggagtggggtgccattgccttctccgaagatcctggtacagccaagtaatattttttaaaggacaaataaataaaagaaacctgctgctgcgaggcacagccaaaataaatcaataaagaaaccttctggtggtctagcaggagtcagcacagcacgttctatcaccctagctatgttgcgtgcctttagaggtggaccccccactaggtctttccaaacaaaaagcggttaatcccaccagttggacacgtgtgtccagaagccagcctactgcactccacatagcacagcctgggggctcatgggcatcagttacacagtaaggcttaccaacgggattccttccgatgtattggcgtgaagcacaggaagacaggggagagtctttcccctccgtggggaaaaaaaaaatatatatatataatatatatttcagtaatatataaataatatatgttatattatataatatatgttgtatattatatatgttaatatatataacaatatatgttatatatactatatatattatataatatttataatatgt

SEQ ID NO: 37229 - DNA, 924 bp, Bovine  19866881747530
  misc_feature (1)..(1): n is a, c, g, or t
ntgtccccagagcaatttcagaaaaaacaactggttctcaaactggccaaccaacaaacagacaaacaaacaacacaaacccaaccctaaaaacaaactattaacactgtatcccagcaaccctgtcatgtgaaagtgaacaaaaataagttactcagtctggagatatctgcattcttacaaccagggtgttacctgctcaactcatcagcctcttgctgaaggttccgtgcatggtcaacagcttcctgaactaaatcatgactgaggttgctcaggttggatagttttctttgaagttcatttttggctccatctatttcggcataaatccctgatgcattctaaagaaaatattgaaaaaaaattgaatttagagggacttaaagtatttttcctagggagcaccaaagataatctctattcctccttactgtgaagttcagtaagcttcaggccagatccagaagagtctaaaaggctatatgtgcatgtttagtcgatttaattgtgtccaactctttgtgaccctatggactgtagtccacgaggctcctctgtgcatgggagtctccaggcaagaatactggagtgggttgccatgccctccttcagggtatcttcctcacccaaggatcaaacctgcgtcgtgtgcactgcaggtggattctttacagcttagccaccaggaagtctaaaagactatatacatagatatttacctatttgcatcttcaactcctctactgattcagacatgctctgccatctctcatctaaaaagaaaactaaatagaaacgccccactgtcctcacttctccctaattttaatcctttcatagcaaaatagaccccctctgcaaataaagtgtttatacatgctatctctatttcatcagtttaaaattcacactttgacttat

SEQ ID NO: 37230 - DNA, 653 bp, Bovine  19866881869781
  misc_feature (1)..(1): n is a, c, g, or t
ntgcccgggaactctctgccactcggtggccccacccatcgccgccccgcccccgctccaatcaccaatggtcgccacccgctgctcccgaggggctcgttgattggacagtggagcctgccactctagcggggcctcccgccctccctcactccccgctggggctggaggggctggagcatcagcgcgagtagctcggagcagccgcggcagcagcggcgcgtcgttgcagttgcgccatctgtcaggagcggagccggcggggagggggctgccgcgggagaggaggaggggtcgccgcgagccgaaggccgccgagacccgcccgcccaccggccgtgggagtagaggagaggctgccctcggagccgcgcgtccatcaccgccccggcgcgcggcgcttcaccccgcgcaccgagggctccccaggcgcacacaaagccgccgcccgcgcctgggagggatccggtcgccgggccggggacacccggcgccgccccctgggcactctcagaaggcccaccgactcccgggcccgccgagcaaccaccggagccgcttcggccgcgccggaggaggcggggagtggaccatgtgaatgggctccggagcctgagcgcagcgcaggtaagcggccggggatgcgccgcggg

SEQ ID NO: 37231 - DNA, 725 bp, Bovine  19866882201607
  misc_feature (1)..(1): n is a, c, g, or t
ntggaaaaactgaggcccccctccagtaagtgactgaggccctctccagaagtgactcctagcagagtcagttgatgaagaaggcaaaagcagaaatgtgtcgctccaaatccagccatcctccacctcagcacatttccccagtcttcatttcaatcttacagatgttgctgtctctaatgaggggttatatcacctgtcagatgtggttttacctaaatctatttcctcgggtatcagaataataaaaaggattacctagcaatggtaagcaaaaaaaggatgggaactgcccctgcactgctagaaaactgcacaggaaaagtgttacagaaagccacatgtagggattaaactgcccatttcccagagccagacggccagggccatatccagctaattctactggtgaggatcaaatccctttcctctgctggctagggggccagggctggacagaggagcgggggtgaagggaaacagcggttctaccccagaaagggcactgacctctggtttataatcggcatccatgctagtggttttctgcaacacatggtagaaagattgcttttcacatctgatcctcatttccagaaaaggaacttctattttaggtattcagttatggctcaggaaaataaatcgaaggtgaatctggggacccagagacaaacccaaaagaactggttggcactttcataacttgtagtgaaaaggagcaa

SEQ ID NO: 37232 - DNA, 1924 bp, Bovine  19866880494929
  misc_feature (1)..(1): n is a, c, g, or t
ngaggactcctgggaaagaaaaaaccaaacatctgagatgttgtttcttggcaaatccaaagttcaatatacaaataatgttggaagcaagcagaaacctctcaggcagctagttgaaaggttgggaaagtatatttggttgaataattctgctgtttctattgtttttcaaaggatatttttacaaaattacaccttaagatgtcagttcttcctgctactttctctgctggccacttcacagttatcaattataacataacaaaatggaaaacaggccgtgtgtgtgcgtgtgtgtgcacactcctcatgtagaagtattcttaaaagatcttcaggaactagactatgatgaccaatcaataatacttctactactggaggaattttcatattgaaatagaaaatcatttggtttgaagatggccaaaagaaagccagggccttttacctgtataagtttcgagccacgtcatcctcatctatcgcatatccgtggacgtggtcagtaaaactgaaacctgtgcccacctgaaggtgaaataaataagcaggtataaacagagagaaatgcacatcttgctgagagacaccacatgggaaggaaatcaacattattcccaaggtcatgcctttggcctcagctttttgacatcacccatgcgcactcatccatgctcacagaaggatgctgcatgtcaccatgtcccccttccctctgctgagcccaaataaactggcagtgcaaagctcttctttgatcctgcagtggggaccctgccagatgattatttaaggatgagaaactcacctttcctggcctctgctacagtagcaaaagagtcaaagttgcctcctctctgaaacctggaaggtgcactgctctgtcctgctaagaaggaactctattggctgaagataaaagctagctgtgtgtgtgtgtgcagtttttttccccatttctttacttgtgataaatgtggccactaaaccctttcaccttcagcagataaggggttttaaaataaagtttaactttaaactaatagttccttattcctggaagttcatagacaactgagtaaatcaatagaaaaagctactacttattttgggtcaacaatatgtacaaggaatgcacccccaccatatacatcagttgtaaatatttttgattttttgtttttttccaaacagccaagggaacagaacatttaattagactttaatgtaaacatggaattctagactaggaaagaagatggctgacaaaacatgacggaggtgaggggggagcaagaatgttggattttttccttcctatttttctgttttctctttgaaccgtctgggaagtgaaagaagttagattagaggacagatactcccaatctgcaggagttgaccctaaagttactctcctatattgtagtttatttgatttgatttcataaaaatgtcccaaggagaattctaccttttgctctccctgagatgaggcattcagctcactgtgataagtgaaaggggctagttttgactttttatatcagagctgtatttgaaagattaggtgttcccccgctacaaaaaaacccaagttatagagaaacccatattatcagtagagagaaagtcatcccttcctggatggtataactcagtgaagagaacatttcataagaccagaaatgagggaaggagagaaagcagcaaggaaaattcccaaacttggatataatggtacatattagaaaaattaaatctcaatttaaaaaaatgtttaattggaggataattgctttattgtgttggcttctgccatacaacactatgaatcagccataggtatacatatgtccccccccggacctccccctcatcctgtatcttgtctcacccctctaggggtcacagagcacca

SEQ ID NO: 37233 - DNA, 1665 bp, Bovine  19866880548318
  misc_feature (1)..(1): n is a, c, g, or t
nttggtaaatcaaaaataaaagctagaatactataaatgaattgggattttacattgaagaaacagaggccaggccttgttctagtcttccagtcactagaaggacagaaaaacaaaattacccttgcttatgtctgaggtttatttctgtttctagattttaaaacattcacagacatgtgcatgcaaacacattctacagagcaatgccatatttatctggagatcagacatcctacaatattaactctttgaaacataacccatatttgcagaatcctacccccaaagccctccatgcagcacataccagatataatgcctttggggagaagtgtcaggctcccacccagatgattgtatagaaccaaaaacagaagaacagcaagaaaagtaagagtgacaacagagaaggaagcaggaaaatagctaatgcccatgtaagcctggctggaggctggcaccctgagtaacctttgagcctgcaacattcagaaaaggttgaatttcattccatttactctgcttaggaaaatgggagtatgtgcagaatatttttaaattgcatgcaaaatgatagatgtttaatgcttaaagaggtagaatctgttacttgaaattgttgttatggaatgaagtgttgctatttatgtattaacatgttctattatattgagacataaatagctaaatttttatcagttttgttacataattctctctaaaatctggctatttctttcagtctccagcagtagacacaatgcctgcctcacagtgggtattctgtatttattgaaagaagaatgaatgaatagcaagtgaatcaaactacccataaaatccatatgtctgtgtgacgtgtgcatgaataaaggcatccaagtttaaaactctcccttttctcctttccagagcagagaccattctcttgggaccattcataagcaagagacacccacgccgtgacatatgccagtgccaccacctccgcctcctcctcctctgcctccacctcccccaccactgggggctcctcccccacccccaccgtctgcaccgccggtaagacctgtttgggtttttttctgtctgttttactggaatatgctggaacaggttttaaatattcaaaatcagccatcacctggctcctctagggcaggtagcatcttagggagctagctctatggtgccagggtctaactccaaaccagtctggccacgtatttccctcccagttctttggcagcccccaccctctaccctagcgtcctctacagatgtctacatgatttttaattcatgctgctcaatataggcttcccaagtctccctaatcaactcttccatctcatgggaaacctcagttgggaggctgcaatgagtcaaggaggcatgctcacatcaagttccaggttgatgttatctggatattgataacagtagcttgggcttcagccacccggttctgggaccaagtgagaggagtggcatatgcaatgccacagcaaaacgtgctaagtcatttcagttgtgtctaactctttgcaaccccatggactttgcccaccaggctcctctgtccatgggattctccaggcaaggacactggagtgggttgccatgcccttctccagaggatcttcctgaaccaggaatcga

SEQ ID NO: 37234 - DNA, 2025 bp, Bovine  19866880588991
  misc_feature (1)..(1): n is a, c, g, or t
nccctgtccatcaccaattcccagagcttgctcaaactcatgtccattgagtcagtgatgtcatctaactacctcatcctctgtcatccccttctcctcctgccctcaatctttcccagcatcaggatcttttccaatgagtcagttcttcacatcaggtggccaaaatattggggtttcagcttcatcatcagtccttccaatgaacacccaggactgatctcctttaggattgactggttggatctccttgcagtccaagggactctcaagagtcttctccagcaccacagttcaaaagcatcaattcttcggtgctctgctttccccatcctactggccttgagcttcagcttcctcatccatcttactcagtagatcccatagacagaaacgaggctatgtaacaaggtgattaagagccttggttctgatatatacgtatcaaattgtcttactccactcaagtcttaatgcctccattgctacatttataaaatgggggaaataacaactacctgttaagtttattttaagggttcattgaggtaacccactgaaaaggatgtaatccactgaagcactgaatgcttgacgtggaattagcgttcatttaatgatgatgattattatcattgcatattatccaacagtacagaaatggagcagctctcccaaaatgaaccaggcttgggatgttttccattcagtggcactaggtaaagtgactgaggaaggtctgatgttttagcccagccataagtgaggagttaaggatgccttcttttaaaacccacccttaccccgcccctgaaactgcacaggatgttaactttataacccttcaaagagacattctaagagatactttgcatcttaataagagtcacttaaagactaaaagtagcattttaaagaatttggtgaggctcagaaccaaggagatcaaagaaggcctgaggcaactgcctggcatccaaggtgtgatgctgatgcatgtcaaaaagaggcacaatccctcttcccagttgccactggcttccttgccagggagaccttggactgcaaatgctatggaagccctgataacagagacctttggaagaagacctatgagaatgggaccagagcaaagaattaggcaaatgccttgattattttaaagagagagaaggaaaattctctaagatataggtggtggggctggaaatggatcccagaaattaaaaatgggatggattggaaaagaagttggtaacagtggtgccataaaagccaatccagtctcactaagaacaagtcaagtcacagtgatgccaatcatttcttttcagaaagattggcatatcagagcaaatgaagcagacaagaaggttgtttgcaaagcgttttggacaaggttacaaaacacaggacagggaccagtacaactaggcagattaataatttgatgattgaaatgtagaaagggaacaaattagttgatataagaatatttcttggccttaccctaggcaatattttcatgaatattttaaccaaaaatgagagcagttttaatcaaaattatctatgtaggagatctaattaaaggtcgctatatttgaaaaaaagcataaagtatgttctctaccctttctggaataaagactcagaagcttggattgctacctgtaagggatagataacatgtcagatggtaaaatggggatttttaaaaaatctgaataggctggcaccagattcactaaaatttcatttaagagggataaatgtaacttttggccaagaattttaaaaaatcattgctaatattggggagacacagcctagcaggggtatgtacaatgtatagatgtaaagattgtaattggtgtaacatcagtagctattgtagagtaactaagcaaactctgatctcagactgtgctaaacaggatgacaaagtagccgtctgcttcggtcagactctctggagtgtcacatgggttctgggggccacactatgttagggacggactaaaa

SEQ ID NO: 37235 - DNA, 1200 bp, Bovine  19866880592052
  misc_feature (1)..(1): n is a, c, g, or t
nctgctaacagttttatttgtataagattctcaggcttagtattaatatagattgaaataccatccttcactgcaattattctttaccgagcatgaatgcatgtgattatcatcttatttagtaaattatctttgatatttcttcacacccacttcttggttattccgtgtgcttctggtgcctgattcctcccacccctcctgacacccaaccctcctgctgtggcctttacaattgaacaatgctcacagctctgtgaatttctcatccagccagtgctatcatttgccaagaacaatttgggaatattggaacacagcctcctttcacagtctgtgcacatttctatgcttgaagttagagatatagttttataaagtgaatgtttaactccagcctaatctcagttttccttagacatactgcgtagtgcactaaagttcatgcgagttattttcctgggtggaacctgatatttgggccactaagtgcttccacgtgtttaatccaagtggccaaagggaggacagatttgcatgcaagatcatttctaagaaatttatgcctgaggcactcactaatttttttcagtgtcataaaccctgctgatctccaacagttggagcttgcagaacaaaatggaagtttcttttgttttgtctctacatagaattacatgagtgggctttccctctgtggcagacacaacttactctctactcaatattcctttccttcttccactccccactcctttcctgaatgcagaaccctgattttgctccaggaaataccgagcaagtgggtctattccagggagggcaaccgcatcccctcagccccggcctatgattggtctagagatggccgtgtgacccaattctgccaatgagatgtaaggaaacacctggtagatggagcttctagagaagtggctgccttcctgataaaacggttatagggcttgtttctcctagctctctgcccctttgcttttactgtcttcatccctcctttctcctgcctataacacaaaacgtcagtagaatggcagtagccacctgtggtcaaaagaaaatggccaagagaaatgcagacatcggccttaatattgttgaactgttgaatcagcatcaggcaacagcccacctccagcttctttttatctgagaaaaataaacctctaacagtttaagcct

SEQ ID NO: 37236 - DNA, 2009 bp, Bovine  19866880626600
  misc_feature (1)..(1): n is a, c, g, or t
nggattctccgaaaagaaaggattgcattttgtttctccaggggatcttcccgactcaggggttgaagccacatctcctgcattggcaggcagattctttaccactgagccccttgagcccttctaagcactttgtataaattggcttaagttttataaccctctgaggtaggtactgttataattacctccactttacagatgagaacatgggaactgagcatttaagtgatttgctcaaggtcacacagttgataagtggtaaagctgagattagaaccccaggcacaatgcctaggtctattttttggttgtttttgttccccaaaatcagtttattttttattgagataaaatcagcataacagcaaaatcattttaacaatttaaaagtatagttcagcaatccagtggcattacatacattcacaatgtcctgcaagcattaccgctctctagttccagaacatttccatcattcaaaatgaaaccttttacccaattaagcagtcactcaccattcccttctccctccagcctctggcaaccactaatctgctttctctatggatctgcctattctgaatactttatataaatgaaatatgcaatctctggccttttgtgtctgacttcttactttttattgctcaatagtaatccattgtatggattactatggatggtccacatattatttatccattctccaggggatgtgcatgtgggctgttttcaccttttggctactgtgactactgctgctaaggatattcttgaacaggttttttgtttgaatacctgtgccagttcttctgggtgtaacactaaatgtatgcttttaaccaccctctaaaactgcctctcatccaaatattgttcacattttgaaatattcagaggctaaaatgcaagaattactcttccccatagttaacttgttaacaactcccaggactggtgtggcctggtttggtttcactgcggagacttttgttctcactggggcctctgccgaagcagacacgacttaagatacttctgttagtaggtggggctataaataaacggtgaaataagctcaccacttcccttttccttttttataaataagggctgggattctattttctgtgtatggcctctcactgctctttgtctccgtgatgaggatcttgcacccaaggaggcgtcaggtagccagaaggcagtggaagtctgtcagatgaagacaaggaagaagaacggggcactgggcaggaagacaaggggaacgaggcgcactggggtgcgtgtgcacggaacacgctcagggacggtgggagaaacaggaagcctttccctctgctcgggctttagtaatcgagcatcttaaaaacgtggggatcccagaagctcatgtaatcaaaggtcccttctccacctggcttcaggcagacctgcatcttggcctctggggaccacaacattctgcctttttagtaccaatttctagaaaagttgatttacatcaatctgtagttcttccataggcactgagtaaatttctatggtacattttaaggagggctttttgaaaatgtgatcatcagtcccaagacagtctctccccacctattccaatcccagtcctactcctcctggggccccactcacttccatctcgggtctgagtcccccgaaggggctgaaagcctgagctacacccctgttacagacactaccctgtagatgcgggcatctgctgcctcatggcaatatatgaaatgaagatcagtattactgatgctggcgaggatatcatggggacagctcactaacagaatgcttctgtttgtaataagtggcccattgctggggaaaacactgtcagtgtatcaaatgcctcatgtacattgatccaatgattctatttctaggattctcttaaggaggtcttcaaacaaagaattaatagatagacacgtatcataataataaccagaaatgagagaaggcttaaacattga

SEQ ID NO: 37237 - DNA, 1086 bp, Bovine  19866880654777
  misc_feature (1)..(1): n is a, c, g, or t
ntatttaagtgactgcagaacttttgtgcagtaaacaaggagagggacttttttctctttgaagtgacagagggaaaaaagggtaagaagtggcaagtagggtgaaagggtgtgcaaagagtgaggaggccccaaccagggagcaccctccacccgagtcttccatgacatccaccgaacacaaatgcctactatgagcaagctgttgctgttggcattggatttaaagaggcattggatttcaagttggggttgatgtggtgaaggatctacagggtaagaaagccaggagatcaggagacagcaagctgcttagaaatgggcaaaagcccttgggaaagggatctttgagtttccagagggtatggaactgggaggttcaaggtcattggacctggatccccaaggcagggagtattcccactgactttccaatcacctagtatattcagggaatcttgaatctcctttcaaatcagaaacaaagtccatgttgacaaaatgctggagtgaggaaaacctccctcatcaggagcttctggttggtacacccacagatgcggctgactggcctggagaataacagggtagggtgagggtggccttgagaggaggaagggtgaaggaggtcagggcagccctaatcctggtcagagggtggaggtggggtgcaacaggaagctggtgccacagccacatctggcagctccaggtgggcttgtctcaccggcggccagtgtgtttcttcaggtaagggccttgggctggcccccttgcgtgccagctgctccacctgcagcctccagtggccgtgcgggaagagaatgaccaccatgaggttcactgaggtcgtgctggacagagcccctcgctagggcgcacaccccgcgctgagctaacccagaattctctcactttcaggtggcaagaccagccagggccctggctcccgggcgccttctccacggcttcccaccaagactatcagcggcccattcaatccccctgcgtctcccaggctaggcaacgcctctgaggggcatggcgcggccagggcggtaccccctcgccccagcgtgcccgccc

SEQ ID NO: 37238 - DNA, 1514 bp, Bovine  19866880662948
  misc_feature (1)..(1): n is a, c, g, or t
nataacattgttctaaatactttttcttaaattatatgacactactagaattttaatttttctcaagtaacaaatcatcttaaaagattctaaagtaaattgtttaataaagtggatcactaagaatttgagttcattgaggtcaatttaaactatattctacatattccaatcaattcatttaatgcatattcacattgttaaagttgccaatttctctcttttggccctccatgaaggcaaaaaggaaaaactaagattataagttttgatggtgaaaatgtgaaagtaataagttttcatatgccaccaccccaacccccacaaagctttctatatcaacttttataattgaacaaaaattttgaagtattggttccatgatgagacctgagcctccataaaccttcgtctatttcgatttacgtgttttgcacatggcagggcttggtaaatatggattaaatgaattaattggaatattgtagaatttagtagaacaatttcctttgtatgagaagcacctccaaagtgttcgacttcagggttgtacccaaatgggcatttttgtactgtttattatgtaatttctgatctcattggtggccctagagcttcttgaaagtataaagaccacaacacttattcatcctgccagtacaaaaggcctgaacaaaagagcagaagcttttaaaaagattttgccttgttttctatagaccaactctctcaactttacttcctatcccattatctctttagccactcatatagtatttgatagagaaatttcaatttctaagagccttacatggtgagctctctagtgtagtgctcctgcctggaaaatcccatggatggaggagcctggtaggctgcaatccatggggtcgctaagagttggacacgactgaacgacttcactttcacctttcactttcatgcattggagaaggaaatggcaacccgctcctgtgttcttgcctggagaatcccagggacgggggagcctggtgggctgccgtctttggagtcgcacagagtcggacacgactgaagcaacttagcagcagcagcagcagcagtgggtaggaaaatgttggcatttgcaggtaaactcagcagtcaagcccagtgggtgatattaatgaggactttgactttttttactccaagggaaatggaaaacccttgcaggttttgagcagagtcacctgatctggcaggagcactgctaagggtaagcatgtttgttctaggaacaaaacagagctctttatctggccttccaggatcaggaggcttcctggaaaatagccaagagacaagtgtgaaaagagcagagagattagctcaagctaaggtccagaggtgagctccagcatggaaggaaagattggggctggtcacttggttgggccttgtacaatgtgaagggatttgaacttgatcctgagggcagtgaggagccagcaaaggtttttatggacatggtaagtgacatgtcccttata

SEQ ID NO: 37239 - DNA, 920 bp, Bovine  19866880673531
  misc_feature (1)..(1): n is a, c, g, or t
naacatatgacattttagccaagatctcaaaatacagaccccaagctgatacacatggtcactgctgcattgtaaataaacaggataaagttctttgaagtttccaaggagaaacaaatatagtagttgtcttcacatcaggaaatattgtctatttttcttttttaaaacatcacaccaaatgtgttgcttttctagctgactataaaaatcagtgactcatgtttgcattttatgccaccatgctttgtgggctgaactatttcagatttacctaagcttacatcatggaaatttcccaaaagtctaaacactttaggactttagttcatttttccccactcataataatagtagatttctgaaagatcattttaagatgttaaattacccttcatttttcaaagcatttggaacactaggcaatcaactgagaaaagacagctcattgttctatgttttttccccacagagaatttatgtctcaaaagatattttttaaaaaaggaaagttatttaatatgtctccctggtcaacccaggatctgctataaattcaaaattcattcttgtacaatgttcttaattataagataagtaatctttctgttagtttaattctgtcctatttatcttctcaagtggaatgacacattgcaaataccatttggggagttttattaataaaggcctaatcccatggcttgtaggacatgtctcagaataatgttttaactacacaaaagctcaatgactgtaacacccactcagtaattataactgttccccatgttaggtaagtcgcctttcccagtgtgattaatggtgatttctcaaaacgggtctcaaagagctcacagcaagtgatcagtttcagtctcctgccttattaggtagtaaggattaccatctttgctgga

SEQ ID NO: 37240 - DNA, 1488 bp, Bovine  19866880677040
  misc_feature (1)..(1): n is a, c, g, or t
nggagtgacgatgcaagatgcagccctctgtctggggagggctgactctggaactaagatttgccctaaatgacctttcctcctagcgtggtggaggagtggagaggatagaggatgggtgtccctgagctgagggagccagtgagcagtttctgtcccttcctattaacacagactgtgtgcttgtttcctggggctgccataacaatgccataacaaagaaccacagcccaggtgacttaacaatagaaatttactttctcacagtcctggaggctagaacttcaaggtcaaggtgtgggcaggcttgatttcttctgcttgcaaatgagcatgtcctcctgtatcttcacgtgttaacctttcgtgcatgcatgctaagttgcttcagtcatgtccgactctttgtgaatgtatggactgtagccctccaggctcccctgtccatgggagtctccaggcaagaatactggaagaatccctcctccaggagatcttcccagggatccaactcgagtctcctgcattggtaggcgggttctttaccactagcgccacctgggaagcccaccctatcagtcacatgtgagtttggagggggacacaattcagcccataagatgttgggtatgacttaatgtcgaggctatttaaccatcaaccacttcccgctactgaatgtctctgacacttaccaaaaagaactttgttaagtgtgaacaagcaatacagtttagttgcttcatctgctttgaggtcttctgcacgtcttagagggcctgagcttgtttgtaaaacaggacaccagatttgaccttgactcatgataacagtgtgtcaaggtcaaacaggtattaaaattagcccacttgttgtcacatagtattatccataatgaaacattaatactgataattactggtaaatgttaatacctgcacatgggaatgccacgctgcatattttagcttccaatttcatctcactgaggaccaaagaactgagccacagctgagaattcttttgagggcctcagaatagtgttctataaatacagagaaatttctgggaaaagcacatcgctggtgcaacctttaaaattctcatggtgatgtcaccatcagcaggtggcctggctgtttaatatgagctttgatgtcaccagcaagcaccagagagggtgcactctcattcactgaatgtgaatttctgaagcagtgcccaagcccaggcaccacacaggcactgcttattccacgagggaataagcagggcaaggctggcatgttttcttgccaggaggcagcctgatttcccacacactctccacagctttctttcttccactatctcacttcctaactcccttaccagagtttccaggaatcaccttctaaataaactacttgagaaccaaacctttgtctccgagtctgcttttagggaaacctcaaattagaccatgatcttctctttctcacagtgtgt

SEQ ID NO: 37241 - DNA, 1346 bp, Bovine  19866880702250
  misc_feature (1)..(1): n is a, c, g, or t
ncctgagattttagggcaggtgatgagagaatagagtggttctgatcaccgaggtgaagatttgctgtgctctatggtgcaaatagtgcagggctaatgaaggttgacctgggaagcacatgccaggggcctgacactcatggattcactgatctattcctcatagaggtcctgtgagggaggaggtatgctaaaaagtcccagttttatggatacggaggcggagtacagagcagtgaactgatttgcccaaagtcacacctctcttgaatggtagagatggggtttgaacctaggcagtctggtttcagaaactgtgctcatatcctctcttctatacttcttgacacagggagaaggaagactttgtcgttgttcagttgctaagttgcgtcagactctgcaaccccgtggactacagcatgccaggctttccttcattttctcctggagtttgctcatattcatgtctgtcaagtcagtgatgccatccaactgtctcatcctctgctgccctcttctcctaacattccctttacagatcttatggattcattgaaaacatttgccaatctaatttaagacatactgtgttaaataccacacagaaacacagactagggtgctcttaagtcctggatattttcatgtggtgtaaaaagctattttgggaactgccttccatcccagagaattgtcagcccctcagataattgaggaaaatgaagtaaaatgagaagaagggtcctatccaagccatttttccttgtcattcaccactaatcagggtcaaatggcttttctcacactgattcctaacagctctgcctctctcccccagtgggttcctgcttttcctgcaaccaaatgttgttccctgattactgttgcttctaaatgcattgtaacagagacagtgtccttcagaaaaatagaatgcagctctgcctttaaaaaggtattgctaaaaaacaagatcccaaataccaggttcccatcaagacagaataaccttcctcaagtctcctcacacttctctggctacaaaatgggcaaaatcaaacttgcttcctcttggtccttacctggtgggactattgtgaagataaaagacagtaattggtatgaaaatgccctgagctccatagatgaaaagctctatataatcccagtatattattagactggctttattgggatttggatacagttctttggctcatagaagtcagtctttcagccagtagtagggagtccccaaggttttattccagaaagagagtgtttatggcaaatacagtcaggttagcattatccaggttacagacagcctagagttagagaag

SEQ ID NO: 37242 - DNA, 1180 bp, Bovine  19866880706536
  misc_feature (1)..(1): n is a, c, g, or t
nataaaaaaattttcaaaggaaataaaatgaggcttattttaatattaaggaattgataacagtattacaaggcttcatcctgaaggagagaataagtacttctagcatgaataaaacataaatatttatttcaatcttcctctaattgtttcaatatttggttgtaataaaaatggggtgtacaccaggattaaaaaaataagcttaatttggtctctttacagataaaacctacatcctaacattttttcaacaaatggctaatgggctaaaattcatttgacatcagaggtataaactttggaggataagatttatgagttgactgaaaagcataaaattccagaaaagatttttcaatcatatcttgagccttggggtaatcacactggatttctaccacatatatgtgataatctacttttgtatgaactttgttttcttaggttaaaggtgttggagttggtgagaaattaacatgaattcccatgttccacttttattcttcctagtctgattccagggacactgaggatatgtagagctacaagaagttatagattttcattgatgcttataaacagcaagttcatgtttatttgctaaagtagaatatgagctgggcggctatttcatttacagtcatttctgtatatagtcaaatgggcagttttctcagcaggacagagtggtggtatctgaaggcagtttcctagcttacctctacccttcaaatgatgcaggggacctgatgtgaagagctggctcatttgaaaagaccttgatgctgggaaagattgaaggtgggaggagaagggaacaacagaggatgagatgattggatggcatcacggactcaatggacatgagtttgggtaaactctgggagttggtgatggacaggggggcctggcatgctgcagtccaggaggtcacaaagagttggaaatgactgagtgactgaactaaactgaaatgggcagtagggagctatgcactagaggaagtttcaaaagggagagccaaggggaccatcttgacaagcctgccttgggcaagcctagctggcataaaactaatcatctagacatgtctaaatatgtgttcactcttctgtgcattttacacttggaaacgcactgaaccaagagagggcattcatcactcttaatcttaagg

SEQ ID NO: 37243 - DNA, 1504 bp, Bovine  19866880769478
  misc_feature (1)..(1): n is a, c, g, or t
naattgaagaaaaactaccctgatgaaggattcctcattccagagagaaggttatggtttgatacccttaagaactagataagctcattaggagaccacctgaagccagattaaaggactataggccctgaacacacccctgatccttatttgcaacccctccccttgaaccattgttagaaaactcttcactaaatcctcctgggttgggacacagaattttgagggacaggactccactgtgttctcctttgcttggaaaagcaataaaactatccttcactacttcatggaaaactcttgtctctcagatttggtttggtaccagtgcacagaggctgagttttcagcatcaaaaccattagagactacaatttgggaggtactctagctcccaagagtgcatagtatatttcaggcactgtgatacagatatggagaaagcattttggactggccctcctttcattggtactccttaaattatatgtgaaaagattatcactccattatgtctgtatctgaaaaactaaaatttaaaaaaacccttaactaacactggaaacgattctagctaggttttttactctgcactgtttgtagaacctccttgttttcctatttgtcacactacataccctagagacaaaggcgatgtaagagaaggaaccatgtttatattttccaaatcaaggaatgaagtaaagtgaagtgaagtgaattgaagtcactcagtcatgtccgactctttacgaccccatgaactgtagcctaccaggcttctccatccatgggattttccaggcagcggtactggagtgggttgccatttctgtctccaggggatcttcctaacccaggaatcaaaccctggtctcctgccttgcaggcagacgctttaccctctgagccaccaggaatggctacttttaaacaccaacattagcattttaagttggtaacggcttgagattaggcccattcctttttggcatatgcttatatggaaaaacaaatctgcattgtttggagacacactggtagttttcttaattatgtcacatgcctggatttggctgcatcaagttctatgttctgaattgtttgtctcttggcagatacttagtttgtggaatctgattaaatagatcttagagcttatcttccctgctcacagataaaagaaatattaaaagtctctgaccttatactctgtatacagaagacttctgataaaaaactcaggatcgaattgaagagaattctgggtaaattcatttcagggcgtggtgctctttctggcaagctcagcctgaggactctgaactggctaatgctgtaagttattccattacctacatattatgttgggatgatattcccacagaataaccaagcccaattaacaggttgtttttcttacagtgaatcccctgggtgctcctaagggctttttcatttctgggagtgtggcagagagaatgtgatgggaagcttatgaggt

SEQ ID NO: 37244 - DNA, 1897 bp, Bovine  19866880774205
  misc_feature (1)..(1): n is a, c, g, or t
ncttttcccttttttatataactttttaaaattaattaatttggtttcatcgggtcttagtggcggcagacacaggctttggtgcatcaggcaggacatttcactgcggcacagactctagctgtggcatactggctcacttgcttaggatcttagttccctaaccagggagagaacccatgtccctgcattgcaagatggattcttcactactggaccaccagggaagtcctcaaatcaggctattcttaataataaccaattaaaactttatttcactgccacttttaaaacacttctttttacaagtcagtcatattataaccaagaaagcattcctatttatgcattggatggtcacacatttaacaatattaaaaattattattgtcaggcagatggcaagtcctaaagactcatagtaacctgttctagtactccccaggtggcgctagtagcaaagaacccacctgctaatatgggagatgtaagagacatgagtccgatccctgggttggaaagatcccctggaggaggacacagcaatccactccagtaatccttgcctggagaatcccttggacaagggagcccaatgggctacagtccatggggtcacaaggacacaaatgaagcaacttagcacacacgcatgccaagtgctcatggagaggcatagcacagtgctaagtcagtctctggacactgaagccagttttcctggggtcagatgctgactctagtacttactagctgtgtgaccttgggcaagcaacttaagttcttagtctctcagttacctcatctataataataatagtgcctgtttcataagggcttttaggaagattaaataacttagtatttataaagcaattagaaatatacctagcacctagaaagtgttctgtaaatgatcagtaaatacactggaactcattttctagtgagggagtcagacaataaataaatatgaaaattacagtcgagtcatggggacaaacaccaagcaaacaatttacgataaaatgaaaacacacccagtcctgtgagtggcatgccaggttatttggcttaattctcctgttggaaacaattgggcaccaaaccaatggttttggtttcctcctgaaggaaaaggaacagaattttaagtgagtgtagggctcatccaaaaaagagcaattaatagaacatccttcccttgataagcattggcccgcaaagggtttgggcaatccagaagtaaactatgctcatccccccaccaacagatctttatggaaagttaagctaatttggagcagaaaagatctggggagggtagggaggcttgtcccagatgtgactataggctaacagtctctttttctggttatcccaaaacatgacttatactaagccatgaactttagtatacagtggcccctaagatcttgaaaagaatttctagaaaaagtgacttttgattaggtcttaaattttcctacaaataattttttaaggaaaatgaggagcatacaataatatccaagaatactaaggaaccagattcagaaaagaggaggcttggagagttgggaagagtcagctggtgatggctgcatttcagagagagggtgaattgtacaaactagccttacttaggtcaagtgtgaaactgacatgattagtaatattttgggactataatttttatgcttctagatatgcattcatgttaacctgacggcacaggatgagatgctatgagcagtggattccaccatcaggcatgggtacaatgtcctctctttaaaagtttacacactaaatccaacaagactgatgtgaatacacaaaaacaagaaaagaaatattaaattaccagtacaggataactataaaggaaaaggcc

SEQ ID NO: 37245 - DNA, 1298 bp, Bovine  19866880797368
  misc_feature (1)..(1): n is a, c, g, or t
ncatgttaaattgattaagcttcatatgttgaatcatccttgaattctagaaatagatcccacttggtcatagtgtacagtccttttaaaatgctactgaattctgtctgctggtattttgttgaggagttttgcatcaatgttcctaagagttactggtctatagttttcttttcttgtagagtctttttctggctttggtatgggttatattgacctcacagaatgaattgagagaattcaattcaattcattcaattctgtgagaagtgatccctccttttaagttttttggaaaagtttgagaaggattggcattagttcttctttatatatttgatagaattcaccagcgaagctttcaggtacaggactttttctttgttgggaaattcttgattactatttactgatttgtttcagaacaaactttttggcttacccaatagaaagcaaacaaaaagtatagttacaaaccactgttacaataatactagattttataattgcctgtatggttacctttattgagatctctatttctccgcatgactctaagttactgtctagcgtcctttcgtttcaccttgtgggactcttttaagcatttcttgcaggttgggtctagtggtcatgaactccctcaacttttatttatttaggaatgtcttaatttctccctcactttttaaggacagttttggtggatcttggattcctggttgaagtgtttttattttagcatattgaatataccagtccactgcttctggcctccaaagtttcccatgagaagtctgctggaaattttattgaggatcccatgtatgtgatcctttgcttctcttttgatacttcagtgtttctctgtttgtcttttgaaagtttgattataatacgtctctgagttcatcttgttgttgttcagtcactgggttgggtccaactctttgcagccctgtggactgcagtatgtcaggcctccctgtccctcactatttccaggagtttgtccaagttgatgttcattgaatcagtgatggtctccagccatcttatcctctgctaccctcttctccctttgccttcagtctttcccagaattagggtcttttccaatgagttggctgttcaggtggccaaagtattagagcttcagcatcagttcttccaataagtattcagggttgatttcctttaggattgactgggtttgatctccttgcagtccaagggactctcaagagtcttctctagcaccacaatttgaaagcatcaattcttgagcactcagcttt

SEQ ID NO: 37246 - DNA, 1616 bp, Bovine  19866880849121
  misc_feature (1)..(1): n is a, c, g, or t
ntttcaaaacctgaagagtgaaagagggcttctctggaatcattagaagctactttggcacgtgggacccctgggaatccctctgcaaccatcaccctgttcactgccatcatccttccctcgttacccgggtctgagaagcatgaagagaaaaactctgtaacatgcataaaacataactcaatattctctgtcatctatagagtacctggtttcttaccaccccccccccccccagggtggggccgggtttccaccatcaacattgtcatttaacttgaccaatttagcctcaaaattcaagtgctggtggctaggggaaagctggggggagggggaagcagagagctgcccgtgtaagacagtctttgaagaaacaccctcatgctcgcacaaggcaacctgaacacagcgtgtgttttctaacctgggcggagatgaagcttctcacggcacaggacagggtctcatctttaaaggccctttgtttctttgaaaacagggattctcgtcccctcctggcctccagtttcacagctatgtggcaaaagggcaggacccacaggttaggttggaacctgaaggaaagggatgtgagaaggaatgaactaggttcctggaagctgggggaggtgaaggttccttgaaggaggacaagcaccctcctccccttctcaccacagctgatccaattttgagaactgcagtaaacattctcagatgattgtaggtttaaaactgggtgggtgtatgattgtagttcagagaaggatatatacagagaaaaaaaaagatggaagaatatacacaaagttgttaacaggcattcactctgccagcttatgactgaatttgacttattagtgcatttatgcaatttctgaattttctgcaataaatgcattactcccgtgatcagaaagatatggtaataatcaaaataatagtccctacattacacaactttttatagtttagagaagttacatatgctatttcattggatcctttttagcaactctgtgatataagctggagagatttatctttaatgcctttttttcatatgagaaaaccaagctccgaggggttaaggaactcacctgaggtcacacatacagacctctgactccttgtccagtgccccttccactgcgcctcactgcttctttccctggcaggtcagaattgccaggacaggagtcacactcaccttcagacgttataagcatgatggaacattccatactgtccagtccctaacctcatggcaggcacacatctgaatcccctgagcccacaaagtctagtcaaggatggactgtagtctgtcttgggcatcccatagtcaagaaggtctttatgtctaggtggaaccatgttaattcatttttcacttcagtgaggcaaaaagcaattgcccagagaaatcacggggtttcagacatggtgaacagagccccaggggtgctcttcttttatgggccagagcccacgtgatccatgcaaggctgggagccctaaacaggaaatctgaaagcctggggccctttctctctttttcattgccttgtcttgagatcgccaccaaggtcttcacttttcttagcttccca

SEQ ID NO: 37247 - DNA, 894 bp, Bovine  19866880895991
  misc_feature (1)..(1): n is a, c, g, or t
ngaagaaggccaagtccacctggctttctgctattgtctttgctcacaagctgaaaattaaagtcagaaccaaaagccaggttacaactcctcttttaaccgcggggaataacaaaagagcatttaccaatttagctccccgctcactatgtattatcctgattgcagatgaacacatactgattatcaccctgcttacttcaggtgtggggtgctgttcatttaagaggctcattcgctggaaagaatagccagcagtcatgaacagtcttccacttctttaaattttgagagcgatcgcttagggatgtgtgtggagaatgtacctatttttctgttttaaaagataatgtttattttttcccttgctatttcccttgctattctacacatgcatgtagaaaatgcagtaggatttcaggcttagccagagactgcctcgctctggaagggatgtctgagccctagagagcgtatggtgatgccaggggagaagagaacaggacagcagttagggacagtcaaccagccggctctctgtcaccctcaaacaataacagctgctcaacgctgttttcagagatttgatcattctgtgttacagaggaaggtgggagctgggttgcagggttaggtcggtaccaaggggccctgggctcttgggaaagggaccaacactctctttctaggattccccaatcttagagaatttggaagaataaattagagaaaaaaatttctggacaaataatcctcttttaccttcctggaagggagagggaagggagggaaatggctacacagttttttccccaggaatgcaaagattatttacaggacacatgtaccaggataatttttggaaaaaaaatatacctatcacaatgggtgcat

SEQ ID NO: 37248 - DNA, 1070 bp, Bovine  19866880926032
  misc_feature (1)..(1): n is a, c, g, or t
naataaatatgtaaagtctagaatctagtgaagcaaaaaccaaaaataaaaaataaagcacaaaacctatataaacaagaagtggataaaaatctcaacctgtccctctcaatagcatttcatttcaaaatcactgtacagacccagcaaaatgaaggacacctttcaatgtctgagactaaaccaaaataggacgttgagaatcagggttgaactagatgtcaggggaggcagggtatgtttctggcctggaaagtggaccggatggcaactgtgagagcctctgatcagtcaatcagcaggttttgtatggtagattctgtgacaaaggctagaacattcccactgaagttgtccagaccagtagtactatctggctcaaatataatattagccacatatgtagttttaaatatcctggcagctacattaaacattttcaataaacaggtagaattaattttttaaaataaattttctttaacctaatatccaaaaatgttatcatttcaacatataatcaatataacaaagttattcataagacattttaccttctctttgttttgtaaactgttcaattcttatgtgtactttactttgcagagcatctcagactagccacatttcaagggctaaatagcccaggaggctgccatattgggtcctgcaggtctaggtggagaatcagtcccttagaggtagcgttgcagccctcaccctctagtagatgcctcagatttaccctcaaaaccatgctccctgcttcctgcttatttgctgtcccctaattgatctcactcaggtttattcttgagaagcaaaattatttaagaaaaagcactttacatcattagagtggcattatgtgaaataactagaaagggctaggtttgcttttcttgaagaagaccgtgctcagccaggactgagggtagagagggcagtgatgggacatgatgaagtctaggtactgggcttctgatgagaaaagaactacataaggttattacccaagtgattctgtgattcataccgcccaaaatttgtgatctgagttatatcattaa

SEQ ID NO: 37249 - DNA, 963 bp, Bovine  19866880935326
  misc_feature (1)..(1): n is a, c, g, or t
naaacccttgtaacacttgacttcggcccctgggaagacacagaaagtttgtatctgaggcgggatgcttgattggttggtgagcacttaaagtctcccacatcctgcgcttttctgctagtggaggaactgagagactcatggaccattcactgcgctgcctctaaacatctatgaaccaggcactctgcctgttccttggatgtgctgctgaaggaagcagaaaggagctgctagtctggagtggaggagagacctgtactcagcgctgtgtcaacacttggatcaggtgcatgggaacacaggtgagacagcagttagtgctgggagggaggaggatctcacacagggatggcagcttgtctacaggttcagattctgtagcagctgctgtcaaagtatgttccccaagcagtccctaactggtttcttaattactagtgtttacaggctgacaatgtgtaggcttatgtttagagcaaggataaataattcacttctcatgccttccctgtgttgtcaagaacaactttcctgtgttgatttaggtaaagaagatgtagtgagtggaagccaataggtacttgcttcccacctgtttgtcttgtgtgactcctatctttcctgctttagaaccataataaataggcaagaagacatttccatgagcccagagttcctatgaggtcttctgctgagtggtccaggtagtagctagtcaaatgtaaaggctgttatcttaaaggataggtatggcttggatcaaataattattggaaaagtattggaaagggtggggaaattgtgagtgaggaaaatatttggaaagtggggacatttgggctgaaagcttcaggtacccactgtttcccatccatgtaaagtggctgtgccattggtgtcttgttttaatggacattagagaaagatccatttccccctgttccaccataagtacagtca

SEQ ID NO: 37250 - DNA, 755 bp, Bovine  19866880974100
  misc_feature (1)..(1): n is a, c, g, or t
ngcctggttcctgcccgaaccgtgggctgacgaatgccctatctgcccaggccatacgacgcatcatggagagggatggcctgagtgaggctgcggctcagagcaggctgcagagccagatgagtgggcagcagcttgtggatcagagccacgtggtgctgagcaccatgtgggagccgcatgtcacccagcgccaggttggtgcccagggaaaggctgggttgtggggagggagtctcagtgaatacctgtctgaccttgtccctgttttcttcctgacattccggcccgtcccaaggtggagaaagcctgggccctcctgcagaagcgcatctccgaggcaccatcaggcccatgactgacagagttctctgtggggtcaaagtggcccctggagctgacgagatccagcggtgaggaggaatggaaccttgaagctcactctagcctgggcctagagggctctgagctaagctgggcagggcagtgctgggcccgctggacaaaggaagcctacccagcttgccagtgtgtggccaacactgaggatgcagctcacgcggtgcaggcccccggcgttgttctatccccgctcttatccacaggtcgttggtacccctgctgggctggggccagggcaaacactggaacttgtaacagaattaaaggtgaatgttgccattggtgtctgcttcctgcttcaatgactctgggtatctttgtgacccttgagcacccaagtgcaaggcccaggc

SEQ ID NO: 37251 - DNA, 1371 bp, Bovine  19866880995050
  misc_feature (1)..(1): n is a, c, g, or t
ngagaaacaagagtcggagcagcccttcacagtctgcaagatgctcatttaaagtccagggttcaactcagcattcgcatgtctttatcacttggatgctgcacactcgaacaaatgtacgcaggaaggaaagccttcctgttactgtggcagggtggatgacagcattggcaggtctataattaaagggttaagaataagacaaacaacaggcgggcccaatgattgctggaagagaaagtatttacattacataacggagcaagaagaatagacacctcccccaacgtgcccccagcccccgccgttatttagtgtcgcctgtcttcaccacacttgggacagctgtccgcgtgccggcagcacagtcatatcctcttgctgtttgcacagtggcacatttgtcttcctaatcgcagtatgtgaaagttcctgcctccatgaccagaatcagaaaccaaatgttaaaacaaatctttccttaacattatcctgtctgaagatgtttgtacttgtgacttctgtttatctatgtttaatggcactggcataaggagaaatagtgtatttacacacctgtgctgttataaaagatcatttgtccagataaatatttacccatcattctgttcttgagctcatgttggtgctgcgcacacagaggaagaacattctttccttcaggcagttcccacttccagaaggaatatatttgaatggtgtctgtggcgggtgtgtgtgtgcaagtgtcacgcccctggcaggggtgagtgggaaagaagaggaaaccaacacagaggacactgctttggagctgggcactaaaggataagtaggagttcgcagggctctgcattatagagaagagaaggaagctgggggtgaaagggaggatggggacactggtttcccttgcagagttctgagaaggaaggagaccttcctgttcattcgttgagtgtttctgataaaggagtgttttctcacaaaaggtggctcatcatttccacggagtctgtgccctaacaaagccatctttccctgcctataatgaaggcataggcagatacaagatggaccagcagactataaatggaaggactgcttgcatcctgtcaaggggtaaggagagggtcacaggcaaattccttcagggtgacctgctgtctcaccttctcttctaagcatgtggcctattaacccttgctgctcagggcagagctccctctatgattactcccagcgggtgccctgtggcttctggtgaaatgcaagtgcagtgtgaatccagtggaaagccaccctagtgtccccccagaccccagtgctcccctgcagcttattctcttcagcacctcccaaagaagagct

SEQ ID NO: 37252 - DNA, 972 bp, Bovine  19866881046418
  misc_feature (1)..(1): n is a, c, g, or t
naccctgtgacgacccatgaagatcaacctgaagggaattgctctcggagacgcgtattttgatcccaagtcggtaggtggctcttctttcctttccattttgttccttaaggagatgcaatcccctttaatcagacagaggctcctcttaaccctagagacctaacttcataaagggaaatactgttcctcaaatgctttctaatgatttcaatcttctaatttttaccaaatgttctatggtgtcaacttactgtgtcagcgtaggttggctgagtgcaagtgtcagtgtgtgagtgcctgtgcttggtgtgtttgtgtgtattttgtgtatgtatgtgatatatgggtgtgtatgtgtgttgtgtggttatgtggtatatatgtgtatgtgtgtttgtgtggtgtatttgcatatgttgtgtggtaggtgatgcctgtgacgtatgtttgtgtgtttgtaagttttatgtctgtgtgggtgtggtgtattgtgtatgcattatgtgtgttgtgtgtgtgtgttgtcccgctccactaattaacaagttacagagggttatttctcaagcagacgggctcccctcacatccctttctctccctgtcgtgtctgtgtttgcctcttttctcctcagatcatagagggctacccatcattcctgttccaaattggcttgttggatgagcaggagaaaaagtacttccagaagcagtgcaatgactgcgtgaaattcatccgccaggagaagtggcttcaagcctttgaagtgagttctaggtcccgcgctgccctggagcaataagcaccatctgagaaggtcctggaagcactggggtgcctggcctggtgttttattgttagagaagctgtatccggggtgctgtcacagtcaggaggcgagacgagtgggctcataaggaagaaaaggaccatctgggtttctttgaatttacttggcaatattttaaa

SEQ ID NO: 37253 - DNA, 1064 bp, Bovine  19866881052983
  misc_feature (1)..(1): n is a, c, g, or t
natgcaaatgaatatctgtaacagacatgcaagttacaaagcgcaacaatggtaactctcattaaaaaacaaaaaactaccacttgactctaggaacattttattcccttgcatcctcctggtgctcttctcccttccctcctctgtcttctttcgttccctccctccaaactaaccactactttgaatttcctgctttttattcccttggttttcttcctttaaattgtcttactccatatcactaaaatacatgctccgtgatggcagatattttttgtctgttctgttccatctgtccccagtgtctagaacagtgtctggcatgcagtaggctgagtgactgagtacacgtgcacatgcttaggcactccataagtagttattgagtaaatgaatatgtcagtgtcccaagtctatcaaagggatgctgctatagtccctcctttatctcttgtatgtaaatcagctctgtaagtgatgtaaatttcatcatagtttcatattagctgcatgcctttaatgatttttagaaaattagtattttttaaagtgttcatatagattatttgcatttagttgcaataggagatgcccagcaaaattacatggacttttatgagccaggacttctttttaaacttgatttgtatttcacaagcacttttcagggctgaatagtgagcactcaagaaacataagtagtgaagcttgagttcagcagggagacctacaaagaaatttttttaaagaataaaatatacatgctaccacaaaaatgaactttgataagattatatgaagtgaaagaattgagctacaaaagaccacatattggcttgcctggcagttcagcagtaaagaatctgcctgccaatataggagacataggttagatccctgatctgggaagatcccacatgctgaggagcagctaagctaagcccctgtgccacaactattgagtctgtgctccagagcctgggagctgcaaattactgagcccacatgccgtaactaccgaagcctgcacgtgagagtctgggctccataacaccaacaca

SEQ ID NO: 37254 - DNA, 2207 bp, Bovine  19866881054464
  misc_feature (1)..(1): n is a, c, g, or t
ntgctgcccaagtatgcctcaagagagacacccaggagggggagtcttggattctcttccgattcagagcccagcagtctgtgggcgcctttgcctggtcagcatgcagcacagtgaaagcaactttcttggtggaactatgaccatgatataaatttaacagaccacttgaatcccagtgagctattcatatcatgctaagaatatagatcctatttctagggagcccagatagccttacaacagagtgataaagatatactatgtgtcctgttcagcaaaagaaactgtgcttggtctgcttcctagagaaacttgaagaggtaatggcgttttctagagccacacaccaggagaagacagcagctcccatcagttcaacaactgttgtgaccacatctttatttagtcttcgtgacccactgtcaagaatcaaatccaatcccgccaccaccaccccagactttttgaccatccagactggactattaaactggtaggttgtggacatttaatctttgtctgcgtttgcacttagatgaagagaaggattcctttataccttcctggtaattaattctacttcaatagcaccattcaggaagtgcagggagctcccaggaataaaaagaattgcaggggttccagcaaagcttaaaatgtggatgctcatctagagtcagtgccccttcgtggggctgatatttaagaatgtacattccaattaaggagtttgacaaagaaatctcaagtatagtcagatccaataggtcacacacacataaatggtgatgtagggtattcaactaaaagtcatatttgccccgaatcctgacagaggggttcatttaccatgacttaagccttgagatctttctaaagctattgagagatggggtttagacctattcttccttcagtctgaacaggactaaatctgtatacagggactccctcaagcttgaactcaacctcagaaggcagaagcagagtatctctgtctctgtattcactgtcatagtgtaaaaaaaaataataataccgctgccttttgaggcctcttatttctatattccattttaaaatgggacatacatttctgaaaaatattgctgtaacctttgttgaaagtgttagtgtcagtcgtgtctgactctttgcaaccccaatggactgtagcccgccaggctcctctgtccatgggattctccaggcaagaatactggagtgggtagccattcccttctccaagggatcttccaaacccagggatcgaacctgggtcttctgcatggcaggcagattatttaccatctgagccaccacggaagcccataacttttaggtacccctatgtcaaaggagtaaagataaggtcatcttgacattggcagagtcttcatcttcatccagagccaggacttgctttgagccgtggagttgggtcatggactttcctgtttatcctgcaggccacctgttcagggtacatcccacccgagcccgtgcccacggccaggaaggaggaggaagaagggaaactgtgcctgggacagtgagctggagagggtggggtgatgtgtagaacagatgcaagggctggttattattagtgcccatggtaaacgggagagcggcttacacagggatgaaatcagctgcttctgtactggggcaagttacaaagacacctctgctctcttcccaacctgatctgactctctgaaactgggaaaccatgtcccctgcttcccctgcttctcgtttctgtgccctcagtgaacttgctgaagccaggtacatcatcataacaataacaacaaatgggacttccctagctgtccaggggttgagcttttgccttccaatgcaggaggtgcaagtttaatccctgatcagggagctatgatcccacatgccccagggccaaaaaaccaaaacacaaaaaaccagaagcactattgtaacaaattcttaaaaaacaaaacaactatcatcaccaacttttcagaaacagttctcagactttacatatgtaaactcagttttccttacaagccctctctgatggaggtactgtggttggcactgttttacagatggcgatcttaaagctcgaaaagtttgtcattgaccaaagttcccctctggtgagtggcaggatggggatctgaaccatccctaaccattctgctgtactgcttcgt

SEQ ID NO: 37255 - DNA, 1365 bp, Bovine  19866881063197
  misc_feature (1)..(1): n is a, c, g, or t
nttaaaagctcactattacattgtccactttgactaaagtattaggagtttcactttttttagcaaacaaagtttgcataacaacataaaccattattaatacgttgttttgtgtgtgtgtctatgtggctgattatccatagagaggttcctgactaggtaagcctaactatccagatgtttttgtatgaaactgtcttaggaggtgtttagttgcctctgtgataggatgggccccagagagtaagtaattgtgaaagaatttcatttaagctacacaactgtgattgagtaagatttgggggaatttcaccactgcagtttctttttatgtatagtaagcatattggagaaggcaatggcaacccattccagtactcttgcctggaaactcccatggatggaggagcctggtaggctgcagtccatggggttgttaagagtcggacacgactgagcaacttcactttcacttttcactttcatgcattggagaaggcagtggcaacccactccagtgttcttgcctggagaatcccagggacgggggagcctggtgggctgccgtctatggggtcgcacagagtcgcacacaactgaagcgacttagcagcagcagcagcaagcatatttgttttttaggaggggaaaatttctcaaactgtcttattgcatgagattagaaagtttctattccttttcataaaattttagtatgtgacagcaacagaaggacaagggcacattaggctgggtgagtgatgccgtacacgtgcaaggtgacaaaaactgttccctcattgaaaagtgctgaactaaaagaactcttcagagttccccagctcaatattctgtgagtcggggaatggatttttccctctggctgtttaagctggagtatgttttaccaagaccttagctatgagctcaggaggactctaataactccatcagaattataaaatcagctgtcagccttgggattgttgagctgactgaacaagcagattttctcccattgtctgccttctagtttgatgaataacagtttcgtcctctccattttgttgcaactcttttcctctgacacttctgattgctgaaaggttttctggaaatttcctaagtcacacactggagtaaattcaaggacatgatgagattccaattgaatcatcagtgtctctgctgtcagacctagtgttttaggagttcagttggctgagtggtacaacttcccagatttaatattacatacttgccactgtgcatcttgccctcaagtctaaataaatgggctaaaggtctgattggaatctgtgagataaactatatgtttattatgccaagttaagtaaatactgt

SEQ ID NO: 37256 - DNA, 1948 bp, Bovine  19866881121875
  misc_feature (1)..(1): n is a, c, g, or t
ncctcattcaggcctgacaaaaagggaagattgcatggaataagagaaaggctgatgttataaagaggaggagtggaattccattgtggctgagcaggaatgaatctgactagtatccctggggatgcaggttcaatccctggccttgctcagtgggttgaggatctggcgttgccatgagctgtggtgtcggctcgcagctgcagctccaattcaacctctagcctgggaatttccatatgctgcaaggtacaaccctaaaaagaaaaaaaaaaattaactttgaagtgttgtgaggatgaaatactatgcagaaaaaatgtttggagttcccttcatggctctgcagttaatgaaccagactaggatctatgaggatatgggttcgatctctggccttgttcagtgggttaaggatctggtgttgacatgagctgtggtgtaggtcacagatgcggcttagatcctgaattgctgtggctgtggctggcagctgcagctctaattcgacccctagcctgggaactgggaacttccaatataccttgggtgtggccctaaaaaggaaaacaaaaaaaactggaacagaaatcaattttatttctatataccagaaacaaacagaaaatgaaataaaagagggtaatgtttatttaaaaaaaaaaaaaagagttccctttgtggctcaatgcccctcctgggcatctatccagaaaaaaccatgactcaaaaagatacatgtactccagtgttcactgcagcactatgtacaatagccaagacatggaaacaaccttaaacgtccatcaacagatgaatggataaagaagatgtggtacatatacacaatggaacattattcagccataaaaaggaataaaactgtgccatttgcagagacgtggacggacctagagactgtcatacaaaatgaagtaagtcagaaagagaaaaataaatatcgcacattaacgcatgtatgtagaagctagaaaaatggtacaaatgaacgtgtttgcaaagcagaaatagagacacagatggagagaacaaatgtatggacaccaaaggggaaaagagggaatgcaatgaattgggagattgggactgacatatataaatatatatatatatttatgactatgtataaaataataactaatgagaacctactgtataacacagggaactcaatgctctgtggggacaaagagggaatatagtttcttgctatacagcagaaactaacacattgtaaagcaactaaacttcaataacaactaattaaaaaaagaaatttacattctgtggtcagatcacatagtatagaataagattgagtaaacttgaaatctccctttcttttctttagttatcctaatggaattactttaaactctccaggatttttatggggcactaatgaggtgctttacttcctgtcttgactagagtgtattattaaaaaatctaccagccagtctttctgtaataaacctccttaaaaggttaccaatggttttgctaagttatgtaagtaaccacaagtcaggctccttagaaacttgctataaaccttctgctaacttgtagatgcacacaataccaggttggatgctcaggatcaaagtagttcccattcatttggcttgttttctgtcttctttcctttttaccctatgttttcccagggattatgattttaaaatatgtgtgcgtgtgttcagttgctcaattgtgttagactctttgagactccatggactgtagcctgccaggctcctctgtccatgggatttcccaggtaagaatactggagtgaattgccattcccttatccaggggatcttcctgactcagggattgaacccacgtctcctgcattgacagattctctaccactgagctaccttttaaaataagggtaatattagaataaataaaaagt

SEQ ID NO: 37257 - DNA, 1312 bp, Bovine  19866881259208
  misc_feature (1)..(1): n is a, c, g, or t
ngttatataaaaaaagttctgaccttttggaaagcttgcagaaccaataagacagatcagctatacgcacagctgatgacctgcaaaagcttctttgtcactgatttagctgttatagtttggcgtgatttattccccaggggagggaacttgacattgctcagtggcttctgtttggaatgagaagagtacacaatgatggtggacaccatctcagggtcagtctccattccagacaggaggtggtggatgcggtcacatgtttgccaaaaccccactaacagtctgccttctgcgcatggcgtattctgggcattacatcctcaagatgtgagggtatgagtgggctgtttcagaggaaacatttttcactgttttctttccacctctcccggatttcctttaatctgcagctattttgagcacagatgaagggtcagtctgcttttttctatttttctctccttcctcagtcacagcttttcctccaaggatgaggtcaggcagcaagcaaaaacacactttcattcccttgccagccccagaaaaagggcatgagaggagcagccacaggtcacagccagtcctgacccatccatattcagggctagctgaactcatatacttttcctgtctagaggggtgccaccacagggactgggggactctcagaccagctcagaaaggtgctaaggtttacctgatgggtggatccaggttccctaagcgtgggcgggggacatgatatttgaggcaggtatttcagaatatgttttagtctatactttttcatgtcatgctttccatgataaaccctgcactcaggggaggaaaaagaaaacatttctgagacagaattaatgatgacttatgtaggtttctaatttgcagggaacatactgaaatctccttcagctcacctcaccctggctgccaggatgggggctcagcgggacaggaaggaccattgcagaaacgtgggcacgaggggcagtgtaaacagtaagagcgttggctacctgcaggactgttcagttacacaaggggccctgtggtcagccttggagggactgaggccactcttggctttgatctgcgttatatttacatgaggcagcaaaagaatccttgtactgcaggatgggagcaggaggggccatgtggcagcatcttgggtgagggacacgctactctcggggagccgcgtcattcataaggcattacctggtttgattttgcagtttgtgtgatgagactagaaaaatcatgccaataagaaagctgttgtggatactatgactttgggaaacta

SEQ ID NO: 37258 - DNA, 1779 bp, Bovine  19866881334616
  misc_feature (1)..(1): n is a, c, g, or t
ntgaatgaataatggaatgcactaatgtgagagattgtgaaattttcttcagtagagatctaaaaaattaattgctaaactacttcctgggctcttccttaaagagtgtccaagttcatgaattggccaccaggggtcaccagaagaattgaaagggcttctgaggcaaagccataatttcctgttcaggaagaagagggcaatttgtaattctattgttaaagagacttctcacttaaatatttaggattcttttgtcccttcttttatatttaaaatttccttgtcccttatttttgatcgtcagttcttgctgcactactctgacctatatgtcattggtagatatttttctttttaattaaatatataaatgcttttttgtaaggtattattcacatttcaaatattagcccatcaccaaaggctgcctttaagtattcagtctaacatcttcctgttgttcttttatattacccatttctttaattacttatttattacctgtcttcccactttaccagaaaagtagccagagctaacacttaagtagatactctaggcactgttcaagtgctgggcatatattaactctgaatctgcacaacagtcctgtacaatagacattattattaagttcaagcttattattatgttcaagcttattattatgttcaagcttatattattattatgttctgcttatgttcaagcagaagccaatgagacacagagaagttaagtaacttgcccaaggtcacacagctatataatagcataattagaactcagaccctgacagtctagtgccacagtccatgttcttcagtaactatccttcctgtccatgagtgggagctggcctgcatccccagccctagaataatgcctgttgatgttctatgttaaatgaattaatacttcatggcaaattcagggtgtcagactattcagccagatgatgatacatactgatatatgaagagatttccacagcatgctgttaagtgaatgcagcaaatatagaatattatatattactgtttttgttcagttgctaagtcatgtaagactagtttgggggggggggaaggtacttatgtacataacataagtaacatctatgagatatgtgcatatgtacatgtgaggaggtagggaagggtatagagaaaaatctgaaagactaaatactccagtgatcatctgtagggaataggattggtggggcaagagggattttttataccctctttgaaaaaaaagtaagaataagtattttctttatgatatgaaaaactttaagtaaaattttttaaatttttgacaaaaataaacacactctctagtttcatacattctttatagtttcagaataataagtactttaaaagtccttcatttcctaaatctataaatgaagtaaaacagttgcttctttcttcattcaagtctgagttttgcaattttattcagggtgtcttcatttctttttcagttcagttcagttcagtcactcaatcgtgtccgactctgcgaccccatgaactgcagcacgccaggcctccctgtccatcaccaactcctggagttcactcaagaggagagtgaaaaagttggcttaaagctcaacattcagaaaactaagatcacttacttttattctttcctaaattggggtagggagtggggagaagggcttcattcccacaattgagagctaaatatatcacctaaggagttagactgccagggtctgaattctaattatgctatttt

SEQ ID NO: 37259 - DNA, 899 bp, Bovine  19866881370955
  misc_feature (1)..(1): n is a, c, g, or t
nataaaaagctccatggtcaaaatcatatcaataaatgcatgtttaagtagagtttatagacagagaaaaaattcaaagattctttcctagatgacatttttaagaaatgtcttattctaaatgcctcagggcaaaatttcaacccaaatgaaataaaatgagaagtggccagttatttagcaagatcattgtcattacacagaattgaacttttttttcagttagagctttatacatattttggaggtggctgatacacctccactgatactgatacactacactgcactgatactgatacagtggcttacatttataattttctaattaaaatatatccttcatatcaattttagagaagtaacaagcttaatccatggcatttaatcgtttgggtttgttttgacatttttagaacatgaaacctaatacagagatgtgattactttgcaaaagatttgcgaggaaggtgacatgccacatgagattttacagagggaaatggactagtgtggtagggtaagggaaagaaaagatctcaatgtcaattctaagcacatgcatgattttcaaagcgcctctctctgaagtctaggaataaccttttatgtaaactttcctccattttatcacacttcactgttctaccctgtcccttcttagatttaagaggaaaaaacaaggttaaatgtacaagtaactttgctaaccaacaaccaaaggctgaatgcttgatccactcagtaggagcgcgtgtgggctcctctggacccatcacctcatggcttcttgcctgacgctcagaccctgacaggatgccctaatgctgtctcaacacaaacagagggtatttaagaaagtgtcctctccagccgctctgtaccttataagaaattta

SEQ ID NO: 37260 - DNA, 2390 bp, Bovine  19866881440339
  misc_feature (1)..(1): n is a, c, g, or t
nctggtgagtttcagcccatcgggagcggctgccccgctaggtctctcgccccctgcccgcgcccggcgctctgggatggagagagcctacctgtggccgttctgctcgctctcccggagtgagggcaggcggccgttgtgacacttgtttggctggccggcaccctttgggcgcccacagcaccttcggcgcctggagtctgacagcacagaggtgggagagcgggggcgcccttggtgtgcagaagtggggtgtttggggatttgtggagcattaggcaagaagcgaggcgagcagggcgggctcgcactttctagcgccgctgaaccagggctggcgggtcggggaaggtgagggtgccgctgggcgccccgaccctctggctgtgtgcggtgcccattccactggatgcccagattcaaggcaagggggagcaaaccctcgctcttcgcatacttcattttctttgtttgtttcagaaattagctccgtggagacgcacgcttggtgtatggacttgagatagggataatacagggattctgtcattctggttctgattgaagttagggaccggcggtcaagcccagcctctgaccatttgcccagtttcaggggtgtgtgcgtgtgtgtgtgtgtgtgtgtgtgtgtgattgtcctctgtggcctcttagaatacgtttggtaattttactttccaggcatacatttttttttttttttctttgaagtgtggctgagcgaaggaagggcttctttcagcttttctatggctgatcagcgggtctaattgaagagaaaaaatcgctaatgaatctgaaggagtaggaatcaatagcagcagaccctctggattctgagtatgacaggtttctaatcaggatgatgcattaggtagaatgcttctaccgctctggtcattgaaaactttaatgacaaaccctaaagggatagctgacaagacatttactgtagtttacagtattcaggggtccagaaggtctttgaagtcctaatggaaatgctcaatatatcaatattgtattaatttctattgtgtgtccgctttaaattattactccaaaaattaaactcagagaaagaaacgttctattggaggcattggacagcaagccaggcattaaggaaccctatctctagatgtgtgactaattaaatcataaatgcaaggtgatttgactaaggtgcagttgcgacatggaacaaggtgattacttgaaagtcatctattatcttttttggcaggttttagttccagtgaaatagcacttcctttcttgatcattaccaactgatgaaaagcacagtgttgttatgtgtatgaggtagtcgaagtttctggtagtagcagccaatggggcagaacagtcatatcttattaagagcagcaacaagttgaccgcctgtggttttaattctgagaactcagcaaatgctacagcttatttttagtatcctcaaaccactgatgctgcttttcaattcattttggttgactaacattgaatttaaaatacagtgatgttggcttatggttagcatatggttacccctctttgaaaatggcccacaagatgaactggtgggagagtggtaatgaagggaaagaagacaagagaaaggacaataaggcagtattatcatatgatttactggtgtataaattacaggtgctgtggcatccgaattttcagatcttgatgaaaaatctccttaagcttaaggacccttattgaaaaacctaactcagccttaggaagaatacatgggtttgaagcagcactgtataagctttagatgacgttgattgctttgtagataggatagagatgcatgtgaaggttctattatattttttgctttatttaccactgttttaaatcctaatgaaaacagagagataacaggaaagctgagattcaaaaagtgggcagggatatgtcatttaatatgaatcaacctagcccatgaggttatattggctaattcaccacttaatcaggcactttgtcttgaaaaatatgagaaccagaattctctttttaagcacacttaccatcatgtggatcatgaataattcagaaaacacaagcaattcacacctgtgaaaagtgttgggcaggaaagattagagcttgtttgtgatggcagctgggttctcaggcaaaggtcagagtctgagaaagagggcacttcatcagtctattaatcaccgttttttgcatagtaggtggacctactatgtgccaggcctcaggttggcctcagtctccgcttcaaggaggttaagtgaggaaaataatttaaggattctttagagcttccctggtggctcagatggtagagaatctgccttccatggaggaga

SEQ ID NO: 37261 - DNA, 1337 bp, Bovine  19866881512822
  misc_feature (1)..(1): n is a, c, g, or t
nccagtggccaagtcatgtgcctgcctaaaatgggtgccttttaaaaattcatcaaaggtgagggtaacccaggcatcagagaacaagatacatgaggttcttgctctcataagtaggtctgtctagcctggcctatacttttgtctccaaatacaaacaaacaaatacataagcacgtaatttttaaaaatctgataataaagaggctctgccaagagttaaaaaaaggcatccaagagacaactttgggttgaatggtatagaagatgtccctgaggagccagaacatctaaactgagatccaaataataatgaagccggccatgtgaaaatcagaggaaagagaatgtataacatcgctaagactggaatgatctggatggatattcaaggatcaaaagagaggctgaaccaataaggtccttctgtatagtacagggaactgttttcaatatcctatggtaaaccttattgaaaatgaatatttttttaaaaagtatatatatatatatatatatatgaaaagtatactttttaaaagtatatatatatgaaagcattagtcacaactgtgtctgactctttggaaccctatgaactgtagcccaccaggtttctctgtccatggaattctgcaggcacgaatactggagtgggtagccattctcttctccagggagtcttctggtcccagagatcaagcctgggtctcctgcactgtaggcagattctttaccatctgaggcaccagggaagcctatgtataactaaatcactttgctgtgcagcagtaactaacacagcacggtaaatcaactatactttgatagaaatgaaaaacaaaagaaaggctggagtagtgggcaagagaggagacagatgagatgaccagggcaagggccagggtccagatcatgcagagcatgaagccctacctgccttgttcacagaggcatgcccagggcttgtctcactgtgtatattcaataaatacctgttgaaaaggagtgtctcctcctgcctctgcatacgaaggggccctgaagctccgtgtggccccggtgccctctagtgaccacaaactccagcccatggccctcagtggatggcttcatcatcttcagaaaatctcagcttagccttggccttggggcccagcctgtgggcccatcaataatttccaggatatatcttattaaccattctctgcaagtagggctaaatcagttacaaaaatccctgaaacgagaggaacacatgcacaccaggccctcattccttaccacaggcagcatttttcaaagcaaatacatggatgtctgatttctctggggaa

SEQ ID NO: 37262 - DNA, 2424 bp, Bovine  19866880166605
  misc_feature (1)..(1): n is a, c, g, or t
ncctctgtcgtccccttctcctcctgccctcaatctttcccagcatcagggtcttttcaatgagtcagctcttcccatcaggtggccaaagtattggagattcagcttcagcatcagtccttccaatgaatattcaggactgatttcctttaggatggactggttggatctccttgcagtccaaggaattcaagagtcctctccaacaccacagttcaaaagcagaagttctttttattaaagtatcattatatctgatacttggtgactgaatttggacctgaggacataattgaactcagtatcttaatagtttaattaacttcatttgaataaaaactgatgacatatcttaattggatgctaattatgaaaacagattaagacctatttatgtcatttaataattggtctttttaaaaaaagattcctagacctttaaaagtgcttctaaaaagacatttaaattttttgcttgttttcttgagtattatgctatttatgtgtatatatttgacccttaggaagttaaaaagatggcaaggcccatgaaaattgcatgtctacgaattgcctgtgccccataggtgctataagataaatcttttcttacacaatccagggtcagccagtaaagaagtgccatatttcagtatttgaaaaagcatagccacttgaaggataaaatcactggcacattcaacttggatataatggggaaagttaaagctgccattatcaacctatttgcgtctgagttaaagggacaggaagtcatacaattctagtgcctggacagtgcactaaagcattggtcagctgatttaaacttgtgacctctctatgctgttcattagatgtggttgttcatgtattctctttaattaaaatttggtttctagaatgtggatggcaacatatgatactatgagaaaatcagatattacagtagatgtggaaaaagttcctttcaattgctagcaatctgtctccatttctttctaacttgtgcaaagtccttaaacactttaaacgtcaaaaggcttctttgcattcccaaataaaaccagtgtcacttgtcttgctctcttgttccatttattgtaataaaggctgattaaaaattaaaccagagttcagaataaaagcaatgtcagacaatgattctaatgatgctaaagcggtgttgtactggagaccctttcaccaggaagccaaaccaatgccatcagcagtgtctgggagctaattaaaaatgcaggttctcagacccccaccccaggcctactgattcagaatccacattctctcacgaccttcagtgactcatatcaatttagaatttagcagtgctgagctaagccatcctgagccagaggatgccaagtttccttccggaggagttagccttgtgaatcagaacgaacacgacactgggctttgatagccctaaatgcgactgaacaacaacagcaaaactgaattgtttttctgccaccgcattatctattggagaaattccttgacgagtctttttccccatctgtcaaattacgtcggtcaatacatgtgctgttcataaattatgacgcacctaccacagtgtctggcatacgacagaaacggaacatcgtttaattcctggcccttgcccactctctccagcagcaccgataccctgtgattctatggatctcaattcctgtcacagacctcatctcctactgccactgcccccaactgaagaaaataaacataaatgatcaaatcctgcaaaagtaacatcatatactaagaactaaatagttatcagtggcagcaaatggagttactccaagctttgataggcagtatccctcagaaataaataaactggagtcctcctctactagagtcagttaggctagaaacaatcaagctaacatttctgtttttcaaattatcaaaatgttgctgttgcttgggggcaagacgtacagatccttggagtgttgtctcaaaacagggcgactgtcaacccaattacctattaagtgctttccgactttcaaagtaaccctgaagaaatctgtttattctaaagagttgttgggggagagaaatgtctcccaagatatcgttttaaatgctgttccattgtattttgaagtgatatgttttgtcttttactgaataggttattattcagaaatgctcacttatctttacacttcattttgaattcaactacactgtgacttttcggtaaatcttttatgaacaaggtctccggtgggtccactttaattggttaaggattatcagccgagaacactgtcaaaactctagacggtatttcttttaaaaaatcatgcacaaaacttttcctgggataagttgtctggatgcagataaaaacaaaccatgctcttgtgcccacaaata

SEQ ID NO: 37263 - DNA, 690 bp, Bovine  19866880261763
  misc_feature (1)..(1): n is a, c, g, or t
nccatggacagaggagcctggggactacagtccatggggttgcagagagttgggcattacttagtgactaaacaatagcagttatcataatactgttctcagaactagccacattttctaggccactgttagttgtgagaccaccactgttggttaactaaggctctaaggagcataaaggatttttgttccccattctgcttattttttaaaaatataaagatatggattagtaacgctatgatctatgttctgtcaggttataatcttacatgtatacaacttgttcagtcttaacaaattttttaaaaagttctcatatcttcactaatttattctaggtcattggaataaatttcatcccatcttccaaagtcttttacccctttaaacagctttggtgacatttcaaggtcagtaactgttgaggataaattgaaagaaaatccagttaagatgaggcctaaaggattaggttatttaaacagaagacatttcttgacaatgagggttattagatattaaaatagaaattaccctttttggtctgttggctataaacattctcatttatctgacaggaagtaaatgtaataatttcagaagtcttgggaacagaaaagatgaccttaaaaactcattccgtgaatataggtgtgacatgtatgatattgagcatgaagtaattaa

SEQ ID NO: 37264 - DNA, 1633 bp, Bovine  19866880389361
  misc_feature (1)..(1): n is a, c, g, or t
nacgtaccttctgattccaccattgtgttttatgaagttggtgaatctgcatgtgcctgaaattctctaagcctctatttcctcgttccaggttaataatatctcctcccaaggtttgtgtaaggacttaataaaacaaccatgtgacatcaactagaaatctgccccgcaccaggacagtagcaatgaatgttcgtcacacatccgcaggtctctgaggatgtgagaagtgacctggaagtgaacagatggctctatcggatggattttaagagacagggaagccatcatctttacaaatggagattattttttatattaatacaacctaatcaagctcgcccttgtttaaatgtcatcgtatactggctcatagtcaattagctacattgtgccagtttcaggtgtgcagggaagtggttcactgatacatataagtgcgtccattctctcaaatgagacggttggatggcatcaccaattccaatggacatgatttggagcaaactccaggagatagtgaaggacagggaagcctggtgtgccgccatccatgggtttgcaaagagttggacatgactgagccactgaacaacaacgcagccaactaaattgatttcagatttcatagtcgaatgtaaagctattgctcgtggatgtgactgcagtgggcttaataccgtgaaggcaagatgatgttagctgctggtgaggggcctaaggaagactttggagggaaagggtagggtagatggacagcacgaaagaatgtgaaggaagtgcagccacaggcgtctccctgcccgtgaagaggcctctggtggacttcagcaaggcagccctccctacaaagttgctctcagtgttcatgttaaggagactatttaatttgtatttgcacaaaaaatgaatggtggatgagggaaacatgagccctggacagtgctatacgcccttgaaatacagcaatcttgacacattgtattgaaggaaacacttttcttagcaaaaatcccaaacaaaataaatgggaaatgaaagcgttttcaacagtaagtgtatacatttatttagattgaccttgtttccaaaagaatttgagaggacttcaaagggaatggaggatttgttttttcatattaatttggaattcagtgcattaataatgaaacactgagaaaggcagaagagttggttcaatcagaatactccgatatgcacaacaataatggattgtcgggctcaaggcccttagacacagacaagccagttcttgatgaacacaacctgtatgagagctattaaccattcaaaagaaagccacactcggggtgacctttgctgttgttggttgtttgcagcaaagactaatcccgttaaaataatacttgcagttagattcacatttcaatttagaaacagactggtgaaaacattaattgattcctgagtgtgcaggttagaagggaaaactgagactaaacaattcacatgtaaagtaagcaatctggaccatctcttgaaaggtaatgggtgctgcaagaaaaaacagaccagtgaaagggaagaggaggaagcagagttggggagaacacaggtagcagcggtgcacgggctcacaagaatgatgcag

SEQ ID NO: 37265 - DNA, 1110 bp, Bovine  19866880567738
  misc_feature (1)..(1): n is a, c, g, or t
nctcattctgcagggaaaggcggcatagcttgagtccacccgtgactctgacacctaccaacctcatcaattcacatgttctttctaagcttgggtttcaatatcagcaaactgggggaaatgataattcctatctcagagtaagactgtgaaaaagatctatacctgagacatcgtatatggtaaataatggtttacagatctatgactctttcctatgactttgaaataaggatgagaatcaaggaacaggaaaagtggcagagagggggaaaagggattataaaactggaaataagccaagatacttcaaataagacatctgtaacataagggaagtcaaacaaactaaacatcgaaatttctcagttaacactgaaagtagaggtgaaaaattaaattagtagaaatgactgaaacagatagtaactaaataatctgagaagataatgaatcattgggtaatactctgtaaggaagaaaagacaacaagatacaaaattatatgcagatgtaactttttccccccaagacaatggtactaggcactgtcgcagataaaagcgtagggaactcacactcaccctgtgtggagtcccatctcaggggtccagcaggacagagagcctgggaccacaatccaaggtaaatgtggtccgtgaagggagcataggatttcatattccttccctgtttcatacaagtttgatgtactgatagtttaaataaatagcttaaataatttatttgaaacagtgatcatttaaaagagagtgaaactaataataacaaataaaagaagagcgaatattgtaagtcagtgaaacctcaggcctgaccatttgctctttgtccacaagcatccagagagttaatttaggaaatgttaatggaaatgttactggcttcatggtcaataaggctgggaagctgttccctttggcagctctgaaagcaacggcggaaaactagcacagctcaagacgtttatttccagccatttcctttgcctgcctgaaagtcctctctatgtcatcaatctcctgatatactcttaaaaaatcattatcctcttcttcgaccggaggaattctctccctctcgttcgga

SEQ ID NO: 37266 - DNA, 1715 bp, Bovine  19866880861306
  misc_feature (1)..(1): n is a, c, g, or t
nttgtgaatgagtctgcaataatctgtgtttgggtgttttgcacacgtgtgataacagggtgtcatcttgacagcaggcaggatcctgaacccagtcttcaaaatgttcaacttcaaaatttcatttaaaaatcttttttcctagattctttccctttaagtgcttcagagtcaaagtagaaaacaaaataaagatacttgaacattaaaaaaattttcaacttctggactttgatgagccaattttagcatctagctacatccacccacttactcagccaggtcagaggcagttacagtaggtgggactaaccgaaagtgcccagcagctgatagccactgtggctttccgctgcctttcaagaagtgactgctagctggtggatatctggatattctcctccccataagaaaatactcttcagcttttgggacagcatgtcatgcatcttggtaaggtgggaagatgtgcctaagtcagagactcaatatccagaaagagacagacagaaggaggaagagaaaacttcttgtgagaactgtccttagaaaaataattataccttcaaagattcacttttttgatatgatataaacaggaacaatatattcatcgtcaaggttttttttttgtcttccactcagagaggtttctgtaatcagcacgcttgcttctgtgtgatgcttagggatctgtgtgccacaccaggaggacgagggtgtgtgaatattacggggttaagacctggactgcacccacgtggctccctgattagctctggccaagaaacacagctttcaactagatttatttggaagtcactgtcctttcttacacttgaaatcactttcctgaaacttttgctctattagaccggagtcctagatttatgctttaactcggctggatttattggacgccagacggtcgtgcagtgccttgcagccttccttggaggttggggcgaggggtctgtcacatcgctctttcctacgacttccattcaagttagctataaaagcatattatgccactgaacaccagctgtggcaggttcttacagctttgtgaatagatttgccatttttgtttgggctgctgagtcagggaattgacattccactgttgtgcttttaaaagtatttgctgtgacttcattttttttccctctctgacagctgaagcagaaaggtggattagctttcttgattccaattatcttccctgtagtatattgctgatacgctagtgtgtcagataagttatgagaagtagaagaaagtgtcacccggtaaatgtgacagtgtttgagggaggccttgaaagatatttcttatcattgatgggtctctaaaaacttttttttaagagaggtagaattcttctgaaataactaagttggatttttttctgccaaatttgctgaaagactaccatgcaaatgtcaatttttgtttttaaaagagacataaattgagaaagtcagtgtgatgtcctacccgatttcattccacacttgagttattggaaggtttgcttcatgacacttgatcccttctgttttttcttactatcaggcagtcgatcatgtctcagaaagaccagggtcttactgccacatggagagagatttgagataatgactggataatatctgcagaaaatgcatgtcttcatgttttgtttttttgtgttgtaaattactggatgaagt

SEQ ID NO: 37267 - DNA, 1597 bp, Bovine  19866880958607
  misc_feature (1)..(1): n is a, c, g, or t
nataccacaggctatggcttcaacaacagaaacttatttctcatagttttagaggctggaagtccaacatccaggtcctaacagggttgattcctggtgaagactctcttccctgcttgcagatggcacctacttactatgatggcatctactattcccatgatgggaaggaagagagagcaagctctctggagtttattcttataagagcactaatcccatcatgagggtcctacccttaagacttcatttaaacttaatcatctcccaaaagccccatctccaaatatcatttcactggggggttagggcttcaacatatgaattgaggcatggaggggaacacaattcaattcagtccatagtgttcactctcttcttatctatcaatcagatacatacagatatatatagcctctattctctcactaatacatctccctgctgctgctgctaagtcgcttcagtcgtgtcctactctgtgtaaccccatagacgacagcccactaggctcccccatccctgggattctccaggcaagaacactggagccggttgccgtttccttctccagtgcatgcaagtgaaaagtgaaagtgaagtcgctcagtcatgtccgactcttctcgaccccatggactgtagcccaccaggctcctccgtccatgggattttccaggcaagagtactggagtggggtgccattgccttctccaatacatctcgctagtacatcttattatccctggaacatctaagctccagaatagctccctccctctgacccagtcatatatctagatcacacactttctcactgtggcttcagctatccttcatttacatggagacttcccatccctgggtcactttattcttacaaaccgtcaactgcctcctagcttcatttcaattctcatctgagcactcaaacaaaaagaacatgtaaggattgcttatactacaggatgtatcttccatgaaggtcatgggtcttcattttatttcacggagcactcccatgcctagggcagtttatggttaatagtaagtagatgctttaataaaatctcattgaatgaataaaccctttcatgaagaaaaattctacacgagttgatgatgacagtcatagtcagtcataataatgggttattatccttaaagtaggaagtgggggaaatattgagttaatgaaaatacttctttttctcctgggtaagtggcagcaaagagttcatttagcccatactatacattccattctgtcctgcaattaagccaaagattcatgaactttgttatggaatgaatttgcagtaaaagtacaatctcaaattctttaaaatgcattctcaacgaacacagtatctaaagacacagcctggctcagtggaaagaacacctgacagggagtagcaggcctcagctgtagctctggttctggctaatatgctctgttttctaagagaagttagttaacttccttaaaattcaatgtcattatgagtgaagggattggattcgattatttctaaggtctctttgaggtgaaatttctcttctagtctaatagatttaaatttttaaaggtctt

SEQ ID NO: 37268 - DNA, 1580 bp, Bovine  19866881010194
  misc_feature (1)..(1): n is a, c, g, or t
ntggaccacctgctttaatcctattatgttgtgagcttctgctcagcatcttgtccacaagatgaacactgtagctgtcagacaaggagaaaaatgaaataaatgacagtaatttgcaatttattccttgtaaagtagctgggtgcagaagggctgctgggtgaatgtatttcatcacttgacatttattctgctagttgatcttgattgattttagagtcgcattcctagggttcttatattcaacacattcgcatgcagcagtgtttctaagtaatgctgtgtgcgtgtgattaatcatatgaccctattactaatggcttatgaagaaatcatttaaatttaaggttacattaatgttttttaaatccctaattcattagttaaattgtctgagattttctacaaagcactaaggaaataaaaatatgccaagatacttcatctgagtataaaaacagccacaatatttttaaacaatcacatctgcttctttccacttatgggacacaacaaaaaaggctattcaaaaattattttctttcaggaaagcctcccaactcggaccctcttaactagctccttcatgaactttcatcatgaaatgttaattagcgttaagtgaagagatggtgtactgaatgagcagttaaaagtttcccctccctaacttaactcaaatgtctctattttatgagtattacagacaaaagtcaaacaagttataataagtggttaggaagaacaacaaaaaattagctaagaataatttatcaagatgaactggtggtaaatttagaaccagtatggggaactggagattaaagcatctattgagcaaaagtcatctcagaattctgttatgaaataagttacaaggactcccgcaggttactctaggtgtgtgcaccggtggtccttcgcctcactacccagaggaagaatctttccatcggcaaagacacagctaatcagaggagagggtggaaaccagaatccctcctgagattacttcagagcccacccacagcagctcttcccctgctcatctcccactggcaagaagaccagtgggagatgagcttcacttcatttaaaatactcttcccttcatgcaaagatgctggatacacaatgtctgctttctgaaggaaaagaaaattgtggagaaaagtctctccctgacggagttatggtcatcaggagccccagacaaaatattaaataaggctggagaagaacagtaggaggagctgccaataatcattaaggaacaaggatgacattgttaaagtcactgtatctctggtgacagcaattggtgtcttctcctgaatgtagagctagtagtctcttaaaaacatatgtggtctggtagtattcattaactggaattacaaccttttaatttcatgtccaaaagtagtacacatgctcttcaagcctttttggttgaaacaatgactgccactctccttggctgtttgaaatacagccactttctttagcagaaatgtcactaaaaatgtctcagagccctctcctttagaacagaggacatttactaaatgaacagtttc

SEQ ID NO: 37269 - DNA, 1187 bp, Bovine  19866881028111
  misc_feature (1)..(1): n is a, c, g, or t
naacttcccaaaactatattgaatagtagtggtgagagtaggcacacttgtcttgttcctgactttagaggaaatgctttcagtttttcgccactgaggataatgtttgctgtgggtttatcatatatggcttttattatgttaagtgcggttcctcctatgcctgctatctagagagtttttatcataaattggtgttgaattttgtcaacggctttttctgcatctattgagataatcatatggtttttatctttcaatttgttaatgtggtgtatcacattcattgatttgtgaatactgaagaatccttgcatccctgagataaagcccacttggtcatgatgtatgatctttttaatatgttgttggattctgtttgctaaaattttgttgaggatttttgcatcagtacacacttcttatttttaataggtaaattacaagataaatcacagtcacgtggatagcctgagtgtttataaaaccacttatatatgcaaacaaattttaaaatatgttaaagagcctcagctatctcaatagtgatacctacttatccactacaagaattccctaactaaggggttcttagtgatgatgactgtcattgtaaataacattataaattatctataaacagagaacttgagtacagtttgccaatgtccacttttactcatgaatgagatttatccagaatcccatattgtatcattctatgcaaatttaaaactactaatgaaattgttttctttgaatttgagatggagcacaatcctgtccaatgaccatacctgttggattgttaattaacttcacatccaccattattaaattattacccatgattgaatgtgctaatgaaaaataactacttgcaacaggcaaatattattgaaaaagcaataaagccatggaagccacaaaaccagaaatgtaatccatttttcatttcattgaagaattcaataatgttagagacatgcaaataaccttggtgtaaacaacccttggtttacatgtgagagaaacactcaggatgaacagaagtaatattttggctttatttttctttagattctcaaaatattttttgtaatatttaacatgtcaggagatatagaataatatttcccaggcatgggaaaattttagaaataaagctaaatttagggaaaaagtca

SEQ ID NO: 37270 - DNA, 1470 bp, Bovine  19866881080773
  misc_feature (1)..(1): n is a, c, g, or t
ncgctggcacttaccgactgaacaagtgtctgagactcgtgtttctcccttttttgtctgtgagctccttgtggacagcagctatggtgtttccttatccctgggcgcttcacacgatgcctggagctcaggaaacatctgtgaaccagatccctccctcctgccctcttggtattcccccacccatcatccccatcttgctatacctttcccaaggtttcttggcaaaaacttctgttccaccaactgttttagctcctttgagaattattaaatcctagtctcttattttctaattatcttcaaagaaatgaggcttaaatataggagtaccaagttactaccaaaagctaggtggatgtaaaatattatagttaatcagaatttcccattaagtaaaaagaaatttacgggaaggtttaggatttcagcaagcagtcccagcctgccctggtttttacttaagatgtttacttagcatttaaatgactgctttgaaaacatctattctaataccttatttgggttctgagggagatgatacaaactgtctatcatgtgggcacttgacccaaatcatctgatccccagtacactatcatttctaaaataatctgctctagagaatatactccaggcaaaataaaaatttcaacttataactgaccatctcaagcacctgcatacatttttaactttttttttttcttttaaaacaccatttgagggataaattcttatgtaccagtgatggtttgttccatttattttgagagctcttatgtacaaatggggcaaggcttttgcaataaacctaagaattacaagagattcacttgccctactgtagaacctggggttatcacctcttcagacaacattcaacagcccatgcaaattcaaaaattaatccccacaagcctattatctttgctgtaactgtacacaattgtccaatatatacctgactttctcattttgaccgttataaacttgttactgtattatctgaacatttcattcttttttttccccctgaaataagagaagaaaatatcctttgccataattttaagtatgattgagaagggttcaccttcccattttcaagtggcttaataataggaatcatcaaaacaacatatatctttggagacagcacatgatttattgtgctgattaccatttatcctgcctatccatgggtgaacaaggaagatgaacttttcagaacagaataagacttttccacagataaatggttcaactctagcacagttacatatttcccctagagaggaaaaatatatcatatttataatcacagtctctcctttttgtcccccacatgctttttacccccaatacaacaatacttttagtaatcacaagccacttatctatccatttgaactatcaaaaaaacctaactttaaaatggtctctaagccccccaaaagaggtctttta

SEQ ID NO: 37271 - DNA, 546 bp, Bovine  19866881283722
  misc_feature (1)..(1): n is a, c, g, or t
ntttaaaatcccatgttatccatgatccatcttttattaaaatcaaatccagagactaccataagcattgtcttatcacatcttattctcacctaagtatttaacagtacaaatcaaggtgctaggtgttcttttctgtgttactaggaaaaaataagtggtttttaaatgatttttaattgtaattataacagtatctatctttcttctcctgatgactttttttcccccaagtggtctatttttatcgtgacatttttgtccattctatgaatttcatcatagggaagaaacagcagtttgtcttagaacagctcaattttgatctccaggtgacaagctgatatttctttcctttgaagaagcttttaatatgatgggttaaatgtcaaggaaaaaactctcatcctatattgaaccttgataacctcatttttcttaatattaatgacatattgagatttgatttctttaaaataaggttttgtttttttaacagaggtaaagattttttttttcttcaaaagaatgcatttatttcgggat

SEQ ID NO: 37272 - DNA, 1004 bp, Bovine  19866881314671
  misc_feature (1)..(1): n is a, c, g, or t
nccaacccatcccatgaactacccattagcctaatgtgtccatgtctgatcactttggggtatttctctgccccactgatctcttatcattttttacaacttttagttgattctccaaaaagaagtgtatgaccctacgaaagaaactctctgattctctgatggcagcaatctggtcaactggtcaaccagggagccttggtttagagactgaccaggaaatcagagccaatggcgtttacttactgccatttgtaaaaataaatgtttcagagtcttaataaccatgaagaaaaaattctactatataaccactttcatttttacacattgaaaaactggtatgaaaaagaattatattttggcaaaagttacaggcttccaaggtccaaatgaaagttttatgttttggctaaagttgaaaatactacctttcctcaatggaaaatgtcttaacagaatccgaggattctctaatggaaatagaagcatttgctttttggtcctccaaacttttacatattctctacctcaaaaataagtctttaaaatattcagaaatgtgaattatgcctgagaggtagtgacttaagtaaaattgaaatatcacatatttacattttgtttcaaatctttaatatccctatacctcagttttccttactgaaaattatcaagcatggtcatcattaacattattactattagtaaacctccatgcccataaatagtaaagagaattggtttaaaacacacataccttcatttcatgtgagtgctactaacaaagaaaccatctgctgacttaaatgaatcagtcttaaaacactgataacaaagcaaactttcaacagcagtttgcttacccccaaactaacatacattcagtttaaagggcctcctatttaattcccaagtctcttttgtatgtaaaaaagaaacttcacttagactggtataaatgatatttagccaatttgctttacaaatgattcctttaagat

SEQ ID NO: 37273 - DNA, 753 bp, Bovine  19866881337197
  misc_feature (1)..(1): n is a, c, g, or t
nagtaagtggtttttactttgttcagttttgctacacattaaaggtacttctgaggatactgaagtttttaagttttttctctaatacatcactacaaattagcttgtcttcaaataactagaaagatgaaagtaatttgatgttcctgttgaatcaggttggcttctgagaaaggtgtatgcgtttcattggtatgcaccctgaggactggtatcacccttctcatccttgtgagaagatacagtttctgttcttactccagaagaaaaacaatgtggatctttcatgcaaagcattctgaggattggctatttaactacttaagtcagcttttgaataataaattaataacacgattatgctaataagtaactctaatatttgcttaacaaaataaatttacctactttggaagcagatcaagtggttaaatagagcagtaaaggagtattctggaaaatgcatctaagttctattaatctaaactattttaggactggtagcaatgttttgttggccaaatatacatgacagagaccctgtcttagatactttcttggaaatagattgataatcatactgccttccattttattattttccagcctgtaaaatactttcattacataatttcatacaagtaggggaattactgccagtgtatgcatgcctagttgctcaatcatgtccaactcttggtgaccctgtggactgttgctgccaggctcctctatccatggggatttcccagg

SEQ ID NO: 37274 - DNA, 754 bp, Bovine  19866881506152
  misc_feature (1)..(1): n is a, c, g, or t
ntttgctagttgggttcccacactcagatctgggaataagccagggcacttagctgtgtggttatgtatgagatatacattctgtctttttgttcaataaattttcatatcaattcctctgctacttgaaaagtgcgttagcacgaactttatactttcacatctctccctttccttacccatcactgatgcatcttgatttatttgcacttccttaacttcaccttgcatctttagctctcccaaatgcctctttctcaaacttgattacttcttgattttcttctttttccattttggtctattctattcagggtgttttccttcctcgggcaagtaaattgtctttttaacagtccccatttcctttggttttgtattgattattgatttcatatatttcattccacctactttgcagtctttcaaaaattattttatgtaaattattgacccatttaatgttactttgataataatttgttggagtcagtggtttagctctcttactatatattcctaatctgtcattcatattattaaatataaactgagtgatgctccattttttaccatttcatgtatagtaacaagcttttctccatactcacaacacactcataaaatttctattttgaaaaaatagacctagattgcctttgatattttggtttgtaggcatacaccaatatgcgcttaggaatgtcattaaaatattcttcattgcttattttttgtctttgtgtatatttga

SEQ ID NO: 37275 - DNA, 762 bp, Bovine  19866881686811
  misc_feature (1)..(1): n is a, c, g, or t
nctgcctggagaactgcatggacgaggagcccggtgggctacaatatcgccatggggtcactagcagtcggacacgactgaggattaacactttctttgctttcccattgatttacagacaaattatctttctagtaacaaacacctaatagtataaatcttcaaggtgaataagggtaaaatatagagtacactgcacatagataaactgttaagaaatactttagattaatggtttccaaactttgggtttttaacacacggaaacttttgctacaaaggaacagagagcagttgcagtgaggcagccccttaccccacagcagaaaccttttaagtccgaagccactgccaggggccaggagctccccaacggggatatggatcggatgcagctagggagctttcgagaccacctgtgcccagagccggcttcaattgctggttccaacgagcaaccaggggtgttaactcacgctgcaggcaacaggtagatgaccgaaagcggaaggactgtcactcaatattttcaaataacttaaaaaaatcatgcatacatactttccagtaatttggttggcaatttcgagcacgccagtctgaatgaagagcctgagaaacgttggtggataaatcctcattgataaagcccatgctttcggcaaacttagtggctggagattgggaacaaaaatgtacatgagttaagtgtcttcttttaaataaaatgtatgcacaggaagtgctggggtcagctgtctc

SEQ ID NO: 37276 - DNA, 680 bp, Bovine  19866881851250
  misc_feature (1)..(1): n is a, c, g, or t
ncataaaaaaaatgcatcttctaacatgtactaaatagaaatttttaggttctatcaatcacctaccttggtgattaactgtgactctatatagactcattgagaaacatctctatgcaaagtcattttgatttaaatatctcatctgcattatggcaggtgaggaccaggcttacctggaaacaattctatgaaattatgtttccagagtgtggcttattacttcagaggacaacatataaaaagcaataataagtaataataatataaatgacagaaatccacttgtgctacattggtgcacagacttttagaagtaggattttatctggcatataatctcaacttgtgtgaacagaagtatccattacggtggcctgagggcaaatttaacttgaatactttttcactaactgaaaatttaccaaaagatttatagttccatgtttggtttcaacctcaaagtgccttttcctggaaagtttttcaacctttctcaactgtgtatgaattattattgtaagaaaaaaaaatgttgacatttgtaacatttgtcagtcttggtggcttgagaaatttccaaaaacagttgaaaccatttccagttagcttaagaaagtcaggggaaggctcaaaacgaagaagaaggtacttcatgcattgcacacagtagggattca

SEQ ID NO: 37277 - DNA, 1244 bp, Bovine  19866881942241
  misc_feature (1)..(1): n is a, c, g, or t
ntgactaatggacgtgagtctgagcagactctgggagacagtgaaggccagggaagcctggtgtgctgcagtccgggggttgccaagagtcggacaccgctgaacaacaaaaggactcaaggtcagcagccaagcaaaggacacgctgcagataacatcgtgtttagttgtagagattttacaggcatataatcatgtaaactgctggaatgctaagtgatagaaaaccagtcttctataatagagcaaatgaaagtgctttaaaaaagaacctaatgatgaattggttatatatttgatgaagtggtccatgttctaagcacacccatatattagatcagatcagattagtcgcttagtcgtgtccgactctttgcgaccccatgaattgcagcacgccaggcctccctgtccatcaccaactcccggagttcactcagactcatgtccattgagtcagtgatgccatccagccatctcatcctctgtcgtccccttctcctcctgcccccaatccctcccagcatcagggtcttttccaatgaatcaactctttgcatgaggtggccaaagtactggagtttcagctttagcatcattccttccaaagaaatcccatgcccaataaatcctgtgttctccttctctctcctgctttcaaactcaacacttgcatgaaaaattccttatgtctttcccctcagactgtagtatttatgatatatatgatatcctagccccttttaatatagcacttatcaggaatgcttttgagaatcatggatataagcaatgaaagagactgtcctctgtgcttttaagcttataattggtgggctacttcaaatagtcctatttgcttatacaaaacaaatgaaaagattaggaccaaatatttacaatcaagataggttagtcatccaaattatttcatttttgaaagaatgatggaccgctttttgttgagaagtattttatatgtagtatacctggcagtcaaaacttactaaatttcccaatctaaagtgcaagatacaaactcatttgttctatctgtagacatgtatttaaccattttctagtgactagatacttccacagagctgcatggagcttaaggtaagttaagcattatgcaatttttaataaaccatcatctgtgacataatgttttggtatcacgaccatgaccatgtgaagctgctcagtcgtgtccaactctttgtgactccatggactgtaac

SEQ ID NO: 37278 - DNA, 744 bp, Bovine  19866882135175
  misc_feature (1)..(1): n is a, c, g, or t
ntcttcttggagagcaacactttaaagaaatctatcacttgcttactcaactttaggcaacaaactatgataaaatacagatattataaagcagaatcaataatcagcaggaaatctgtacactacttaaaaacaccctggagcaaacccaagtgtaagctatgaatcaaaaaaaatgaaaaataaaaaaccatctcccccttctactcctgtctttcttcctcctacccctttgccgaactctcaatttctccagtcactacccacctttattatcttcttacacatacaaacacatagatagcatagttacctgacaaataataggccagtgttatcaaaactatatcttttaaaaaatagtagcttttccaaatgagaagcaaaatcccatatattgtggcaggttaggaacaagccagaaatctcaaaggccagaaataattcaaggtatattaatcttatcccagtctctccggataaacatcttggagggctttttcattcttttctccttcattatctctacctccttttttaacacaattgctcctaatctagattgtaataactacaacttttggagtacttcctttaagtctaaatgaatgtatttcctctaatattcaaaacgataaggaaaggtagtcattacagctttcctcttggaagtaaaaggattaagacccaaagaaccttcagtgtttgccaaggccacagagtgggcgaaagccaagaatgttc

SEQ ID NO: 37279 - DNA, 937 bp, Bovine  19866880386330
  misc_feature (1)..(1): n is a, c, g, or t
ncccaggacccgaggcccaagacagtaccctcaggctccaaccgccggcagtccctgcggccgggaacgcagacattaaagttagagcccccgccactgccaggtccctgcctagtcggcgcggtgacggtggctctggcggcggcgggggccttcccctggctgccccgccatttaatcagggctattatcagactgggcttgcaggatggcgccggccgagctttacccccattagcgtagggcagggtgggggctgggtccccagaccgccgtctgtcccaacgcagctgcagcgcttctggggcgctttgagaaaggccgagccgcggggtctggtggcggctagcgctgtctcaaaccagttcttctcaagctgacagtttattagactattatttcctacctcccaactcgacctttactagctctttggcgttcgagcaaaccactgaacttttttgagactcagtttttcatctgtaaaatggatctgcttaggtacttaactcaaggttctcttgaagataaactcagatgatgcatctaagataaactaagaaggttcagaccacaaatggtgttaatacgattattacactagaattatatctgtttttttaaaaaagcatttcccaccccacccccgctgtttaattaaaaaaaaaaaaaaagtgtagagggaccaaagaagtccaaagattacttaaagacctgctggatttattcatgacttgctgggatctaatttctcctctgccacttgctctccgtgtgactttggggacttcacatctcttagtgcctctttgccttagctgtaaaatggatggaatactaccaccttccttattagactgttgggcacattaaataagatgatacatggggcttccctgaggcgcagaggtaaagagtccacctgcaatgcaggaga

SEQ ID NO: 37280 - DNA, 2618 bp, Bovine  19866880449479
  misc_feature (1)..(1): n is a, c, g, or t
nccatcctttcctcccccacgaatcccaggcaaccactgatcttttttgctgaatccatagttttgtttcttccacaatgtcatatatagttggaatcataaaatacatagcctttcagattgctttaattcatttagtgatattcatttaagtttccttcatgtcttttcatggtttgaaagctcatttctttttaatactgaataatacttcagtctctggatattccacaatttgtttatgaattcaattactgaaggatatcttggttgctttcaagttctggcagttgtgaataaagttgcactaaacatttacttgctgggtttgtgtgaatgggcttccttggtggctcagtggtaaagaatccacttgctaaagcaggagacacagatttgagccctgggttggaaagatcccccttgaagaaggaaatggcaacccactctaggattcttgcctggagaatcctatggacagaggagcctggcaggttatagtctatggggtagcaagtctgacccaacttagtaactaaacaatgacaacaatttttgtgtgaatataagttttcaacttatttgggtaaatgtcaaggagtgtaattgctagatcatatgggaagagactgtgtaattttgtcttcattttgtgttcccaccagcagtggatgagctttcctgttgctccacatcctcaccagcacctggtgcatttagcatgggttactttttaacttataggctctctcttttcagctttctctttatttattgaagaaaccaatcatttgtcccatagattttctcacagtctagagtctgctggttgtatcctcatggtgtttagcatgttttcctaattctgaattgctttcaaatcagtacttagatctagagtttgatcagattaaaatgtgatattttttgacaagaccactttatagatggtggtatgtacttttcattgagaggaataaaatgtttgattgtctctcttttaatgatattatgatcattattacataaataaattaattcattagtactgcaaaatggtaagagtctatcatcctttctgcatttattagctggaaatgctataaagaaaaaccttccttcatcaacaatttggtttccctgaattacagttcacattggagaggttattttatttgccattatttctatttaaaaataatgaattgattccctataacacatccatttcatccattgtagcagttattattctaattgattctctgaatacctcatctctggtcagtggaaactctttcagacagctcttgatccttttgccttgacctcagtggaatgtgagtttccttgctgtcttttatgacaaggagctccagacttatccacagcagaccaggaattagtcaaggaaccctgttacttgtagtgagttattgacactttctgcattatgttcttcaatgttgacagaaatggaagcttaggcagttagcttagcatagaagcttactgggtttgcagaatgttttgcatctggggcaacctaggatactttgtcataggcatcttgatattctgagaggtattctctgtcttggccacaaggacagccttctataaagacttgtttgctaatgtttattaagttctcatggtcatccaggtctcctttcatcataatgtgtgtctgtgtgttagttggtcagttgtgtccaactctttgtgaccccatggactgtagcctgctaggctcctctgtccttggaattctccaggcaagagtactggagtgggttgctactcccttctccagggaatcttcttgaccgagggatcgaacctgggtctcctgcattgcaggcacattctttatggtctgagccaccagggaggcctacatagtgttttaagtggttggaaatatttcatattctatgtaaaacacaaattgatgcatcttctttgtgatactaccaaaagataccaatttatggtagtgaagttttagtgactttcttctttatttagggagtgcaggtcattacgcatgcctgctcagttgctcagtcggtctgactctttgtagtcgcagggactgtggcccactaggctcctctctccatgggattctccagtccataatactggagtgagttgccatttcctcctatgggccattgtaaaaacaatttaaataagcacacttgaaatatatctaaggagtttcaagctgctacatcttttcattctgttttatgcaaggattgtttatgaaagtcaacattatcattatagcatatgaattctgggtaaaaatgagctgggatgcgtaacttagagagtaagccggaaattccctggtggtccagtggttaggactctgctcttccactgctgggagcctgggttcgatccctggagagggaactaagatcctctggtatagcccccccccccaaaattttatcagatcagatcagattagatcagtcgctcagtcatgtccaactgtttgcgaccccatgaatcgcagcatgccaggcctccctgtccatcaccaactcccagagttaacccagcctcatgtccatccagtcagtatgccacccagccat

SEQ ID NO: 37281 - DNA, 2962 bp, Bovine  19866880461546
  misc_feature (1)..(1): n is a, c, g, or t
ncacccctggctgacctaggcttaatatttaatcacagagagttaagaacaaataattgtggaaagtcagcagtggatgatgcttcttcatttctaatgtgtcctttcatggagagatgtcacattttcaacttttatttgctcttcagttgttggaagaggaaggaatagccttatctgtgtcatgaatttggagagaataaactgggcatgctcagctcagccttcctcctctcctgggtgcaaactgcttgcaggatgctagtgttctcctcttcccctttatccataaatcttattagttcactaacatttatcagtacatactctatcccaggcagtgttctggtccaggggatatagcaatgaacaaaataggcaaagatccttgtctcatgggagatgttggcaataagcagtaaacataatcataatcacattatacagtgcattggaagatgatagatgctggtgcaaaaaaacaaatcacaaaacagtgcaggagatcaggattgctggattggcagccgcagtgtgaaagaaagtggtctgggtaggctgacttagcaagtccatttgaggatatgaagagagtcatttgtctgcttacattcagaaccctgtaaacgccatagttttagaggagaatattgaccattcttgggagaaggaaatgggcaacccactccagtattcttgcctggagaattccatggacagaggggcctggtaggcctgcagtccatggggttgcaaagagtcagacttgactgagtgactgagcatacatacatgcattgctcactctctttctcagtccagccaccacttgcccccagtcctggacatgccctgagtatctagtttgagtaggactatgggctgtggcccacagcacaggtaggtttaatcactaggtttaccttttgaggtgtcgtcttggaacaaagtccaaatcataattgcctataattagtgctttaccccgctttgcaaacagatacacatggtcagttagcctacccacctcatcctgcctccactttgcagccaggacagcagtattaaagcaatagctattgctgttggcaaacaaatgtgcacacagtttttctttaaggcagcaatccttaaagtgtggtccagatcctggtgaatggagaggacctttcagggagggtctgtgagatcaaaactattttcatagtagtactagaatgttttttgggcctttttcattttctttctctcttgtttacagtggaattttccagaggtcacatggcatggactagcacaacagattgagtgcagaagcagattaaaatactccttttttcccctaactacatatttgtgtgaagcctgattttctttacatatttctatcaaaacaacatattgccacagattgaatgcagaagatctgaaaatccagctgtcttctattaagccaaacttaaagagatttacaaaaagttaaaacaagttgatcttcctgctaaatatttttttgaagagggaaatagttactttccatatagaagatatttatgttactatgtattgagtttattattgttatttataaaggagttaataggtaaatattaaacagtttctcacatttaatttttaatgcagtaaatatctatgagtataatccacataaacaagcatgtgaaagtcagtcagttgtgtctaactctttgtgaccccatggactgtaacccgctaggctcctctgtccatggaattctccaggcaagaatactggagtgggttgccatttcctactccaggggaatcttctcaacccagagaatgaacccaagtctccttctttgcaggtggattctttaccatctaagcctccagggaagtccataaacaagcatccagggaagtccataaacaagcataaaggggtctgagtctgaagaggttacactcaagggcttcagtgtaaaaccctatctgcatgtttttacagcccccagacatcccttcagaggcatccttccttgttctcagacatcacataaactcagggcaatgcttccccacttgatttcatttgcgtatctacctgcatgtaaagcactctatactaaggtctgtcttcttgtggggaaagagcatttagtctagagtggatagaagaaacaaaatttagtcctgggtttacctaaccattatctggagagatgcaaggtgatgaagttggactcttagaagaacatttgtcctcaggttggactcagggcaactggacagaggtaagccaaggtggcccacacccttcctggccatgagaaacttgggctttaaagacctggcatgctgttaagcactggttcctaagtactggtgcctcaaagagctgcagaaacccctgcacaagaatcacctgagttgcttgctgtacgtacagacttctaggctgtactcagagaccaatgaatcagaatgcggttggagatctcaagatctgtacttctttcctaagcccgtgagtgattctgtgacgcagcaagatttgggaccctttgatcagccttcttaaaccctgtcaaatcatcatggagatgagtcaacatgcttttgacaccaaatatttgtcctggccacctcctgcaggctcaaagtatctactttttttggaagttagttctttggcaatagggcagcaatgcctcaaatgttccctctttacttgaaagcctctctggaggaatgctgatgtggctgtacttggggagtaacacagcaggtgtatgtacctgctatacatgagggatgagaaagggcagaaaggaggatgagactctttggaaggacatgggggttggagttatgagtaagaacttcaggactccaggacccctcaataggcaacaagagaacagaagctagatattatttccactggactacactcaagactctaggaggagccaag

SEQ ID NO: 37282 - DNA, 3387 bp, Bovine  19866880547250
  misc_feature (1)..(1): n is a, c, g, or t
ntcaaaggctttggcatagttaataaagcagaagtatatgtttttctggaactctcttgcttttttgatgatccaacggatgttggccatttaatctctggttcttctgccttctctaaatccagcttgaacatctggtcaccttgggtgaccctacatggcatggctcatagttttgttgagttagacaaggctgtggtccatgtgatcagattggttagttttctgtgactgtggttttcagtctgtctgccctctgatggagaaggataagaggtttatggaagcttcctgatgggagagagggactgagggggaaactgggtcttgttctgataggcagggccaggctcagtaaacctttaatccgattttctcttgatgggcggggctgtgttccctccctgttatttgacctgaggccaaaccatggtggaggtaatgaagataatggtgacctcctttaaaagttcccatgcaagcactgctacaggcagtgcccccaaccctgcagcaggccactgccaacccacgcctccaccagatgctcatctagtaaaatataattattttacgttttcagatttttaaagtgctttcataaatgtcatcttacatggtcctcataataaagtgagcagtgttatgttctccattttctacatgaggaaacagactcagggtaacctctgagaatcacttagaagtgatcttacttaagatcttacttaagtgatctacttaacttaggtaacttctctaggatcactcagccagggaaaggcagagcagggactctaacccatggctttgtcttcatataccatgctcaacccctgacctgaaacagaagatatgaggcacactataaaaacacatcactactgccccactgaaccactgtcttcatttttgcctgatacctgattagaaagcagaaaaaattcacctattataatcccacctgcataaatccagtgtgaatcagtgcctttggcactctagaaacaggagatgagaaagatcacacctaaatggaagtagcctttttaaaacacctcctggtggctcagatggtaaagtatctgcctacaatgtgggagacccaggtttgatccctgggttgggaagattccccaggagaaggaaatggcaacccactccagtattcttgtctggataatcccatggacggaggagcctgataggctacagtccatggggtcacaaaaagtctttgtaaatgtggactcctttgtcacccacactgctgataccgctttctcactgctttggatcttgtggcctatttgcatgcctatgttctacctaatcgaagagttacctccttgccatccattttgcaaggcattttcaaccacaagctcaagttcctttccctgatctcagtacccccaatcacttgtcagactcttcaactaactaaccttttctactcaaatgcctgcccaattttcagtctctcctgctggattctttgcctcctcactgagcttctatatctctccccccaaaatcaaaaccacacctttatgctctggcattgggaaggatgatggaaggatcagacagatgttgctaaaacttataataatcctttaatttgagttgccaggacaggaaagagaagtgctgaggtcaggacatatgaccatgtggtaggtaacaaagagtgtgacagaaccatgtagcagttggtggggaaaccacctaaagatctggagataaaataaatcagagggctggtagttagggtactccacctgtctgtaaagattccaggacatataagagattaaatacacaggatgaataaatcttatgatttaattataaaatggtgacttttataatttaaatttgcaaagacagtagaatttaaatgtgttcacaaaaacaaaacaaaacagagtaagtacagaaagttgcatagtacacttaggggtacaaataatcagttaggttgaaaaaaatcttttctttgaaaaaaacttttttttccattcacattgggcaaatatgcatctcaatatagtcattactcatcacataaacagtctcacactgtgtgaaccatttcagttaaaattagggtaaattacaggcacatgattgtcacttgccttaaaggtccagatatccaatagccttcctattaaatacaagcattctacgctgtagataaaatatgcactttgatttaaactgcctctgtttgcttcagaattccaagctacctttatagtctttatgttagcaaatatatccacttcagaaggcaaaggctattaagattctattttctctgtggattgccacttaagacacaaagcttaatatcatcaagaggactgagtctttgataacaaacaagccctattttttgcagttgaattaatgtcctgttcaaagaaaccacttcactcagaaatgggagcatagaatagattcaactgcagcaactgtcagaacttcagcagttgcatatctgtagggtttataactggacgtgaaggtggggcagagaacgggagactgtacagagtactggagactatatacagtaaagttatgtctcttttggtgttgcaaggagtgtgctcttacaaactagtacttttctttatcttatcagggcaaaaaagtaaacagaaaattctcattacctctcaatgtccgtgagcctggaggagtcccggaatcctttggcaaaagggttactatctattttcagcttggttatctggaaagggaagatgagtaacaaaacagtgtcatgtctgtggtcaaggaaacaaaatcagaaacaaaaagtttgttcattttccatcatagcaccccaagaatgtctaagaatatcttagtgtctctcagtattgtgataaaggttgaaattgctaaagaaattcacaaatttgggtgaattggtcagagaaggcatcaaggaaaaggaagtatttgaggacagagtatctgttcctaaaacaggctggaagtcaataaatagagacagttagaaatgggggccttttatgaacagtgtgcctgatgtgagaagtatttaagagcagtgaaaggctagagctggactagggaatgaggaaactgtccagaattggacaatacccaccagcattggtgggtaaagggaataaaaacaagaatgttgcctcatgctgatttgacagcctcatttgttaataccatgggcacctatatataccacaatagacaccccaataatagcttcctgttcaaaactgtactgaaaaatatgacatagatacatgatataaacttttcagcatataaatttaccccattccccttaccatctgaccaaattagaatcaaattaatgggtct

SEQ ID NO: 37283 - DNA, 1358 bp, Bovine  19866880561100
  misc_feature (1)..(1): n is a, c, g, or t
ntgcaagcataaattaatgggtgggaatcctaggaatgccagctaagaggacaggtggtggggcatgagcccctcttgtcctttccgctctctgcttttctgttgactggaatctgggaatgatggcaggagtcctagcagccatcttgaaccaacaactgaccatgagccatataccatgagctgaccttgaggttgaacattctttaatagagtagaaatatagagaagcctgagtttccagtgataaggaaatacaatatgagccctggactgcctacctccagaattctttacataagatgaaaataaatccttgtagacttaagccacctttatctggattttatagatattcagctgaatctaattccaactgattcaccaactaagtaaatcagagaccaagtggaaatcaaaaggttcctcagagaatcactgtaaataggaggcttttgtcaggagagtcatgatggacaatattatttaatgaagagtattaatattgctttcaggtcagttgctcagtcgtgtccaattctttgtgacaccatggactgcagcatgccaggcttccctgaccatcaccaacacccagagcctactcaaactcatgtccattaagttggtgatgccatccaaccttctcctcctctgtcatccccttctcctcctgccttcaatctttcccagaatcagggtcttttctaatgagtcagttctttacatcaggtggccaaagtatcggagtttcagcttcagcatcagtacccccagtgaatattcaggattgatttcccttaggatggactggttggatctccttgcagtccaagggaccttcaagagtcttctccaacaccacagttcaaaagcatcacttcttcggtgctcagctttctttaaaatccaactttcacatccatacatgactacaggaaaaaccatagctttgactagacagacctttgttggcaaagtaatgtccctgctttataatatgctgtctaggttggtcatagcttttcttccaaggagcaagtgtcttttaatttcatggctgcagtcatcatctgcagtgattttggagccccccaaaataaagtctgtcactgtttccattgtttccccatctatttgccatgaagtgatgggaccagatgccatgatcttcattttctgaatgttgagttttaagctgacttttccatcctcccctttcactttcatcaagaggttctttagttcttctctttctgccataaggggtggtgtcatctgcatatctgagggtattgatatttttcctggcaatcttgattccagcttgtggcttcctccagcccagcatttctcat

SEQ ID NO: 37284 - DNA, 2307 bp, Bovine  19866880574576
  misc_feature (1)..(1): n is a, c, g, or t
ntccacacttgccaataactatttactttacagaggcaaagcacaaagccctgggcctggtcagggctgagtggctgagaaaggaccttaatgagccctgagaagcctgccttcccagcaaaataagtactcaaggttaatgtcgtcagaattgagggagaataccttgttttgactgagagatcaaagctaggggagtttttgatcagaattgcctggacaaatattttagcttccaatttattctgattatgcagaacaggcctgagagggtcacagccagttagagagacggtcactcagcccagccaggctggagggaggacaattcttgtttgggagtcctgacgtcggagagcctgtgggaagtcacagaggtaggcaaaatccctctggacctgctttctgtgcttttagcactccagtgaagacaggttcaaactggaaggggcctcggagacccgtcttggtttgggaccttgttccagtggcttgccacacagccagctgatagccaagctggaaggagaatcagaccaccctctcctaaccccaccacctgcactgctccccatgctccctgctgaaaatgtctgcagtgaaatatgaacttgaccacaaactgtaaactctggggaaacatctacaagaagccttggggctgcccccgacaagctggagtgagcccatccaactgcagtcacagctgtagctccaaggggctgtgaaacggccttgggaagccccagggaggaagggaaggcttggagttacaaacataccaggagcaatccccatcccatcccaaaccctgaaagaggcagatgtagttttccagagcaggctcagcgagcaagctgaagattcattgtcagaatgcattgtcagagatccgcatagggcccaatcctaggaccatcgtaggaggacttaactgtgattacagatacttgatgagcactactctgtagcaggcatggtgcctttacataagttaatttttaaaagattgtaataagtctgctatgccgtctcacttttataataacgaacttgaggcacagagaggtacaatgctttgcacaaggcaaattaactactacacagcatatgtaggattagtaccagactggtcttcaaagcctttgcagaatcaaacagttatcctgacttccctgcctcagctgtatcttggattaactgaatagttcggtgttttggaaaattctaactaataagtgaaagaggaatgataaatttagaaatttatttagaaaatcaccactctgcaaccattaatgcagaaatattgggttggccaaaaagttcatttgaatttttctataacatcttaccgaaaaaaaaaaaaaaaaaaaattgggcttccctggtggctcaaacggtaaagagtctgcccacaatgcgggagacctgggtttgattcctgggttgggaaaatcccctggagaaggaaatggcaacccactccagtattattgcctgagaaatcccatggacagtggagcttggtgggctacaatccatggggtcacaaaagagtcagctatgacttagcagctaagcaacaacaacacattgtctgtaagacaaaggatatacttgataattttcaaaacaaggccaggttaagacatctcccttggcccactcagtgattctcttcctttactattatgcttctactcatttggtaccaagccaacatagtaatttgatagataatgcacgcacacacacacacacacacacacacacatatatacatatacatatatatatatatatatatatatatatatatatatacatatgtgtatttttccttcactaatactggattgtgatacactaaatacattgatattccccactgtatttcaatattgaatctacaatagggtctatattactctggccaaataagatatattcctgcttgtctcttaaagggtttgctgaaattaaattatcaagcttattaaccttgcattttctactggaatttccctgccacatgtataaacgttccttgtcttcttttgcatcactctttttgcttgctttctttagaaagcagacttcactctgagaatgtcattcgccttgtagggtgtttgattgatgcctgttcctgttttctttttccccttcaaattcttgtgctttgttcttcttattctacattagcatttccagactatgagtaattcatttcatttttttttttttcagaacaaaagcattaaggattaaacatttctgctgtatcactctctctaacactgt

SEQ ID NO: 37285 - DNA, 1696 bp, Bovine  19866880626609
  misc_feature (1)..(1): n is a, c, g, or t
ngtattttatttttatttaaattagtggaatttcttaggaaaagaaaaaaccgagtaggtgaaacttaataatgataatttttagaaaggctatcttgaaagttgttaaatggttaggcttatttaactaagtcatgttgatagagaaaagcaaacttctcctactaaaaataaaaacaaatgaacttatcagaattgtgtagagagagctttctattcctgacttgattctaccataatgcagaatgattaaccttctagcttaaaaggctgcagagtaaaagaaacctgaaaatgaaaatccccttagacctcttagaataaattatgtggatttgctaagtacacagactggccctcttaaaagggagataaccactttaactattgctttggaaacagaatccataagaccaattacgagtcttattttacattagtgattttacaccagtaaaaataaccaccttgggtccttcacaaggtgttgttttaaaacaaaacccaaatgaatttggaatctgtttacatttcaaagataaaacagcaaagtatagtaaagagcctgccagaccaggagtcagaaaactgtgttctctgcactccttctgaataaccccagcctgctgtgaacctcagtttttcatctatgaaaggtagagaaaaacatctgccctgcattcttcatggtatttttttttctattagttgattgtggtacttttgtgaggcacatttgaaattagaagaatatgaaatttccctttgaaaattatgaattttagcaaaagatattttggaaggttggaattgatttattgagatgtaaaagcatttacctaagataaaactatattccattttcctctttcctctcctaacctcagctttcttaaagtaaaaattatatataaaatatcaggaagggaaggaaactggtcttttaaaaaatttttttgttcttttttggctatgttgcatggcttgcaggatcttacttccctgacgcactctcttggcagtgaaagtgtggagtcctaaccactggacgccagggaattcccttggtttttctttatgctgatcacaggttctgtggtaggcagcctccatgatggccccctatgaatccacgttttggcatcacatccttgagtggtccactcctatattgttccaaggttagtctgtgtgagtggtggtgcatcacttccaagatgaggtcatagaatgctgaaggtttcctgtccctgtttctctatctgtctctctgagctgtctctgtgtgcagaacaagctgccatgttctgagcagcccaatacagagtcccatgtgcctaggaactgaagtctcctgccaacaaccaaggttagaagcagatcctccaacccacatcaagtttcttgatgattcagtcttgcccagcagcttgactgcagccccatgagaaatcttgacttagaatcacccaggcaatctgctcccatatcccctgcccttggacacagtctgaagtaataaacatttgttattttaagatgttaagtttgggggtaatttgttaggcagcaataaataactgatacaggttttaacaggaagagaaaatgtcagacatgcagctgatgaattcttttaactagagaatgtaaccaagaaagcctgttgggtacacatttccttactcatcagttt

SEQ ID NO: 37286 - DNA, 807 bp, Bovine  19866880755109
  misc_feature (1)..(1): n is a, c, g, or t
nctaaatgaaaagacgagattgagactgctcaatctcataattacatctgctttcatactctacccatcgactctatttttaggatctgacctatggaacatttctttcagctctgacagtttatttatttagttcccaggttaaaatccacatgctccctttggatgcaatgattgtacagccttgaaacaagccatccctaatcatgaacccaaacggtgtacaaatgtaccatagttcaccctggtcaacagccatcatatactactgtaactgtactatatatacgtttataatacatttcacataagataaagttcttccatagtaagttctactatctgcatttattccattttagttagctaccctataagagacttactcctttcttaagaaaaatcaaattgactttcacagggatttttaaataaagaggtggcgactgcagccatgaaattaaaagatgcttactccttggaaggaaagttatgaccaatctagatagcatattcaaaagcagagacattactttgccaacaaaggtccgtttagtcaaggctatggtttttcctgtggtcatgtatggatgtgagagttggactgtgaagaaggctgagcgccgaagattggtgcttttgaactgtggtgttggagaagactcttgagagtcccttggactacaaggagatccaaccagtccattctgaaggagatcagccctgggatttctttggagggaatgatacgaagctaaactccagtacttggccacctcatgcgaagagtgactcacggaaaagact

SEQ ID NO: 37287 - DNA, 1480 bp, Bovine  19866880777089
  misc_feature (1)..(1): n is a, c, g, or t
ncacttcgtttatgtattgttagcttttagtctgatttgctttggatataatttatcccctttcctacggttcttgctcttttagacaataatgaattgaaactttggcaaatgttttctcatttgttaaatgaaaataattctagcttcctcatgtggctcgttgtgggaagtaagtgaggtgatgtaagtatgaacttggtgatacgtgaagaatagacagatgctaactgtcagtcaaaaggtgtgttttattccaaggtctgcctgttgtctgcttctttcaaaaagtcttttcagtctgcctttcagaaattctgaattatgtttgtttttctttactcaaaaacatgatgtccctttgtgattgctggatgttaccaagcccactggataccttgtagtgtatttcacaaggtttaataccttgagcagggaaaactcaagggtaaaagcctgtggaatgtggttgatggtgcgtggaaggcagggtgttgttggagctatcacttgtcagccaaagaacggagactgtgaaattggagggtccaaaaacagccgggtgttagaacagcaagttctgccatgcagtggaagctgtttttaggtactgttaagattgaaatgagttacagcaatgtatggcataatctaatggtgccaccctttattccttactaggctcatattggcaacttattaacatcaaaattcttcagttacaaggattttgacactttattgtatacatgtgcagcagagtttgactttatggagaaggaggtaagatgggatctatccttttctttccttaggttttggtccattcatttctcataaaggtgctcctgttactcagattcttaccgctgtgctcgtatctcagtttgaaggaaaaggaaaaccttgcagcttaaaccaagatgttcctgtttacattagcacagcctcatgaaatatatgatttcttctgattttgataatttagaaacatgcattcagtctagcaatagtttttaggatgagtaaacacagaagcatttcaagttgcttcctttcaagggtagtattgattcagtgaaactctcaagcttttcagtttccacttgctttgtgattatttgtttgaataatctcagtgatttgaaatatcattgaatacaggtttttcattccaacaacatttgtctttctaaaactgtactcgtgtgtttagaaggagatctgagagtagttgagtggattgtgagacagaagtctgcagtattacttatgttgttgagcaagtgactctcattctttgaactgtagcttactagtttctggtagtatgctacaaacagatattgtgagaaggaaaggagatacataggaaataccgttgatattttaagatgtttcacattaaatactattttgtaatactttatgagctagtttggttcaacagtatttatatatatgtgccttttgtgtgtgt

SEQ ID NO: 37288 - DNA, 1690 bp, Bovine  19866881077806
  misc_feature (1)..(1): n is a, c, g, or t
naactagcccatagtagtatgtttgaagtctttctgtgcagtccattttgaatcttcaagaagcagctttcctcaccatctgttctcgaaatgaactcccccctcctaccaccaccaccaccattcacaatctcagtatctccatctaccttgtatcttacagttatctttcccccaactttctgtatctaagggctcatagccttgagcagaaggtccaagaaagaggaggaggaagtgacaaatacaactggaaatcctatctggtggtagaaagtcagggaaaaggttttgaacttcatcctaaaaataatgaaagtgaagttgctcagttgtgtccgactcttttcgatcccatggactctagtctaccaggcttctctgtccatgggattttccaggcaagagtaccggagtgggttgccatttccaaatgatgaagaaaatgacaaaaggagagttttcatgtcaatataatgtctttttaaataagtaaagggatatttgcatgttttttatgattatcacttaagacttggttcacataatctcagagttgactgaacactcccctctgacctcttcctcctcagggatcaactcaggtttaatagaagcttttgtttctatctatgcctttgacagctgggagattagcagggacttggctaattagaatttaactgtttgctaatgttccagtaggtttgtcgatcacaatctagtttaaaatggattcgaagttttcaaaatcttgaaaaaaaaatgctgtgtcagaactgatttaatttcttgaaaggattcaaacaagaatcagatctatctttatgatcttttcagtcacattccctaacaaaaccatgttttgaattggaaataagccacaatcctctttagacacgaaggctatcgaatgagagtggagtgaattgaagagcctccatggaaacatgagctttcatgagcgcccatcgacagcagccccacaatgacatgctcccatgcttcccaggtggcctaggagacatatgaggagacaagtctcattatgtgatgtttagcacctgaagtttactaaaaggtaccatgcaacttgatgcctactttgattcacttgcgcagtcagtcagtcagtaaaaattttcttcttatgtgctaggcagtgaacaaatactgaggatatagaggtagaaaataatgacctctaaagaagttgacattttagaaggaagacaggcatgtagacaattaccatgctatatgccacatggtgtcttaataaggcacagcatggagcagtagggacacagaagaaggaagatctatgtcatgagacagctgcttaggaaagacttcagaggaggtagcactttgactgggtcttaaaggatgagtgcaatccctgcctacaatcccagagacctgggttcgatccctgggtcaggaagatcctggggagaaggaaatggcaacccagtcccttattcttgcctggaaaatcccatggacggagaagcctggtaggctgcagtccatggggtcactaagagtcggacacgactgagcgacttcactttcattttcactttaaaggatgagtaggggattctcagtggaaaattaggggcagataattctaggcagaggaaacagcattttcaaaagcataaaacaaatccaggcaagaaca

SEQ ID NO: 37289 - DNA, 1239 bp, Bovine  19866881113450
  misc_feature (1)..(1): n is a, c, g, or t
ngaaaaaatgtgaaagcagttttcagagaatacaatagtggagccggtatgcttttcacttaatacccaaatcagcgtttcttaaatcatgtgcgccgggatagccaggtatcagaggccccaggaggaaggacgccacttccctgaaccttggaaactctgaaaaccactgcctgccactcccacatctgctgtaccaagatcttgaggcatggttcataattctcaaagttctttccaaataattcagtctcatttgattggcaaatgtagctttgctgctgctgctgctgctgagtcgcttcagtcgtgtccgactctgtgcgaccccatagacggcagcccaccaggctcccccgtccccgggattctccaggcaagaacactggagtgggttgccatttccttctccaaaatgtagctttattgccctttaattctttgagaattaatgggctctttggtgcaactgacataactcagccagctattggcataattagtgagtcacagagctctcctattttctctggaaaagtttggggctttttgcatgtgtaaaaaggaagatgatttattttttccttttccaaatttgctgagttactttcagtgagtgtcaaagatggccttcattttatttactagtcagttttaggctatttagacttttcctttctcctactgaagtgacttcagaatttaaagtaagtatttactttaaaaatctgtgtcctgagcaacccaaatgtccattgatagatgaatgaataagtagatttggtatttaaatgaaatggaatattatttgactattaaaaggagactctgacacatgctacatgtatgaaccttgagcccattatgcttagtgaagtaaaccacagaaaaagacaaaatattgtacagtgtcccttgtgagatacctagagcagtcaaatcaaatccatagaaacagacagtataatgctgattgctaggggccgaggggaggaggggggtgaagaattattacttcaggggtgcagggtttcagatgaaaagagttctggagatggatggggatgatggttgcacaataatgtggaagtatttaatgccactaaactgtcaaaaaaagagacatggttaaaaatattaaattttatgttttatatatatatatatatatgttgccacaagttaaatattttcatgtcctgcggatattgccatcccttggccatgatttggggggtt

SEQ ID NO: 37290 - DNA, 2127 bp, Bovine  19866881163259
  misc_feature (1)..(1): n is a, c, g, or t
ncttagcagcagcagcagcaaacatctttaaaactcctcttctgtgacttagaaggtcaactctctgataatatttcttatcagtcattacaaaaatccttcctaagtggctgcatctgagtggcaacagactctaacaataaactgtaactcctaccttgccttacattttcctctattgaaagtgaaagtgaaagtcactcagtcgtgtctgactctttgggacgccatggactacagtctgtggaattctccaggccagaatactagagtgggtagcctttcccttctccagggtaccttcctgacccagggatcgaacccaggtcttccccattacaggcagattctttaccaactgagctatcagggaagccatttgccacctaataaatcaggaaaaacaaaaaaaaggctccaggaattcatttctactgtagcatagttgcaaatttgaaagagactgaaatcaaccacttttatgtgtttttgttagattctttcacaggactggttaacatcttgacagatatcatttggagattcactggagacttaatggcacctgacctggtctgccgcgtggtccgctatttgcaggtatgtagcaccttccaaatatgatgagacaaaccgacaccaaaattacctcttggattcttcataaggaaaatactgtaaaacgctgtactctgatgcaacaaattgctcacttcttcatagttgaaaggacaagcaaaatttatatttttcatgttttttgtttgctaaaaacaatacatatataaagaaaacccaagtaagcaataataagaacataagcattcctagttcaagcattaggtaaaatttctgggttattattctttttgacatattctggctgtcttagtccaaggatgctgatatatataaaaataccgttctgacctggagaattccatggactatatagtcaatggggtcacaaagagtcagacacgactgagcaactttcacagaataggtggcttttaaacaacaatttatttctcacagttctggaggctggaagtcgaaaattagtgtaccagcctggtcaggttacagcctttctccagactgcagacatctcattatttcctcacacaccatgacaaaatgggatttattctgggtatgcaaggctggttcaacattcaaaactcaattgacgtaattcataacataaaaaggtaagaaaagattatatgatcctatcagtagatacagaaaaagcatttaagaaaatcttatactcactcatgataaaaactctcagtaaactatgtatagagagaaacttcctcaacttgataacaaaaatctacaaaaaacctacaactaacctcagacttaatggtgagaagctagaagctttcctcttgagactggaaataacacaaagatgtctcctctcacactcgtattcagcatcatgctggaagttccaactaattcaaaatgacaagaaaaaaaataaaaggttacacagattggtacagaaagatgaaattaaaaacacctgtgtttacaaataactttgtctctgtagacaataaagtgaaaaccagtaaggtcacagaatacaaggttaggggacgacagaggatgagctggctggatggcatcatcaactcaatagatatgactttgagtaagctccaggagttggtgatggacagggaagcctggcgtgctacagtccatggggttgcaaagagtaggacatgactaagtgactgaactgaacatccaaaagttcagatgttttttcatataccagcaatcaacaatttgaagttaaaatttacaacacagtaccatttatgttagcacccaaaatatgaaatctttaggtataaatctaacaaaatatgtgcaagatcaatatgaataaaactggaaaaactctgaaaaaaaaatcaaacaatatcttgaaatgtatagatattccatgttcatagataggaagactcactattgtcaagatgataattctgccagtacaacttataaatccaatgtaattccaatcaaaatcccaccaggttattctatagatatggacaagctctaaagtttaagtaaaaaacacagaacagtcaa

SEQ ID NO: 37291 - DNA, 497 bp, Bovine  19866881355929
  misc_feature (1)..(1): n is a, c, g, or t
ncgcaggctgttggcgaacgcgtgcaggtgcttcagcagcagccgtacgaccagcacgtgctcctccgtgggcatgaaggactcctgggggccgggcgggggcgtcagccaacgccctgcaggtgtgccgccgacgcccaggtggctcctgcacttggatacccagcgcagcctgtgactgggctgcaggcccacaagtgcgggcgggtctgagaccaagcggctgctcccccgcccacccccagccacgggcttgcccgcggtgagcagcgccgagaggggcccagaagacccaggcccacggcctggtcccacaggccgccgcggcatggcaacagccgcgcaggccccagcgacccccagggcggtatcccttctgcctcgtctacctttgggtctctatgtgctggacctgcaacatgccagacagaagggcatgccgtaatgggaaggaaaagcacagggcccctccgtgccgagcctgctccaggagcccc

SEQ ID NO: 37292 - DNA, 1587 bp, Bovine  19866881414839
  misc_feature (1)..(1): n is a, c, g, or t
ncttgatagctcccgtggtctgtctgcataacatgtagtccgccaatcaagacattcctagctgagtcccagactttatggagtccacactgtggaccttgttttgtcatgcttgattttttgactgtcagaaacatgagggatgttttcagtcactatcatttggtattatttgccacctaggaatcaatgacagaacagaggacccttgtttatgtgagtaatgtcctttggagtgtccagtgggtttggtgcctgctgtgtggtgcacagtgggtttgagatcccatttcccgaggctctcttatctggagggacattgaagaaggcctgggagagagggttggcttcccagccagtggggaaacttttcatttcccagtcacagatgctgcagtctccccagttcccagagtcattcagggagcccagttctgtgctctagtcctgaagccttgacctcctcagagatgtgaaaacatagcacctaaacttttgcatctttgttctccctgtattctgcagtgcttcccaggtggctcagtggtaaagaatccccctgccaatgcgggagacctgggtttgatccctgggttaggaagatctcctgaagaaggaaacgacaacccactctagtattcttgcctgggaaatcccatggacagaggagcatggtgggctatagtccacgccattgaaaagaatcagacatgactgagcgactataaaacaacaataataacagacattctacaggacttcggctcccatagccttccagtctaaggattttccctttatttctggcacctcagagtttcaccttctgcctttaagataagttagtaattttttaaaatacatgtttttcttccataagttttaatttggagtgggggtaaaggtgggttacaaaggaggaattccagaggttgctccatctgatgttttaatctcacttccttatcttctctctagaatatttttgggcatttgctccctacatcacaggactgtgttagcaaaactgtgaatgtgctagctcttttaaaagatgtaaattcattcagaaaagtgaaactatatccttggtttctagatgattaaattcatagttgtattctattgatccactaggatggttctgacaattgaaattcggtttcctgtggggaccagtgatggtagttactgatcagggaggtacctttcttgcccagtctggtcttcttttgaacagccactgaagagccgtgtccttaagataatgaccacgcataatccgtctccgctgcagataacagctaatggagtcaggctgctcatatggatatgctcctagataatgcagaggtttttttccccccctcatttatattttaataaaactagcagataggacttcaagctgtaacattcagtaaaataattaatatactgaaatgtggctctttgacagatactcaaatgagtataaggctatcaagaagaaaaaataattatcaatcagtcagttcagtcgctcagttgtgtctgactctttgcgaccccatgaatcgcagcatgccaggcctccctgtccatcac

SEQ ID NO: 37293 - DNA, 1683 bp, Bovine  19866881441728
  misc_feature (1)..(1): n is a, c, g, or t
nataaatgttatgatgagtccactttgtagatgaggaaatgatttagagaagttaatcacgttttccaagtttgcacagctatttagtgagatcaaaatctgaagccagaatgtctgactctcaagccctagctcttaatcctatgctattaaagttccctgttttaggaagatttccaaatctgagcaaaaggctcagaagcctagacttttgatgctcattcttatgctgttctccagcccaagccttaaaccctttgagggcttcagcaggttgaaaatggctcagcagagaacaggaaatccttgtaaatgtcttctcgggtactacccatacctcgctatgtcctcagaccgccgagtgacaccagcactgtttatttgcatggttccttaaggattgtccattgttgtttcccagaacaagttacgctgctcttcctacaatgagtggtgggggtggggatggggaagggctgcgtctctgcagacacttcagaaatcccaccactttgagacagtctcgagaaaatccagtcccagccttggaacaatgtgtagccctgtggcattttgacattgggcgtctcttcactgttgaagtaactcagcacgtggcaatgtgtttatccccttgggtcaggtcaatgctaaagtaagttcatcgcctctgcttcttcaataactgatgtctgatgcatcagctgaatgcatttcaggcttataagcagttccctggatccacaggcaaaaagctttcaccatctccccctcccccactaggtgaccatatcttagcattaatgcatctgatggcaccaagcctttgtggcccgagcaaggacagtcgccaagcaaggattgaaatcacatttttatttacattattacttttccacagtttggtttccttcaggcttttgatctattaggccacaccatttagtctggactgaatccttgaattactttactttttcttccaagactctcaaagaacttgataaacttgtacttattaaaatattcatcaatagtgttaacataccagggataaaagtgaaacactgcttaatgtgggagacaaaatacaatctcaagtgtagattttgactcttttgtgaataacaatcattgttttaggaaaacactgagtttatccagcctttgttagaatctccctatcatataatggaaatgttaaatctaagccttcttgtgaagtaaactcatattatcatttacatatgtccagtcatggcattaataaaagcagattgtcttggataaaacacacagttaacctttaaaatagatctgaaaataagattatgaataattgttcttctttactgtgactattgggctgtatttagtgccaaacttttttgacagctcctaaggagtaaattgtaagtatattgaaattgttatccaagtacaagctgccacttctgtgtaatggcatttttctcccacaaactgtgaaagaaatggagccataaggaatcaaagtaaaatcagagggatttgttagaatagaaattctgattccttcattctacttctcatttattgtcagacaataagtgaagaaatgcccactaaaaaaatcaaaaagatccctttatcttttgataaataaaatgtgcaacattctcaacacaacagcttagttttgga

SEQ ID NO: 37294 - DNA, 1120 bp, Bovine  19866881510828
  misc_feature (1)..(1): n is a, c, g, or t
ntttgtttttagccctttcactcattcccctggttttcagctctgcttcttatttatgctcttgtgtgtgttccctctgagtccagaggttctgtggttctgctgcttttggatttgggcagcttcctcaaggtcactgtttcctagctgtgcttcaaaccaatgatgcctctacatttactttctatcatctggaaatttgttataatctcttatctgttgatgagtatccttctattgacttgctattgcaggtttataccattctgttgctttaccatcatttttctagggaccaggtgatagagagtcttatcatggggatttagtctgtcatcctgaagtagaatcctttaatctatttaagaagaatcccttaaattccatggaagatgtttgatttcagccaagtgttgaaaaataagtagaatttacatggaaacagagaattgtaaaagatagaccaaacagaggacaagtttgtgcagtagtgtggagatgggtattggccatgttaggtttgaagaataatgagtatgttagccaagcagaatcccagagttccagcaggagagtcatgggaaataagacttaaaaaatagtctgcgtctagagtttttagttctagatgggaaaatttggctgttttgagcagagcagaaaggcaatgaaatcagtacttagaaagatttatttggcatgatgtgaaatatactttggagggagatagactagaggcagagagccaattaagaaacaggtataatcatccatttatgaaatgagggatggtggcagcagggaagaaaattgggaagagatggcaacttagaaataagaatctatagtacttagtgactgattagctatggaggataagatgactataagttttcaggtctggataactatggagaattactggcattgatgtagttctaaaagtcccaggtacctatcctaattccacctcctctctctgctaagagtaggtcacacagagtacgatctttgtttccagcctaggttttcacaggcagtaatagtggtggtggttgtagtgatgatgggtgggagatcgtgctggtgaaagaggcagtggcagaaaatagtgacaatg

SEQ ID NO: 37295 - DNA, 659 bp, Bovine  19866881776454
  misc_feature (1)..(1): n is a, c, g, or t
natttactctgaatatctcaaaggttagggcgggagacggggggttcctcctgggcataggtgaggaggatctaggtggtcccatgacaactgtgggtctaacctacaatgttcctattggcagtagcaggacttcactttatggttcgctttttgcatctgcagatggaaagctgtgcaccagttacaaccgagggctcatctcaaaggcaaagatcaaggccatcaagtatagtattgtcatcattcttggtaagcaacatccctcctcgtgttgtaaaactgtggacattccaataacaaatttgtacctgggacctggtgacacaaagaaaaaatctgtctatgagaacttctgccttttcccaattagaaaggaatatgtgtgtggagcttatcagtgtcactgcagctccctcacgggccaatatttggtttcctatatctatctttatgaatattgttgtccaacacagccatgggatgcataatgtggaggaaaaacctaattaagacattactagctgaagctgatgctcaccatcatctagttgacccagttgcttttctgaaggcatacactccccagagctgaagttcaacaaccaaggaagacagaagcagcattccatttctttggatatttaatttcaaggtca

SEQ ID NO: 37296 - DNA, 1850 bp, Bovine  19866881999140
  misc_feature (1)..(1): n is a, c, g, or t
nattgcatggaatgagaagagtttaccttgtagccatctagatgtcagtttttatgtctttttcacttaatagcgtgttcagattcctttttctctctccttatcaaaccagcttgtttggagaaggaaatggcaacccactccagattcttgcctgggaaatcccatgagcagaggagcctggcaggctacagtccatggagctgcaaaagagtcggacacgacttattgattaaacaacaaactcattagctactccaaaccagcttggtcgaaatgatgaaactcactctgaggcatcagagattaataccaattttgtgtggtagttcattttcaattggcatcaaagactttgtccagaagcatctacaaggaaaaggtctgtgaccaaaatcccatgtgtgtgagggcaagtacatattgaaatggacaggatggtaggtttggagcagaggttctgaaccaaggatgattttcctcttcttctccccactcaaagaaatgtctggagacattcttggttgtcttaacctggggagggatgctctactggcatctaatgggtagaagtgagggatcctacagttcacaagacagcccccagaacaaagaattttccagccctatatgtcaatagtactaaagatgaaaaattcagattgagagggtttcctactgcagctgtaacaaattttcctgaacacagtggcttaaaacagcacaaatttattacagttctggaggtcagaagtctgaatggatttcactgggctaaaaatcacggtgtcagcaggaccgtgttccttctggagtttctaagggagaatacatgtccatgctttttccagcttctagaggccactcagatttgttgacttgttcctcctgcgcttcttcaaagccaacaatgtcaggccaagttctttggggccatgccttgacctttttccactttcacttaaggacctgtttcacctaagacccctgattatgctgggtctatccatataagctgggataatttccctgttttcaggtcctgtgattagcaaccctaattgcacctttgaccttaattcccttttgctctatcatctaacatactcctaaatttggagattaggatgtgggcatttttggaggccgttattctgcctaccgcagaggtctgtccttatcctacaagtgttggtacaacacaatcctaaatcaaatgcatttactggctttatcaaaactagtttgcaagtcatttaagtaatgcccaaatacgatgatatgattttaaaataattaagtgttgactgatcaagatatataattgatctcattccccttcaattgtggttacttactgaccaaggcctgcaaaatgacctcctatggctttgtttcctgaactataggacttgttatgggctctggactcaaccacactggcctcccagtgtccttacctgataagaggtttatacacgaggatcaatagccaaatggaaatcaatatgccttttcattaagtgccagaggcaacaactagtataaaaagacgaatccaagcgacttcactcatcttccctgaaaatgtaagatatcagcctaaatctcctacccagttataggcagagtgcaggtggatgagaaagaacccgaggtgggcctgcccagaggtagaggtcctgttgaagggagcaaggtagtgtgcatgaggaccaatcattgtctgctcccacaagtcaacctgaaaaatgaggttaaagaaaaagctaacatgagtttaggtggactattggacagttgcactacccttaggaggtatattggaatccggggggctttagcaaaaa

SEQ ID NO: 37297 - DNA, 2024 bp, Bovine  19866880350464
  misc_feature (1)..(1): n is a, c, g, or t
nagattttcctctatctgtggaaactataatattaaaagaaaaaagtatttagaaatctgtttcaccttatgttgatgtgacattctgtttttcactgactacctggtgatttttgtgatcggtaatgctaccttgattaaagacaatttttgtaaaaattacattctttaccatttaagcattgtgactaatattttaatcaagcacacacctgtaaggtctttgaagttttattgcagatttttaaagatcctttcactgttatttcccttaagaaaatggaagcactctctgcaatttccattcgtattctgagatgtcattttacggcaggaggaaaaggtaaagcactttatatgatgtgctcgtaggtgcatctttatgagggtggggcgtgactgcattcaccggggttcctttcccagccccctaagtcacatcctagcgagatggataaagtcgtaatcccagacagtggaccctggcccttatcatcatgtcactcatttccacaagcctttccgggaacccaattacgaaaagattgctgatcggagtgatgtgggggagagactgatctgtggccagtctgtaaaatgcataatttttttccccctgctccttgaaaaggatctacccccattgtggaataaattaagtgtgaaacatgtcgggtgagatttatggtgttgcccagacttctgagaagcggagatctttatctcacggaggctgccatacattacattctgggtgatacgcggatgacagccaacctctttgccctcagacgtatttacataacatgtgtgcggaggagggggggatgccttggtcccttcaatctccccaggccacctgtgtcaggagcgtcttctgtagcttgttggctggccttcacccccagagatttgtgggagaccccatgtgcccaagacagctctgaaagtgaacctttaaatcagcagaaaaaggagacacacaatcaataaggaagcttccttttatttctctccttcttttctccaggcagaatccccagacataacaatgaaatctgtctggtctaggccaaactgttactattaaaggttacttgacaaggatattttgacccatacagaaagagcttgatctacatctgtgtttgttcacctcttgggcagacttttaggaaaataagaacgagctccgccaggctcctggtgccccgtttcttgtgtcaggaccacttgtggtgtagatttttgtagatttgataaatgtttccttatccagggttttattaggaagaaaaaaaacacaggcttttatttagggaatctcactgttttcttttttttccccaaagatttaactggttccttcatcttcgtgaatgacagacatttataaataggaaactttagaatttccttgaatattgatatcttattgttagttgactggtattttttttcttctcaaaaggaaccaaagaagcgtgttcataaatttcagatatggtaatttcaattcaatgcccatatccagattctagatatttatattaaaaacacttaacagtaacactatctgcttctagtaacttattttgttgattagtatctatcgacttaaagtgaatcagaatgagagcaagcaaaactgctggatggaatcagttaatggaaaaataaaaaacagaaacctctgcttacaaatattgatgctatagagagatcaatttaccactacacgtgaaatccagacttcttagcaaacctccggtagaaagctgaagccaggcatgaagaattatcagacccatttacctttgctgaaaaacaatcttatttctttgggtaaaatccaactttacagacattctgatgtggtctagagaattcgagaatgtatgtcaaaagtctgatttttatcagctgttaatcccatctctttctcatggattatattttgcatcatgtaaatatcgtggtggagatgggggattgactgacgagtgaaattacttccattctgt

SEQ ID NO: 37298 - DNA, 1923 bp, Bovine  19866880356999
  misc_feature (1)..(1): n is a, c, g, or t
ngacctataaagctttagaaaccagtaaatattataatgcacaaaagatttaaattaatgtagtacctcattcttaatttaaaggtgttaagtctttgcagaaaaaggcaataaaattatgtagttaggcagtgtagaatagtggtgctcaaactttttttgtttcagagcaccttcacattttaaaaaattattgaggtctctaaagagttttcctatatgtagactatgtagaaagatatttattattttagaaattaagagtgggagcttataaaatgcataattttatcacttaaaaataacagtaaaaaaatccatcatattttagcataataacatttttatgcaaaagagccatctttgccaaaaaattagcaaggagtttagtgctgttttacatttttgtaaatatctttaatgtctgtttaatagaagacaggcatattatcatgtttctacattcattgtcatatggtaggttgttttcggtgaagtttataaagaaagtcaggctcacacagatttatggttttaaaggggttattttaatagtcttttcagataattgtggatatactcaacagatggtagtttcttaaagatcagttacattgtggaatctgaaatccatatcaaagaactttttgtctccgttatggtaaaatccattggtttatctttcaatgaatttttttttatctgtgcttgattttggtgacaccagtcattggtcattgaaaatattagtttactgtgctgggcagattcttccaaatattcgcacatttaatgtgttgtcaaaaatcacacttgtttgtgtcattaccatcacagtgccatcagaagagcctcttaagtcgaggaagctattagcaccttcactcatttttcagaaaaaatgtctgccgaacacagaaatctgaacaaccacagtttatcagttgtctttttaggtaaaaatggtgtcacttaaataaagcagctagttcctcccacacctcagatgtgttttcagtacagtccatagggtcgcaaagcttcagatgggactgggcgcagccacactcagcagtagtgcctcatgcgccccccttgcttggtcactcgttgtcacaaaatgttgcaaagtggactcactgatagagatatgataaagaggacagtggcacctacattttggtgcccctgtcttgaatcttgctaaggcactggcagcttcacccatctttcgttttgtaccactagtgcgcacgtcagacagcgaaacggcaagcagccttctagtctgcttccgttgatcctgttgatctgaaacaccctttgaacgggccttggggaccccaggagtctgcagccacactttgagaaccacgggcatagcgaggtctcaggtttcatcgggaccttatagttcacccagttcaactgctctacttcacactgccctcgccaagtatttatttagattttgtttgaatgcttccagttcctgtgaataactgtgctaaatgaataaaaataagagacatagacagctgcttgatggaaagtaagagattcgtaaccctggaattgtgctttgtcctgttattttaaaaaagtgcatacttataaattttgaatcgcctgtagtgtctgtgattgagatagcagatgggtgcaggtgttgatggcattgcctttcatctttaaatcggatgatagcctgcattggaatctgacgaggcttggaaagcagccgtggggggtgttctgtggtctaggctgggcttgagaaagcccttgagaactcatataatattgagggtgggcacacacttgctattaatctcatttttaagcctcagcttatagaaacagttatttaaatatttccccttaggaatgggaaccatttcccgtcttctgagtccacgtgtg

SEQ ID NO: 37299 - DNA, 1129 bp, Bovine  19866880410144
  misc_feature (1)..(1): n is a, c, g, or t
nttgggaagatcccctagaggagggcatggcaatccactccagtattcttgcctggagaatcccatggacagaggagcctggtgggctacaatccatagcgtcatagagttggacacaactgaagcgacttaacgctacaaaaattaagctccagtaaatacacacacactcctcttttgaatatagccattaagaaatagaaatcactggcatccatttttgtataagaagtaactaaagttgtctatgtttaaaaacataccattacttcctggttcaattagagcgattagcacttggccttccaaatcaagtttcactgtaatgacaataacaactgactgaatctatatatttccaccagaaagcaaaatgatttttttctgaactgtagtaattatttgtatccagccatttgccatattctaagtacttgaggaagctggttttacctggatctatttttccgtacatctgcctttctggaaggactcttgtttccattcttggatcatccagatctttatgaaagacacttttttcccttaaagaaatgggtacagaagagagttcccaaaccagctaattcctcatagaattgttaagccagcagttagttaagctttctgaatatctttgaggttgtcaatataagaagcaagtggtcctagagcagatgtctgttttatgctgtgattcatcagtgagataaactcctgactttagttctgttcaaatatcctctctgctgttcctctctgccctctgctgagtagatgggtcaggggacagaggactcactttgtttattcagtgtgtcttagctctgttgcacgagaatgctggacactccagttgagaaaaagaagtgggtgaaaagaaactgaatcacggcagagaagtcttggctcagctccagccctaaataaacatgaatgtgaccgagtcaatgactaaggactacgatttgttgaacagattttcagttaaattactgtcacaccctttcctctgcaggaaacagatcctagattgatggagtaataacttccttttgctcctctagtaagaaatttgagagcacacgaacgccaacttcattttctacctgttttctgaatcatatca

SEQ ID NO: 37300 - DNA, 3077 bp, Bovine  19866880420683
  misc_feature (1)..(1): n is a, c, g, or t
nagaagggggcctggagggcggaccgggccagggactgggtcaggccgtccactgctgcggggactgagatggagctacagtggagacgcctcggtctgctcttgtcttcagctctgtggggagagaatgaacacacagagccccagcggagggacccagagccatcgttcagatggtagcagtgaagcggctcaagcacacgtcatctcggctcttgggtaaatcagccttcccgcgaggctggaggatgcctgcggggctccggtacccagggcctctagaggcagccactccatccttccagccccgcttcccgacagataagcacgtgcgaatctcatcatgattacttcagaaaaacatctcacccaaacccaagacgtctcaaggagtgccacatttgccatcaggcattcgctgagtcaatttttcacactccgattattaagcaaatcaaaaaaccagaatttcaatctgaatgataatttctgggaagttcatcttaatagagagttactgatgcatcagttgctgggagttcatcactgctcatccttgcaaaagagtatatacttacaatgatcaaagattttcattttccctctctctctctctctttcccttgccatttaaattccatcagcaattatttaattatgtgcagaattgttatttttcttctgtggctccatctggttgcccaatgccaagtgaactgctggtattcaataaataaatagacaactacttcttcacttaattttatagcacgcaaatgaatacatgatgaaattgagaaattggggtggctgtttagctccagcagagaaaataataaatattattctggaagtcatataaaattaatagttatctggttaaaaaaaaatttccttctggcttcacatgtcaatgtaatcgtgtgcgagggagatgccaacgcgttcatttcacaaggagtctcggagcatttgtttttataattatatctttgtgtggcagagaaccaacagggctgggatccactgccgggcagatcagacgcccgtgtaggaaatgaacgagctgaagatgaaagtgtggcactcggaggataatttgttttccctgtaatgtttaattacagttttccgtacaaaagggaattttttcagcatttaatcactgagatagttgaagctaattagtgagggacacaccaccatttccactttaataaaaaatcatttgacattgcagtcaaggccaaggggggcggtcatctgcagtgaggagcaactagatattgctgtgttcctatgggaaagtacctccctgagactttgggaaggtcatgtacacactgctatattcaaagtggagagcaacaaggacccactgtagagcacgtggagctcagtgtcacgtggcagcctggatgggagggggctgcggagaatggatacatgtatatgtatggctgagtcccttcactgctgttcgcctgaaactaccatacactgataatcgtctatgtcccaaatacaaaataaaacagttaaaagtctggggaaaaacaatcttcctgacagcaaattaggatggaaaggaccagggagggctatcaggcatgagtatcgtcatttgtcacagggagacaagagcggtgacgtggagaaggacctggatttcttcacttgtttatttccagctcagcatccaccgtgaactctgaaagctttccctgaagctttccttactggcaaagaagatgagcgagcttcctaagggaaatataatacaggccaccaccgatcaagctcactgcttttgtgtttttagagtggcttctccattttgggggtcaaactttcagacgtttctgtgagtcagccttatttatatatatgacacttgcgtaaagatgtcgagattccagctatacgtttttgctaagatggaaatattagatgacttaaaactcggttggtgagggacttccctggtggcccagtggtaaagaattcatctgccaatgcacagggcacgggttcggtccccagtcccagattatcccacatgctgtgggacaacatggcctgggctccataactactgagccagagccctagatcctgtgcttcccaacaagaggacccaccacgatgagaagcccactcactgcaccttgagggtagctctcaatacccactcacggaaaccagagaaaaccagtgcagcagcaaagacccagcacggctgataaagaacgaaataaaaaattaaaaaaaaaaaatcttggtgctggaggtggcaaatgatacaggcattagtgtagcaattatttcacgtggcctgaactaacacacagagcatccgttttctagaagggaagcccaggcaatgtatcctttcagatgtcaggaggtttcactttacacagtgggcatgcgtatatgagtgttcttctccctacggtcacgtgtgattgaactttacattaagagctatcagcactgggacttccttggggtccggtggttaagacctcgccttcccaagccacggggtgtgggtctgatccctggtgagggagctgaaatcccacgggcttcgtggccaaaataccaaaatatgaaacagaagcaatattgcaacaaactcagtgaggactctaaaaatggtccatataaaaaaaccatattttgaagagcactatgggcattttcttgctccccccaccctgatgaaccacgtgggtgatgggagctggacaccgcccgcctttaccttttggagccttcctcctgcttgcccctggcctccaacttctctctgtggaaagcagcgttcatctcgttccgaagccggtcattctcgcgggcgatgtccgaggcgttctgaacaaccagggcgtcataggtcttcagccccaggtcctctgtgacctgcagcaagctgttgatggatgtgacctcctgctgccgtatgctccttttctgatgcaagtgctggcgggctaaaaatcctctgaccacttcagtgaaagaacacaacggtggggtcagaaatccagacgtacaccaacaagccacag

SEQ ID NO: 37301 - DNA, 702 bp, Bovine  19866880461056
  misc_feature (1)..(1): n is a, c, g, or t
naattattactagtcctgctggttgataagtgatcaggatcgcttctcttgagtgtggaaatactgacgtcgtctggattgtgtttcattttggaactgttagaaaattattattcagtttaaagtatgtaaacagctgtagctgtgagataattgattatgcttttggttaaaattctggaaatcaccctctttttttcatactagtggtagaacaaagaagcttacatttaaaaggaatagacaaaaaatcaaattcaagtgtaatacattcagatataattaacaataaatgcaatttacgagttctgacatactaaacacattttatgactctccacgattatttaatgcagctttttaaaaatttcttataaaattgtatttctgttgagcaatcagacttggtaataaaacaatttgagagtcagagagtgtttatattttgagtagcaggaaagcacaagaagagcagttgcagatttccaatagaggactaaacataatggagtttcatttttcttgagacttcacacatacgcagttttctaatgctttccccccttatggacagattctcagcactaagactgttgagtggaagtgtctgtgttttcgccgttacaagatattgccagatcagtttccaaaaaaattttactaatttacgttttgaaagagtaccctttcctcacattctaa

SEQ ID NO: 37302 - DNA, 2837 bp, Bovine  19866880469911
  misc_feature (1)..(1): n is a, c, g, or t
nccttggagatctttcttttgcttacctcttgctgctgtattaggaactatttcactttctttgacacttaaaaataaaatcttagatataattagagaaacacgtggatatggtaaaatgcacaaatcttacagttcagtaaatctttatatacccttgtatctctatatatttgtacttatataatcctgatcaacttggaaacattttcatcattctagaaagttcccttatgctccttttccatcaatacttcactttaaagacttctatcatcataaattagttttaacctgctattgaacttcttctaaaccaagagctgtaatttgacaccctcaaaatatcccccatcagcttcatgtgagacttttattttggtgatatttcttcacactgttacctaccttaaaccacttaattaacacctccatattggggtctagagatgtgtatcaacatctttggcgctctggaaattattctatactattaacagcttacatatgattgccagcatatatctattaaattgaaaaacgattctattaaaggtgctccagcttagatgctttataagcatctaaaaagtccattcttctctacccacttaattcccacatataaagcaataccccctctcccttctataatgtcctactctatctgtaaatcttttctaaacccttttgtgcgtttatggatgactgaccccacattgcagtgtctgccatgatggatactctaggtgtaagagtaaacatcatttgattagcatcatattagcgttttgagagaaagcccacagtggacataaataaacctgaataggatgcagaggcggggggcgttgcagcgatgaagcagtcaggcacagctaagctgaggacaaaggcgtggggcacagggaggggccgtgggtcagattcttgtcctcctgtgtccccacctcactttacccgccttcgcctcttctccaccttcacctctctaggtcactcactgcaggagccttggtgctgcaaaggaggcaccatcctcctagcatttcatcagcttcacccaaggttggcagaatggccatgtctttattgcttaactctgagaaggttctccaatcatccaaagacatgaaaaggagggagagggagaaaggggatgaagggagaagatggggagaaagaggaaaagaaaaaagaaggcagagcagagacagattccgcgagaaatgtgaggtcatggattacggatcagagagcagactgtgttctcacacagcatcccagtgctggtttcctgagccccagtccccaccaaaaaatgcagtggaagccccttattacagtgggtttggagagaattagaaaacaaagcttatgtagactttgggcacttctccccatctacacacacacacacacacacacacacacacacacacacacacaggatgcagacctctagagagggaggaggatgtctccatctccatcaccttcaaatataaccagatgagtctggagagatgattctccaaatctccccagagctaccccatccctagcctcccaggagtgtttttaggcaattatccttaaaccaaagtggctgatgccctttgccctgcagagcagattgtgtagacgtgcaaacagttatggagatctgttcccaaacaatgagttctattgcaatttctcaaaaaaaattaagtttctaagtttgggaaataatattatttatggatttggatatttcaccatacagtttttttttccaaatcactttaaaatactgttaacattttgtccgcatgcctcccacccccttgcccagtttagagaccatacattatcctttgaaagctaaagtgaaatctgtgtaacaggctccagttcatccacctcacaactgactcaaatttgtttcctttcgatggctgagtgatattccatcgtatatacataccacatcttctttatctagaaaaagtgtactgatgaacctattatttacagggaatgagatgcagacttagagagaggacttgtggacacagcaggggcagaagagggtgggacgaattgagagagcagcgttaacatgtatacactctcacgtgttaaacacacagctagtgggaagctgccgtgtaaccagggagcccggccggtgctctgtgatgacctagaggggtgagtgtataatcatggctgattctcgttgttatatggcagaaaccagcacaacatggtaaagcaattatcctccagttaaaacataactaaaaaacaaacaagaaaggtaaaatctgaaaccagggaatttatttggaagaaggaagtcatcagtgtttaaacttgccctcaaatcatcttataaggccttttaaagaagccttcgtagggaactgaaaaggcaaatgaataaatttattgtatctttacactcacatgaagaaggcttatcttccactccacctctcacctcttctcctttctcaagtatagtaatgttttcccagttgtttgataatcctgcattgaataaaatattcctctgaggttacgtgtagtgccccagaagatgcattagagtatttctaattctctgtttcttcatttgatgacccttgagtgttcattgatgttttagccttcatagggaataagaaaattagaaagtctatacctcaaataagtaattatttactaaaagaggctttttctgtgatacaagtaaagaatatattaaagcattgtattatcagaggctagatggactgtcccatggaaaagggagcagagggttcaaggtaaggccaggacttatttag

SEQ ID NO: 37303 - DNA, 1893 bp, Bovine  19866880547283
  misc_feature (1)..(1): n is a, c, g, or t
nctcctctgtcctgggattctccgacaagagtactggagtgggttgtcatgccctcctccagaggatcttcccgatccagggatcgaacctgcatctcttatgtttcctgcattggcaggccagttctttgcccctgggaagctcctcccatctcattaggcttagccttttagatgctattcttcctttcctaacatatccccccggccccagttttgtttcaaccacagtgatctgctctataatccactgtagaaatctacaagtaatactggggaagtgggcctgatctaccttctcagggagcatatttacaacttgcggagactataagacccttctagtttgtcttgtacactgagaagaagaggagaagggcttgctcctttggaaggccttctctttctatttattttcacatctaaatccacctgaaggctctcctccagacggtttctctcatgtttttgctatgtcccatattatcatgatgctgaaaacacacatttgtcctcttctcccaaagtaatgaatttctccttcatctccatctaagcattactgtaacgtgactcatacatgacaacagcaattaaaaaaaaattctcctgaagatctattctttctaaagtaacggatgaagagcgtctttgaagattactagggtcaagtccttgctgtgaaagatctcacagaccagatttctggtccatggtctgcccatctctttggtgtcaaagatgaacttatggctttgctgagcttttgcatttttggctcatttatttaccaaagaatttgtgttccctcctctgttcatgtaatattttccaatgaaacctatgcagccatctcatctagaatctcacctggcatcaccacctctttctctatttccctatgcagccgtggtcttctaaaatactctgtgtatttatctgtctcttgtgttttccatctgtctcccccactagagtgcaggccccaggagggaaggtatcttggtttgcttcatatattgtgcatcctcctgggcctagaatggggcctcactttccaagggtgatagctaaaatctgtgaatttgttaaacttttctgcaaagaaggaccgcctctgcatttcataattctaaaaattagtaattaggcaataacgccacatgaactaacctatgatgagtttacttgagaataaactgtggttttgcctaaatatgtctagaccaccaacgcagaaacttttgttgtctggtctccaaaatttcactcattgagttctgccgagtcatgtttctcccctgcgtgaattggttcagttactgtgtgcagataaagcaggcttaatttttaattaggttgtgataacagggaagccggatgaatctctttagctttctaattcgcagaagtttacatggactagcgaccgactttctgaactgttctgtttgaggctcctcattggatgtggaagttgggataggagtgaaggaaagtgatatataagtagcttttccctaagaggcttagagatttgaattaatattctttatctttaatgattaaggggcccctggcaagccaaggatggatttaattctattaaaaatataccagggcggcagtgctgcacggggcacccaaaggccggaagtcaagcatccatgacccagcggggcagccccttccctccccagggctaaccttcattcgccgagtccctcgctgcagcccataggcaggcgctcacagcctcgtaggaggcgctcagccgcgtggctgggtccctctttggcttgggcggaggctgtttccgtggcgacgggaggccgctgccgtcatccaggctgaacaccgagtgcagagaagggggcctggagggcggaccgg

SEQ ID NO: 37304 - DNA, 1947 bp, Bovine  19866880587435
  misc_feature (1)..(1): n is a, c, g, or t
ntcccagcatcagggtcttttcaaatgagtcagttcttcgcatcaggtggccaaaggattggagtttcagcttcaacatcattccttccaatgaatattcaggactgatttcctttaggatggactggttggatctccttgcagtccaagagactctcaagagtcttctccaacgccacagttcaaaagcaccaattcttcagtgctcagctttttttgtagtccaactctcacatccaaacatgactagtagaaaaaccacagccttggctagacggacctttggtggcaaagtgatgtcactgctttttattatgctgtctaggttggtcacagcttttcttccaaggagcaagtgtcttttaatttcatggctgcagttcctatctgcagtgattttggagtccaaaaaaattaagtctgtcatggtttccattgcatccacatctatttgccatgaagtgatgggaccagatgtcatgatctttgagttttaagccaaacttttcactctcctcttacactttcatcaagaggctctttagttcttcttcgctttctgtcataagagtgatgtcatctgcatatctgaggttattgatatgtattgaggttattgttacaacataaatgaatatttaaaaactaaatgagagaagccagacacagtaagctatatagtgtgtgatttcacttatatgaaatatccagaggaaggaaattcataaagatagaaagcagtctggtggttgtcagtggctgagcgagggtgaaatggagattgagtgtctaagggattcagtatttccatttggggtgatgacatgcatgtcctaaaattaaatagtggtgatagatgcagaacatcgtaaatgtgctaaatggtacattttaaaacaatgaaaatgggcagttgtattttagatggattatatcacaataaaaagctataatcctcctgctgtgatgctcttattgaactttataaccttcttaaaccacatatgctttattatatcttattaaattatgtatgaaagtgaaagtcagagtcagtcttgtctgactctccgtgaccccacggactatatggtccatggaattctccagaccagaagactggagtccaggggctcttcccaacccaagggttcaaacacatgtctcctgcattgcaggtggattctttaccagctgagccaccagggaagcccaagagtactggagtgggtagcctatcccttctccagtggattttccttacccaagaatagaaccagggtctcctgccctgcaggcggattctttcccaactgagctaccagggaacctatgtaaaaactgtatacagaatgaaaaacagaaatcgttctttttgcataaatcctatttgtgtttctcagtaactctgaagcagcatgggaataattttcagtgataataaagtcttcttatctgtaaaatatcattttggaaaattttcctccaatgtgctgaaataggtatgtttagccaaaaggatgtaggtagagagcagttctgaattcagaagtatagtttctggtcacttaagaatgactcagcaggggtgttcaagtctagccccctagacactactttttacagttttcaactcagcatcaaataaaccacatgttagtcgttacttgactccgatatttcccaggttactatttcaatgtctaccttttttctgagtctcattcatcagtacatttttcttttttatgctctgacctgtatgccattaagcatttataactgttgtccccagagatgctcatgtggaaaaatatgtaccatgtgacacatttaggaaagagataaacactgcccctaagaaatgatcaattccaatttcaatacttgccagaggcttccacactcaacaaaaccgagtgagcccgcccttggcttggtgctcat

SEQ ID NO: 37305 - DNA, 1525 bp, Bovine  19866880711802
  misc_feature (1)..(1): n is a, c, g, or t
natgcacttatttttctttatatgggatagcaatacagctccggcaaatactcagtgttctcgtggaacaaaatcttcttgtgagttggaaaaacatagaagcaaagctaattattttataaataaagatacttaattttagtttccaaacagaaagagctacaactgtagctattaggaaaacagatcagtgagaagaacaggaaactatgctagaaaagtgaaagtgaaagtcgctcagtcgtgtacgactctttgtgaccccatggactatgcggtccatggaattctccaggccagaacactgggctgggtagcccttcccttctccaggggatcttctcaacccagggatggaacccaggtctcccacgttgcaggcagattctttaccagttgagccataggggaagcccaagaatactggagtgggtagcctatcccttctccaggagatcttcccgacccaggaatcgaactggggtctcctgcattacaggtggattctttaccaactgagctatgagggaagcccatgctacaaaagtggcccagctaattaagacagccccagacagccctgttcttcactctgaggcaccccaagttttgcaaagatccaaataatagacctcccaacagtggaatgtgcatagctttcagcttgttccctttggaagccgtggagtctgactccgacaactcacagctgacaagatgtgagaaagttcaaggtcccttctgcaggaaggagcaggtaccagggagtgactccacgttaccgcctgtcaccccagggatgtgactcgtgacttggtgaccttcagacccacagctcagctcacactgtctccagggaagataacatcctttaccttgctttcagaattaatgagacaatttttttaagaacccatggctgcgaagcactaattattattattctaagccatcctcagaataaaccttttgagaggcgcgatctggaggaggtgcgggacccagagaacaaagaggcagctgtgcaggcttttctgggaggcgagaagtgcacagtctcagcacggcatgcccctcggacacgctacaccgtttctctgacaaaagatcacacttgaagggattggagtttctttggtgttatttatacctgaaccgcagaaagaaaaaaaaaaaaaaaaactaaagacagggcatacttctcagtttaagaccacatggaactcagggttccgaatgcctcccccttggccaaggctggacttactcatgaaattacacgctggggctgtgcaattaagcattctctgtcagggaacacatctgggtccccagcctcagcttttcaggatggcaccgggaccgaccgtggctttcttctgacaagggttgagcttccaagtgtccccaggaatggatgcagagttgctgggcagactgcccttgacttgagcccttgctcacctgcatgagatgcttaggaggctggacgtgttctcccaagagaagagactgcatgcgacct

SEQ ID NO: 37306 - DNA, 1253 bp, Bovine  19866880777097
  misc_feature (1)..(1): n is a, c, g, or t
ncgtgataccctctgttaactgtagatttggtaaaatgtggatccacttcggtaataaaccaggaacatcatcacttcgggatgacaatcttcagttttattgtcaccctggaacaaatcctggaaagaattatcactgtggatctatttccactgaaaagttgtttatcataatcaaatcactcattactggagaaatgtggtaacacaaagattataagtaaaaagaaaagtatagattgatgtgtaaaaaataaatgtactcaagagtgtgcagtcatttttatgtcatatgtatttgcttcattcccattttcatttaaagagaaaacatttttttttttttacattctctcattagaaaagtatgccctagtaatgggatggaaacccaagaaatcagttcttggtacataaatttgcaaatattgttgattttcttgagaagaattattttatttaagcttatttcttcatttttcagagcagtgtttcagtgcagggttacatgagacaggcattgtcgacctaaatcctgagatatttttgggcttggcatatcttccccaaatataatttctttttactattttttgctctgcaaatagggatatggacctacagcttgattactaggatgctaaaatctagcacttttaaaaggctttaaaggggtgttttttaatactctgggggagtatgttgaaattgattatactcgcctttgaaaatcctcactgttcctttgtttcattgtcattgtatatgcagtaaaaatatctctggaagcatgttgtaacaactgattctgaggatgaaatttatgcttggagagttgttgggtgcatagataaaatgtgtgtgtgtgtgtgtgtacatgtaacacccatgtgtaagcatgttaattttgttcccagaaaactaccttcctggagtccatagaaaacattagtataaagtggaataaagaatacgcttgcaactacatttttcaaaaaacacttagtctatgtatgttttaaaatctcctgtgatccagccctttgtgtcatctcattctcttttttctgcttcttttattatgattaaatatataaaatagaatttactatctttgttgttattcagtcactcagctgtgtctgactctttgcaacctcatgagctgcagcacaccaggcttccttgtccttctccatctcctggagtttgctcaaactcatgtccactgagctgatgatttactcccttaa

SEQ ID NO: 37307 - DNA, 931 bp, Bovine  19866880817531
  misc_feature (1)..(1): n is a, c, g, or t
ntcccccgtggcttagcggtaaagaatctgcctgaaatgtaggagtcccaggagagagatgtgggtccagtattcttgcctggagaatcccatggacagaggagcctggcgggccacagtctatagggttgcaaagagtcagacacgacagaagcaactaagccctcaacatgcatcaattatccacctttaacatgtatggaattattcttctccaacttcacagttactgggcatttctaacagaggtcttccagaaatctcacttagactcagatactcagtgaataaatggagttaaataaatgaaactggaaaagcttagcaacttccacagctttttcctgatgccctgcacaagcatgcgatgtctttttctcaaagatgttgatctaagaatatataattagcacgttggtgctgataaagcatcaggactcataatgcaggatacccaagaggtggggcgaacacagagctgctcacgcttgacattttcaagggcgaaattgcctttttcggtacctaaggcattttgaaaccctgtaattttgtctctctggcaacctgcaattttttatttgtttttatttactcagtaacccccggaaaaggaggttcggtgctgagcccacgttcctgcagccgtcaggaggttttcttacatgtattccagcttcaaagcctcttcatcttagcctgacaaccaaagtctaacagtacaaagatgcagagcatttgcactggattcagagctaaatgagtgcttcctgttcacctcatcaccttcatcttctcatttcttctttcttccaactctaccatttctgaatctttttactctgttccctgggccgtctcattaggcaaagatccctatattcttagagttcatccatccatccacccatcccttcatccgcccatttat

SEQ ID NO: 37308 - DNA, 1159 bp, Bovine  19866880830898
  misc_feature (1)..(1): n is a, c, g, or t
nctatcgagttgtcagtcagtcagtttgaagttttcctacaactcactgatactccattcatttatttagtcatttttctctctgttttatgtcatatcgtttttactgcctttaagtcactaatcttgtcttctataatacctagtctgtttttcctttctactgtccatagatgcggttttcctttcttatataagcttctttccttgtaagttagtacaaaaggggagcaaattcctcaccagttgagctccacctccagcttccataattggcactaaagttttctgtatgtataaaagaaatttggaataggagtaagcctatcatggtttattgcaatagtatattttcttttctttctttcttttttttagtgcgctcggtatgataatgtcttcatcgcagagatcctgattgacagaggggccaatgtcaaccaccaggatgaagacttctggacaccgatgcacattgcctgtgcgtgtgacaaccctgacgttgtcctgctgcttatattagtaagtaaagcgatccagtttattaccatttgaagagatttgatggcatagagaagtctagatacttacctaagtatccagacgtagaaaagtctacatacttaactaatactctttgatagtatgtgatacttcagttgagaaaaaatacgtgtgtttatgtcagcacttatttgcctggaattacaagataattaggagactgaggttgtgggtcactgtatagttaggaaagccattttgtagatataccaaactgaattcctctcacctttttcttggaaattgtatgccttgatacctcacaagtcagagctaactagtttgatgattattgtcttctctctcaattcattttcctaatgttcagccaaaccgggcatatgatagtaaggatatacggcttatattgaatcttcttctcatgttaaaatctagcaaaaaggtgcctacaacatttgtgtttccaggaaagtgaaaactttaagtataaaatcactggaattattttgctgtcattgtcttcagttatagctcagatgtagacatggatccttacacatactgtaattactttagaattggaatcctttctgattggtttatctctaacaaagattttaagaaattatgcagg

SEQ ID NO: 37309 - DNA, 1419 bp, Bovine  19866880862051
  misc_feature (1)..(1): n is a, c, g, or t
ntgttgcggttgtctgccgaggaaaacggtgcatttctccctctggagagtttcggcttggctctcccagaaactaatgtataagtctgctattgcacttcccccttctggccctttgggaatatgattctttatttaaagatcccaaggtgcatttatttggctacatctcaaagactctgaaattctgtgaccgccacagaagaaagaatacctctgtgctttggcaactggttgaaaacagaattcaaagtccttgtcaagttcagctttcccttagatagcgctctgagagccattgtactcaaagtcagaggagtcatgcgtgccttgagcctctccgtggtgactctaagcgctctctccactgagcaaggcgcttacatcctaggtgatgtacacacttattcaaaactacctcgtgtcaaagaagacacattgctggaaggatctgacatatttttaactttgcttgacattcaggaaataggggagtaaaaatgccctgtgattaggtcttcacaattgaagcgtcactgagtcgaggcccgaacagaaagaaagacaggaagatgaatgcaacctttctcttcatcgatgtgatattgacaaggtaactaacagtatagctcctggatggaaaatggctaagcagggttgacagagatgctggtgagctctgctcggttgcttcgttctaatggatttaccttgggggcgcattggctttactaaaaacattcagtgggaagctgcaatccaatagtttattctaagagcttcacatgtctctttccaccaacaatcacttttgagtacacatgagacagatgtcagaagcgcagagttcaagatggaaaagacatggacgctcttctcaaggcaggctcagtcactctttgggaatgctattctccaattctgcagaatggaacttctgcacttgttcggttttaatctagtgagtgatcagcaactagggggtgattcctgcagtgctgtttgactcccacatgttcctattaaatttttgttcttctgctacaggaagcaatcatcagaagggaatcctcatcctggaagggtaggaggggccccagggtgggcaatcaacaccctttattagattttactcatctcctgagtgacagagtgcattgctcataggaacgcccccaaacactttcctcagccctttgaggagcagttagagcctacgtctcgggccgggaggaacgccatcctcctctttatttcagatttatttcagaaatcacagagctgtctccatgtgtgtctatgttctgtctccatctcatggaaggggggtgttctggcttctttggcgaacaaagtaattttttaagaaatgctcattgatgaaaaaggtgattctaaagttgcaggagatggatgcat

SEQ ID NO: 37310 - DNA, 1653 bp, Bovine  19866880866648
  misc_feature (1)..(1): n is a, c, g, or t
naactgaagcgacttagtatgcatgcatgccgaaactaaaaagatcctgcacgccccggtgaaggtcctgtatgctgcaactaatacccaacacagggaaataagtatattaaaaaataaaaatatcaaaaaataaaggagaagaaatggactcagaggtggcaataaacagggtaaaattcacagagatatgaaaggctggatcttgggcttattttacatttagccaagtgtcacatcttagttttgcaattttggatagtaattttaactcttttcactattttaatatgtctctaatctatttcagaaaaccaagctccccaaaccactcccaggatattttgagtcattctgactagctttttgtttcactggcatacaagtgaaaacatgggactcagctcacagtgatctattctaatttctcagctcactgactattctaattatccaaaacttagcactagctattcaatacccttcactgagttgcatgtaacatggtgtgaatttgtgtgtgttacatagagtatgcacatttaataagtaagttctgctaaacagaatatcagggaatcttgtcagccagccatctttcaaaagaatgtgtatgccaatgtcttaaaaagaagttagttttttcaaataagcctcacagtaattttagtagtctgcataaaactgctcttacataaacaccaaacagaacaaattgcttttcactcagatatactcttaaagaattatgcattaaaactgtaagttttttaaagttaatgttacatgtaaattcattttcaatgattataataagccaacaaatgagttttatgatgtatgggtttaaattatatgttcaaaacgtatataaggatttccccccattaatttaaataaagccatttttctacataaacacatttgaattgaattgccttcctaaaagccaaactattcagttgtaaaatatctatttaatgcatgatataattcattattaatatccaagtttaaaagaagaaaaaaaacaaccactgcaaactaatatcttgtggaatgtggagagatggtaatgagttaaaatgatggggaaattttgatttaattttggttgctcaattttactttcattattttgattgctcaataaaaactctgcagtaatctgctcattagagttgtttcctttaaaagaaaagttttgtgggagaaactgggcttcacgagtgacagattcttcggtcactccaccagggaaggatcactagagcgaaactcacagtgtaagcagccagttccgggtctggtgctcgtttttgcaggtcgggggagttgatggccgacacataagaggctaacatgtcccagcatgctgacgtcactgaaactcacacttacataaagtgtgcatttatgttacatctactgggtatatgggggctgtccaggtggctcagtggtgaagaagactcctgccaatgcaggagacccaggaaatggaggtttgatgcctggtcgggaagctcttctagagaaggaaaatggcagcccactccagtattcttgcctgggaaatcccatggacagaggagcaggaaagctacagtccaggggtcgcaaagaatcagacggactgagcgcacaggcaca

SEQ ID NO: 37311 - DNA, 3637 bp, Bovine  19866880955885
  misc_feature (1)..(1): n is a, c, g, or t
natcatataattcataaggaatgaaacaagtgacttaggtaattatttaagagtggtttggccctgcaagcaaggccattttgcaattatgttttacctgacataacttataattaaaaatattaagttgtatcggtggaggctggaaatgggggagcccagttaaatcaaataatcaataagattcagaattctgggatggaattttttggatgtactcccaaaattttattaaaaataaagtatagctctcaatatactgaattcaccctttgaaaataacttctggtctatttccctgattttggttgtttcatattgaatgctttcttgttgctgtttagttgctaagtcctgtctgtatcttctgagactccgagtactacatcccaccaggctcctctgtcgatggggttctccaggcaagaatacggaagtgcattgccatttccttctccaggggatcttcctaacccagggatcgaacttctgtctcctgcactggcagtctgattcttcaccactgagccacctgggaagccttgactaagtggaatcatatcttggttttgaatcatttagactggtcagttttgcgtatcatctccaatgttgtttgaaagtgaagtctttttgatttcaattttcatatgatttttaaggaaaacattctccattttcaagcgccatttttctcactcttcttgagctgattttcggaggtcgtcacctgctgctgtgtcagcaccacacagatttgtggtgcgtgtgatctctagtgaacacggcagtaacttctgtccaggaaactccacagaattaaccggactgttcatcaggaaaccgagcaaaggccatccagggtcaagagtctagtgctgggtttctttgcccccactaacgtcatagagctgtttgggcatccctgtggtctggcctgtggctgcgaaaggcagtcacgcctaaagagactgcacacatcgtggaaaaagtagaaggagcaggtccttgaggacatggccactatcagcaccaaggcgtgacggaggagcagttaaaaatccgcagggctgaggtgtgtgaggctttggaccaccagcacgctccttgggatctcagttttctcaactctaaagcgggcagggactgataatgcagctcgtggggacgccgcgaggatttgatgagacaacgctttcggtcagtcctgatcaatctcacccaaggcaaaagtcccgcaattattagttatatcgtactaacaggtgtgtagtgagagcagtcaccccaaaaaaggttattctgaggaacagagtcacgtataacatgcagatctggagcttcatccacggcgggaattcaacaacacccatcagtgacgccccaggcactcctgacgggaacttcccgaggcgtaagggcactctgagtcagtaaaacgcctgaataaattaagctgttaagtagcttcagtcgtgtctgactctgtgcgacccaagagaccgcagcccaccaggctcccccgtccctaggattctccaggcaagaacactggagtgggttgccatttccttctccaagaataaattaagagtgaatggaataatgacaaagaagtgagtggtgaaggaatgagtaaattaatgctttcatgggagaccatctagcttattagagtagaaattaggatcaaggccagatactggggataaaagagcaaacatcaaagtcacgtttcacaacctgtccctttttcgatggaaaaacatgccccaaattctatcagaaagaagacaagactagataaagggttaggcacccatgggtcaaaaccacccaccttctgttaatgccgacagtttagcctgcggtcttggctggcagacttggaaaggtcgtgcacgtgataaataaactctcctcacttgttcactgacaggctgtctacgagtcaatggctacctcatggctaccttctgccacgaggcagagctgagtagctatgtcagtgatcttgtggcctgtaaacctcttatagaaaaaatttgcagatctccagtagattagaggggaattttatgattcttaatccattgagcagtagaaaaaattcccaataaagataaacctaattgtatttaaactgaaatggcctcgagaatctattatacttctcattcctatttttatatttcattgaaaaataacaggtcctcattcctccccaacctcattaaactttagacaatcagccaaccctgcagaagggttttagcagaaagaatacgctgagacttggcaaaattatccctgaagaaactatatcccttgccagttacattagaatatttaacagctcctaaacatgttaattctcatttctattaaagatgtattgacagtaactgacatcacttccaaggaacaaggaagacgttcagacgatgccagcctggacctggagctggtgagtgctgcacggcggggcggccttggccctttcattcaacccaatcagctgacgagcatctcctttcatctgtctccacgcacccaatttaacgtcatggctgtgtgccttcacggcctgacctttcagcaacaactgtgtcatttaaacaagctaaatgactctatttctacgagggatctcatccaggaacaatctcaaaacagagatcacaggtcctcaccttgccaagcataataccagtccctgcagtgcttttactggacaagcccttctgtcttctgcaaataaggcacctcattaaagggtcaacctctccccatgttggggatactgtcctgctctcccctccagccacagagaagtccatacacaaatgacgtgcatgacccttccaagtctgccacccaagacccacagcaagatcctcaaagatgtgccttttacatctggaaaaagattaccattcaaaaggctagcaccctgagaagagtggagatacacaggactaaaatctggtatgcccctgcatgaccattaaaaagccacgttacctataatgtcataagcatcattgttccctgttcagttgccaagtcgtgcccgactctttgcaaccccatggcctgcagcacgctaggcttccctgtccttcactgtctcccggagtttgctcaaactcatgttcattcaatcagtgatgccatccaaccatctcatcccctgttgcccccttctcctcctgccttcaatctttcctagcatcagggtcttttccaatgagtcagctctttgcatcaggtggccaatgggtcagctctttctttgcatcagagaccacttgaggccagattcaaggaatgcaggccctgcatacatccagacccttatcagcatccctgcccttgcaccactggataaaactcccctcctaatcccctgggtggttgggatacactggataaaactcccctcctaatcccctgggtggttgggatacactggataaaactcccctcctaatcccctgggtggttgggatacactggataaaactcccccactaatcccccgggtggttgggatacactggataaaactcccccactaatccccgggtggttgggatccacagttttttgagaagtacaatgtgcccactgtatc

SEQ ID NO: 37312 - DNA, 2079 bp, Bovine  19866880966268
  misc_feature (1)..(1): n is a, c, g, or t
nctttccccagcactgtggtttgtgtattactaattgttctgtaccctgcccacagtgttcttgggtctagtcttcattaactggaatatactcgtgcacactttttagcaggaaattactccagcttctgtcccgacttcagttcctatggatactattacaataaacacatttaacatggaagcaaacccagtgtaaaaactaaattgagctgaaacccatgcaagagagcatatttgaattttgtttgaacaaaacacaatgaatgtagctactcttttctcttgctctttaattctgatgaatttttagtatttctaatatgaacttatgtagacacacaattacaacattcaggtgcagacctgtatttacaccgatactagcctggtgttcagcctcagatacaagtttattctggtcttcattatacatgaacttgattttaagccatttcaataaaacagtgaaaaccatacacacactagaagtgtaccatttgggcttttatccttgggtgtgaaagaggccggacagttacaactgtgcctctctcctgaaaattcatatgttgaagccctaaacacgaatgtgaacatcttcggcgataattaatgctaaatgaagtcataagggtggggatctaatttgatagaattgatgtccttataagaagagaaagaaacaccaagactctcgctctctctgtcatatatggacacaagcagaaagaaagtgaacatctgcaagacaagaaagaatttctcaccggaaattgaaatttctaatatcttgatcctggacttccaacttctaggactgtgagaaaatccctttctattttttaagccacccaacatgggctatttcgagatggcagcctaataccatgacataaacctgctgagaaaaataagttgtaatttaactgcgacccctgctgtataaccatggtgagggtggatggcatgttcagctttcctcgggaatcccctcggtgggcatctgcagcaggtgtggggtgaaagggttaagtaatgtttaaccaggatgtatacttagttccctttatctcccggagacttattagcactctgagtatcaattccctaggaatgactaataccttgaatgacatcagcttccgccgacatgtagaggttactatggcaatggagaaagtttgtcagagcacaaaacaaggaccgtgcttgatatattagtcagccagggagagcagtcacatataagctccagcattcattcgatgaatagtcatttatgcagcatgcatgtcagcaattccgctgtgtttttccgaacatcaaaactttggcagttgaattgagaatcttggcggatttacaaaagtgggagcactcattttctgggcctagtttgttgggttttgtcttttttttttttttcattctttatttcttgaaacccatattttctaaaggttcacagggtttcaaatccaagcaccaaagtgaatgttttctgctggggttcacaccactgtccacggcaaaatcagccctgcttttgcttccagtcattcagaacttactttcattttattaattatatgtggccttgttttttagtacaatgttttattacactgcgtctggttctatcaatcattgttaaattcctcctaattggtcttttcaaaaaggctatagagaaagaatgaatgaccaaagtacaacatactataaataaaatattagtaggtaactagtaaagacctgctgtgtagttcagggaactctcgtcagtgctctgtaaaggccgttatgggaaaagaatctaaaacaaagcggatatgtgtgtatgtgtaactgattcgctctgctgtacacctgaaactaacacagtataaataataaagcaacagtactccaataaaatttttaaaataaaataaaaaaattaatggccaatctatcctcatcaggtagggtgtagatctgacttcagtatgtgggtaagaaccagttccttccccgtgaacagattgcttgagagagaaagtaatcattaaacccagaaccaaagcaagttctcta

SEQ ID NO: 37313 - DNA, 1175 bp, Bovine  19866881275483
  misc_feature (1)..(1): n is a, c, g, or t
ncagaggggacaacatggttggaaggcatcactgactcaggagacatgagtttgagcaaactccagaagatggtgaaggacctgtccgtgctgcggttcatggggtcgcagagagacgggcacgactgagcgactgaacaacagcaacaactgttttgagggtaagtaacctcaggtgtccagctggatttcgaaaatatcccgaagttcacagcagaccttctgcattaaatccagctctcttttgctcatattgttacaaatctggcatgcaagctcagtcactcactcatgtcccattctttgcgaccccatggactgtagaaagtcaatctatatagtcggtcctgtgtccatgggatttcccaggcaagaatacttgcctgggaaagtatgtagtttagaattttcaacagcagaaaagttgcattttttctttctggtacatagacctatacatgtgcctgactgctaagtcacttcagtcgtgtctgactcttttcagctccatggagtgggttgccatttcttcctccaggggatcttcccagtccagggatcaaatttgagtctcctgcatctcctgatgcaggtggattctttaccactgtgccccctgggacgtcccaagtaacaaatctggcaacattatgaaaagaattctactgcacgcttcatcacccatgttctgaagatgcctactccttatcaggcagaaaggaaacagctcagggaagaaagagcttgtgggttgttcgcccagtatcagtgaccaaaactctacaatgtcaagatcttaaagggttgcccttaaggccttcggtccacgagtgctcagtcctgtgaactcacccggcccgcgtagtgcatgacagtgaaagctgcgccttggtctcggagggcgaggttcccatttccatccttcacgggggagtagactgcatttgtgtttgaggattctagcagaccgtggagctttttgggaagacttggttccactgaccaaatcatttgactttcttcgtccaatagagagagaaatccagaaggcttctgaaagttaaaaagacagctgtttttcccttccattcctcagtctgctattttcgttactgttcacacataccatttgcagcctcatcatgttaatacgatcactcagaacatgagtttgc

SEQ ID NO: 37314 - DNA, 1120 bp, Bovine  19866881334748
  misc_feature (1)..(1): n is a, c, g, or t
naagagctgactcattgggaaagcccctgatgctgggttagggttaggagaaggggacgacagaggatgagatggttggatggcatcaccgactcaatggacatgagtttgagcaggctacagaagttggtgacgggcaaggaagcctggcgtgctgcagtccatggggtcatataaagttggacacaactgagcgactgaactgaactgagctggagatgcagacatagagaacagactcgtgatcatggtgtgggaaggagagggctggagagatagtgggagcagtgtggagtcacatacattaccacatgtaaagcaggcagccagtgggaatttgctgtatttctcagggagttcaaaccagtgctgtgacacagcagaggggagatttggggtgggaagtgggagggacgtgccagagggaggggatgtatatgtacctattgctgattcatgctgatgtatggcagaaaccaacacaacactgtaaagtgattatccttcaattaaaaataaatttaaaaaaagaagggataatgtacctaaatattttattttgtatttgaaagtattcagactacagtagtagaaaggagcactggagagggaaacaattacatgaaaaaatgcatgttgtcagagtcagaaaataatatttaacccattagcttttttccccaaagaataatgatgtccacttgtacaaatacaattatatataacttcttttttaaaggtctttgtattttagctccaatactttattaaatgcatctctttaaaccaccagatgaagtacatcgctgtcactgctctttcacgttcaatgactaaggctgtttttgttgcagttgcacatggcctgcgccagtggctacaaggaagtagtgtctctccttctggaacatggcggggacctcaacgctgcagataatcagcactggaccccgcttcacttggcagcaaagtatggccaggtaaaatatgccctgaattcagttttaaaaattatcatatgatcattgcatcatttcatatttaatttttttcaaaatgtgtgctgacatgatgtgacttgacttttaatgggattgttttactgagaaaatatgttttt

SEQ ID NO: 37315 - DNA, 1215 bp, Bovine  19866881380157
  misc_feature (1)..(1): n is a, c, g, or t
ntttctgcttaatttttctgaacttaaaaaatttctctgaaaacaaagtctattattttgtttttttaagtctgtttgaaaggaagctgcattcttttctcttctgataatacgtgtaaatgtacggagctgaaactaataatgccatttaacagaattcctcttcttttctttaaccagccagaatcttcacgtatatgctagagaaatccagactcgtttcacagccccctggccagagcaattttctcatcttctacctgctgatggacggattatctgctgaagagaagtatggactgcaccttaataatttacatgcccatcggtaagtgattatgtgttttcagtttgatagttctgccctcaaattgtggttgtgttttagcagtcttaaagtttcttcttatttttcagagaagaaatggtgacttcttttaggagcataattggatgtactgttaggtttgaactatctgtgtattaccatttattgagtgttcaggtgaagtctggtgtgtgtgtattatctttttctagttttcagatcagaataatgggttagcacatttctaagcgtttgtgttcccttggatattttggatgtaacagttatgaattcctaatttggggttgtcttttgaaataatgggacatggtatttgagcaattatggtgcattaggaacagatgaggttacataatggcttcagatgaaccatgcccacaggctgggggcactgactttctgcaggggaggcagaggagggggccttggtcacaggatggccgtgcaaggggtgactcggcgacgtatgcgtttttgccgaccacctgaccctgtgtgtctcccttcatggacgggtccacacttggagaggatgagaatgagccagcaaggagtgggaaccccactcagacgaggagtgggggagccggggggagagggtggcgggtgggcatgtccaaacccagtggtgaattcctggccgagcagcgaggaggggccgcgctctgataaagctgtgcgttaacttcaaacattcgctgacccctgacaactggctgttgccggctttaagaagaatgatgtacttgtgattttatgagaatttttgtgagagaaaataaaggatgcatgagggggaggaggagggcctcccaggtggggatggtggtcaagaacccgcctgccaacgcaggagagtcaagaga

SEQ ID NO: 37316 - DNA, 1441 bp, Bovine  19866881404528
  misc_feature (1)..(1): n is a, c, g, or t
nggtataatgttatctataacacagcctttatccaaaattttccgttttcccactaaatcctttttttattccattccttttagaagcaactattttaaagagaaaatcatagggaacagaaagcatgtctttaaagtcatttcgattcagtccaggtactttaaaatactttgggcagtctctgctgatgatttatacgaacacagaaatccacggagagatccccatggctaaggcattctgtcatattttgggatataaaaggaaaattattcaagactatcttctgactggaagtaagactgcatgccaggagaaacagttatagctgctttgaatgagaattcaaagcggaagaggggcttcaaagaggaacacactgaaatatacaagatgacatttttacccccagcagctgagaagcagctctacgttgtgtctgaaaggctctccccctctccctccaggagtggatctcacctcactgcggcagatgaagcttcagagaccggtgagcatgttaacggacgtcaaacacttcctgtcctgtggaggaaacgttaatgagagaaacgacgatggcgtaacactggtgagtcacaaggttctctaggagacactgcttacaacgcaaatgtgcatggatttcgaaaacagagaattgggtaccattaactcctaaataaggttttttatttttctgattatatcagtaatacgtatttattgcagaaattttgcaaaacagaaatgcaaaaaaaagtgcaaataacataccatcacccaatatttatctgttgatatattctctttaagtcctatgcatgtttttcctacaaatttagagtaatttttatattatttttgttagtgtgagacttctgagctgcaacttacaggagactgttttcattttaagcaaaagaacctgtgttactctgatgaatgaatttctaaattcaaacaaacgcctgccattgctttttaatgctctcaggcatagttgcattaaattgaacacataacaattaaatgtggactcacttggatgtaagcacaatgtcttatcatcacaggaagaacatttggtcctattgacccataaaaattacttggatcgggcatgctggggttagaattaattattatggagatgaatgtgttgtctcaagaaagtaagctacagaagcaaaagggaaaagctctgaagcaaggggtgcacagaagcagttgcaaccaattttagaaaatgattccatttctactatgggaaaatacggtgtgaggttgaacacagtagatgaggaaagcagtgtaactgagtgaataagacttgtgtgagacctgatacctttgtagatttattaagtgcaaattaagtgctttgagacttctcaatagagttatcttcccggacattgatgttcatctttggaatat

SEQ ID NO: 37317 - DNA, 1068 bp, Bovine  19866881636499
  misc_feature (1)..(1): n is a, c, g, or t
nagttttcatgcctatatgtattccccacaaaggtgactattgtcccttccatattatcgtgattgttttaggtcccctttcaatatccattccaaacacatgttccctgaatgatgttacttaaatttaacattattatgtcttctgccaaccttcatcttaggaaggaaccattttctacaaatatcactcatcactttcagacaatgacatatatgtacagaactttacagaagtgctacaggagaaaaaaaatgcatgtctagcaagctatttttaccaaaaatgtctccctcttcattataaaccagaaaaggcttagatgcagcgtttatctagctcagaaaatcctgttaaaaattcagaaactaaagaaacccttcatgaacccatgagaaaagccagtgccaaactatttttcaccaaactagcatcagtgtggagcgtctggtcacagatgttacctgagtccctgagtacggcaaggtgaacggtacaaggacaaaagtttacagtcaaggataaacccaaggtgaagctcacaagttaagcatgaaatgtagacacaagcagcacaacctgagaataaaataagcaaatggagtcagccacgtattaacaagctaagtttctatgcccacattttattcatatatgcgtatacctagaaataaaccttataaaattctttttcaataactgcttttttaaaaaaattgctgtatcttgttcttcaaaagctagagttctaaagatttcaatactatcagcatttggatcacactggaattatttcagaatccggtaggaagaggacattcatttagcatgtgaaacacctttcaaagtcaccattctctgtcactcaggcacatgtggcatgccagcagaccggctggcatctgcataaaatagtatttcaagaccacgaataatccgatgagccaaagagcaaggttacttacagcacttgataaaatgagagtgaaacatctttccatctcagacagaaatcttgctacgggttccagcattctcttcggctacaactgtcgtccccaggaaat

SEQ ID NO: 37318 - DNA, 1313 bp, Bovine  19866881765806
  misc_feature (1)..(1): n is a, c, g, or t
nctatttgtggacaaacgtgaatggctcttcatgaaaatgatgatactgctgttaacagtgggaactggaatagtgtcttggggaatggatgggcctcttggagcccacagagtgtcacagaagatacattaacaacacagcctatctcccaaggcctgttgcattccatgccctatccggcccacctctgctgttcaaatggaaacacgggtcactttccagctgtgctgttatcctgatgagtggcatctattttgagctgtctgacattgctaatttagctacaaatggctttgggagaatgatggaagtggggccgaggggtaattgcacgaaggaaagcttaatgtgcaaagtgtcagcttttattgttttaagccaatgagtcctaatgagtttaaaaaaataagagtgagctaaagcatacatgagctgagtgaagtgattcccttctttttgcttatttctccttgatctatgatagaagcttaagccaggcattttgaaataataaattgtaagagtgtggtcccctttgggaatagtttgtggggctgaaataggtgatgatgttggcaaaccaagaaatggatttcaatgtgaagagaaatgctgccaaggttaaatccccaaaataatgttggacggtgattcgtgcatcttctttggctttcatggctgtttgggatttagacacaaatgaaacgctgccccttctggttcacagtgtggaacaaagacgtgctgtaactcccctctctcattcttccagtgctgcgactcctgaaggagggggccgacccccacatgcctgtgtcctccggagggtccctgctccatctggtaagagctgtgatgcccgggtgggagtgggtgacatgctgtggaaggggaaccaactgtggactccaaactccgcagcggaatgcacttgtaacagacgacgaccagtgcagtgatgtgcttcagaggaacaggcctgaatagtgacacgctgatgcttgttaattactcgtaatatagtttgtaaattgttgttgtttagctgcttagtcatgtctgattcttttgcaacccagggacagaggagccgggtgggctgcagtccatgcgattactcaggcaagaatagtggagtgagttgccgtttgttcctccaggagatcttcctgatccagggatcgaacctatgtcttctgttgtctactgaattggctggaggattctttactcctgaaccaccaaggaagctcatctttctctctttctctccctctctctgtcaattaattctatacaaaattatcaggag

SEQ ID NO: 37319 - DNA, 1063 bp, Bovine  19866881869568
  misc_feature (1)..(1): n is a, c, g, or t
natgtaacagagggaatgaatatttctgaagatgatcttgaggcattatagaagccaaaatcatttctaaataaattgactttgatttagtactaattttgctttatcacatgctaattatttaaaatttcttagtattatgtcctaaaggtaattctctctgttaggttattataggagcctacatatttattccccaattattttaaatgaatctattatcttaaatctgattataagaagttttgaggcagatcattgatttgaggtggagttcaaatacagttttggggcatgaaattacaggtaattggactgaactgaatcctaagtgggaaagtccctgtgatgctggattaccttttcgtatagtgggcgtgtcactgtctgcaatcagctgcaagcagtcttgagtgactgaaaagcaaaaatatatcatttagttacatgaatagaaatagggaacgaagacgaccaagaatacaaagctacaaacccactcttccaatggcccctgatcaatcatatcaatactttctcactgcctacgtgctgttcttaaaatccctttaggaaatatgcccacagatctcaatataacttctactttaaatgcaatatgtatatacttgaaattcaagttttagaaaaactctatgctattgaaatatagtagttttaaaattattttgccaacaagtgaagtcctgtctcactctttttgaccccatggactgtagcccaccaggctcctccatccatggaattttctaggcaaaagtactggagtgggttgccatttccttctccaggggatcttcccaactcagggatcgaacctgggtctcccgcattgcaggcagatgctttaccctctgagccaccagggaataccatctaaacagtttagctgaacttcttctaaaacatacgcctgtatagaaagaaagtttagctactgtcattttggttctccagttccctcaaatatacgagccaaatgatcagattcctctaaaatgattttttggtttttttttttaaatctaacattaaatcataa

SEQ ID NO: 37320 - DNA, 1268 bp, Bovine  19866880370314
  misc_feature (1)..(1): n is a, c, g, or t
nattgaggacactcaactttgaggaaattgccccttgttgtccaaactgtcagtgtgagaacagaatcactgacctcttgaatacagagcttggctggcagggccagccccccatcctgagaggaggaagcactgatccagggtcacacagcagaagtggcagccagaccctggctctccccatgtcccatctgctccctccccactagcaccagggccgctctatatgccgttttccaaagagggttcccggctccctcgtccctgtgagagcaggcaggcagacgcttcttccctgtcccctctctccagttgtgttttcctcatttactttcctggtgacagtcacgtggcttttctcttctctgaggtttctctttttccttcctacagttctgagccaagaagaacactcagggtagggcagtgagtggacgggaaggcactgcccggacgccacccctggacgccaccaggcccacagctgctccacggggcacttgtccctgccctccttgtctgggctgcaagcagggcaccctgtgcaacacgtcccaagccttggagagcccctggatgtgaactggagcttctgggctgggagggatctaatggagagggtcaggatggcctgtcagctgtgtgcaagtgacccatccccgttgttgaagtgccacaggcaaggtgtgcttaaccagggcctgttcttaaccagggcctgaaagagatgggtggcatttcagggggttctgaggagctccagtaccatagtcttttatgtctcagcacagaaagaattcaacgagatgcatagtgatagataaggagtgatatattgaaataggacgtttgtgaggcttacaataggccaggtgagagagtgccatgctcgagcttactgggctacagttttataatcaaaagaaaagtagggacagggagaagaccttctttgtctttcttgagtagacatcctgcttccatcatcagcttctccaagttgagcaggggagttttcttgtccttccatggtcaagctagggccacaaattattgttttttatgtgtgcagagaactgtcctaacttactgagctcactgggcaggatgtggtctcaggccaccattgttttattacctgggggcgtgtctagtgcttctagtgcatgggttggttgctaagcaagccggcttgcttttgtggttaagcaaaccttctttttcaagtaatcattaactgacaagggtctgctatatttttctattta

SEQ ID NO: 37321 - DNA, 1705 bp, Bovine  19866880532386
  misc_feature (1)..(1): n is a, c, g, or t
ntgtgtctcctctgatttagagtctgtgctgtgtgcgctaagtcacttcagtcgtgtccgactctctgcaaccctatggaccatagccctccagggtcctctgtccatggggattctctaggcaagaatactagagtgggttgccatgccctcctccaggggatcttcctaagggatcgaacccacatctcttacatctcctgcattagcaggcaggttctttacccctagcaccacctgggaagcctccatttagagcctacacacacacacacacacacgcacacacgcacgcatgcacatccataaatcagagtcctgtccttggctgactgctggcctaatgggctgaaaggcagcaatggcctctggattataaatatccctgtcctgacagggcttttagcagcctggtcaatagcccatcagactggctaatgtctattaatgtgggtcctcccacagaaaccctcttaggcacagggccgaccagcctctggggaccgcctgccatcctttgttcactaagaaggaagagaagctgtgtggggctggggcctctgctcttggaggcctgggaggagtgcccaccagagccaggcctggctctcaggtacctccgagtctgaggctcacagagctggagtctggagtctgaacggggctcctgggcacattgcctccagtcagccaaggccagggacaatcagctccctcgagaaacctttctcagggcagaaactggggcttggcctgggccagagtgcagagatcaaggccttgagagcacctgggtaggccacagccaaagacagtgctgctgacttctttggccctttggcccaggaaatgatccaagagaagggaaaggctgtgtgcaggaagcgggtcaggacactgactcagacagggctggtgctccctcagaccacagtgagtatgccacaggctcgccctgggctccagcccaactctgcccttcaccttccccatgaccctgggcaagttcctcctccagcctgggcgtgggcgtgggggtggggatggtcagtgatccattagtaatgcctgccacaggtgcatgccagttgagctttgctgtgttttttaccattcctgatcgcagagcccctcagacactgcagttttatcagaaatttttagctaatcctgcaaggacctgatcttttcagaaagtctgtagtcttgtcttaaatatctttttttaaaaaaattatttatttttaattgaaggataattgctttacaatgttgtgttggtttctgccatagatcaacatgaatcagccataggtatacacgtcccctccctcttgaacctccctcttaaatacctttttattgcaaaattttacacagtttttatagtttagaaaaaaaaattttaagatacagaggatgatttttaaaaagccacacccatttagctcaccatatagagataaccatgaataacagtttgatgcatttccttccagtctttttttctcaactttagtgttcatgtgtgggacttccctggctgtccaatggttaggactctgtgcttccaatgcaggggatgtgggttccatctctagtcagggaggaactaagatccctcattccaagaggcacaaccaaaaacttttataaaaaaaaaaaaaaaatatatatatatatatatacatgtatatatacacat

SEQ ID NO: 37322 - DNA, 868 bp, Bovine  19866880727847
  misc_feature (1)..(1): n is a, c, g, or t
ncccttgggccctgatgagagaggttaaagtgcacaatctttctttatcgtgtttgctgggaacggacattctatgattagctcgggtgctccccttattatggggagcacctaataggaacacaaagacatggccgactgtgggtgaatgctgcagagcgtgtctgcagtgacgtgccctaaatccccacggtcccggaatgggtgttattgtgttaatgtgtgagtcagcctactccggtaccccagccctcggcccgcagagctgtgcccggccccacttcccacaagactccctgttccaggaaggctgcagttggccggactggccgctggaggcctggctgccctgcctgcctccttccccagaggggagaagggctggcctggggggccacagccagtggcatgtgtggagaggcagaggtggtttctccagaagccttcgcctcttttcaaggctgctcagggccactcagtgacttctagctggagttctagcaactttctccttgtctaggatttttttttttgcaaagtttcaaatatcctagctcctcttcctttgcagacatgaaggacgaggtcattttcattcctcttctttgtgaaagaataaaaacttcacaaataaggcgcgaggtcaggtgccaagtgccccccatcctgtgcactgcatgccatctgagcagtcccacaaggccagccgtggcgccagcttctccacagccagagctgacagtgttcctgcagcagctgcctctgctctgtgtggttctgtcatgggggaggccccagccccaggcctcccacccttacaggcccgagaccataactcggaaagagggtggcacgtgtctgtgacggg

SEQ ID NO: 37323 - DNA, 1372 bp, Bovine  19866880747401
  misc_feature (1)..(1): n is a, c, g, or t
ncccaaaggttaccctcctgaagacatctttagcctggtaggcaagaaggtcctggtcactgtggaagaagacgaccccatcatggaagaattggtagagaatcatgggaaaaaaatcagatcttaaaataaagtgccattctctgaattctgaatcgccttgctggtaccatcaggtgcatttggctgaggtggggcaggactgctggtctctggggatccccaggcagcagacattttggggccaggccctgggttaagcccattggagggatacaaagagcaaatataggcagcctctgcctcaggttggctggcccagaaggggcagtgggctcagaagcttctcctcattgcccattgcagtgcagaggggtgaatgctagctgtatgggcccttcctttcagcctgccttcttccagcctgcaaagccaaccctaatgaccccaaatgtcccttccttccggctctctccccttatctcctgcctgccctggtttttttttttttttttaatatatttatttaattggaggctaattactttacaatattgtattggttttgccatacatcaacatgaatccaccacgggtgtacatgtgttccccatcctgaacccctctcccacctccctctgccctggggttcaatccaattaactatatagtgatcacttggcattagagaagaaggggttggtcagggtcttacaggcagaagaatgagcaaagagagggaaacggcatatattccttctttcaacaagtgtggagggcttgccacgtgccaggccctgctctgtggcctgaggatgcaggacttccgttctgatggggatgaatgcttcacaaaccaggagcacaggaagtaaaccacagcgtgttagaaggtgacatgtgcagtgaggtgtgtgagggagatggggagcgtggggctttgtgtgtttgcagcttctggtgacttgtacgtatgccagtgatgctaaaatcagcctttctaggatctgcagtgaaattacacccagctaacaaaatagcctcactgctggacttccttgaactacagcatgaacctttcacagacattccgtatcatattcctctttgttcttttgaaccaatactgagattattttcagattcttaatctttgtttgtatttatttgacctggttactgtaactcgtgtttcagagtgtgtcttggagtctctcttcaaatgtgtgaatttgccttctgaagattctttacttgtgaagatagggcctccctctcctgtgggtcccaagacagtttctggaaaggcatctacctgcatttgtatgtgtgggtggggtggggtggggctctggggtcatacgagaatcca

SEQ ID NO: 37324 - DNA, 2564 bp, Bovine  19866880819128
  misc_feature (1)..(1): n is a, c, g, or t
ngaacttggagtggagctgctgtgggtgcaagggggaccaggaccgttttcaagcttccacttagcaaagccatacttaacacaggaagggtatttaataaaaggtactgtccagatagaaaacaagacagccccccactgtggtgggcatgtcccctcagtcagctttccagttgagcttccagagtcgttggctttcattttgggggacatggttttctgttgtccattttggacatgccccagaagcaccttcccccaggcaaactggcccctcactctttttgttcccccgtacctcagaccagtccctgtcacagtgtctgtaaagctttggggtccctttcaagctggtgagctaaaggcaagggcacccagcctgccccgtccctcgccccctaatgcagagcggacctcagtgcacaccgcagggagggagagaagaaccaacagccccccagcactgggggtggggggtccgctcctggggacagggtctgggctggcagcaggtgtcagggccaggtggggcctatgctcgctggctggtttgttcctgggcgtgatggtggagactggaccatggccccaagttaccctgagccccacgtgccctcgcaggagtacacagccactgagcagcagatacagcagcagatgagccttgggggagctgtgccaccccgtgccccactcatttgagcccgtcaagagcttctttaaggacctcgtggaagccatgcagagcctgctgcagacgccactggatgtccgccttaaggaaagtaagtcactgtgtgaccaaccttgggtccttcactccctggtcctgtcattagagatggtgcagtcatgtctgaatcatgtctctcccgcacagaggcccaaggctgggcccaaccctccctgccaacctcacctcctactcattctgagataggtcctgtctctcacagccgctctgctctattcctgcccctcagtcgctcccggggtcctgcctcacctcagctctgcctgcactcagctcccagctggacggaccaactccccccacctcctctacctggtcaaggcacttacttgggaagcccttccttgggctcccttgctgtctcagccatctgcccctctgctctgggcctgctccatctcctgcctgggggtgtttgtgagctggatatatggcccttctctgcctctcttaaatgcctggagggcaagaaccactttgggtccatctctgaggtcaccatagggcctgacacaaagcaggtgctcagaagtatccattccttcatctctgttattcgttcaaaacagttattgagcccctgttatgtgctgggcacagcagggtacaaaacagtgatcctgtctttgtggtgctcagtcttttaaggggaagacagtcaactaatgaatacgtatcagcaataagaagtgccttgaaaaaataatactgagtaaggagaatagagggtgaccaggagaaagagctattttctatggggaagtggggaaggcctctttgagaaggggatgtgggaggtgacttgaagcatgagccagagagcttagtggtcacaggcatggactctggagccacactgcctgggcttctatcccaggtccaccacttcctaaccctgccatctggaacagggcacctaacttttccatgcctctgttcctgcatccatagaatgaagataatatagtcccatctcatagagttgttgtaaggattaagtgggttcttacatgtaaagtgctcagaatggtgctcaggcgtaataagctcccgtgagcactagctagtattgttactgctgctgttacgtcttggggaaaatgtcttctaggtagaggggaaagaaagtgcaaaggtcctgaggcacaaggcaattgtgagtttgacttgctggaggaagagcaaagggcggggggcggaagcagtcaattggagtagatgtgggcacaagagggaagaagagagagagataccaaggaaactccaaagattttgaactgaacaactagaaagaagttgtcatattctgagatgaaaaagagcacttagaattggaaggaacagcccttttggctgtctgagtagcatatagggatttgcaagagcaagtgcttgacaaaaggcagcaaaaaggaaccaagaagaaagtgagtggttgacccgttttctaagaaaggttatgaaagcagcagctatgttccaaataagaaattttggaaaaaccctaatcacaagaactgtagcaacccaaattgcatctgatggccttgaaggtcacctcttgaagtgagtcttgctgatctgtaaaatgatgaagctgcgtttagagaattaaagctaattcccgaagatgttaagggcaaaaactgcctttcatggtatggatcttatccatgtcaaaatacgctccatgatcaaaaaatggcaaaccgtgattgaagctcacgttgatggcaagattaccaacggtcatttgcttcatgtattctctgtgctttgctaaaaagcacagcaagcagcaccaccccat

SEQ ID NO: 37325 - DNA, 1402 bp, Bovine  19866880907953
  misc_feature (1)..(1): n is a, c, g, or t
ntaggtgtcctgtaaatgtttgctccaactcctggcccttcataatagatgtgattgctaaacacctataatctgttctgaaggaggcaacataaaacaatacatggagaatcttggtgaattattttctgatcctcctggaaaatctctgtcctctaaaataatccaggttctggacattttgcggtaacaaagctctaaggctgagggaaaccccttccctagaagaaaaatgctagctagttgtttgcctctaagaggatttatttaatgatggggtcatggggtagggaggctggaacattctttggttatccttgtgttccctgctcctcctaataaaggcttctgctacggagatttgctcagtctagaacgtgagttgtccagagctcaaggaaattcagcaatcactgaatctaccccacttcacaggtaggggaagtgaggtgcagaagagggcaggaattgacctgagctcacaggatggggtgaggaagaaccttcgctgaatgtacgctgacttgagtcttggggcttttcctctggaccacactgctcctgtgttagccagactctggtattggaaacttcagtatcattattttaaaagctgtactttttaaatgaaatgcttattcagccgtagtaaaacaccaagcgcttctttaccataagataacttcttgtaaataacagcactacactcatctctcctataattacttccttagggcaaagtcctcaaagtagaagactaggggcaaacggaagttaggaccattttcatggacttttggaacaagctgccagattgccctgcaaaattaaacgctactggagaatccctatagctttaccagcatagagttttatccttttacatttatttctgctaattttataggaataaatagagtgctttcatttactatatggtatgtgttttcagacacacacacactcaagtcctggaatcaagatccctgggcttggttgcttgtctgctgtgtgatctttgacaagtcacatcccctccagggacagaggatatctatctgtaaaatgatggggttgaatgagatgattttttaagattcctttcagcttagatatttcataattccatggtgcattttaaaattattgacctaggatgactgtttaatacccaggatctgccatagctctaaatcaaggtccaaacagcttggactagtggaacaggaaaacagaacccgaattatatgcaggtagagatgacaggagacataggtagcacttaagcctgttcgagggagctgcacttgagtgacagtacagatacttagtctgcttttacgagggaataataacactcatctatggtctagccctcaagtcccgtgcagctccaccatgg

SEQ ID NO: 37326 - DNA, 820 bp, Bovine  19866880438057
  misc_feature (1)..(1): n is a, c, g, or t
nattattattttttttttaaatcctgttgctcatcctgttgtatctacatatttagttatcctcagtaatgtctgagacgttactgagaggacttaaacagtcagaaacgctttctcattagtaacacgtgtagagtatattaaagtaccagttgttaatgggcaataagagaaaatgtcagcaattttactaatagtttttatctaaagttttctctttgtttgcctgtaagattttaaagaaacacttgtgactttaaccttcttcagtgggtttcttatctctcaaggattccaggatgtaatttatcttaaataagagcaaaatgaataaatttcttagtacaagggttaatagacaaatgtcatctttagttactttccctttaatttgaccctttttgccttttgccagactttcgaagataacataagaaaaaacaggactgtgattagtaactggataaaatatgcacaatgggaagagagtctaaaggagattcagaggtaaagtcactgagcatgtaactctgtaaatagaaattcttaagttaccagatacaaaaacatagaagttaaagcacgtgtaaaactgtgtgcctctgataataataaaataaaaattttcagagtttgttcccttgggaccctaggcttcctttgaggggcctcaggaatgctgtggtgggctggtccaagggaggaacagtggaggaggctctccaggtgattctcgtcaccagcacacactctgcagccagagaaatgcagttctatccattttctccatattgggaaatttttttttttttttttaaga

SEQ ID NO: 37327 - DNA, 1162 bp, Bovine  19866880444518
  misc_feature (1)..(1): n is a, c, g, or t
nccgtgtggcacgactgccgagcttgtgctctagagcccaggagccgcacctattgaggcctgtgtgccgagagccagtgctctgcaatgaaagaagcctgcacatctcaactagagtagcccccacccgctacaatgagagaaaagcctgcagagccaaaaaataagtaaataattgaaaaaataaagaggacacctaggctccaaggagtgatctgacgcattgagatcacatggctagtaaacagtaaacctctggaccaactccagtaccagtgcccatgaccaacatataccccagagcaaacagggtcttacggtattaacttccacaaagaaccagtgttaatgagccaaagtataaacaaacccaagtctccttggaaaagacacaattatccagaccacaaacttttgttctgaatactatgtccctagaaaatataaacgcaacttatgaagcagaagttgacttctgggccaacatcagtgactacatggcccagccagaccacagccccccggcagtgcagcaggcagacccatctgaaggatatagcgctcatagatggtgcgggcccggtccacctccttgtatctcagctcgaagttgatgtacgaatgccaggcctgctcctctggccgccactccatccagcgctcgaacacctgccgggcaccagcgatgttcccgagcatctcctccatgtacgtgtacttgtaccttcaatagaaccatctggaacttatcagtcacggtcaaaatgacttcagaaaaaaacggtctttggcaatctctggctctaactttgttaacacatgagagtcagggctttatcttcccaaaaggtgaagtcaaacatgttttcctattaaaatagaaatctgaaaaggatcagacattctgaaaaggatcagacattggaaaaaaaggatttttctcctcaaatgttgcttagttcaacaaaaagattcttttgtataaaagactgtaaccaaaacttcagttttgattacacagctattatatattgggattatgacttaatagaccagaggacattaaacagtaatgagtgtacgtttaaagaaaaagtaggatgcaagacttaatacatatgattacaactataaataaaataattacacagggattccctta

SEQ ID NO: 37328 - DNA, 2492 bp, Bovine  19866880537155
  misc_feature (1)..(1): n is a, c, g, or t
nttgggggttactcttgatgctgcctgccttcaacatgactggtagaagcatagggcggtgacagcaaatggctgaggccggcacatgatacagtctctagctgatcaatttccatccaggcctaggatgacataaagatctgcccacaggtgaccaaagcccagtgtttcccacagagctcggtcatttctacataggcctacagattctgagcaacgtgtctaacaggacatggacaaagctgaaccccaaaccccaagtgaccccccattctgcctgcctggtgattgctgctccctcctcccatgacaccagcatccctgctgacaccctactgctgcctgcacagacaccatggagatgcatccaccccaggcctcctcctctttctgccgtgcagcagatgttaacctccttctcagagctgtgcagctcatgtttaacctcccctgttcagagatgctcatgaagcacctctgcgtgtgccccacccaccccattttgctgcagcaacataaagaaccaaactttgtcctggagtgactacgggagcattcccagttgtctctgactggtgtgctatcatgctgagaatcctattttattgatagagaaaagttgagactcacctcttgtggggtcatggagaagtggattctaaggtggttttgctcttgtataatctcaattagctggccctccatgtcctgacaccccaaacaaacatgccatctaggtccaaaaccctttttctttgttccacacacagattcaacaagaatgccagccctgttctcccaatcaaatcacctctccaaagaccctcctgcctagaaatgtggagcctccactttctggagcttgtttctccttggctgaggatccaagggagctgcttggtgaattgcctttaccaacgggatatggcagagatgataccatgccaatgcggagcttagggcagcttctgattatctcatgggacatttctagctgccatgtgaagaaacctaagctagttccctggaggatgatacaacatgtgaccccagctgatagccagtcatctgcccaaagacaggcacctggctgctgacaactgatgagagacacatagggaagcctagccaagactggaagaaccacctgggtaagccctgcccaaattgttgacccacagaaccatagctaaataagtggttgcttatataagctactaaaacagaggttcctctgttacacagcagaagcttactgatgcaatatcattcatttagagctaagatcattaatgggccctgacggtggttagtcatcattactcaaagtaggactttagcaaactgtaaagtacttgtgaaagaagaattctgtgatcagctttgaaagccatgctattacacttcccatatggagattcatagcccaaatttgcatattaaaagtttgtgagaaaccctgcatttagcacatagtcagacaataacttagcatttctgttcccgatcaataaaggagccttgatttccaacctgaagaccacagatcctctgagaagcccaaatgattgtactggggtcaggtgttaacctggagatggtggcaggtggttgcgacacctctccaatgggaaccaggtgtccctatgctatggaatagatggtgtctctgctcttggctcctgaccacctggaggcttccttgtacctgctgaggctgcaggacaggccaccaagagggcacatgaagcagcttccagaaagaactgaaataagacaagtgctgcctccagaaggtggatgagctgcctggaagtcgttgccaaaatcctctatttacagaaaatggcactttgtaaataccaagctgtgctatttatgtagctgtttctcatcaatatatgtgggaattctgcaattatcacgagtgctcttcaaaggcttccggaattgcagacaaatgagggtcacagatagagtcagctgagccccgcaaaccctatgcccccggctcctgctctttcacatggcttggctgctggtgaaagagcaaagggcagggcagggccaggccagagccatgaccagggtctagccagatggcccctctccttggggcatggatgggggagtaatgtgggcggaaacaaggcactcaggaatctggacatggagggatcagtccaacaatgaccagcccaccctggtgctggacacaaggctggtgacactgccctgcagcatggccacagtccctgtgtccaccctacaacccctgggtcctctggcagcttaaagaactgggaggtttctagagctgtgcccagaaataaggctttggaaactatcaaacactgtgcctactgaccatgcctggagtcacttccaatgtcatcactcacatcattgccatggaaggagacttccctccccatcgcccaccaactcaggagccctgcaccggccccaaccccagccgtcaatcctgcact

SEQ ID NO: 37329 - DNA, 1787 bp, Bovine  19866880558660
  misc_feature (1)..(1): n is a, c, g, or t
ntttctattttctgcctaaacatatatagatgtgtctccttcctcctggcttttcttagctgctcatcaacccagatttttctcaaagatttcctcctcttgtgagtcttgaatccttgtgggaagatttttttttttttaccctggagggttggcaaagcccaaagaattgcaaaaccagccatttgcggaggattccaaggtctggtggaagttggctgataggataggcttttggcaactctctttttccttcagaagatttctgtttcttgagcagaatagttttggaggggggaataaaaggacacagacgtttatcctggaggaaccggggtctgcgagggttcagaaaatgtccctgaagtcgcagggcaaatgggtagtcctgccaggaagggaattcgagtttttctggcctcttccagcgttcagtttctgtagagcttatttggcaatggttttattttctcattttcaggggtgttacacgtggtcccattttgtgccatctgagaattaagtattgaggattcagtggaaggagattttctatgcatgaagcggtgatgggcaccattcgggcagttcgaatcatggagttgtgatgtttcagatttggatggcatctcccagtctccctcctgctgtgaggtccctgtctgtctacacctgttctctcttcatcctcacccctgggctgggtgatgcttttcattgttgcaagtcctagggacttcactcacctccctggtcttcccaaccttgctcccacctctgtaaatggtcccttatgaaactcccttcaacagtatcccttgagtgagtttctgcctggacccaactggtgtaaaacatagggatcttcgttgcttctttctggaaatgtgtggcaggtttttgctcattgttgcgctgatagccgtgtctgagatggatacccacgatatcctcatgatgctctgacttttgtgggaagagacacattgaacaactgattttcaagaattttgagagacaaatgagaaatacagcatgatgtggaggaggttttggtccagggtgggagatgctggaacctggaaaataaaggcgttagggctggtgaagaaaggacaaaaccacaaatgtacagaaaatgggtaaaagaagctggaaggcagttcctaaaacaaacaagcaagcaaaaacatttgcaaatggcctgttgacacaagtaaaaatcctcagccttgatagtaacaggagaagctaaattgtaaaatgacgagttaccattttatagtatcagaccagcaaaaatgaaaacaaagtgttgccaaagatgcaggggagactgcttctcttgtttatggcaagtgaggatgtgccacggtgcccaggatggggggagactgcagcagactgacagggtgctaggcatagacctcctgtgatgcctctgccttttaatgagatcgatgtgcggaaagtggggaggtaggatgagaatggcaatacaaagtatttgagacgtggatagaaatgcaacttgtctggacccatctgtgaccacggaacaggttggtcctgaccctgggaactccagagtgcagggattaggtgagagttcaggggaacaggggagaggcccctgtcccttctggagcatgcccaaacccatccaggttgctaattgaaatttattttacttatttatttttggttgtgctggttcttcgtcactctgcacgcttttctctagttgcggcggttgggggctactctctaattgcagtgcacaggct

SEQ ID NO: 37330 - DNA, 1257 bp, Bovine  19866880603173
  misc_feature (1)..(1): n is a, c, g, or t
naaatgcgcctcactgattggtttgttttgcctttgttgttctcccagctggcaaactggaaacagtgaagtgggcattcacctggcccctgagcttcgtcttgtacttcaccgtccccaactgcaacaagccccgctgggagaagtggtttatggtgaccttcgcttcgtccacgctgtggatcgcagccttctcctacatgatggtgtggatggtgagtccaggaccccagggtgctgggtcccttcagagagaaactcaaggatgcagaggattctcaggatacaaatggggtgcagggaagagtgtggggtctgggtggaggcagggaaggggcggtaaagaccaccagccctctctcagtccttctccccatggacaggcagctacgtcttcccagagtctaaggtgggggtcaggagacagcgccacctagtggaatttctcaacatcgtccttcaatttgcggaaactcccctctccagaggggagccagggcagaggttttagcccagtaactgtatcagtcagctgttgctgccatacactgtgtaacaaccagccctagattccgtggcttagaatcaaaagaacttatcctcctgctcatgtgtcggcagggagactgtgggtgactggtcttaccgggcaccagctaatcagtctgctttcagctccattgcggttgcctttggttcaggcagcaggtggggttcgtgtctcctctgtgtttgcccattttctttggacctgtggctacctggggaatgtcttttcacagtgggtcacaggaatgcaggagggaaaaggcaaatatgggggccttctggggccttggcttgagatttccacccagcctccatctgccaagtatttgtggagtgggggacatacacctgacctgctctggtgggaaggcctgcagggtcacaggcagccagcctggaggcaaggtgggaggtatgagaagtgacactccatccatcatagtcactccccatctcagctcagtttcttcaaccagaaaatgaagtcactgaaccaagtgaatgctcaagggtcccttatgaagctaaaacaatgattcaagagttggcattgattgagggaccttcgctcaaaagtgtttctgccctaaagccatcctaggaaacccagagtgcactcattgcccatgcatgatgctcgtttttaactggggagtggccctaattcattataatggaatgggaagaaattaaaaaccatacatacgt

SEQ ID NO: 37331 - DNA, 1541 bp, Bovine  19866880628173
  misc_feature (1)..(1): n is a, c, g, or t
ncctgggtgttcttggaaggactgatgttgaagctgaaactccatactttggcccctgatgcgaagagctgactcatttgaaaagaccctgatgctgggagggattgggggcaggaggagaaggggacgacagagaatgagatggtcagatggcatcatcgactcgatggacatgggtttgggtggactccgggagttggtgatggacagggaggcctagtgtgctgcggttcatggggttgcaaagagttggacacgactgagcgactgaactgaactgaactgaagtgtgtatatgtcaatctaactggtatagccactatggagaactgaatggaggttccttaaaaaactaaaaatagacctaccatatgatctagcaatcccactcctgggcatatatccaaagaaaaccaaaattcaaaaagataaatggaccccaatgttcacagcagcactaattacaatagccagaacatggaagcaacctaagtgcctatcaacagaggaacagatacacaaaatgtggaacactttctagccagcactgttctaatgcctgcttagcctgacacacgccacatttctgggttgtcctggaccacacagttccctttctgggtgttgccttccttcctaacaccatacctaaaactagctcactgctcatctcctccaaaaggacagagcaatatcctacaagctttcatctatcaaaaaaactaacttctctgatcctttagtctaccccacagtttttaaatactcagttgatttttttcatgattttcacagtttttgctaacaacttccttcagatgttggccctctcaatgctgccccctcacattgctggactgctcctggaggtcctggcttcattccctgggactcctaactctggagtctgggcaaagccctgggttggttcctaatcatttctgtccttctgacactatggctcatttgctccttttttttttttttgaatttttatttatttattttgactgtgctgggttttcactgctgtgtgggctaccctctagttgcgatgcgcaggcttctcactgcagtggcttctcttactgtggacatgggcacagggcgtacagggttcagtagctgtaggcacgtgggcttagtatttgtggctcccatgctctggagctcaggttcagtagttgtggtccacagacttagttgctctgaggcatgtgagatctttcctgatcagggatcaaacccatgtcttctgcattggcagatggattctttttttttcttttaatcactgagacaccagggaggttcctggctcatttgtttctaaagaaaactttagactgttgaatcacagctccaatatctgcattcatttctcacttttcatacaaggcttgagaaaaaaattgctatagagaaaacctaagcaaatctgctttcctgaaatggactctcttaactttgggcttattgctactgagttcatcatggatttgattattttgtgatcatttcctccaaggcttctgtctaat

SEQ ID NO: 37332 - DNA, 925 bp, Bovine  19866880633427
  misc_feature (1)..(1): n is a, c, g, or t
nttctccgggatggtgtttggtccaggagccgcatgagtgccggagcctctgataagtgcttcctgtgtacaggctgttggggagcccgaggtccttgtgtcatgctggcaaccgctatacatccagctgaagtttcccccaaataccttcaaaatcctcaaagtctctttctgctcctctccttctccccctaattttctttccggtacatcttgccagcctggggcaggcagccggcagaggcaagcagtgctgttcccatggaaacaacagagcctggagggagcggattccccttaccaaggcaacggcaatcagcggcctgcttctctctcctggctgctttcctgggcctgagtttgatgagtctaaatggaagtctgaaggggatggagagcttttttttttaaaatgcaacagggactttcatagcatctttagacatactaattgcatactgatcaaatgaagcggctcaagatgaaaatcaacacacctaaaaaggcccagctccctgaaaatacctgagtgaaaggaatctgggcctctgtgaccaaaacaacaccctgctctcatccaggtttgtttgttttttaatcatgaaatactcagagcatcttgattgcctggccccttggggattgcaccaagaactgaggtcctgacactgcccagctcctctctgtagcaatgggtgacttcaagcttctgttttagacgttcatgatacatcttgctgctccctgggcccctggcagacaccctgggaagccgagtctgccaggtgtggtgacagcccccacagagccctcctgatgctctgttggtggtcccattatgctgtgctgacatgtaaccttccaatacactgcagtcatgccttggcctaaataaccctatagctcccgggagtcaagacctctc

SEQ ID NO: 37333 - DNA, 2419 bp, Bovine  19866880688121
  misc_feature (1)..(1): n is a, c, g, or t
nattatgagtgagctggcaccccactccagtactcttgcctggaaaatcccacggacggaggagcctggaaggctgaagtccatggggtcgctgagggtcggacacgactgaacgacttcactttcacttttcacgttcatgcattggagaaggaaatggcgacccactccagtgttcttgcctggagaatcccagggacaggggagcctggtgggctcccatctatggggtcgcacagagtcggacacgactgaagtgacttagcagcagcagcagcagcagagacagatgaggctacagaaacaagttaaggttagttgggggagttcttatactctagacttagagatttgggttcacaggtgcagaccatctatgatgatcaggaatcattgttgactttactgggaaaaccttatgatgatggtgatgatgaaagtggttttgatggtatgatgatggttgtaataatgctggtgctgacagtgattggatgatgatggggacagtgatggagatgaagatggtgatgatggtggtttggtggtgatggagaagatggtgatgatggtgatgataatggtgatgacgatggggacaatggtgaagatggtgatggtgatgatgagaaagataatgctggtgatgatgatgacaggtcacactttttgaatactgaccattgagcacatgaccactgagcacactggccatatgactaagcatagaaatgctttacaacttaatcctttcaactaccccatgagatactattgttatccccacttttcagacaaggaaattgaggcagacagaatataagtcctaagtcacagcaccagcacaaaacagaaactggacttcaaccccatttgaatgattacagcccaagccagtcatggttctaaccttactttcagcagcaagagaagagatgtggtctgaatgctcaggatgcccactggcttgagggtttctcaagacccctcatctttccttgagtcatttcttccctttctgcctttcctctacttcgccatgatgctccccctctcccattgccactaaaaccgtgtgacatactctgggagctctgaaaaccccatgtgagatggtctggcagcaggtttgttagctagcactggcctctccttcaggctcattgagaaagtgacaatgacttctactttgaggatatattgtaaataatagaaaatttaactttttctgggggactttgaaattccagcatatactcaactatctgcaagaggacggaactcttcaaggttggtgagaaacctgcttcttgccttaaagtttttaatagcaaccagagctgagtctttctgaggcaatccacagtgaagtaggaatttccatgccagattcagagctaagcttattaaacaacatggagcctttgaaagacgccagtctggttaaagttatcaagacatttatactcttgcctttctgtcgttttcttgttattctctgtccaaacagtcttgggagctggtgggtactgcagctgccagataacatcaaacagtggacggcggccgaaccccgggcaggtaaccaaaacttccaaaaacagagctggcctgagacgtgggcacttcaagcaggctcatcattggcgcctcttcaaactcatgctctttaaatatttattcaacatttatttactggaagatggaggcgaaaactcatcctctattaattaaaaagtgtatatagaaattaagcctcttactaatgcatttccagcaatgcaggcatagtcaatattctgaaaaatagactgcaaaatctcccctatttttctgtaattgttatcctctttcatctttcttttgcaaaagggattactcttaagtaagcaatgtcttgttggtgaattcaaagttttaatatctaatatttaggtagtgaaacactttatgcactattcattctaattttaaaatttcaactggtgacattattcacaatagtcaagacagagaaacaacctaaacgtccatcaacagatgactggctaaagaagatgtgatgtgtatatatatgtatatatatatatatcttgttttatatatacatatgttatatattatatacatataatatatacaatggaatattactaagccataaaaaagaatgaaataatgacatttgcagctagacatagatatcatctagaaatgatcataccaagcaaagtaagtcagaaagagaaagacagaccccatatggtatcacctatgtgtggaatctgaaatatgatacaaatgaacctatgtacaaaacagcaacagactcacagacacaggcaacagacctgtggttgccaaggcgggggtagaaaaggagtgggagacttgggattagcagagacaaacatgtata

SEQ ID NO: 37334 - DNA, 1639 bp, Bovine  19866880739063
  misc_feature (1)..(1): n is a, c, g, or t
nggtcccaacagagccccacacctgatcttccccctgatagaccctgttgttcctggcccggactcctttaaggtcacccacacagctctctgctgctccacctcaatggcctctgcatcctcatcccagctctctattctcactttagctttggctcatagcacgtgttcctggattgttctacgtccttgaaatgatccctggaaatcagaacccacatctagattaggtaagaggtttttggtttcaggaaacaaaaagccccagctctaacttggtctcttagaggatgggaatatattaatgtctgaaaaatacagaagaaaactggacttcaggcatggtttgatcaagcctccagccacgttttctgtgattctcttatcactaatctcttttgttcccttccacataactatttttcttgggggctgtagcagtttcaggcttcatatacacatttcacactgactaggaagaagaagaatatctccccacccttcatcctcatggcatcatcaaacaaaaatctgattggactcaggtcacctgaccatccctgaacccatcactgtggcacaggaactagaattacccagttggtttagattactcagaaaccaaccacgctttcctccgtctccccagagataagactatgatccgttccactccacgtacatagccattggtccctggttatcatagaaagcagataaatgcctacagaacaaagcctatgcagtaccctagggctagtgtgacacagacaaacgtgtttagatccattacaggtccttgtgtggacactgatttcatttctttggggtaaataaggcaggagtgggattgctgggtcatatggtgagtatgtttataagaaaccaccaacagactttcaaagtggctgaaacccttttgtattcccaccagcaagctgtgtattccagccgctctgcatcttctccagcacttggtactttcagattgttgttttgttttgcttttagccattctagtgagcacgcgtggcacctcactatagttttaacttgcgtttccctgataagtcatgatgtcgagcatcttttcatgtgcttcttccctgccaaacatatcttgtttggcaagagtctgttcaaatctttgtccatttaaaaaagaattattggagtatagttgatttacaatgttatattagtttcaggtatacagcaaagtgaatcagttatacacatacatatatccactcttttttttagattctttttcccatcttggccagtacagaatattgagtagagctctctgtgctatacggcagtttattattagtaatctattttatatatagtgtgtgtgtatatatatatatatatatgtatgttccaatctcccatttatccctcccccaccccttatcccttggtttgttttctgtatccatggctctacttcagttttataaataagttcatatgtatcccctttttttaagattttccattttaagtggggttttcaccctcttactctaaagttcagcggtctgtgtaccatgatgcttgaccatccttctgagacattctgtcccgtttattttatcttcagataagtaaagactagggccgttagaaa

SEQ ID NO: 37335 - DNA, 1116 bp, Bovine  19866880739248
  misc_feature (1)..(1): n is a, c, g, or t
ncggactgcagctgtgctaaggcccagggcttcactcggaacagagacagaaccactggtccaactctgagctgcggtgatttggagggatcaaaagaggcacagctcgctctggttcatccctgagcacacaggccctctcacctctcccctctccccaggatgtggattttatgtttcagtgacaggcctcattccctcggcaagttgagagcaaaagccaactcaaggggctgtcttgggttgggtccctgagatagtgatttattgatggacagttctcatgcagaggggagagaaacaggcttagcaagatgagtgagccaagctgtgttctcagctgcaggccagcctcagcctgatcctgcagggaccagagagcatgcatggccctgaaaagttgtcccaccttgaggcaggggttgaccacacgctgctctggaagtaagcacttaatcttccaggcatttcgggtgaagtgttgtgcatcagtcacttctcaggagaagggctattctcaaggagaaggatgcactcaatggacaacattcatggcagcaggaggtgggtacccatcccacagaaggggatctaagttgccagcaacagtgtctactacaaagatgttccctgttgtccttcttgacttcacctgggactggttataacaaaactccaagttcttgtcaccttgaaaagaaagcaccgggcatctgtctgtgagaggtttcctttcctttcataccttaacaggttatagatgtgttttgaaaagggaggaggcagtaggtggatacataagagaatgtagctggtcaaatattacagccttggacccaggaccgccagcccctgatgtaagcactcagctagctattcatccgggcttgttaaacatgagggcataaaaagagctgatttcattcattttatagcaccgcatagtttcccccaggagaggcaaggctggccaagatgtgtgtggtccataccttttgtgtgaaagatgttttcaagacttttcccccttgtatatgcctagtcctgcccctgaccaacacctacttattgatactatagagcgtgagcgtatttggggctgtttctagcacttgc

SEQ ID NO: 37336 - DNA, 2619 bp, Bovine  19866880773354
  misc_feature (1)..(1): n is a, c, g, or t
ngcaggtttgggaccctgtaagaaggttcttccctctaactcatcccaacctctcccagataaatcccaggacagggaaaacagctgcatcagcagttgtgcactgctggacagccgtcagaagcatgttctcagtcagcagtttaaggcacaatgtgcatggctgagacctggcagaaagacgcccggggctcatttcagaaaggaaccctgcccagttcctaggtcagcaatcatggtgcatgaaacatggaaacaaccagtcccagaatttcctctctgagacatttagcctggaactatggtttctcaagatttcacagcaaatgtgtaaaaaaacaaaaacaaaacaggctttggatcaaatgtctttgcttaagactaagactaaaactaatcaagactagtatgacagagtatttaacataaaagcatttgatgcttcgtaagcaccaatccacattatggtaatatcctgtccatgtctgtcatgtatttataaaaagcaccaatataggaataaaacacttttagatgtaaacactcaagacaaagctaagttcctagtattttcccaccacctgggaagagatttttaaaaaataaatttggaactgtgaattaccagctatttttcttctgattcctataaaacaattctattgaggttcaggtggaaacttggcttgtttgctcctctcgggctacttttagatccttgtaatgatttttggtttgtttggctgcacctcacggcatgcgggatcttagttccccaaccagggatggaacccccagccccagcagtagaagcatgggagtcttaaccactggattgccggggaagtcccctgataatgatttcttgagagtcatgcagaatatggcttattatgtattactttctttccttcttaaggaaccaccttggggaagtcttaattttcacaactgaaatctactaaaatcagacaggagggtgacttgagccctgctggacatcactgtcaactctggaatgctctccctgttatgtccagctgcaagaattcctaacacaccatcgcacgtatcctaagaatgacaggcctagcagagaaccttcaagattcagaggggacccaagatttgtcacttcatacctgcaatctgccagacactgaccagattcccagaggcgtcaaccaagaaacagtaaacattcgatgacaccatcttttcaccttccctgtgtcctcctcactccagggagaaagcaaagaggaaactgctcaaggaaagatacagaacagagaagtttattttacactatccgtccaagaaaacaatctccataaaaccagtgcaaaatgtgtaacagaatccgtaagtatgtctcagctcagaaagcccaaagtggtgattccctctcccgctccgctggccagcaggtacccctcggccaaggccggcctcggtgggcaccggcgacagaaacattcaacccatttgtagcaggttatttttacaattcataccagagtgtgtacaggggaaggggaaaaccataccgaatgaataggtgatcagtgcttaaagtaaatacatggggcagcacggggcgagaatccacagtttcaataaatacaagtgaacaagcatgggtgggtctcaactcggtggagttgtctgcggagtaattcagcatcggacagaacctggcggagctgctgagcagcgattgacagcaacatccacagtaacacgcccttgagtgagtctgcatccaacacattctgcgtttccaaggttgtcagttctgttcctccttcctgtgtcccctccccaccccccggggaagggagcggggcgctggggcagctgggcgtggcgactgggaggagacgctggccctcgagccagcagtcagggtccagtgtactcagtacgaggggcggtgtctgtgcaaagtgcgcttctccacttcccgagaaaccagtgtctgcaactcctgcctccgggtcacactccctgccccgccaaacaccaaaccaagagcagtctcagagtctcaggcgggaggcactgccgtgccggctgcctggtgctcaggatggagaggttaacccgggcaggcaggcttcaactattgcttgagaggctagaaagaactggggagagagtgatggtcagaacggacaggcggtcagctgtcctcttcctagaaaacccagggcctcagggcagagccccgggtgtgacgagaaggcgcttgtccaggggcctctccagccgctcctcagatgggcgctaaatccacacaagctccgacgcacctgggcctcgaccccagaggacgcagctgggatgcccagtgggtcagtgaggatccagagcccggggagagaagatgcgaggcaaaaagccaacatctctggaagggaaagaagaaaagaggggagcccccaacccaaacccccagactcaggaacctagaaaccagccccaaacataaggagaatcccaaacgctccctgtcacgcgtggaccctctcctctctcttctccacagtctcggctcatacattaggccggtcttccatccaataacttaaaaaaggaggagggatatatactaag

SEQ ID NO: 37337 - DNA, 1691 bp, Bovine  19866880779105
  misc_feature (1)..(1): n is a, c, g, or t
nctggatggctgtgggtagcagtccagcctggggctgtgtgtctgagtaaaaccaacaggcttgtgtggggcttaaactctcaccttcattttattgcttaagatctagtgcagttaatgaacccagaccaaagctttgtattatagtacttccaacttcacacttcaatgacaatccactaaaatcactcccagatgaataccatggacttttaactaggaggttcaaaacctctcttgccagacaattagcttagctgggcatagaacgtccctcccctgggctgacattcagggtattccaaggaatcctttgtacccagacaacagcatgaatgactgctggtcttgggtgtccttcgtgcattctattcacattgtgtgcccttagaaagcaacagggctccagatagagatgctctcagacgttctactaaacatctttctgttgctggagggacaatgcctctgatgagaaggggaccgacttctgctgcagtctgtagatgatgacaccaacatgaggaactggggctttaaggcagaagctaaaatttaatcatgcttacactcacctcccccagggctaagaaaaagcaagctgcagagctgcaactaaaaacccaagagatcgtctaaaggcataagggtaaagcacactgaagtatgtgcatgcatgctaagttgcttcagtcgtgtccgactctgtgtgaccctatagattgtagcctgccaggctcctttgtccaggggattctccaggcaagaatactggagtgggttgccacatcctcctccaggagatccccccgacccagggattgagtctatctcttacgtctaacctgcattggcaggtgggttctttatcactagcaccacctgggaagcccacattgaagtacaagagagatgatttcctggagatgataaagaaactggacaacagtggcatctttgagttacttcagttctttcctggaatgaataaacaggaatggaagaaatctgcctggctggttactcctgtgaaagtgttagttgctcattcgtgtctgactctttgtaaccccatggactgtggcctgccaggctcctctgttcatggaactctccaggcaagagtactgaagtggggttgtgatttccttctccggggggatcttcccaaccccagggattgaacccacatctcctacattgcagacagattttttactagttgagccataaggggagccgtggttactcctgctctccctgtcagtgtaaggaagttggtggaggcagcgatgaaccatggttatgaagcaggaaccaatcgatttattgttgcttagttgctaagttgtgtctgactctttgtgaccccacagactgcagcatgccaggcttccctgtacttcactatctcctggagtttgctcaaactcatgtccattgagttggtgatgccatccaaccatctcatcctctgtcgccctcttctcttcttgccctcagtcattcccagcatcagggtctttcccaatgagttggctcttcgcatcaggtggccaaagtactggagcttcaacatcagtccttaaatgaatattcagggttgatctcttttaggattgactgatttgatctccttgcaatcgaagggactctcaagagtcttttccagcaccacaatgcaaaatcat

SEQ ID NO: 37338 - DNA, 1535 bp, Bovine  19866880982625
  misc_feature (1)..(1): n is a, c, g, or t
ntgctccactgttcagggaaaccaggaaaggagcaagcttccaccgtgtaagtctggaggaatctgacagcctctctaactaccgttccttttctgtttgttggttcagtctgtttgtgtactggggtggttttaggatgagattgttggtgtaactccagggtaggtgagggatcaggtgagaaccacaagtggaaagaaagtctccttatcaattgtattagatttctgtccatgttgagttggggtgtcagaggctatggtttgggaaggaaactactgctccaataggaaagacctgacacccaaacttcttcccgacccatgagagctttatttaagaattcgaataatgtggatttcattctctgcaaaggacctgctgtggcccttggcagcctgtctttgtcacctgctctcatagccttttgaagaagcagagatggaatctgcatcctttggaagaaatgtgatgcatctgccaattccacacagaatccaggctggccgtttccttgagaaccacttgaggtagacgtgttcacgttcagttttcaggaagctaagtaagctagtaaacttgaggaatccagacttctcagtggttataggcagtatcccctgcctgtcctggctcatcagaaagggtttgtatacggaaaacttctgaacagaacaaagagacttaggtctggatgaggaatgaagtcttggctctcaacgtgccattccttcactgctgtgcaatgtcaaatttcttgccgagaaagcatctggaaggaaaagaattacaggcattaggcttggattcaagtgtactttttaatttgtgtgcttcttggttgaaacagttaatcatttgcccctcaaggttccactgtggttgtggttctgctccgtgctctgaagacagcactgtgttttccttttgggagcactccagcccctggactttgctaattaagtgatgaacttcaaagggcctggaactggggctccgtgcagcagctgagcttgtgaacgtgaatctcagagtcaacagaattgccatggaaaactcaccagtcttctcaggaggcttttggaaggttgaccttcatcccattgggattccgagtggaaagaatcggagggaagacagctctgaacctttaaagggacggagccacagagacataactgaaataggtgacagctccagaaggaagggcgggtccatgttgtgttctcattttctgagatggaaaccaccggtcattgcagccccctgcggatgtgaaggagtggcaggtcttagggcggaaacgtgcctgtctccagaggtcatcgcttcctaacgcgagcaattctctactactcttccgtttgttgacatgtttgtgggctgctgctgcctctgtccccccaagttcatgatgaaagagcctcagcaaactggcagcagctcatgtgtctttggggccttcccaccccacccctgccgctgaaccctctaagatcccccggacacgttttcatttaattttcctttacag

SEQ ID NO: 37339 - DNA, 1192 bp, Bovine  19866881019832
  misc_feature (1)..(1): n is a, c, g, or t
nattattaatggtagaccttttagagcagttttaggttccagcataactgcacagaaggtacagagtcccttcatccccctgccccccgacacacacagcaccccatcgatatcttgttctgttttcccagtgggaacctgacttctagtgggtaacatagcaaagagctagaagagagtttcttgtaagtaaagtggcaggctgccctcagatgccaggaggtgctctgagctggaaagaagcccgtggcctggcaggcccctaggtgtccagaggagccttgtcacagagcatctgtgggtgggtgtcctacctcacgctgccttgggcatgaaactaacttggttttcagtaggcttcacctttgagagcacagagagcctggcaaatctgctcatttctcatcctaatccaagtgttggcactgctgtgcattagacgaagcttcttactcgaggaagatcaatacataatattggaacatggtcttggagagagagtttatggacttgtaagaggcgttgaggcttttagcctgttgtatataaaacagatcaagaaaaacaaagcagaatacgggggatgggagggccttttgcttagactgacattaacccagaggtcctaagtacatggagggctgaggcaaggtgatctggagggaacgtgttccgggcagtgggaacagcaagtgcaaaggcccgggagcagcatccatggcacacttggggatctaagaggtggacaaggtgagcatgtgataggtgacaggcattgcaaagacttggtgtacagtataagctgctgaattaatgaagacaggatgttcttgaagcagagggtggcctgaccctcaccccaggggctctgccctgactctgactttaaccccttctctcctctcttccaggccatgtacatgttctacgcgctggccattgtgtgtgatgacttcttcgtcccctccttggaaaagatctgtgaggtacatgtttgagcactggaactgttccagcctcctccactgaggtcctgaggagccctgcatgctgctgggtgggaaggccaggcaccagcatgcttcagagctgtgggcaatggtagcccagaaactcactggtctgcttagagtttcattgtgctcatccatgctgtgttgggtagtggttagtcgctcagtagtgtccaact

SEQ ID NO: 37340 - DNA, 1106 bp, Bovine  19866881188895
  misc_feature (1)..(1): n is a, c, g, or t
ntccatttactagttgatatatatctgggtttttccagtttggggccattatgaataaaactgctatgaacattcacatgcatgtcattttgtgaccatatattttcatttctttgggagaaacaccaagagtacaatggctgggcaatatggcaagtgtatgtttaacttataagatactccacactgttctccaatgtggctgtacattttacatttctgtcaaccacagattagagttccagttgttccacatctttgctaacacttggcattgtcaggttttaaatgtgagccatcctagtgagtgtacagtgttatctcattgaagtttgaattttcaattccctgatgactaatggtgttgcatatcctttcgtgagcttatcagctgatatatgcattagttgggttaatgtgataaaggaccttgctcaggggagacacttgctcgtttcttgtttcctctttaagcaatttttaaagcacatattcttcttggagaaggaccacgtctcaataatccttgtgtctctagcacagtatatgacacatgataggtactaaataaattaactcgaaaaaaaaataaacaaatgaattccagttaattctgggatataataaaatgacgttcttaaggccaagtagagtgttcatctataggtttttctacactgaatggcccaagatgtaatttttttgattgctgttattatactatctctcctttcatatcagaccttcagcctccccctgcctctaaataacccaccttcaaaactagtgatctgaatctatcatgggcttgtttgggatgcaaacaggtttgttttgacttctaaatgtgcaaccatataaataaaagcaaataggtctgaaggagagccttcaacactttaaaagattaccttggggaaaagtcctcaggagattcataggtaatgattttccccaccaaaggctgaaaacatgttgaaactgaggtctctggtacagcagaattcagcagtgaggtccagagcagggaactgggcttggggagagaaacccagaaagacgaatctagttcaaaccccagctcctccagtcctgatttcccagac

SEQ ID NO: 37341 - DNA, 1251 bp, Bovine  19866881205934
  misc_feature (1)..(1): n is a, c, g, or t
ntacagtttcgctctctggttggggaactaagatcccacatgcctcatggccaaaaaacataaaatagaaacaatattgtaacaaattcaataaggactttaaagatggcccacatcaaaaaaattctttaaaaaggttcaccttcacaagtacctggcaccttgacgacggagcctttccagggttctttctggctggcccctcctgttcccatcctgcagggacggagttgccaacttaatctgctatgtcaattattgctcattcttccacccaacagatggcagaaccgtgctgaccagtctctgcttccactctcttagaatttgtggatccatgcctttctttttttattgaggtatatttgacatataaccttatattatcctcaatcaatgccttttaaaatttatgttattatcgacatctaaggattttgtgaagaaatggagtaaaatacatatgcagtgtgccatatttagccaaatgtcatctccgctgtaagaggggtggggagaaactagattagtcaagactattatcttttggggtcacaaattaaatttgatcttagttttttgataggaaaggctgaaaggacagtgttattatataatttatgggttagttgtccacagatggaagatgtgctctaagatacataaaaggggtgactattattttctttcttttttatttttggccataccatgtgccttgcaggattttagtttcctgatcagggatcaaacctgggccatgccagtgatagcacataatcctaatcattgtacccagggaattcccagctattttcaattgtaaaaggaacagacatcttttctggaaaacctaggggaggcactttaaaagaatataatagttccctgtcatgtcactacctcaagaaaactgatgtgagcatttggtatttacttccagtctctttccattttaaaaaatgtaggtgaaatcatatgtggacataatttcctattttttttccagtcacgttctatcttaagagttttcccatactgggaaaaacttttcaccagcatcgtgtttaaggctgtatttttcatggaacagataagccatattttttgagccattctcataatttggtgcatttcaactctttcataattagtgttctaataaaccacgtgtctgttatgaatgtctttgcacaccaaggagggctcacatatctgaggccctcttcaagatacattggggtcaaaggg

SEQ ID NO: 37342 - DNA, 2160 bp, Bovine  19866881233419
  misc_feature (1)..(1): n is a, c, g, or t
nctttccgatgtctggaaagaaactaaaaatagattacctttccctgccaaaaaacagcctacaacctgacataaactatattccttaagctggagaattcaagggtccctgtggctgttattcagcactctgaaagagtacccttcactgaagcacgtgggggctgcgtgagctacaagtgaaagccgggttgaaggtttacgtgtcattaccacgtggacagaactgcatgtctcctgggaggtgggcttctgtgggggcctggcccaaggggcatggcagggatgcttcgggtcaccgctgtgctggtaaccctgtttgccaatcgggtcttacagtcgaagatatgtcaccatctttttgcaatgagaatgcgggcggtgactgggatgtcaggagacaggagattcagttctaggagcccagccttgccgtgggcacacctttggatgcaaaagaatggcgtcagacaaagtacagagcccagctctgggactggggtccagctctgtgcagggccaagcgatggaagcttctgttccctggagttgggaccatgtgtcaggggagatggtgctggctcgctgtgagtggcattgctgactgtttcaaagaatgcatttctcagagtgacaggtgtaaaagaataaggcgcgtgaaatgccatcgcgagacaggaatgactcagctcacaggcagaacagaagatgtccagctaagaagagctgaagccagcacctgttggtgttggcaagaaagtgggggcgcagggcaaggaggagaggagagactccagggggcaacagtggtgggggggtggcaacaaacaagagctccccatcctgcagctccagtgcaggctgggaagcagccttctggactggcctccttcctgttcacgatggtgtcacagggcagggcactcacggctccccgggatggtgtcagggctcccttggtgcccagtgctgagtgtccacatggggatctgagtgtgtgggggccggtgtggccaagggaagcacagtatcagggtcacaggtgggagttaacttgactcttattgtgaagtgtgcctggtgccctctgatgtcacagggattctcaggctgtgtcctcggaacccctggctggagacgccatcggaatgaaattgactgggaggctggtgatgggttgacatgttctggttgtggaaacagttgggggatggggctggcttgcttcctcacttgggaagcagacctagtttaaccctctgccccttccattgcatgagtgcagaataggaactcacaaactcttccacccctaagacaccaggtccagttccccttagtaagtccctgctttgtgttcccagaattccgtgtcctactgccctccctgtccttttatctctctgccatccatgttcctccctccccctctcccttccccgctccctctctttgataaccaggaggccagagcacggtccaggggacagccaggatccccggcccattggacagtggctgtgctatctttgtgggtgtggcgagcttgatatggctcacttttcataggacagctgccactttaaagacgtgtaaaggacttccctggtggcatagtgggtaagattccacctgctgatgcgggggacccaggtttgatccttggtcagggaagatcccacatgccatggagcaacctgtgagctgctactactgagcccacccgcctagagcctgtgttctgcaacagaagaagcccccacaatgagtagcccgagcgtggcagcaaagagtagcccctgctcgctgcaactagagaaagcccgtgaggcaatgaagactcagtgcagtcataagtaaataaataacattaaaaagacatctaagatttaaaaaaaaatttttcttttaaatggcattcttccctgcccccttgaagacctgtttttggtgaaaatttgtaattttttcctccagatctgtatgaaaaagactgaggtccaggctctaatttttctgtcatcgttccagccctctgagaatttttaaggttgttttcttagcctgacattgccaatctcatctcgagcccggaaacattgtcttttggcaaataacacttgaaactgtttactcagataattattatgagaaatttaa

SEQ ID NO: 37343 - DNA, 1574 bp, Bovine  19866881298147
  misc_feature (1)..(1): n is a, c, g, or t
ntttgttgctgttgttgagttgtatgagctgttcgcatattttgaaaattaagccgctgtcggtcacattgtttgcaaacattttctcccattctgtaggttgtcttttctttttgtttattgtgtcctttgctatgcagaagcttataagtttgattaggtcccacttgtttattattgtttttatttctatcgctcaggagagtgcccaggttctgactgaacatctccatggcgtctgcttcccatgcccccctctcctgtgctgccttcaccatgtgtgcagcccctcccttccttatacaggacactggttcgcactcacccatctcctgagcctgctccccctccacgtgacttgcacccactgatagaacaatgagggcacccaaaacagatacccaggagagggctttgggggatggagagtgttctcaggctgccttaaaaaaaaaaaaaaaaaaagactaaaaacagaccgaaagacttcatttattgcaagcatttgggcaaaagatcaccaacatcacagacagagccattttctattttacaaactgctatctccacattttagtgaatattccttgcagaaatctggccagcttggtgacgtgaccatttcatagttcaaaaggtggagatgctgggggttaggagatatactcaaagccagggacttagagacagatctgatgtaattgaatacagtatttatgggacccaaggtttggggagaggctgggcaactggcccttctcatttcccgaacatttaaggagccagttgttgtcaggccagtgaggggagacaggtttgcgttgtgtgtctccaacctgtaacaccctgaccctcgatggatgtaaggttcattgaaggcgtcttttgcacttgttgtttatttcctgttttgtgataggctttccaggccagtaattcaaagctatgaagtagttcggtggagtcttgatttcaacacgagatttgcagaatctgctatgatttcattggaggctagacggataactgggcatggcgtatagctagtatgttagcagctggttgacaagattgcttcaaaactgtgattaatgaccttgggtgggagaagggttctctctcatggccctcttaacctcagaagttcatcatttttatagatgatagtgaacgagaaatgtcagttcataaagaatttcactgaagacatcaaaggcctgattatcacatttgcaagagacccaaggattgtagtcataaccacagagcattagggagaaccaaggtttgagactgtctccccatcctggagatggaggagatgaaatttaacccagaaacgtgcaaagtcccacaccaactctgttcctaaaaccagctatgtgagtgctgggtggggaacgggggctaaggagtagttgctgtagagggctgtgtcgcctggttttgttcatgttgctgtgatcagatgtggctgaggatgtgtgtcattgggaacaaagggtgcatggtagcatcatatgcagacttcctgctcttcttccttccctccccaccctgctgtgtctctcatt

SEQ ID NO: 37344 - DNA, 1170 bp, Bovine  19866881390432
  misc_feature (1)..(1): n is a, c, g, or t
nttggttgattgacatcagctttgctctcctgatgggaggataagataagttcccatttgacccagctccctcttgattccagggccacatatcctgtttcccttttgacaagctctctacccttcacactgcaaaagtggtacgtggagggacaagcaactgctttaacaaaagcatgtataccatttggcatcctcctcaaaagcccaggatcggtaacttcatggacacagtgaagtgtactcactcctgagtgccccgtccagtaagatatagaccctgtgacatcatttgttatcccaacacatgctccttattggtgggttttcacatcataccacttccgcctcagtctctttcaaccaacgagagaatagtcccaaagtgggttacagcactgaaatacctcctccaacttccttaatttcaggatggaattctgtagatctaggctttacattcccacctcctcattcagcactctctcccccagaagctgtgggaaaggaggacaggactagatttttttgaagaagaagagaaacccagctggtgttctcaactggtattctcttagtcccaactttctggtagtgaaatctacactttgcagaacttgttgcatttttgtggatactgttttgattttcttaaagcaaaagaatttttacttctgatttgatattaatcttaaggaaatccttctgttttcaagtcttgtttcaagaaaaacaaaattttccaactcccaaaatgttagtaatcctcaactttctacttcattcaaattgcacacaaacactcaacaaagatacagataagccaactgtatttataaaagtcagtaataaaaaacaagatacggttttgccttctttagtggctgtcaaaatgtgtattttttctgaagagtattaccattatttgaagaaaaagtagccttaaaattcaattcccacatatttcaaagagaacatcaatttacttacatgagtgttttattttctttatagagaaatgatactgaaatgtggttaaacaccagagagcatagtgtgcgtaagaaagaagtctgaagtcattccttgggttttaaacaattaaaactgccttgcttcatgtcatttttttttaagaacattcaaacctggggattccccagtggtaca

SEQ ID NO: 37345 - DNA, 1530 bp, Bovine  19866881600076
  misc_feature (1)..(1): n is a, c, g, or t
nctgggtatgttcgcaaattgccatgtagcagacattcattacatcgaattcatcaaaaccctaattgagacaggaactcaagccttatggccgaatcactttaatttcagatggggagcagactcggtcactaatagcctttcacgccaggacaccgttagagaagcccacgggcgctcactggtaattctccccgcaaatacaagtgcggagcaacgtaaatgacactgccaagtgagccccatgactggactgatgaatcagctcaattcccaaagtctgtcctgtgctgccacatgcctctgtcccagctccactgcctaggagggcttctcggaagataaggcagcatctgtgtctcaccgaagttggttttcctcccagcgatcagaaggcacagggaccaggaccagtcctctgaggtctttctactaacacctcctcaacttttttttttttggctgtgtcaggtcttagctgtagcacatgggatcagcagtatgtcgtgcaggatcctttggtgtggtgcacggactctcgagttgtgacacactggcatagttgctctacagcgtgtgggatcttagcttcccaactagggattgaaccctcatcccctgcatcggaaggcggattcttaaccactgggctggcagggaattcccaacacctcatcttgcttctcattttctccccagccttcccattcctccccactggcatcccatggttgttcaactattttttttttaactttttttaattggaggataattgctttacaaagttgtggtggtttctgccatacatcagcatgaatcagccataagtatatatatatatccgtccctcttgagcctgtctcccactcccacctcatcccatccctctaggttgtcaaagactactgccttgagttccctgtgtcatacagcaacttcccattagctatctattttacatatggtcatgtgtttatttaggctcagctggtaaagaatccacctgcaactcaggagaccccagtttgattcctgggttgggaagatctcctggagaagggcatggcaacccactccagtatttttgcctggagaacccccacgaatagaggagcctggtgagctacagtccatggggtagcgaagagttggacatgactgagtgattaagcacacagcacatgtttcagtgctactctctcaattcgccccaccctctccttcctctgttggatccataagtctgttctctatgttgagtctctattgctaccctgcaagtgggttcatcagcaccattttcctagattccatatgtaagcgttaatatacgatatttgtttttctctttctgacttacttcactctgtataacaggctctaggttcatccacctcactagaactgactcagattcattcctttttatggctgagtaatagtccatcatacatatgtaccgcatctttctccattcacctgtcaatggacatctaggttgcttccatgtcctggctattataaata

SEQ ID NO: 37346 - DNA, 2784 bp, Bovine  19866881604233
  misc_feature (1)..(1): n is a, c, g, or t
nctggcctcgtcccctcgcaagttagtccctgcatcggcatccttgtcacagagtcggcctcctgagagcctgaactgagacccagattcttgggcaccaaatcccagctcctcccatctaggcagcagtgttttcccctttaccttctgaggggaaagtctccccaggctccttagagagaagccaggctgtcttccaagactaagcagtcttcataataccaggggtggagaacatgcagttaaggttggggtattttcttcttttatcctgaagagaaaggaaactgaccacactccctggcacacaccccccccatccacctccccggttggctctgcttcttgtccagaaagggaagtgagggtcaggcagagacccaggagaaaaccccactgtctgagcttctggcctttggaagacagattgggcccagagaggtgacagagtccccaagtcaccgcatttactgtgcgcgggacctcatgttctgtgagggggaagaagggcggcaggcatcgtaaatcacggggagtgtgccgtggccacctctgggtcggggcttggagatgcagccatctgtcaagcagaaggccaggcccgtggacccccctcagctgagccttggcgaagagggggggcccctgaagtgagagggttctgctcttccttcagacacccttgagaatcagagaagttggaaaaaacacttcaaaatctcctgaaaaatgtttttctgaatttggcaaagatgaactaggattggccatgtgagtggggagggccttttgcttttattttttaccttttttttatatatatataagagtataattgctttacaacgttgcgttagttgcagctgtgaaatgaagtgaatcagctatatgtatacctatatgtatacatatatcctcttcgtcttcaacctcccttctacaccccctccatcccactcttctgggtcatcactcctgggcatataccctgataaaaccataattctaaagatagatatacccttgtgttcatagcagcactaatcacaatagccaagacgtggaagcagcctaaatgcccatcaacagatgaatggataaagaagacatggtccatatgtgcagtactcaggctgtttatggctgaggaatattactcagacatagaaaggaatgaaattgggtcgtttgtagagatgtggatgaacctagagcctatcatgcagagtgaagtaagtcagaaagagaaaaacaaatattgtatattaatgcatatatgcggagggcctttttgttaataaataaaacaaagtctccaaaattcttatggctgttagaagcttctcgtgtgtgtcttgaaacagactgaaataaagagatgttgaggacagcccagctttcttatttaaagctgattattaaaatggaggggcttcccaggcggcattagtggtaaagaacctgcctgacaaggcagaagacctaagagatgcaggttcaatcccagggttgggaagatcccctggtggagctcatggcaacccactgcagtgttcttgcctggagaatcccatggacgaggagcctggcaggctgcagtccatagagttgcaaagggtcagacacaactgaagtgacttagcgagcatgcattagaataaaaacattctaacccagtacaagaggtaggatgtgtatgggtatgtgtgagcccaaagacagacgctggaagaaaatacatgaaggtgagggcaagtgggcagataaggtgctctcgtggaatccattgtgcaccccaatttatatttcccgtaatgctattttgtttgtagttttatttgttgctcatgaactgccagggtaggaacaacgttttggttgctaagcgcgtgtccaacaagaaaccaaaaagaaacatggaggcctccctgtgtttgagatcactgcttgctggttttctggtgaccagtagtcatagaagggctgggagggagaataaactggcaccattgtacaggaggggccagcatcaccccaagcttgcttgtgaccctgttctgtgtgtgcgtcctcacgtggataactgtgagcagcctgtcgtcctagccttactgggagcctgttcccaattcattatttcactctcctacaggagtaagccaagggaaagaatatgcccagaagcagattgttccaggttttctgaaaggtcacggccagttttttactggttgctcccatctcagcagaaatgctccagtgtccctccctgtccctcgaaccagggcttcttgctgactccgtttctttgagataaaacttccctccgggtccagtaatattgacggccgacttggccacaagacagagggccctgtgttcttaattatttctggatgagaagtcccgcaggcaagtggagattcagggccaagctggctaggtggggcaggccccagtgtgcagtggattgtacaagtggagagataattaaattaaaagcaccaggtgcaggcattgaaagataaccatgggtgttaattatgcagcccagcttcacagtccagcgttaggggaagaagtgccaggggcctgtctgtcacgtggtagctcgaaggacttgggggagagacattcatggtttctagagaatttgccaagggctgcctacttgggattctggtggaggtgggattatgtatgagttggaagtgtgtgcctttttttttttttttttcctatttcacactgagccaaggaggtcctttggtatataggatgggg

SEQ ID NO: 37347 - DNA, 1119 bp, Bovine  19866881726997
  misc_feature (1)..(1): n is a, c, g, or t
ntcgctcagtcatgtctgactctttgcgaccccatggacagtccatggaattctccaggccagaatattggagtgagtagccttttccttctccaggggatcttcccaacgaagggatcaaagccaggtctcccgcagtgcagggagattctttaccagccgagccacaagcgaagccctatacccctgtgtggagggcatcaaacactcgattgtttaattcagtgaatattggttgagtccatactgtgccccagccaccgtgccaggcactggagcttcagcaatgaacatctgcctgaggaggctgagtgagtccctgcaaactaagggaaaccctaggggggtacacccagggatgtctgtgctgatctgtctcaaccaggagcgggcaggagaggaagtccttttgcagagcctggaccaccctgagacattgcctagagtctcagagaccaggctctgcagaccacctaagactaagagggaggcagtgatgggaatagcactccttgtgattatttcttagccataagcttgggcatgggttttattctttccttcttgccaaggcattctgaaaattggaaaatcacttggtcatgctaattgtgacagcgtgagacctccatcaaattactgcagagcttgcgctctgggaaaccctgcctttaaaatggaaaaatgccttcttagattagtaaagtgatgaacatcatttgttaggataaaaaagccccagggggctcctaagaaaacagctctttactgtgggtgcttttctgctgcttctccatccccactcccattcaccttggtcaagagtaattatgatatgattgaattttccctgggtcgtggggatgatgggggaaatctgctcaatgtacaagccagagcttcaggtcgtaccagcttctctgtccttgggcagttgtagtggacgagctcatcatactctgggttttgagaaacagtcacattccttaatctcatgctcaattttctcaaccttttacatttattaacttctaagcatggttgtgtattgaataggaaactctcgaatctctgttttcccttgtttgttgctgtaagttattcccattagtggtggtg

SEQ ID NO: 37348 - DNA, 1121 bp, Bovine  19866881787470
  misc_feature (1)..(1): n is a, c, g, or t
ncgctcacccagctgactccttccagatgggacacagggcggctggagtgacggcccagagtgtctgtcctcagaggcagcctgctttggagccttggtcccgtgatgggtgacccgtggctgtcgggacccatgcgactgcctgggctcaccaggcggcccggggaagccagggcagggcagagcaccggaaagctccgctttttatagcacctctctaagtacccaggcatgagcatttcaggggtgaaaagcagggctgactttttccctggtgttcttctatcccatcgaggaaattgtctaattaaatacacattttctcaaatggaatcgaatcaagcactttcattttgagttaaaaaaggtaggccataaataacttttatttcagtctgagtgtgtatcgtgaaaaacaatgctgcttgaaaaagccccagtttaatgccttcatctgaaagttcaagtgcaaggtggtaaactgacgtgcccccaggtcacccagcaaatgaagcctcagaggccagtcctcccgtgcagcatttctccaccatgaccaaagactcagctcgtaaaatgtgaggctccaggaagatctgggatcctgccactagggtttccctttacatcccaagccacatgtcggtaagtactgcattattcattttctcttgagttcagacgtttttctggatgccctttgcagtgtttctttttatagcatcagagagcttgcagaggagccatatctggcacatgcctccccttatattaatcccaagagaaagctcgggatctaatatttaagcttccaagacattaacggggggctctgcccagatttgcagtttcatctcttgtctctgcagacacagtgtctctcctcccaccctgagtgaatactgggaagtgctttatgcccaggtcaaaggccccctgatggctgaggtcactacccacagccccctcttcctcgctcctgctagcctgccttgcccgaagactggggtttgggattcatgggggtgataggatttctgagccactgtgaactgcagactggcagtttgtgagagaaatgtcactgaaatgccggccattctcaagacaaagtggcagga

SEQ ID NO: 37349 - DNA, 1563 bp, Bovine  19866880291025
  misc_feature (1)..(1): n is a, c, g, or t
nttggtggtgccatccagccatctcatcctttgtcgtccctttctcctcctgcccccaatccctcccagcatcagggtcttttccagtgagtcaactcttcgcatcaggtggccaaaatattggagtttcagcttcagcatcagtctttccaatgaacactcaggactgatctcctttaggatggactggttggatctccttgcagtccaagggactctcaagagtcttctccaacaccacagttcaaaagcgtcgattcttcggcactcagctttcttcacagtccaactctcacacccatacatgaccactggaagaaccatagccttgactagacggacctttgttggcaaagtaatgtttctgcttttgaatatgctatctaggttggtcataacttcccttccaaggagtaagcgtcttttaatttcatggctgcaatcaccatctgcagtgattttggagccccccaaaataaagtctgacactgttttcccatctatttgccatgaagtgatgggaccagatgccatgatcttagttttctgacctttatacttgaaggtaaatttttctggatataaaatccttggcttgcagcatttccttgagtatttaaatatcttattttggcataaagtgttgctataaaaaaccagatgatggtgtaattttcttttccttatagatatgttatttttgcctagatgttcataagatttttgtgttttttttcttaaaatgtagtaaatttcgctagaatatttttggttattctgagttggtgtttctgagtatgtgatgtgctgtttcagtgtagcttcaggtcttcttctttttttttccctaccctccaggaaagttttcttgacttagaagtcttcaaagtttgttcttttgctttggttttttccttcagggactcctgttatccaagtgctttatcgtctttctttgatgtttgatattatctatctagctttgatatttatcagtttctctccaaacctttcttcttcttctttttttagcgtttacaaagatgtttaatagcactcctgtctattaaagaaaatacaaagttcaaatgcccaacagtaattatgtttaacacttggtatatacatttggataaagagaaacgctgctgagtagacattggatttaaataaaggtgttgtaggtataattcattacaatttatattatgaataaattagaaaaaagggctgaaaaagacaggagaggtttatttttcattattctttcatttggacccagcacaccacgcccccgccccgccaagaacttattacttcccaccattgaaccatcatgatgactctccaccaggcagtcacagcacagagccagcccctggttcagtggaaacatgtttggctctacagttcatatcctaactccgccccagcttcaggagtgcaagctcatgcctttggtcacttgagactttttaacaagcaccaactggatggtgttagctgatttggacccgaaatgccactgtgcaccagagaagaggctctcactggattccgaat

SEQ ID NO: 37350 - DNA, 1753 bp, Bovine  19866880501591
  misc_feature (1)..(1): n is a, c, g, or t
nttggtatatttgtccaaatctgtaccagaaatatgtgcaaatgctaagtcacttcagttgtgtctagctccttgtgaccctatggactgtagggtccatgggctcctctgtccatgggattctccaggcaagaatattgcagtgggttccatttccttctccaggggatcttcctgacccagggatcgaatccacctctcttatgtttcctgcaggtgtgttctttaccactagtgctacctgggattgctcgtattactatggttttcttaagtcaaattgtcctgatgcctacctctgtttttcagttccaagatcaatttagctattcaaggatctttatttcttaatataaattttagaattagtatattgaaagcattaaaaaaaatccacctgaatatccattaggatcactttgaatatacaggttaatttaggaataattggtgcatctattatactaagctcattaattggtatagttactatattgggtttactgtgttatacaaatttataccaggaatatggcataaatctccatttattcagattattagacctattagtaatttttaaaatttcaggtatcatgtattcgtgcaagctaatttttttaaagcacaggatttattgcaacaaaatttaattggagatgcatccttgtgaggagcttctgtcatattccatcacaaatgtctgtagaaatgtgtccctctgggccagagctagcctgttcaatgtccatctccaacctgcctcttagttggagctcttcagaaaattttaaaagcctcaatcaattaaaatgaattaactgcaccctggggatatgatttaagacgtgcactttgcttgagtagaaaaatttcagcatgtttctagcccaacaagccttcaacagcattcacacaccagggaactctgaaacctttgtttttcttatcaaaataacatgcattaagcaatgaggaagctgttaatgagtgctctttcagagaaagactcagggttcctcaaacttctctactagcataatttgcaacagggaaaggaaaattcataccactaatatgtctaagaatccagtgtggcatggtctgggttttgatttgaagtgctgtgttttaatagtaaaatgttattcagaattataattcttcttcaaaatatgttgattactagctttttccctagacagagtgtaaagtaaaatggactctaaaaagtcatgctacattgaacttctaactttgtgctcccaatcttgctgcccatggggtcagctggaagagaatgacactgtaaaatttcattatagtttgcctagggctggctcagagtaaaagaatctgcctgccagtgcaggagacacaagagacatgatttcaacccctgaatctggaagaccccctgaaggaggccatggaaatccacaccaatattcttgcttgcagaatcccatagtcagaggagcttggcgggctacggtctatagagtcacgaagagtcgggcatgactgaggcgacttagcatgcactcacagtgtccttatacaaagagacttccctggtggtctagtagctaagactctagtctcccaatgcagggggcctgggttccatccctggtcggggaactagatcccacatgctgcaattaaaggtcccactgctgctgctgctgctaagtcgcttcagtcgtgtccgactctgtgcgaccccagagacggcagcccacgaggctcc

SEQ ID NO: 37351 - DNA, 2083 bp, Bovine  19866880587104
  misc_feature (1)..(1): n is a, c, g, or t
ncgcttatgtctcctgcattggcaggcaggttctttaccactagcgccacctgggaagagaaaaagccatggatccgtgttaacagaatccacacctgtagtaagaaaaagcaacctctttgcaaattattcacatttgtcttttccctcactttagaccatacctttaaaggctgtgattccattattgttttgactttttcttccctcagtaaaaaaagatcttactgggcaggccttaggatcttgaggctttacctataggaaaattaaatgcttagcagtcagtttaaatgggtttaaatgagtcagtttaaatgaggcctttttctttttccaagtaaaacttgggatgccaagtaaattctatacttggaaaggagcagatcagtctagtacagacaaatgaaatactagtgatccccaaacctgctttaggaagtccttctccagggagaatgcttttcaggaatcagtttgcaaagtaatgggtagaattgtagctgttttggttttttttttttttttccttgttaccaactatgtcctaaatccactggtatactcatttaacactctttttattttatttttttcacctcaaggcatgtgggatcttagttccctgagtagggattgaacccactccccctgcaatggaagtgcaaagtcttaaccactgaaccaccagggaagtccctcatttacctctgttgattctgggcactgtgtacactggagatgtgtacaagtctaagtgtggggcaagtgtggggtggggaaaagtctcctgggccaggctgaccccgctggtcttggaacccgttaggagtgtgggtcaggctgatgtaggcatgttacctactatggaatcgaccacggagcaggaactcagggtgactccacagggtaaatccccatgattctggcaggtgcagctgagttttctgttctagatgctttttactcttccttgcccatctccactgagggcacacagccacgcgactcaccagcgggctctgagtggtacatgctcacctgcctggtgctccgttctgtcgtgaaggacctgatgcttcagtgtccttccacacattgctctctgccatgtgggttcagcacctgcagaccttgagacacactgtcactccagcaagaaggggactggaccctctgaaggcacacggccaccgagacctccctggtgtgcgctcagactctggggcctttggaacatgagagccaatgtgacttgactgtggctgataaagcaaacggttgtctcttgtgtcatgtgatagagatgactgctcgtttcatagctgtggcttttcccccttctgtctcctcagaaatcgcaggtgctccggtgtctgaaatttctgggcctttctcaacagaggacatagccagcaactgcgtccctgccctgccgttgaacgagcctgttttgtggattgtctcctatactctcatgagcgtgtgtggagtcatccttctcgttttaatcaccctgctgctacttccggtccggtgtaggcatcacccccgagatcccgaggtggtcaacgatgagtcctcgctcgtacggcatcgctggaaatgaagagaaaagcctagtgaccgtgaactcgacaattaagacgattcagtgcagcaggcaggggttataaggcaaggcttcttcctgtgcgcactagtcttaaatctctgttttgcttccagatgccttccagattcactgtattttgattcttgactttatagcttcctctttctcccctacttccaaggaaaatgataataaaaaagcacctcattcttaatcaaaacagagtgaattgggcttcaggctttatgtagctggttatgccaaactattttgggtgtggccgccccccacccccccccccaaaaaaaaaactacacaagccttggcttgttctcttttcccttctatgtctggagaaataagtgcatatactttataactcttcttagctaatgggaagctttttgtattgatcacatttaagggtattttgtaccaggatccatctgcgtcaaagtgatacaaaaa

SEQ ID NO: 37352 - DNA, 796 bp, Bovine  19866880725075
  misc_feature (1)..(1): n is a, c, g, or t
nccactcaccagcccaggggcttctgctcacaccagagggtcatcaacatactcaacgatggcaaatgcttcagggccccaatatggcaagacccctcctggacaaacttaagaaattatctaaataatcaagaaaaatgtgtgtcatcatcagatggaaagatgtagcatgagatctcaagggcctgggtcagcctccttaaggaaacaacctgcataattttctaatatctcaactctactcataagcatcagttgaagacaagaaattgttcttttgccagaactactctgtgagctgcaccccagatggaatataggagggggagacattttagtgaaaatatagttaatttctgagtagattagtataaggtcagggggatgagtatactgaatctctcatcaagccacttggatggagactattttactggctaaaaaagaagtacacctaaaaaaatacatgattgcctttttgctgtatagtaattcattggaacattcaccaccaggaaaagagtgcttctgatgggacaaagctgcatagatgactgatggcagcctgatgtctgattccataaatcaaagagatcttgtcaaagaaccccaagtcaaatctccaattactgggacatgtttcaggaagcgttaaacctgaatatccagagactgggggacttgaatcagaggctgacaaacccaaccagaaaccttattataactaagagagatcagagggacaagcagatacagaaacatcacaaggcagcaagctgcatctcaaaaaagaaac

SEQ ID NO: 37353 - DNA, 1831 bp, Bovine  19866880779663
  misc_feature (1)..(1): n is a, c, g, or t
ntggcccaaggataatcttttggaacaaataatcattaccacctgggaatgtgtgtcttgatgttttgagtggaagagaattttttcagctatagcaacctactccagtattcttgagtgggaaatcccttgtacagaactgagtgactcaacaacaaaaattaatctgggcaatgtgggtcctgacacccaaagttcagttcagttcagtcgatcagtaatatctcttttcgaccccatggactgcagcacaccaggcctccctgtccatcaccaactcccagagtttactcaaactcatgtccattgagtcggtgatgccatccaaccatctcaacctctgttgtccccttctcctcatgccttcaatcattcccagcatcagggtctttttaaatgagtcagttcttcgcattaggtggccaaagtattggagtttcagtatcagtgcttccaaagaatattcaagactgatatcctttaggatggactggctggatcttcttgctgtccaagggactctcaaataatagtttgtctttattaattagtccaatcacctttactctaaaatgacgaagtttattgaattaagaagaatgcattgagtatcttatgctgctgtctttactgaggccaaggaagtagttcattcaaggttacttctcagttatacattctcatgtttccagggaaggctctttttaacaatccagatttaatttttacatttgacgggaaatgaaatattctgtgccttttccttggcctgatttagtaataagctgctttatagcagaattcatgtgtgctcattccaaatgcctactgtaaactcttaggtgttaatgacaagtaaatcagaattcattctgtctgcctcctcctgaaacatctcagaccactaactgcgggtctataacaggcaagagggggcagctgtaggtgacttctgaacttaatggaagtttttctgctctgttaattgccaagagtcctgcatatgtgctctgctgattttctgaagcctaaaataaaacttgcttaggtggagagaaaaatggagttgtagattcaagagaatcttttgaaaatgaagggatagtcatggatcatgtggagggctccccttgtgttacatgccttacaggtgccttccccaggaatcctcaaaagggccccaagttcttacccccatctagtagacagcacagctgaagcttggagttgagtggctttcccacggcagtgggacaaggcaaaagcaaagctctagaaagcagcacaagttgaacccaggccattggactccagaacccaagttctcaatgacctggcaaacactgggtcccttcacttcctcccttctgacttattttctttggttttgggccacttgtttttctcatcaaccagagatccccgaactgtgcaccctcagatattaggaacttaacatatgacccagactggactctcccagacccagccacctctccgtgcatccccttccttcagggtgatgctcaagcctcggcatcctgaataattggatccaggtgtgcgtgggagagaacgtacaagaagattcaacaggaaccagagccccatgctccttgctctctcttgggaaaggctgggaatgtgctcagtccctgggtgcgttaatcaagagttggggtccctctttcagcctgacacccttccaagacatcacaggcgtccacccggaagcacgtgtgtgagcagccccacgttggcatggagatgagagctggggctcatgataccattacatgacttccttctaacaggagagaaccagcagctg

SEQ ID NO: 37354 - DNA, 1796 bp, Bovine  19866880883436
  misc_feature (1)..(1): n is a, c, g, or t
ntgtttcctccttgagtttcaaatacaagactgctgtagtcacatgacaatattgagaggtggaatcttgtttgttactgtcattcccatcccttttcgtttagaatcagaataaagttgtatttcaaatatctaaaataaataaataaagagatttaagtaataaaaaagtatagtagtcaccatttctggtgtaaattccttggtgtagattaaaatgtgcattcaatatcattttcctttggcttgaagggcatcctaaacatttcctgtaatgcaggtctgctagtgatgaattcattcatttttgtacatccagaaaagtccttactcactttcttattttaaaagattttttttccgagtagaaaattttaggttgatgatttttctcagtactttaacaaagttgctacactgtcttctcatttgcatagtttctcctgagaaataggctataaatctcgtgtttattcttctgtacataacatgtcatcttctggctggcattctgtcattatcactgattttgaccaatttgactatagtgtgccttgatatagttactttatgtttcctttgctctgggctcattgagctttggggatctttgggttaatagttttcaccaagtttgaggacatttatttcttcaaatatttatttctgttttaccctcattctgttgattggggagctttaatcacctgtatacattaggatgattgaagttgtccatctttgatggaacgtgacctgcaggttatgatagagatctcccattctgcctcttccaggagtccaagagcaacctgtacagccaatatgaagagaaggtgcggccctgcattgatctcatcgactccctgcggtccctgggcgtggagcaggacctggccctgcccgccatcgctgttatcggggaccagagctcaggcaagagctctgtgctggaggccctgtctggggtcgccctccccaggggcagtggtaagcaattggcttctgtgttggttagctcaggctgcagaaacagaggacctcagacttgggcttaaacaatagaagtttacttctcaaaatttgggaggctagaaggccaagatcaaggtattaccagggttggtatctcctgaggcctgtgtcctctgctcacagatgactgtcttctcctgtgtcttctgggggatggtggaggatgtttgcagaagtctggggtttcccaatgcagtgtaccacctgggctgatggaaaacaccggggtgaagcaaaagatctaaagtaggggatttcaagtcaaactccatctgaaatgtacattctagatgcacattcgtgagtcaccccagatagcatgcctcagagagtcaaagggtgagaacagggagtttgcagttttaggagcctcccggatgattatacaaatttaagaaccactggtctaagaccaccatataggactgtatagacctgatgagtagtggtttcctaggtattgttacaagatgtcctcttgtgctgaggctgaaaaaacttgggaatgaagacgagtggaaaggcaaagtcagcttcctggacaaagagatggagattccagatgcttcacaggtggaaaaggaaatcagtgaaggtaagtgtcccatgtttgttcttcatgcctatttgcatatctggtcaacgaggtgaaatagatggggtatgcctgtcactgttcccactctcccctttctaggcctgttctggtccctcaggaaccttcccttccctccatcaggcccccagctctcttggatttt

SEQ ID NO: 37355 - DNA, 1478 bp, Bovine  19866880896930
  misc_feature (1)..(1): n is a, c, g, or t
ntgcggtttcccagctctgcctcctcttagcaccatcagccacccacatctttagatcataatgtttctctgagtgagaactgtgtcctgggggggaaatggggaattagatgtggatggaggataaagctgatgatgaatttctggtttcattttgcttatttttagtccccttttactctgataaaaacgttgcttactttactctcttgaacagagttcagggaccatcaagccaggatgatgtggttctatataacttttttcactcatcattttatgctaattcctccttttcaagagaaggaattgaagggaagcaattagagggagggtcattgatataaaattatctacaataaagccctgtaacttttattgtcatgagcttttgatttatcttgcaatgtaacgcacagtctgatttcatattcaggtactagctgaattaaatatgcaaatttaatggcccaggcacacgcagacaaggagacacaaagagataagagtggaaatacctctctgcagtccagattaaggctctggcctccaatttccaattttagaatttctatctgataataccactcctccttaataggggtgtaccagatgtctcctttgtacaaagttggttcaattccacctaggacctgggaaggaaaacatttacatctttaagagaaagaaaatataggcatattacaaagtcacacagagaagcgtgcttttttgctttttaaatttattttttaattggaggaaaactgttctgccaatgtggtgttggtttctgctgtacaacaaggcaaatcagccatagttatacatatatcacctccctcttgagcctcccacccctcaccctactccatccctccaggtcatcacagaacaccaggctgggcccccagcgttatacagtaacttcccaccagctatctgttttacacacaatagtgtatacatgttgatgctacttttcccattcattccaccctttccttccctcactgtgtccacaagtccatgcactacatctgtgtcttcactccttccccgcaaataggttcatcaatactattttttagattccatatatatgtgttaacatacaatacttgtttttctgatgagaagcatgctcttataaggcaaaacttcactggaatcagtacttccaatttaacaggatgttataaacaaatgcataggcctggaaattaaacaaggaacattctggggccatgtgttggaagatcagagtcccactctaatcaggatgctttgataatttctcttatgtagaggaaatgcatacagttccagctttctgatactgagatcctcccccaccccatcccagtcgtgggcaaagaaatgcaataaaatggttaaccacacagactgacaaaaatttagttcctcggaagatgaaggatggcttcctgccccacatatttgcatggaaagaggaa

SEQ ID NO: 37356 - DNA, 2995 bp, Bovine  19866880989097
  misc_feature (1)..(1): n is a, c, g, or t
nttggttttctgtttattgagaactgtattgttaacatctgaattcacctcttccctttgctagagcaacgtcagtaatgattgtgagtctaagaggtcaagctgattcaatctattaaaatgttagcttgcttgccaatttcagtgccaacagattttaaatcactcatataaaaagggttaaatgtgacaagaaaaatagaaaacccaggtacattgtgcccatcaatgaccttgggaacctgttatgaaatcttttcaattttgaaaggataaaataaatggttggaaagagacatttaaaaattatatgcagttctaacaatacagtcagccaactaattggggcctgtttgtggtaatgatctaaagtgacatccatctccaaggcatccgtcagctttaacaatggtgacattgtgtgctcacgggacccgcaaggttgtgatgcgaaaattatccttcatttggctccttcagccccgattccaaaatgaacccttcgagaaatatttgcttaagactgagctttcaaaataaagcaaatgtgcttttaaaaaaatcaaaagaagttagagacgatggttttgccagagcaaatgaattaggtagagttaggtgtaattttagacaaaacaaggttagtttcaggagagtcaccaacaggagttttaaaaagttaaacaaagctcactaatgccatggaattccacactggctgcccagggatgaaatgaaggtacaggctcagagaggaccagctcagaacggtgaaaaatgacttattaaggccaagggaaatgaaaagactcagagtacacttacagtttttaaagcaatttcatgggttttgaccaaaattgcttaatatcactagaaaaagctaaattttcataaggtcttctaaaggaaggaaatcaagaactggaaaatataggtcaaggggaacacctctctgaagtaaaaacaaaagttttacctgtggagaaatgtctatttggatcttctgcccgttttttgatccctggtggctcagatggtaaataatctgcctgcaatgcaggagaccaggttcaattctgggtggggaatatcccctggagaagggaatggcaacccactccagtattctggtctggagaattccatggacagaggagcctggtgggctatagttcatggggtcacaaagagttggagtccactgagtgactaacactttcactttaatattgaatcttatacattgtttgtacattttgaagattaatccattgctggtcccgttgtttaagattttgctgtaatttatgtcaaagagtgttctgcctgtgttttcccctaggaattttagagtgtttggtcttacatttaggtctttaatccaatccactttgagtttatttttgtgtatgatgttagagtgttctaatttcattcttttacacatagctatccagtttttccagcaccaattattgaggagactgtcttttctccattgcatgttcttacctcttttgtcatagattaattgaccataggtttatttctgggctttccaacctattccattgatctatgtttttgtttttgtgccagtattattttgatttctctaactttaatatcaaagcaaaaacagaaattggtttgcccaaggtatcgggattaaccagtatcactgggtgttggcctcatcacacacaacagctggctggatcttcatggcagtactatttttgcaagttcagtctgagcatgtagtattttcttaatagccacacaaaagccatgctcttcaaccaggaattcaaagactcctcagtctagcctcatgttacctgtgatcctgtattcttctagcatctacactactgattgatgagtcctttcctctttcctttccttcctttttgctgtcctgtcttttctcacgaccccccaacccccacagtcattaagaccatgagcccttggcttatattaagcctgtaatcccttctagcttcccttttgttaaaggcctctactggtttccccatggcttaaattcatggcttaaaagagcaaaaaataggaacatatatacaatggaatattactaagtcattaaaaagaatgaaataatgccatctgcaggaacatggatggatctagagactgtcataatgagtgaagtaagtcagacagaaaaggagaaatatcatatgacaccccttatatgtggaatctaaaaagaaactatgcaaatgaacttatttacaaaacataaacagactcacagacttagagaacaaacttatggttgccaggttggggggctgagaagagatagttagggagtttgggatggacgtgtacacacctctacatttaagcaacataatcaacaaggacctcctgtatagcacagggaagtctgctcaactttatgtggccgtctgcaagaaaggccagtttgagggagaatggatacatgtatatgtatggctgagtccctttactttcacctgaaaccatcacaacattgctgatcgtctatcccccattgcaaaataaaaagctaaaaataaatttcaaaaatataaaatatatccaggtctttaaaaaaaagcacaaaatacattctcctgtgactctggaggtcagaagtccgaagtgggtctcacagagctaaactcaagggctggttcattttggagatgcctgggaagaatctgttcatttgctgttatggattgaatgcttgtgtcccccccaaaattcatatgctgaaatcagtccccggtgtgacagttgtttggaggtagggctttggaggtaattagtttatgcagatggagccctcatgaattggatcagtggccttacaaaagggaccacagagagctctctagttctttctgccagctgagaactcctggaagtccaccatctgcagcttgaaactgaccaaactggcagactggtttcaaacttcctgcttccggga

SEQ ID NO: 37357 - DNA, 1753 bp, Bovine  19866881006467
  misc_feature (1)..(1): n is a, c, g, or t
ngcagcagcaaggaccggaaatatgttgtttgggggtgaggataattggaccattgcccagggcttttcagaattgagaattaaaactctgtgcccagattgaatctaaaacggtcctttgttgttgctgttcagtcattcagtcacatctgactctttgtgatcttccctgtccactgtctcccagttttctcaaactcatgtccattgagttttgagttttttattcatcatctaaccatctcatcctctgttgcccccttctcctcctgccctccatcttttccagcattagggtcttttccaaagagtcctggatgtggctttatgggtaactagaggcttcccggatggctcaagcagtaacaaacctgcctgccaatgcaggagacacaggttcgatccctgggtcaggactatcccatgcagaaagagatggcaacccactcaagtcttcttgcctgggaaaccccatggacagaggagcccggcaggctacagcccatggggttgcaaagagtcggacacgactgagcacacatgcacacaaagatgtgacacactcagccagtattcacgtctctctcctgccctgtgccccaggatagcagatgctgctttagaaacctgtcctaggaccagactgtgttctagggtacacacccaagtctgcaggtgagacattcataggcttcccccctttgcatccctccaggctgaaggaagatgccaagaaggccatagaagccctgggaagtacagagatcaggaacatgcgattcaggtcaagctgggtgtttgtggcagcaaaaggctttgaacttcctgcaggaattcagagagaaaaggtgagtggttgttaaacatcccttcttctcagacagttaccgtatgtcctagcaattccattcacagatgcacagccaagagaacaaaaacacatattcgcacaaaatcttgcgcaggaatgtgctattactcctaacagcaaaaaagcagaaacaacccaaagattggatgaatggacttaaaaatgtataaataaaatagatataagtgcccactggaacattattcaggcacataaagaaatgaagtattgatatatgctgtgacatgagtgaaccttgaaaacacactgagtgaggaaaaccaaaaccaaaaggccgtataccgtatgattccacgcgtatgaaagttccataacagtcaaaacccagagagagaaagtagattaggagctcactgggctatggggcatggtgagtggatatgggctttcttatttcaggggtgaaaatgttttcgtttgtgttttgccaggatgtggcttgcagggtcttagttccctgaccagggtttgaatccaggctctagcagtgaaagcaccaattccttaccactagactgccagggaattcccagaatatgttttaaaattgagtgtaatgatggttgcatgtctctgaatatactgaaaaccactgagtaaccactttaccattaaaaccagtaaaaaccactttaaatagatgaattttatagatatgcaacaagcaacacaggtttactatatagtacagggaactatagtcaatattttgtaataatctataacagaaaataatctgaaaaataatatatgtgtacatgtataactgaatcaccttgcagtgtacctgaaacataagtcagttatcagttcagtagctcggttggtctgactctgtgcaagcccatggactgcaacacg

SEQ ID NO: 37358 - DNA, 2405 bp, Bovine  19866881140176
  misc_feature (1)..(1): n is a, c, g, or t
ngggcatcttatggagacacatattaatttggtgtttgctctagcgaccatatgctggtcaggttctaggccctatttctggctacagtgaaaagcaaacaaagctattcctaagataatcgcctttactttatgctaatttcttgttagcatttaaaatcaattccttattttgacttgttaataactattggatatcctctctttcctccaaaaggcaggcacataaaacagcttatttggacacatgatgggctcatccccaaatttattgtgaaaaatgagtggtagtaaatgagctttttgaacaatttatagtcaaaatttgaaaaacgccagagatttgcctcagacagatgacttaagcatatttaccctttatgcatttgaatggctacctctatacttgattttggaaaatgctccttactgcagccctcaacctctgcatctggtgtaaactcccaggagataaatgaatgaatgactgaatgaaatcagtttattcattcagtaaatgttaagcatctattgtgtaccaggctgtgttatagacacaacacaattccctaccacatgaagtctaaattctagtggttctgttttcatcatagcaaggaggtgctcagccactctttggtaagggcagaatatttactgccacatctgctttgggtcatggttgccttgggtctttcaacaccatccccatcactgttaccttgaataccatcactgttactgccatcttgaacctcacgcaacagtggaccggttcaaatttgagaaaggagtatgtcaagtctgtatattgtcaccctgcttatttaacttctatgtagagtatgtcatgagaaatgccaggctggatgaagcacaagctggaatcaaggttgctgggagaaataacaataacctcagatatgcatatgacaccacccttatggcagaaagtgaagaggaactaaagagcctcttgatgaaggtgaaagaggggagtgaaatagctggcttaaagctcaacattcaaaaaactgaatggcgttttttttgttttttttttaaagatcatggcatctggtcccatcacttcatggcaaatagatagggaaacaatggaaacagtgacagattttattttcttgggcttcaaaatcactgcagatggtgactgcagccatgaaattaaaggatgcttgttgcttggaagaaaagctatgatcaacagagacagcatattaaaaagtagaaacatactttgcttacaaaggtccatctagtcaaagctatggtttttctagtagtcatgtatggatgtgagagttgaaccataaagaaagcttaaaactgaagaattgatgcttttgaactgtgtgttggagtagactctagagaatcccttggactgcaaggggatgaaaccagtcaatcctaaaagaaatcagtcctgaataatcattggaaggactgatgcttaagctgaagctccaatagtttggccaccgatgcgaagaaccaattccttagaaaagaccctgatgctgggaaagattgaaggcaggaggagaaggggatgacagaggatgagaaggttggatggcatcactgattgaatggacactagtttgagcaagctctgggagaccatgaaggataggggaagcctggagcactgcagtccatggggtcaaaaagagttggacatgactgagtgattgagcaacaacaacaacaaccctgttttatagatgagaaaaggtatatgcatattatgactattgaatccattatatatggttatattttatttgaatattcatttcaaaagcttgaaccatgttgctctatttccttacggattcttaggttttctgggcggaaatttgcttgttgctcaattgtgggtcctgctcaaaccaggatctatggaaatagatgagttgtgcccttaaggatgccccctgtgctcccgagggcacacagttacgcatccttctttctttctttccaccttagttctctgtcttcctgcgggaaccactgtctcaggggtaatctgtgcccttctgctcctttgacagaaatctccattaagtttcttttctcctaagaagagctccacaattcaaaccctcgctcatcttccctctcatctcttcccatcacatctcgtatctaatcaattaccaccactcagacagctgtcacggggagtgctgaagcctgtgagccttctgctgcagcctgttagagggtgagataccttaatgtgttacttagtcccagaggcatcagggaacagaaaggtaattttctacagtgatggctttggcatcaaccacaggcagacaggagagaaattcgtgggtcagggtaaggcggtttaccctttcatgtatccttca

SEQ ID NO: 37359 - DNA, 1141 bp, Bovine  19866881265433
  misc_feature (1)..(1): n is a, c, g, or t
ntgatctagggcttctggtgtgtgtcattccaatgctggaaatatgtgactaatgctagagtgtctgcttgcacatatgtgtgacccatgatgtaagggagacctggcacaggagtcacccacattgtgggctcttacctgtcctccgagctctcacagaattatgtttttagatgaattttagggaggaaggtataaaagagctttaaaggagtggtaaattatccatgttgagggcggtcacgtgaatttgtgatttttctcttagacgcactttcaggtccaacagcgattcttttgaaagaccagcacattctcggtggcagggaatgttctgtcccgtatcaacaggatacaatttctcttctcgtacctttaaatgttccaatctggatttaaaaagaaaactatttttattttaaccaatgtagatgtcattttccattagttcctggggatgtacatttttcagtagcacttggctctgatagagtttctgccactgtgtgcctttcagtatctaaacaaaacaataacctctactctgaattttcaataatgagatgctaagtttcttcaatgagtaaattttcagaaaatgttttatttcgaattgaatttgtcatttgcaaccgaaaacagggaagttggagagagtgtttgaaggctgagaggggctttggccaggccctggcctgcttgctgaatctaagtggagtgtcctggagtgatgggtgtgctcgactccccgggggtagctggtttgtgctaaacctggttgccctgtctcgcacatagctgagactcaggctggtagggtcactccagctctgtttcccatgcttctggatctaggaactcaatttcatcagaacctgtggggatcctcaggcccttaattttactcactcgataaacctgcacaagctgaatgtataaaccctcaggcgaagatgccggtttcagtgattccagcactctggctcttccaagacaaatcagttatggtatcctgtctcatcatccatatactccagcctggctaccctgtctccgcaaccagcatcatcatctccagcctgtctggcccgccttcccccctcccccaacaaaaccagcagcagcatctccagcctgtctg

SEQ ID NO: 37360 - DNA, 796 bp, Bovine  19866881335963
  misc_feature (1)..(1): n is a, c, g, or t
ncacagagaggttaagtgccttgcccaaggtcacacagcttggattttaaccctccagtttgacttggtgtccactctttactactgtcccctatgtatgtcggtttactttctctattcatgtcttcaattgcaaactcttctatatctgaagaggcagggagtgagaacattggaagaaaatatttatttctaattatttcgagaatcaagtgtctttactgttacagtgagcagaattttcccctcttcttttgcagcgatgtttgttcttcaaaaacagtggtttctttacgctgtataggtaagtgttcttggttttctgtttctaaaatgggatgcattttggtatcccatttgataccaaaatcaaatggtatcaaatttgataccttattgaaatgtatcccagtgtgtctttgggggacttggagatagaaggtggagtaacgcgtcaggacacacccagcaccctgcccaagggttcccattcttgaatctggatacactttagatacctattgctttggtccaagaaacagctgtcccaaggacagacaaactgcagagacagacaatgtggccctctctgtggtgtccacattgtggggctggagacccatgggtatccccattccagcgtttggactacttgtagtttccaaccttttgggcttccctggtggctcagacagaaaagaatctgcctgcactgcagaagacctgagttcaatccctctgtcagggaagatcccttggagaaggaaatggcaacccactccagtattcttgcctg

SEQ ID NO: 37361 - DNA, 1520 bp, Bovine  19866881504685
  misc_feature (1)..(1): n is a, c, g, or t
ncttattttgctcacagctggcacattaaacattgttgattagatgaatggatacattaaatccttttctttcctttgcacagatcaaccactcagatgatgtgaagaacaggtattctggctggccagccgagatccaggtagaaggctgcataccaaaagggcccagctaacactgccccgcctcgataaatgggcttcttatagacaaatgcatcctgaatggactacgggcccttttccaatggtcaatatttgatgaatatttcaggtttgtcaaccaaccaatcaaaatatttgccagttgtataaaatcttgtcccacagactttttatgccagtgtttatagagtgaagatgttgagctgaaatacacgggagtgttcaagaggattcagtgacatcacctgggaagcagcccctgcctgtccaggtgtggagctattttatcatcagatccaagtttgacccatgtggtccagatagctctgcagagagaaaacctttattctccgaccacggagcacacccttgttatggacggtcatctcatagggacaatgagcagcagccatagggcttagctaccttcttgggtcaaccttcttgagctctccctgcaggtccctgaacttattcattcatcccacaaatgtgggtgcgcctaactcaggcacaagcaatatgatggtgaagagattcagtgtctgcctccatgcaggggtgttgctccagtggcaccttgtttaacaggatggggagggagggatctctgatgggctgggtgggcaggggctgctctcaggaggaccactgtacaacccagacttcctaggagacacacagtagatccacataccaagatgcccagtgccttggggttaagaaaaccaagtcattgccaaatgctctttctgacctccctcccaaatctggctcccagaaacgataggagactttgatgccagcttgatagtgcttatctagcctccagtttctcatctatccatagaggggttggaacagatgaacggttttcaagtacgtttatcagcaggcctccttttaaaaacatggcagtatgtgtcaccctgaatttcagcatccttgcaggacccgactccccaagtctcagtggctgacagcagtgctgagtcctccatggttgtagacgggctgcagggcagtggaggctcaattctgagcgtgggggccaggctaaaggagggtccctatggggcatggaagccagagagagcacaagtgcagatgtttgccagagctcctgccaggacacatgtgagccctcatcattgcatcccgctgccaaccagggtgaacggcagcctcctggcagtggcggggggtgaccgtcggcccctcagggagcctgcgtctctttctgcagaggagtctgcaaaccactcggtgggatcttggctggggccctgttacaggctagactctgttcctccctgactcgtgagttgagtcataactaaccggcagcaccacagaat

SEQ ID NO: 37362 - DNA, 1045 bp, Bovine  19866881708683
  misc_feature (1)..(1): n is a, c, g, or t
ntgatttatttctaatgacataggtgacaccaggactagaacttggcactaaaccatgcctggcaactcccccagtggggatctggtaagaggaatctgacaaatttctatttgagaggagaccctattaaatgaagaaatagtccttctgcttctcttgaaggagataatggaatccccaaagcaaaactgctttgcagaatctacggcccaaagctctgtgaagttgttaatacctcattgctgggagttactttcacagttttgaactgtaaccgaccccaaatttatttcggaccaaaaagtctgcatttcacagaagcaggtaagaaaaatccttacaaaagtctgggagagggctgtgttcagggagaccgtccctgttgtcacacaccaggaatctatttctttaacaccaggtccctgtgttttggctcataagaaacacaaaatagttcaccatggtgatcacacaccagtcggttgcagttcttctaaattccagaggaaaaaataaaatcaatccccatctcattgctatttttgataaacagtttcaggttctgaagacagggtttcatttcaggcttctgaataactcatcaagaatataaagcatcagcctatttaaaaaaatacattgttcacgtaaaaacatcctttttctatcagatagttgacaaggttttgacaaaaacctgatgctaatttgcatctttcaggagaggaccatcttccagccccttccacagtgtgctgcctaataaaaatgatacccccaaagggctgctatctcctttcctgttcaaagcaagcctgcttgaaggtttgccaagcgaaggatcaatttacataactggaggaggtgcgtgtcactaacagggttttgactcaaagtccaaatttcagcagcaaggcatgccaggaaaacgtcccaatttcaattgtctatttcattcttgttgctaagttatgcttttgtaatttcagtatttccattaaaatgtcacatccactgacatctcagatgaaaaggtagaggaaa

SEQ ID NO: 37363 - DNA, 742 bp, Bovine  19866881725408
  misc_feature (1)..(1): n is a, c, g, or t
ntgggtgagaaagatcccctagaaaaggaaatggcaccccactccagtattcttgcctggagaaaccaatggacagaggaacctggtggggcacacacagtccaaagaatcggacatgcttgggcgactaacacatacccacacacacatacactccctctcaccaccatcctgcctctgtccccacatctcacccctgccccctgctccatcctgatcaaagcaggaagaacctcatcacccacacacccccagcaactgcacaactgccacgcggctccctgcaccccactcctgctcacccttgaaccctggatgccttcacagcatcccagggggctcaggcatccagcaagcagctctgacagtgctgaccagcacatactgctgctggaaagagcagaaggaacccaggacagggcaaggccagggaggtaatgattaaccacttactgagtttaaagccatcctgatgttatcagcagcatcgggtaaagggaggtatttggaacgttcaagttgacctagaggaaagaacaacaggactgttttgcttctgtgccggtgagtttacgggagatgagacgggaaagaaccagaagaggtcctgggtgatagtcagctctcaccacaaccacggcgggtctgcctgctcaccttcaccttcacctcatcacctgcacccacagctgcccatcctgaaggagctggggacctgctcgcttgtaacttacattcaggg

SEQ ID NO: 37364 - DNA, 962 bp, Bovine  19866881809513
  misc_feature (1)..(1): n is a, c, g, or t
nttttagatatacacatgccctttagttcttaatgtagtttattattaagagactgaaagtcttttaagacatgaaatacaggtttcttaaattttttttccagtaaatattatacttgatgcatttggtatgtgaaagatacagtgtgtatattcggatgagatactctcagaatgagcctgtgtgtgttaccagggtcctgttcttaccttccagttttacgggagccctatacagtccgtgtggaggaccagaaaaccatgagaggcaatgtcgcggtcttcaagtgcattatcccctcctcggtggaggcttacgtcaccgtggtctcgtgggagaaagacaccgtgtcactcatctcaggtagggcgtgggcttcctcggggcaggcagggcgccaggctctcctgcgcacagctcggtctggataaccaatcgggtctccatctcttcgcgcactgtaatgaagaatttgtatgctttaagttgacgctgctttagattaaacgtgatttcggtgttttcttttggtttatatggctggattcatagtgtccaatgaattgactgatggatagaaatttgttccttgcattatgtgtatagtcattgagttacttttggtttccaagttaccaaggaaacattttggttttatttctgctcccgggaatagaaatataggattgttgttatctgtgagaaacctcagaactgatattcttatattctctgtaatctggaaaatggaaatcctgattttatgctattctcagcctttcaagtgtcttcagagtcatgtggtatctctggcctcataaagattttttttgagatatgtagtcagtggctgaaatacacacatacagataggtaggtagataggtatgtatataaatagcttactggtttacttttggtatctagaaaagatatcactgaaatctagcttctaagaaat

SEQ ID NO: 37365 - DNA, 4976 bp, Bovine  19866879992949
  misc_feature (1)..(1): n is a, c, g, or t
ntggagagtgaaaaagttggcttaaagctcaacattcagaaaacgaagatcatggcatctggtcccatcacttcatgggaaatagatggggaaacagtggaaacagtgtcagactttatttttctgggctccaaaatcactgcagatggtgactgcagccatgaaatgaaaagacgcttactccttggaaggaaagttatgaccaacctggatagcatattcaaaagcagagacattactttgccaacaaaggtccgttgagtcaaggctatggtttttcctgtggtcatgtatggatgtgagagttggactgtgaagaaggctgagcgccgaagaattgatgcttttgaactgtggtgttggagaagactcttgggagtcccttggactgcaaggagatccaatcagtccattctgaaggagatcagccctgggatttctttggagggaatgatgctaaagctgaaactccagtactttggccacctcatgcgaagagttgattcattggaaaagaccatgatgctgggagggattgggggcaggaggagaaggggacgacagaggatgagatgactggatggcatcactgactcgatggacgtgagtctgagtgaactccgggagttggtgatggacagggaggcctggcgtgcctcgattcatggggtcgcaaagagtcggacacgactgagcaactgatctgatctgaacagatgcaaactactacgaataaaacaggtaagtaacaaggatttactctatagcaatagggacctatatttaatatcttgaaataacttttactggaaaatgatctgaaaaatatataaaactgaatcactttaccgtacacctgaaaataacacagtactgtaaattaactctacttcaatctgtaaaaacacacagaaagaaaaagataaatagcagaacagagtgttaatcaactagaaggtaacagttgaaaattcagactgaagtgcagagaaaagcacattaataaagaaagtgcagaaaaagtacaaaagacatggacagagacaaaaagtctaatagcaaagaagtcctaacagggaggtaaatggaattatgttattaaaacatttttatgttgtttaagaggtgacaaaatactaattcacaatagacttaaagtttgaagagcagtaaaagtatcaattcatggtaatttacagtacgtcaaaaaagcacattgcaatctctaaagtaattactaaaagaataacaaaattataaaattaaaaagctaatagtgaaggaaattttgataataaaatgtgtaagattgctcaatgtcattaatcaccagggaaactacaaatcaaaaccacaatgagatatcacctcatacctgttaggatgcttattaccaaaaaaacaaatgacaacaagtattggcaaggttggggggaaattggaacccttgtgcactgttggtgagaatgcaaagtggtgcagctctttatggaaaagagtatagtgattcctcaaaaaattaaaactacaactaccacacattatccagcaatccaacttctaggtatttatccaaaagaagtgaaatcaggatctcaaagaatattagtattcccatgtttactgcagcactattcacaaaagtcaaaatatggaaataaccaaaatgtggataaatgcatgaatgtattaaaaaatatggtatatacatacagtagaatattattcagccttaaaaaagaaagatatcccatgcatgcatccatgcaacaacatggttgaaactagaggacattatgccaagtgaaataagccagtcacagaagaacaaatactgcatgattccacttacatgaaatacataaaataatcaaacataaaaaaattcagttatacaaaatgaataagttttagagattgtctgcacaacattgtgcttatagataacaatactgtattgtacacttcaaaaatctgttaacagggtagatctcatgttaagtgttctcatcacactaaaagaaaaaagaaaaatacaagattaatccaaaaggaggctaaagaaaaaagaaagtatgaagaaagggttggagtacagaaggaaaaatagatgatttttgatcctatgtggagtcaatttgttgtaaagtttgggaagtacaatggagaagtcaatatttgtggccatgtgctgcttttcttgctccattgggaatccatctcaatttttgtttggagaatcatcttttcccgtttttaatccatgtagtttgcatgaggactgtaacctctgtaactcaagataagtcaatgagcctcaattctgataattttgttagaactttggggaaagtggaaaatgtggacttgctagctctgatatttgtaaatccggcaagttaggggcggcacaatgtggggagagttgctatgccatggagagttgctgaagaatgaagccactggggaaagtagagctaatggatgggaagaaacatgaattctaatgccatcatttgagctcctggatccactcctgtctggattccatccatgctgaaatttttagttatacattctcttcttggtttaaagtcagtttgaagtaagtttctgtcatctgcaatttcagagtcctgataggtatgctcaatatatggtgtgtgtgtaactcgcttcagttgttgttcaactctttgtgacctatgaagagcctgccgggctcctctgtccgtggtattctccaggcaagaacactggagtgggttgccatcacctcctcgaatgctcaaaatatatttagtgttcaacaactgcttagataaaacataaacaccattattactggctataatataagttaattcacagataagtggacttgtcaaacctcattaaacattctttgcccaggtatgttaagtgaaattcagatcatagaagagcacaaattggttaactctttcaaaatattctgatattaagaaatgcagaacttccaataattcaattagatttggtgaatgcactggctatttgaaacatcatatttcctcccagttaggagggagctggatcagttctctacctctgtctcccactctctctctgtgtgcgctgacggatacacacacacacacaaaacattttttcttccaatcgaaagctttgtttggtcagtggtcatgtaccgttttgaaagagaattttgagcagaggcattattatagaaatatgttaaaacccattgatactatgtaaatgcttgaaagagatatatttattaataacattgattttgtgctactaaaatcatctttggcaaacatggaagattagtttatttagtttttgtttgtaaaaattagtgaaaatccaaaggacaattagaatcaaaacaatggcttgtgaaatattatttctttaaataattactttaataatttttaaagtattaatacttccattataggcatcatgataatctctaattttataactatttcctaagaggatataattcaattacctactttcaatcacaagcttttaataaaaatcatactattctatgaattttaaaattctgtataatcatttaaaaacttttatgtagtccatataattaaaccttagagtaacccaaatttggtaataacttcacttcactttcacttttcactatatgtggttaagatgtgtcaatttcctttaaattatgcaaaatggatcaaactgaaactaagattttctcaagacttagtgggattaataacattgtaattgttttaacatacaccaacctaagtaggtcttcttccttgagttaaattgaaaagtgctatttgtaagaaatgtttactgagctttcagattcaaatcacactcacctttgtcaattaataaaatacagtagccagagggaacatgttgaaatcagacaatctatgttaaaatcagaaacatttggaccatagagaaaaactcaaagtgtaaaatgcaattgaacataatcttgcagattataaatgtagtaatgagatattaaaggaaaagaacaaatagaaacaatacccgttttagttgctgttcttttaggcttctcactgtccttgcaggctcagaaatgaagtttttatagttttcacatatattgatccgagactgggctacctgcattgttccctcgagaaaagatttccaaacaggatacatgctcctaaattcaaagaagaacagaaaagtattaggcagagaaaaggaagaataagttgcctaaccttttgctctctggctagcaccgacaaacagaattaatactttctttatagtttaaagtgtatttatattggttcataggtagtaatgtttttagcatacttaacaagtagaaacatgggaatacgctctatttctctatagcctgacaatgggctgttttgattcattagctattcttgatactggagtaaagtgatacaaggcttacaattctagacaaagctaacactataaaaaattagtgaataattcagacttttcaggcctttcactgtttcaggactgtcattatgaataccaaatttcattattccattaaggtattttcctgattttagagatgaggtaactgaggctcagatttagaagatcaccctagcttacacaagaatgtggcagtactgagatacagacaaatacctctaaagtaccttttctttcaactatattatattgctctcttacataaatggatgtgactggaaaaaaaaaatcatgaacaattgcttgtgttcttgagaagtctatttgttagacaaaagaagtctatggtattattgctctacatctgtttctctgttgtaataacacttagccagcatctcattgcagcttggagtcattccaaccaagttccatcacctttgcttgagtaaagtgtgctctcatcaattttttgagtagggtcaaagaag

SEQ ID NO: 37366 - DNA, 1825 bp, Bovine  19866880171555
  misc_feature (1)..(1): n is a, c, g, or t
nccagcaatcgaactgggttcctgcaggcggcagtgcctaacagacattagcaggaggaggaccgagcctgcagagtgggtgctagccatctgggtctggggccctcccaaagaggaagtccccatggttctactctgggccccaccgactgtgggcaaggcctggcacctttctggtctgttttcctgctgaggtgcttaagatgcctctctcctggcctggggcagctgggtgggctctgtaaactgtggagtcctgcatggtggggggtgcatgcagtagagctcttctttcctccaagcctaggagcaccctgggcatcaagaccctgcaaggcccagagagaagctcccagttcctggaggactgggagggaaggacaggagaggaggcagcacagatggggtaaaataccctgctcagcagtctagcataatggctaagagcctgagctagggagctaggccgtctaggttagaacctcttactgtgtgatctagaataagttacttaacctctctgtcttggtactcccacacctatgaacaagtaggctaatagaacttagatcattgcctccaggatgaagtgagttcatgcacgtggagagcttagcacagtgcctggcaagcaacaagcgctcaataaacgccactgctgctgctgctaagtcacttcagtcgtgtccgactctgtgtgaccccatagacggcagcccaccaggctcccctgtccctgggattctccaggcaagagcactggagtgggttgccatttccttctccaacgcatgaaagtgaaaagtgaaagtgaagtcgctcagttgtgtccgaccctcagcgaccccatggactacagccttccaggctcctccgtccatgggattttccaggcaggagtactggagtggggtgccattgccttctccgcaataaacgccacagctactatcaattcttgtctcctaagctcccttaccccaggtctggcagctgtccccaaggcatagcctcttttctaagtctctgctccttgacctggaggcagtgcctccctcttctgacctggagaaaaagaaacaatctaagttcacctggaacctggagggctgagaataaagcagaagtggccattataacatcttgcccccctccctcaccccaattcccaacagagctacaaaggcctggatgggtcccctttgggaggccttcactcaacgacatgagctccttgcatccacacagcccccttctcagtgtctgacaacagggcaccaggacagcagcaggccccagggagcctggctgtgcccagccagcaggcaggacagtactgagatgtccacgcccccggggctggtttctaggaccctttgaagggctcatgtggggaaggcttgctaggagctctgtcagtgagtggggctgaagactgggtctgggttcattttgaggtccaaaattcgtacctggggcaggcctagaagaagcccagctttcctgggcattgctgtgttggggactcctgccaaccactgccctctgccctcaggcactggtacccctgcttagtgggcatctccagggtgcttccccgggggcggctgcctccttcagcaccttctaaatttagggcttgggctctgtgactcattactgaatctgctttgctaccctcctccaggagtgtgctcccacggtatttttatctcctgctgcctcagactgattaataaggccctagaatcctgcagcagccacacacacaccactgagagctccccagtccacccaccccagcttggctctggactgctctctg

SEQ ID NO: 37367 - DNA, 1098 bp, Bovine  19866880440698
  misc_feature (1)..(1): n is a, c, g, or t
nactgtcaagtagtagctgggctggactcaccttgaagtcatgctcattcacaagtctggcagtttctgctggtatttgagtaggacctcatcggtctgtcagctggggtagcctgcacatggcctctgcttgtgacctgggcttccttacaacgtggtgctgggctgtaagaatgagtgactcaagagcaaggtagaagagcatggcatgggtgtggcctagctttgtttttgctttttttaaagagcatggcatgggtatggcctagctttgtttttgcctttttttaagattcttttttaatgagcattttttaaaagtctttattgaatttgtttcagtatttctgttttatgttttggttttttggctatgaggcatatgtggggtcttagttccccgaccagggattgaactggcattccctgcgttggaaggcaacgtcttaatcactggaccacctcgctttggatgtcacatagtatcgcttctgctggactctattggttggggcagtcacaaaggtccacccagtttcaagggtagggaacataaacctcatcactctgtaggaagagtgtcagtaccacactgtaagaagaccatgtgtcatggaagatactgtgatagctatctgaaaaatgcaagctgccacactcccctggactgcttatgaggataaaatgagacagtgatgtaaagtacttctcccatgcctggcacatggtgaatgctcagctatagctgtttttggtttttactgatgtggccccttcactttccacctctgccaagaaccacagggatcaccacccacagaggtgctgtgcagtcgcatggccacagaagaccactgacagggatgcacagacacgtgcatgagcctgcacagctgaaacacgtattgtctctcataatcccacctccaagtgcgcactgtctgacctgagtggggcagtgaccctgtggcaggaaggacctgaggctccttaggcccttgatctctccccttcctgttctcaaagcacattccccagaattctggggcccatccagagcagccagtcccaagggagtcctgtggcttggagactgcc

SEQ ID NO: 37368 - DNA, 1598 bp, Bovine  19866880468803
  misc_feature (1)..(1): n is a, c, g, or t
naggtgcctcgggctgcagttggtcacggaccccagtgccccatgcacatgggcacacaacaacacacacacacaccaggactgctcaagagctgagcccatgaggggtgccaaggcacaagaaattctaagcaacagggacccaaagccccatgctctgaaaactctctgcctgttcagacacagtcatagagggagacccagtttgcggcttccaggttccaagaactcccagagctttgtgatctaagaaaatcagagtttccattgtaaatccctttattagaaaaatctgtgctttttacagcctatgaatgtgagagcttggagccctgaaaatgtcggagcccaagatcctaacactctattatcctaactgcctataacaccgagactctaggactccagctccagggtttctacagccctcagagcttgctggtctgtgggctgcatctcatgtttctgtgaatactggtgaggagagggcccctgtgagcccccacacttgccttccagcctccaccttttgttcacaccactatccatgcctaaagttccatcgccctcatctctgctaattaaatctgagacaactttgaaggggcaggaacgacaatgctgtcagggactacctactaagtgccaggcccacacatcttatttaatcatcattatattattagtccaactttacagttgataaaaccgcagtcccaggacaggaggtcatttgtctaaagtcacacagctagaaatagtagaacagtgacccaaacccagccccttgcaaacgcatgcctctgagaagagcccagaggggagagggctccctctttgacttcaggaccacactggagcaggtcctctcacgccagtggctccccaagttccagaaggcagagactgtggtctcctcttctcgcctcttcaagctggaggcagcccagagatggccacgtttcctgtcctgattgatcgaaaggagctggatccgccaagactccatgtgggaccggcagacatggcattttgtttctaggcacccgtcgctatggaagccaggtgctgccagcccaaggcctagcaacgaggccctgagtggtgcagggcggagggcaattgtcaggggcctcaaaggcaaccagcaagagagagagggagggtggaccactccgctttccaggctggagggctgtacccgctgctctggctgggctttgcgaggggaggaagggaggcagagaagacaggaccaggcaggtcctaagagacagagacccagagacaaagccaaagaaagacttacagagacagactaagggggatcagagacagcaaaagacagagacaccgtcagagagagggagattcaggaaagcggaggaagacaagagctgagactcagagaccactgagtcacgcaagtggtagagaggaacagactctcagacaagcccaactcctgcggtggggaaagggtgtgccagggagcaggaggcagccacaggggaatgacagagatggatggaagtgcgaaagaaggagataagcccaaggcaggaggcaatacagagacataataaaggaagagagga

SEQ ID NO: 37369 - DNA, 2787 bp, Bovine  19866880551913
  misc_feature (1)..(1): n is a, c, g, or t
ntaaggccctggaggaattcaggggcttggctaaggtcagcaagaaattagacttagaaattgaatcaagcttgggtctctgggctcccagccccacacagtgccacgtccccttactttacaccttcagggatcttcgactgagttgggcactgatataagaggtaaaggcctctctgagcccctcattctcccctaagggttcttcctggtcctggcgtctgctgaggctggaactcatctaggctgagaggagacatttagctccattgttctgatgaagacactgaggtcccaaggtaacagtgactcactcagtaacaggtcagaaccagactgggcctgactgcctggcccttagcttgtccacacttcccccacccaaagctgtcccttgcttctcttcatcccgctgtgcagccttgctgggcctgccagctttgatggatggccccacatctcagcctcccttccattcctttccgggtgctgggctgttagcctcctaatcaccagtcctgcctgtggttcgccaagccatccatctctccaaaaaacctcacccagcgcaggtgggttttttggggttcagcaggtcccccttctctaaggccaagctgaaagtgtggctgcaggccctactccaggggagtcaggggtcaggaagctgtttacaccccgttgctagagggccagaaatccccacgagaacttccaagggaagtcatacatgcatacatgtgcatacacacatgtgagcacaaacacttgctcacaaaaacagtattaaaaactttcatgtatcaaaaaaattactgtatgccaagcattgtgccagagctctgcaagtatgatctcattcagctagttgattactgttgataaccccaatgtacagataaggaaactgaggctcagagaggttaagtaacttgcacagagtcacatatccagaagatggaggaactgggatttgaactcaggtcatattggctcacttttgtatttgccacttctctgttctactgacttacgcatgcacacaagtgcacacacacacatgagcacatgcacacatgcatgcacaaacaccagcctccgtgtggacccctgccccgcctgtctccctggacctggttcctaaggagtagagagagtgctgggctgaggaagagacgaggggtcactacttattgtcccccaggctgcccccagactctcaccctgacagtgacactgatcagccatggaggctgcatggaggaggcagcctccagttagtaggaagaggaggctgagaggcagtcaatcgattgattacccctgcagcactgccttccaggaacctgggcccaggggagtgtggcgccatgggtcgatcatctgggatgcagcccaggttccacatgctgggggtgtgtatgtggagtgaggctggcataggtcccctgcctgcccccttccccctactttgctgaccctacaccttccccctgctcttcccgctgccccccaccatgggcactgcagctgggaatcaagctacctgttcccagacaccatgtgcacccactcctgtgggattactgtgctccagaggctgatcctagggttgctgcttcaaggtgaggagaggtcaggcagggaggccaggggccaggagttgcagggggtgggagtgagccttcatagacctttgtggccaatttaataagataatgaatgtaaagtgcttcgtaccaccagggcatgcaataggagcttagtctttgctggttcctccctcaggagtctgcagagagtgaggctgatgggggtggatgggggtgcctctgagggcacctgagctcccagagggactgttgggtgccactgacagtgttaacaatggcaggaacgatttagctctgaaaaagaaagagggagagagattagtacctgacaagtgtcagagtctagccaagaattatcatctttctgacacagggaggggaacagctggtgctgggaggagtggctgggaaccttccccgccctcctactgggaagggcccctgaacaggtctgtgttgcccccttcctggatctgcttccattctggcagagggacctccaaaaaggccctccaacttgcactggtccccaagagacctgggttcaagtcctggttcaggcacctgctggctggtgctggttagggcaagtcactttccacctgtcttctctgtggcagtcctctctgagggcctctgtcttctcatctgtggcaagtccccaagaggattaaatgagatgtcacgtgtccagtgcctgccatttccctgcccacaaagggccgtgccccctgggttccccagagcctgccttccctgttcacagccccaagagtgacagctgtggtccatctctaccctggacgccatccgctccaccttgggtccccactgtcctgactcagagcctgttgttgaggaagaagtaggcaggggatcgcatcacaggctccgtcatcttctctctcactgtggggagaagagtgggaggacagtggacctctctgtactgacggtgactccatgggtcaccaaggcccggtctgactccgatgggtgttggcaccgggctcaggactgggattcccagggcctgacttcctactgttctggacactgccttactgtacgagcttgggcaagacctgtcctagggggtggggtaagagagacacggaacctctctgaccagcctctcttctgagggtgtgtacctggatgattctgtgttctg

SEQ ID NO: 37370 - DNA, 1541 bp, Bovine  19866880590884
  misc_feature (1)..(1): n is a, c, g, or t
natgggctcttagtcgctagcccctctgcatctatccagccctggtgctcagggcacaggacctggtcaggcaccaggaagctcaggctgcagcaccagcgctgccagccctggcttcctgactctggccgagacctcagccctctgccctttgccttctgcagtcaagatgctgagctagagggtgttcgaggtcctgattctctgatctccgtgactcccagatttccctgggtttggtttgtctgcagagtgtgtgccaggctgagaacaggatcagttcccatcctgccctgctggtcagccctgagggggccctccaggcagtgggaatggttgccagggtcaggggttacagattctagttttatctgttgcagccaaagctggggctggcctggcccactccccagctgacccccactgaccccaaaactgagtggctgggaattgacccaggttgagctgaggcagctgtcaaggcagccctaaaattagcttcaacagggatagggagagagctctggcccgggcttcaggctccaacgtccccgagggactgagcccacactccactgaaggctggagaggtcagccagggttctgccagcggccctaccatgatgttggctggagagtcacagatgagcataggcacatttcaggaggggatttgaagggcaggcaccctctgccaattgcttgggccctgatgtagctcccgtctcccagcccatcagaacctgggagggtccagggaaggaccttgctatttatattcttctagaacaggttgaggcagcctgtctgtcttcccaaggctgaattggatggcctcacacctaacatcagctcccaaccacagaggaggagccagaggtctaccagcctgctgtgggggtaggttgcagatccccagtactaggtctaaagtcagctcctcctgcttaggaacagcagctggatccacttccctcctctctgccttgtgttctgaggaacttgcagattctaattccaaaggtctggggtggcacgtgaaattattcaagattctaacaaggtcccaggttggtctgcagactactctgatcacagatcttactttcccagccagtctgggtggaccccaaggccagacttcctttctttggtttcataggtattcctcaaccaaccccagtagagcctggctcaggtacgtgggcacatgatgcagcaggtagctgactgttttattttgtgttcctatgtgggtatgtagatgctcatggcagtcctggtgcctctgtgtatccagcttgtgactttttacacttatagagtgtacaaagatgcaggtgtacaataatagcacacatcgctaacattttaaaaaacagtcaacttttagtcaggtactaacaagattacatataatgtcctaagtctcataacaactcttatgagttatggtcctattctcagatgagaaaattgaggctcacagaggttagatgactgctcaaggtcacagactgttaagaggcagccggctgctg

SEQ ID NO: 37371 - DNA, 1382 bp, Bovine  19866880596457
  misc_feature (1)..(1): n is a, c, g, or t
ntttttggagcatctcggtgcccaaccaaccccagcctgagggggaagtaggggctccaggctgcagagggaggtggctgagcctggggaagtcagattctgagaattgtttctggggagctggtcaggaaggggtgtggcagttcaagccaggatgagcaagtgtgcatctgtgtgtgcacctctggttatctgagattgtatgtctgaggttcaaagtctaaccacagtccctccagctccaacactggtcctaatcttggctgctgcttaaccatctcccccagcctcacaactgaacttattgctcttgtcctgggacacttctttgcaaccttccaagctgttgatcctctctggggatgtgaggccagccctctacctgtaggcagcctcacttctccactgctctaatggacaatggaaccctccaatatgagagaggagtcacccccaccgacccactgggagctgcaaatctgtgggagtggagtgatcctggagggctgaactcagagacattgcaggtccagtcttctttgtggtcttggacaaatcttaaccctaaacctcagatttctcactcataaagtgggcaaaatggcatcctctttagatttgctaggggggccagaacagtgccctggggcttggggtgggggttttgttgtgagaacaaggccggcaacttaggtgatccagcaacctaggtgattgacctaggtgaccagtagggaacagggagagggaaaggggctgaggagtcaggcctgggcctcaccctctaccccaccctgaaactgatgagaaaagaggaaatgaccagggatggggtggaggggctgtattccagggtctgtaacagaaactaccaaactcaagaactttctgttctggcctgaggggaaacttacaacaacccaggggaagtcaggactgttttttagtactgctacagaaagttagagctcctggaagggaagtatcttgccaaaggccacaggctagtggagcttagtttgtttcatcactctagggccaggccctgtcttgggggaggttgaatcaatccctggccccttccttcccttgagaccctcagcaggcgttggccagctatctcctttcccctaatgggtgtccttctctgtccctgggagagcaggtcttctcctgggagggtctgggggttatgctcttaggaggctgtgcaagggctggaggtcctgatggagctacactcatcccctgcaggcaaggcagagcccagcctgccagtggctcccccttctgcatcactggactcctgcagccctcccagccagagaggtagcttgtctgcctggggtctgcggaaaggtccatcttgctccaggctcacc

SEQ ID NO: 37372 - DNA, 1676 bp, Bovine  19866880617692
  misc_feature (1)..(1): n is a, c, g, or t
ntgttttctttgtaggggaacttctagtccccggttccagttctggagttaaacagtggcgtttcacacgcactcaataggccagatggggatatgctttttggtcaagttctgaccattaaccagacgtcctatagagcagggatccccaacctctggaccacacagcaggaggtgagtccagccagcgagtgaaacttcatctgtatttagagcccctccccattcctggcattaccatcctccccactcccaccccctcccttggtccgtggaaaaactgtctttcttgagactggtccctggtgccaaaggggactgccactatagagggtccggacctgtctctgctaccagctccatgtgaggctttggtcaaatcccttcccagttcagcttccccatctgaaaatgaggctgcttaacatgttgcctggaggtcatactagctctctgtgtgaggaggcccgacctgaccgtgtgggaagggtgagcagccaccagagcccagagaaatgaccagggatggtggaggcgagcagtccctctgtcctccgaaccacagcaagctgcacctggaaccctgcccaagagtctgggaacattcagctgctacagagaggagacagggaaggagttgtggaggccaaaggagagatttagatcggctttttatggagcttggagaaccacaggttcaggaaaacaaaggactcttagaatcacaggcttttaaaactcctggcatctcagatgggtcctcagaatcttagcattttaatccctgagctcaagcacctcagagacagacaatcttgttgaacctctgatagggaagccggagaactgagtccagagaagtcctgtacctcatcctaggcggcacagcacaagacttcagtaagctgggtgagctgtggtgacccaggggcagggacataggccccacccactgagatgcctaaggtggggtggggatcctgggctgcaggatcagagaaaaggggctgtttgcgggggatctgagcagatagctgcctctggggttatgagggctacctaggtggcgctagtggtaaagaacttgcttgccatgcaggagacatgagacccgggttcgatccctgggtcaggaagatcccctggaggagggcacggcaacccactcgagtattcttgcctggagaatcctagggacagaagagcctgacaagttacggcaagagtcagacagacaggactgaagcgatgtagcacgcacagggttacggaccagaaatggtggcgccctctgtggatacccttaagttccaatgtgactgtccaaagcaagaggaaatgtcatggctcagacttaaatttcaagactctgcacttggctaaccccctaactggtcaggttctatccctcagaaggtggactgtcctcctgtatctgttcctagcctccagtgggaggcttggtttaaagccattgtcaggctgtgtggccttaagctagtgactttacctgagtgcaaattcactctcagggcattgtgaggatctgctgagaccccacatgggaggcatcaacttattctacgctgcggggctcagaacctgctcctttagtccccacgccctgtgtcctctccacagcccagtgtctgggctctgccctctctctccagtaa

SEQ ID NO: 37373 - DNA, 1377 bp, Bovine  19866880637093
  misc_feature (1)..(1): n is a, c, g, or t
ntcgtgtccgactctttgcgaccccatggactatacagtccatggaattctccaggccagaatattggagtgggtagcctttcccttctccaggggatcttcccaacccagggatcaaacccaggtctcccacattacaggaggattctttagcagctgagccacaagagaagcccaaatcagtggtgggaactggctttttccacacctaccaaataactaggacttgctccttggaaacaagtatgcccctcctgtatttatattttttgaaggtcaagagtaacgagaataaatggccacaaataagtttttctcccttgtacctcaaagacttcagtagtgatcaagtttcctgggattctgaggtgtacattttaactgctttatagatgttaatacaatctaatcccttttactgttactaggattaggactgaagaaatataaagctatttttgattaatatggaaattagaaattactttcaagagaaattatttctgaaatgacttgatctttaggtagtaaaaatagcagtgtatcaaaaagctagtagaagactaactccttgggtcaggaagacaaagaggatgttgtcgctgtgagcaggggggacgcttatgcaatgaagacactcccaggtctgaagctcacaaataaaattaaaaaactgtccctccaacccttatgggtaaccaaaaaaccaaataagcaaaacaactgaacaataaaaacaaacaaaaacttcaaacactttaattctctcaaaatgagaaagaagagggcaaaaagaagaatatattttgaatttgtaatatgttctgagctatcaggtacttctttatctaccctaactttatgaaatatattatcagtctcattttatagatgaggatattgaagcttagatttatcttacaccactagtaaaaagagaatggcaacagaactgggatggctgaatgagacaaagtccactctaccaacctccctcaaaacatgagtctgctttgggtaaacctctggatttggctgctattttcttcgccaacattcttatttcagattcgaaacctgagaaaacaggaaattactcaggagaattgctttgatcaaagatggttcaggttttttttttttaaagctattctgttcacactcagtgtcctaatatagaccatgctcacattactgaaaagcatcacacaagcactgaattacagagttagaagagatattagagatgattgagtccaatttgccatccagcactggaatatcttcaataatggcccgcatagctggtcacacagcctatgccagcacactttctaatgctggtgtattcagaacctcttcaggcactcaaagctt

SEQ ID NO: 37374 - DNA, 976 bp, Bovine  19866880646449
  misc_feature (1)..(1): n is a, c, g, or t
nctcaccacctgctcccttccgctggaagagctttcctgagccgggaaattccctctcatagcaagtgacagaagctcccagcattctgatgccacgtgcactgcccacagcaacatggcaggaattagatcccatcgtggggccaaggctggacagggaagacaggtgggtttagggattggagctgtccgtttaggagggctgaaaatcagagagggagtacaggtcctggggaagcttctctccacacactgggccaactttggttgaaagcggtgctcagctcacccatgccacagtacgctggtgtgtggatggatgtgttgcagacaggcaaagggtgggtgcccagagagaaggcaggatgctcagggcctctgccagccctccaggacactcattttggcctacaggccccccagcagggagcaggcaagcatgttctgttttggcattaactaggcaagctgtgggaaagtaagcagcaggcttcctaagctgaatagggtctgctccctccacaggccagtgcactgtggttatagagcggtccctccccggcaacaattctctcccctgctccctgcctaaccccccaacccccagctcagcctggagggtcttctccgtggaagaggctcccagatgggtagcatcccatgccttccaggctgggaagccccagtgtcccagaagaggaaacgaaggctgagggagggcagggacttcccgggtcctcagagtgagtcaggacaaaaccaagactgtagctgggctcaacctcctcccaagggaattcctctttttgtgttttattatttttttaaacttgcaaacaaaaccagaatgaaaatgcagggaagctgaaggaaaacacatgcacacacagaggaaactcatatttgtaggccagtatgttgtaggcattttatataaacattcccatttaatttccccgtcacaacccctgcaaaa

SEQ ID NO: 37375 - DNA, 1257 bp, Bovine  19866880657880
  misc_feature (1)..(1): n is a, c, g, or t
ntggctcggtggtaaagaatctacctgccaagcaggaaatgcaggtttgatccctgggtcagaaagattctctggagaagcaaacagcaacctgctccagtattcttgcctggataatctcatagaagaggagcctggcaggctacagtccatggagttgcaaagagttggacacgactgagcaactaaatggcagcagcaaatagtctttactatcaatatacaccagacaactaaagcactttttattaacttgtttaattctcatagcaaccctaggaggtacatacttcacaatttaagatgaagcaactgaggcacagagaggttaagtaacttgcccaaagtcacacagctgggaaggggtaatttaaatatagtctagacctgcaatacaataacttctagaagccacatacaggtactgaaactccagatgcgaccatatagtgaagtgtgctctatacaacacacactggattctgaagacttagtaaaaaaaataagaacatgaaatatctcaataactttgtattacataatgaaattatagcattttggatatttggattaactatggtattaaaattaatttcacctgttcatttttaatgtggctactagaaaactttaaattgcatttgtggcttgcatcacattgctaccggacagtgcagctccagactcttaaccactctacacactgcctttcaaaaacgacaagctctgactgagcagctgctgcaggccaggcactgttctcaggattcaacatggattgatgcatgacagcccaaccaggctactggaatgaccagggctgggaaacaggaaactacctctcctccctgagaagggcccagccccctccagggcctctctctagttcctattcctgcactaagggcttcaggccaagatcagactcagggactccgcactgacactcctctaggacagcctcattcaaggcattgaaagcatgagccagaccaacctcaacccacccttcaggaatctcaggcttgacggcatcagataccacccagccagcgaaaaacagcccacagggccctcaccaggctgggggtcggggaaggcttcctgaaggaagcagtcctttgaaaaaagaagtatggagcagtgcgctgctgaaccatgctagggcctaaaaagacaaaaaaatctgcagtactaaacctctttatttaaattttggatattttgcttatctggatttttttcattattttcatt

SEQ ID NO: 37376 - DNA, 2162 bp, Bovine  19866880767540
  misc_feature (1)..(1): n is a, c, g, or t
ntaatgggcccaaaatagtacttccccctgctctttcctgcaatctggcctgtggcttcaggtctgtgaggacagaagagagacttggtgtttggcaggcatgcaaaagatgtgacgagctctcggaggtcacctgggtcattttttttttttacttttctgaccataggaaaccttcctgcccggttctcctccacacccaccctcagcctcagtgctgccttgctgtgtgacgtcaggtaaatctctgtccttttctgtacctcatcttccttttgaggcagatgtatagctaaaccctgctgtttgtatctagcccaaggaaacacctggagaacccccctgggagaaaaggtggcttttggccctgactgtctcctctgaagtcaggatgtccttcccaggctgggtatgaggaacatgagccagatacgtcatgagtggctggatgtgtctttggctgcttggactgtctcgtgtcctccagccaccccatgtcactgcccttactctcctccatgaggcagagacctgagcagacagatcacatgcacatcccggctctactgcttagtaggaaggcaaccttgaggaaggcgtttgacctctctgaacctcagtttcctcatctgaaaaaaaggataatggtaccaacctcccaggaccactgaggatgaaactggatggtccaagctcctggcttgcaataaataaatgggagctggggctattatttagcaacattcaagacctacagggaaaccgcaactgaattctctagatttaactaaacaaatatttattgagcacctactttgtgtcaggcactgcaggtggcctggggatggggcagtgagcaaacatcccccttgcagagctcacattctggcttccctgccttttcatttttccccactgctccagctgggcctacacctcagacctcttgctcccggtttcctgacccttctttgcattgactcaagctgttccttcactcctcacatcaaacccgagtcccattacctccaccccagtggcatggcttgtgggatcttagttccccacccagggatcaaacctgggcccacggcagtggcagtacagagtcccaaccactagactgctagggaagtccctggctgtgccctttaaaacagtggttctccgcctcactagcagaactaaaccacggtgtcagaagccagcatggtagttaccctagaaggggagagtaggtgggggtacgtgggagctttcaagtggtggaatgttcggtttcttaatctgggtgtgtttattaataaacttatctagcagtccactaatgacttgagtaccattctatacaaatgttatacttcacttagaagttttcctacaaatatgactgacacttgggtcagtcccaccctcagaattctgatctaattggtctggaatgtgacctggaccccccaggtgattacaatgtgcaggcaagatttgagaaccactgctttggaggagctgatccttctaggctctcccctaggccgggtgcctagcgatcgatcgtgcatcccaggaccgccctgcccacagctgacctgctcagggctgctcatctctccacaggctgcccggtgtcctgggatgtggccttctaaggagcagcgggctgggccgggcccattcctaccgaggcatattagggaaaatgctgaggatctggccttggataaccagtgctgaaagttaagtctgtccagaggcagaagagggcctcaggcagcagaagttgtgaagcagaaaatggcagctggctggtggtgaggcaggaatcagagactcaaggtggagagtccaggggtcttaaggtggggcagcagtacatgggccactgtgctaacagctatttgattctagttcgtttccactagtcagcgccccctttatttctgggcagaacaaatctcttccttgcaatccaaagatctgtgcacaccaaccaacagtcctgtgggggaaaggattatcaaccccaatttacagatgacgagatggaggctcagagggaatacaactcatccaaagctgcatagccaattagtggcaaagtctaagtttctgttcagcttcaaaacctgtgctccttctatgccatttcatcaaattccacg

SEQ ID NO: 37377 - DNA, 1327 bp, Bovine  19866880779780
  misc_feature (1)..(1): n is a, c, g, or t
ntcatgtccgactccctgtgaccctatggactgtagcccgccaggctcttctgtccgtgggatttcccaggcaggaatactggagtgggtagccatttcctcctccagatgatcttcctgacccaggcatcaaactcccatctcatgcgttggcaggtggattctttaccactgcaccacctgaggttgcctctatgagaagtgttcaaaggaattgggagagttcacccagggaaaaaagcagatttgggagggtacaatccatatgttccagactccacagggatagagaaagagatttctatataatgtaagcctgactaaaatgtcccctttgaaccaggctggggacttccagagccttgctcctgcgatgcaggcaagcactcttttacagtcagacctcttgagattctttgggggaaatgccataatacattcctgtggccctggagaccgaactggtacaggtctcagctgcgtctcaagaaggaggttttccaggcagagtggcccctggagggagtgagctcctccatccctgtgactgtgcaaccaggtgctggctcccttccatcgaggaggccacagatgggattcttaccctgggaaggaattaataatagccaccatttatttcacctcttccatgtttcaagctctgaactaagcatattattttcattgcttctaaccctcaccacaaaccctagcagtacatatgacccatttcacagatttcacaatctgaggcccagaagtaaaatgacctacccaaggtcacacagttaggacaggagagcgaagcctagcccctgactacctctggctctgaagctgtgctctcccttcagcatgcctgcagctatatagtctcctggaaggaatgtgattctaagtttaagtcagagccaggactgaacgttgacctggtacagatgtaagagtgggcattgaaagacaagctattctcatattccacaggactcccaggagaaacctcaggtaaagtatgcaccagcacttgagcatggctaacatggaacagcaccccacctcacccactccagcaccccagaatggacacccacgacaggttagtactccattcaaagctttctccagagaaggtggccagcatcccatctgcccattgtgcaccaaggcaccccttgctgtagtggggattcaaaacctcctctactcccttccttgctttgtcattatctcccactcacactgttgcagactgctcgggactacctgtctccccatccagatgccagctatctcctgcctgagccccgcaccccacccctgcaagcca

SEQ ID NO: 37378 - DNA, 1445 bp, Bovine  19866880820796
  misc_feature (1)..(1): n is a, c, g, or t
natctgatgcaaggttgattcaaccatttgaaaatcaattaatgtaatccatcacatcaacaggccaaaaataagaaagtcacattatcatattaacagatgcagaaaagcatctgacaaaaccctaacacccacttaggataaaactctcagtaaactaggaatcaggcttcccaggtggctcagtgggtaaagaatccacttgcagtgcaggagatacaggagacatgggtttgatccctgggtcaagaagatcccctggaggagggcaaggcaaccctctccagtattcttgtctggagaatcccattgacagaggagcctggcagactacagttcatagggtttaagagttagacacaactaaagtgactgagcatacatgcatgcaaaccaggaataaagaggaactctctcaacttgataaatactagtattatacttagtggtgggtgatttgaagctttcctgataagataacaaggcaagggtgtcccttctcactactcctttttgacatcatactggaaatactagctaatgtaataagacaaggagaagaaataaaagatatacagattggaaaggaagaaataaaattgccttttgtttgcagatgacatgatcgtctatgcagaaaatcctaaagtatcaacaacaaaaaaaccctccagaactaatgacataattgcagtaaggttgcaggatacaaagttaatacacaagagtcacttactgtcttacaaacgagcagtgaaaagtggaacttaaaatcataataccatttacataatcatttaaaaaatgaaatactcagttatatatgtaatgaaatatacacaagatttctattaggtataggacaaaactctttgcatcatagattaaatcattaaaagcctctattaagtagtgaatgcaaatattattagctttcatagacaaatatttatcactctccacctacttttctgggcaacctgccaagaatttaaaatatatcacttaaaatttctatttctttaattgttccttcctatttgggttaccagacccattgaccatttgtgtaactaaaggaattaatcaattaaattacatacaattattattgttctcttaaaacctgactcagcagtatacagtatagataaaatagtattttcagaataaaaaaatatttctgaattttaaaatcaaacatatagcagagactgctagctttactggtatccatgttttcccctccttcaaggcatacacacagatgagatttttccagcctcctcttaaattagatttgaccgtgtgactaagtttcagcaaatggaaagtgggaagaaataatgcaagccacattcaggtctggcctatcaatacttcccctgtgcaaggaaaagactcatgccaaacaaaaggaggtgaatttgaaaagaaactaaaga

SEQ ID NO: 37379 - DNA, 1315 bp, Bovine  19866880868394
  misc_feature (1)..(1): n is a, c, g, or t
ncagaaaaatcctgaggctgagtggaaacctgaccctgctgaggggcatgggggtgcacagtagtggggggtggacaggaatgactgggcttgtgcaggaggcctgcccaggctgagtgctacagagggcagttgtctgtggcttaggaagtgttaggaaagaaaatgtgagggagtttttgcttcacattgtggcctcagaaggtggaattttagatctctgaaagctgtgggcaaactgcgtcctcagccaggcccatccctagggccttgctcctccacacctgccagccaggaaggcattctatgggctcagaaagccaaggccctggactatgtccagtcctggcctctcacagctctccttcacgccctgaggatcctggcgggaagaagctgagtcagaggagttcaaaggagggtgcctcccggaggggtgcaggtgcactgaggcctcacttggccctcagccttctttctgttctcttgctctggaaacgatgggtggagtcctcatcctcaaaagtctcctgggattatgctcgcgcaggtcaggtggcaggggagggtctcctccccatcccactaccacaccagcctccacagctgtcccacaagtaagggagtctgtagtaatgaggtgcaagattcaggaccatgggccctccaaggcttagagccaggcaggcgggaattcaaaccccagcactgccatgtgccctgggcaagttcacctctctgaatttcactttagttttctcatctgaatgatgagtgactcaaagagttatgaggtttggggagtgtccatcgagtttccggtacatagttccctccgcttccctctcctaaagaggttgaattgatggggccaagggagtaacagcagcaaatgttggggtaggggttgctgcaaggcagtgttgggagcggggaagtgaggaaaagggagaagccctgagactgtccgggcctgcacttctctcctccacctagaaccggctttctagaccagccagggcaggaaccaatgacccagcgcaattacggcgaagccccgccccacagcaggccccgcccccgcctttctccatggtgctgatcggcgcgtgtcgcgttcacaggctctggcccgtagtgtgccagcatacaccattttggggggcttgttgcggggctggagaaaggtgaggggaagcaggacgctcctgagaggcggggggccgcccaaagcgatgggaggatacagcctctgggattcggcctccgccccgcgcccaccgcctcggaaggactgcaggctccaaaggctcca

SEQ ID NO: 37380 - DNA, 1703 bp, Bovine  19866880935067
  misc_feature (1)..(1): n is a, c, g, or t
natggggctgggtaggcagggtgggcaaagtctggaggcatgtggggatgcagggggctcagtggtccccacctagtggagccgcagggtccagataggaaagttctttctagagtctacccacagtctcttctgttccagcagtcactgtggggccccagagcctgacaggctaaacgggtttaccgcccatttccacccaggacctcctgaagcatacgcctgaggaccacccggactaccctctcctgctggacgcgcagcggaacatcaagcaggtggccgagcgcatcaacaagggtgtgcgaagtgctgaggaggcagagcggcacgcccgcgtgctgcaggagattgaagcccacatcgagggcatggaggatgtgagtgccgtctcgcctggccccacccatgcctgtgtccacatctgcggccacctggaactgtgctcatggctgcagtgtgtttgcgtccatcgcggttcgcatctgtgtcctcccccatgtctgtttctggccatatgtcccatggcctgatgacacagcattgagagggtggacaacgtgttgctcctactgacttggcccatgagtggggccaagggtcactagggtctggggaggggaaagaattcataatgagccttcaggacgccttgtccctcctgccccacagctccaggcccctctgcggcggttcctgaggcaggagatggtcattgaagtggtaagaagtgtcccattgtctgcccgcctgtcccccacctccctgcttggttaccttctctgctcacagctgctgccttctggcctcctgctcttccaccccagcaggagcccagggtcaaggcccagtttgcttctgggcatcgggaaggccctcccctccctcgtcctggctgtccgccttgggcacggtgggcaggagggagggcctctgggcctgaatcctgtctcgggccccacagaaggcagtcggtggcaagaaggaccggtccctcttcctgttcacggacctcattcgtctgcaccaccctgaagcggaagtcgggctccctgcggcgcagctccatgagcctgtgagtggccagggtgcttgaggccattgtccttccctgggcccactcccccgccttggccagagcacccctgttgctccccacaggtacacggcagccagcgtcatcgacacggccagcaagtacaagctgctgtggaagctgccgctggacgacgcggacatcatcaaaggtgggggtgctgggtattagggggtcttcctcggagaagcccacctggaggatttgagccgtgaccaggctggctggctgtgcacctgctcttctgcttttgggcctcgctttctcatcctgtccaagggtgctggcatgcaggatccagtttgtgtcccacggagccagaccgaccaccttctgattgggcaggggcctgccgcgggctggcgggggactggggctgcagtgctgcagggagcgcagacacgcccgtagcggttgattcactgcacaggtgcctgtatgcacctcatcttagatgatggcgcactgttctggtccagcagtttggtgcctggggaacaggcacactcaactcaggccaatcagaaagctggctagaatgatcctttggtctggggctgagactgtcgggagctgaggcagcttcaaagcgctgttcctcctgcgg

SEQ ID NO: 37381 - DNA, 839 bp, Bovine  19866880979426
  misc_feature (1)..(1): n is a, c, g, or t
ntctctcctagcacagcacaaatcctagtgggccctagaagcagagaagggggacagtcctcttgcctaccagggacccatttttgtatgagactcaagaccaggcctcgttcagggcacagtcacagagatgctgatcatatgcactcgtacagtatattactgtggccacgaggacgtggcaaagatgctcatctttcttcaagtggctttggcttatctgattgagtttaatcagatcatgttggctacataaggaaagcagcaggagggatttcaggagaggctggctcctccccgcagttggtccccaaactgagaaactgaaaccttattggaaaaaagtagactgccctgagtttagcaccgattgcaataatgcacatctcttccacagctaacagatttaaaacaattaacagtgtcctttgtattaatatttatgccattcatttagtattagcagagctaacatgaaggggctgaactagtagccgaatctcatccatcacatagactaatagaaagggggctgcggctaaagcagaaatggagcttccagatctgcaatgagccgacttagtgttctttttatatttggggtatttttcatcttaatttttgcagcatatactatgatgaccagtatccttagaatttgaatgtcttgataaaactggggacacatacttgccttgtcaagcttctctactggagaggcacctagcattattttattcccaagctagtccactggcccaggcagccaagttgtggctggcccagaccagcagccacccaccacatgaaatgcagcttcccaggtcccactgacctga

SEQ ID NO: 37382 - DNA, 1373 bp, Bovine  19866881020728
  misc_feature (1)..(1): n is a, c, g, or t
naacagaggttagagaggcaaagccccttgcctaagacccccagctggtagatggtagtgcagaaactcaagcctgagtttgtttacttccaaagcttgttttcttgtccctaggtttgggatccagggctgacaatgcaaggaagtagggggaggaggaagccaagggccaactccaaacaccgccgaggctcctagctacccggttgtgacagcgacaaagatcaacagaaacgaccttgggacagcaggatcttgcctcctgttggcattttttttaaaggtatattggtccacaccctgcaacaaagccacacaaagcaaacagaggtgatggcatggcttctggtgttgctgagatacccactcccagtggtttcgggccaaggcgccattggcttcagaagctcagattcttagcacgatccaggagcttagactctctcaaagctctagcatggacagggtctcctaagctttcagtccaccccaccagaagagggctccgcttcacagactccccagctgggttcatccaaaccccactctcacaccctcactgcttatccctagaagaagctccttctgctgaaggactgcctttctcactctgagctgagaccagcctcctaggatctccccaagtctcctttggggcacaaagtcagctgccctatggccccaagtggccctatcaagctgggaggacagtgactctgcatcttctctgctcctgatctaaaaccacctgggcaggggcatcagtgccaaagtcattcctgagacatgggcacaaaactacccagaagagctggttggccacctcccacattctaggctttaagcctctgctaatgcatccagatagcaaatccacctttgtgctggtcacgttccactgttttcctctcatcttagaccccaaggctttataaatttgatctaagtacaaggtcttcttaaaatttccgtcttgtaaatattagcaattcatagaggtatatacagtttatgtacagcttcttctgcatcatctcctttcatgcttagtgcagtttactggacctcacagagatggctgatgtgaagtgctccctggtgagcctgatcatgtcagggggcccagcaacagctgctgagatgaccatgagcattaggtggacaggatcctctgctccaagcagtgatggatataagaccatgggagccccccaaaatgagaccgtgtagcctacatgagggtccagaggggttcctgagggctgcctcaaaggcagggttctaagggtgagtctgattgggagcccgcagaaggggagaatgagggagactgtcggtttaggggagtccttcctaggcagagagggagccag

SEQ ID NO: 37383 - DNA, 1375 bp, Bovine  19866881042104
  misc_feature (1)..(1): n is a, c, g, or t
ngtccacagctgggaactggaaagagtccatagcagaactaggatctcccacctgtccgagaaagcaagatgttctaccttagtcttttcagtgaaggcatctccttaggagaagcctgggtgagaccctaggtgaagaactctttcaccttgtcactagactcccgactaccagccggctggcccgtgtcagcctgagattcctgggcaaggtgcactgggaaaatcgtggtccaaggcctttcccggtgtcccctccccttgccctattcccgtggttcccccatctctgccttctccactttccccacacttgcatgggcttccagcttgggggcctggcttcagctgtctgagaccctggtcccgcattgcagggaagtgaacctgggagaaagaggaatgttctctttctctgagatgggtctgaggttctggtggacactggggcctgcccacacagaggcattcctccaccagtcaccatcccctcaccgaagcaccgtgcctgctctgtgggaggagtcccaggcaagacacacaaccagggccagaatcttgacctgggtgctggtcctggctctgtctctggctcattgtgagcccttgggccctagtttcctcctctgtcaaatgggagtttggcagaggtgatttctaaaggctgtccaggccctggctctctaacactctatgtgtgtatgtctgaatatgactgcctgtgtgtgcccatgtgtgtttaccacacctctggaggaatgattagcagtgggatgatggaggaagggtattccagatagagacccagcttgaggtgaactgtgttggccacagtaccattgagtgcatactgggaagccagggtattgagtgtttcctgttgtggggctgaagcacagacagggactgagggagggggcactggaagctcagctcagctctctaggatatgggggagaccctccccggcagagccatcctccagtgaaagggggtgcctgggaacacctgtacaacatgtgagctaaaagggaatagttaggggcaagagtgggcagaggacactcctgcctaccggaacaagcactcctggtcactttctgcctctttcagaccagggctggcgcagaggaggcagcctggggaaggctcatcctagctgacttcctgtgacccagagccccagctgtccccacctccctgtctctggagcccacagcattgcctgccctgagaaatgctggaagctgggcgaggtcccaggctggaggacctgtttttcctgtttcccacagagctccctgcagctcggtccaggcctgtgcattcatgagtgaggaacctgagctggagctgagcatcctgacagcaagag

SEQ ID NO: 37384 - DNA, 1197 bp, Bovine  19866881103317
  misc_feature (1)..(1): n is a, c, g, or t
nacttcttcatactttcaatctgttccacttctaaccaaggagtgttgcccctttgttatttttgaaaaacaagttctttgcttcagcttgaaaaccagctctttgtgtctggtggcaagtctctcactctcttccaggtccacatccaggacatctgctgtgtaagcgagtgttcggtgtgtgtgagtgtgcacatgtcaacggcagcctcaggggaaaggagcaaacactgggcgtggacattaggagagcaggaggttctgtgagggacacatgtctcagatactctagcagaagttacactgtaagtcactgaaagttacaaagagaacagaggaaattctgttcccgtcccaacctggaggctgaactgccccagttcccagaggggactccctggacaatcaatcatggacaagctgagcccagagcaattacggacatggaaaggccagcaggtgttttgagtttattttttcccaagtagagcctcaccttccatcccactcatcactactgtctccactttctccttacctggagcataactggggctattggtggggtacaggctggggttgtaggcaggggccgcagctggataggctgtggggtaacctatgaaaagacagaaaaaaaacaaaccctatttagttgggcaagaagaaagatttctgagaaaatggaatccaagtcccaggcttggccttcagcctcttcatgagccatttcagaccatatatgtgactggttttagccttctgagaaaaatagaaaatatatacatatttttctattttttaaaagcagtataagatatatatgcctatatgctcactgtaaaaaaacacaaaaaactgaaacactatataagtatatatggtaaaaggtgtaactactttcacattcctgccacactgctctcctccgcagagacagtaaaagtttggcatttaagtctctggatagttttctatgcatttttatacacatatattcagtggtgtgctggtaaatatttaacaactggcccaaggaaactgcagtgaagcctatttggtagcccttgctgagttccatgctgtaaatactcccaccatggctggtttcaagccagcaacgtcatccaatgaatagttgagaagagatgctcacaagggccctagagagcccatacaagcctatccagtccacca

SEQ ID NO: 37385 - DNA, 950 bp, Bovine  19866881112627
  misc_feature (1)..(1): n is a, c, g, or t
natgagttagggtccaaggacttagagatgtgggcataatgtggctgcatatgtcagagagaaatgccaagaaaataacctcctgtgtaacctgggtttgtgcctcttggctgcaaatgtcaagaggatcgatccacagtgaagaacttaggactcttgttttgtgtagatagttacaatcagaaggactttcatcctctttatcagaacttccagattcaaagctttccttgtgcccatatagtttattccagttccgtttgactgtcaatcctctataatcacaataccaatcactacctgtattaaagaatgaaatgcattttcataaccaagagagggcgatgtcacagccccattttgccatcagcatcttttgggtgatgaggtcactggaggactgggagcagtggataggaaggaactttgccctctgtgctgtgctgccccgtctggtgaggataccctctctgtttctcctccaggagcagcagatgataaaaaccttcccccaccttctcaacgtcaatgaagacccgcagctcacgggggttctcaagcacttcattcaggctggtacttacttacccctctcaactcgcaccgagggaaggcagagggaagagggtcaagaggcacttgcctgctggctttggttcgtaaggtctctggccaaattgtctgggaccttctaatttgcagagtgatgttaactgacctggcacttcctcagcagttgattttggttctgttcatgcctcttgcccctgagcatatttctttttcttttaaaaaatttttaatggtaaaatacacattacagaaaactcaccatgttaaccatttttaagtgtacagtgcagtggcattaagtgcttttgcattgttgtgcaaccattttgtgtgtgtgtgcacacacatgtgtgcaagcattcagttgctcagttgtg

SEQ ID NO: 37386 - DNA, 1872 bp, Bovine  19866881116379
  misc_feature (1)..(1): n is a, c, g, or t
ngcctacttagtgctggagaaaggcggggatcaaagatgtgggcatagggctcatctttgaagtgagagagaagatcctggctgaaaattccactgcggctttccaggccccttttaatgctaattcttccacatttcaaccaatagaggttctaaatctcccggatttctcttccccttcaaagctaagaagtgcatatggaaggcagaggagagagaatagagacatccaagagcttccttgaagagactggggtgcctgcacaggggggagaggcttctgcctctggatactctctctgagctagaaccctgaaggctcatgctggtgctgctgcctgaataaagtgtagggagaaagccgggctgtgggcagggaggacccaggctgtgttcccatgagacaggggttgtttgtgaacacagatagtggattagagcattctggagataagctcatggaagggcctatgtcagcaagcttgtcaaaaccaggatatggtggaggaaaatagggccacccctcccagttcctcatacttcccatggctccttatgaaagagtgtgagggtcagaggaggtacaggaaccagatggccaatcagcaggcacaaggccaagcagtaggacccctgatccaagggacaggctggggactagccaatggtagggacaaagggaggccaggtggcccctatctgtggggatccttggcaaagagggggccaatgtagagctaaacagcacccaagaaaccacacacatcccctctgtggagaccaccatatcacagaggccaaggccagaaggacccagagcaagaccagggaaccctctctactgcaggttgaagttgggctggcaggagatcttgtcaagcttcctccccagccccaggagttagtgaccagcaaagagcagagtgtgtcacttggcacatcatggtccattcccatgctaagcccctctagtcacaattctaggctggatagcgtaaaagaatcgctatgaattggataggagactgaagttttaaactttgctggtctgagtttaaataactgaatgagaccagaaagttataaaaactctatccatgatgttaaaaaaaaaaaaaaaaaaaaagaggaaagaggaaagggagtaattaggaagaaaaaaagacccagaattgcttcatgttgtccacctcaacaggttgaatgaaactccttgacaatcacttgcgataacaaaatggccactgacctctcacctccaaaggatgcatccccaaccccccacccccaccccaccccaagcaaaacagacaacttgtgaaacagggtgcctgcaaaagtcccaagtttcactctggctggtcacctcgggtgacaagcctctcctgaaccaatcactgtggccaagagatggaatgtactgactggtctaccttaggtcttatttccacccctcgagctgccttccctgggaccacagggttccctaaagggaagtgtgaactgcagaaaagaagaaagggaggatgaactgggggggggaattttgtgttggtgattctccccattcattcctctgagagcaaaacgcttctgccccaagaagagagtcgaagtagaactaaaatttcagctgtttcgtaattcccattataaaggccattggcattcttaaagacgatgtggcatggtgggttgcagcagcagggcagaattaaatatccctgcagtaagaaaaaggagggaaagggagaatgatatgggcatgagctctttggggcatccaggggcctgaaagctgggaggggcatcacagtgaaggagtggactgctcctgtgagaagagtcacggatcacggggattttctaaag

SEQ ID NO: 37387 - DNA, 938 bp, Bovine  19866881136948
  misc_feature (1)..(1): n is a, c, g, or t
ntcttggttcttagcctctccttgagcctctttgccttagtgtttaaatacgtctccttcctccaatacaaaacaccaaaagaacctggaattaactaaaaaccccctctccctgaagcctgtacctatggttggactgcagctcttccttacccaagggcagataaggccagatgacctgcgaggccacctctggccccacttcatctggtgccccacctgccaaacagcagacactgccaggggagggatggcatgtcccacacacagggcctgacacagaactatgcagtgaatgggcaacctgggaagaggcacaaggacaagcagctcctcctgacactactttcccacatttttattattcaacaatggatgagtatggagacacaaggatggacaacagccaagtttcaataaataagagaaacggggacagccgtgggcccgtgcctgcacagccccacataaataacgagactgctgagccagtgtggaaacggaggtggagcagtcgcctgcactgcccaggccaggggacaaacaccaacaccgcagggacacacaccaccgaggccagaggccccttcccagccccgtcgcacacgccacttccctccgaagcgcctgagatcgtgggggtggctggggctctgcaccacagtcctgcccaggtcaagtctgtttcttcagtttcaataaaaacagcaggggcagaggcaggcacatgcattaggccccttatgtatgcagagccacattcaggcagccctgggggagacttgaaggcggagggcctgaagcagcaaaaacggggtcagataaagctactagtgggaggggcagtgtggagtcgagctctccacccccacgacccagcccagagcctgcgaggcgggaaggtccctgtgcgccgcggtgccgctacccccacttca

SEQ ID NO: 37388 - DNA, 1474 bp, Bovine  19866881211612
  misc_feature (1)..(1): n is a, c, g, or t
ntctgccgctaggttggcaaaccctcagaacatctgtcttatactgggccccgggccagagagatgtgggaacctggcctccatctctgctttactattccctggctgggtggggtgacccacgctggtgacctcctgcagcctcagtttccttagggatgaaagaggcgtgctcacctctcctgtgaggagtggaggcaaccccggatgagggcctggcctgagggaatgagggtctgtccccttccctgtgagggcggaggatgaaaaggagacagcgcctagctgtgggcactgccctacttcagccccagttgccagggaaccactgggttccttgctaacctggatttctctatcgatgggaagcctttgtcttcctgcttgggcgcagccattgctgagagaggcctgtgtccggctgtgtttccaggcaaccctagcctctggaggctgcaggaggtcacaggccataaagccactgtcgaggaaacaaatacctgtctcccaccccctgctccaggtgggaacctgcctcccacctccgtctgtccagccctgcttcacttggccggcagcccagcaagccctccgagacttgagttgttccatgcctttcgctcccctgctcacccttcaaggctccggtaggccccgagggcgggggtagggggtggaaacaaaggcttctcagctcctacctagacttggtgtgacctgggctccgcccaccaacctttcttctcccttcctgcaccccccacctccccagatggtcagtgtgtctaatggagcacctcctgtgtaccaggctccgtgccaagccttgtacatgagtgtaagagaatctcatttgtaactcgcacatcaggtgtgtgccatagccccctccacagtgtacaccagaaacggaggcatggtgaatgcttaccgagagcttgttctgtgtcaggctctgtgctgagtatttttttttaagaggattgattgatttattagtttttggctgtgctgggtcttcgttgctgcatgcgggctttctctagttgtggcgagcgggggctgctcttcgctgtgggcgcggacttgttgcgatggcttgttacctgtcccgttgtggagcacgggcttcggtagctgtggtgctgggctcagtagttgcggatagctggctctcaggccccagcacacggacttggctgcttcgaggcatgtggcgtcttcccggaccaggatcgaacccgtgtcccctgcaagagtctgttggcgcgcagactcttaactactggcacccctgggaagccctgtgccgagtgtttaacgtgaattctctcttgtcctcacaacggccctctgagagatggggagcgggggtggggtccacagccgcagagccagtgaagagcagagccaggaaggctggttctccccgagttaggcaggggcttcaaatctggttcagtgccccccaccc

SEQ ID NO: 37389 - DNA, 742 bp, Bovine  19866881246016
  misc_feature (1)..(1): n is a, c, g, or t
ntcttcttttgttctatttttaggaaaaaggtaagtataaagatgagaaaattgaaacttaattgaaatgcttttcatttcaccaaactatgtgaccagccatagaaacaaactacccctggtatatcacagggaacacagctgtccacctccagagctctgatgactcagtctgacatctcaatttcccatctttcctctgttgcagcatttattgcatttctgaatccaaggagccaaactcatataccagaaaatagtacaacacattcaatttggagcagacagataaatacaggcttgaaaaattaatgcacatactctggtgctattccatactagtaattttcaagacaagacttcagggtttgttttttttttcttcttcttctttttaaataacaccatggcacaaatcacttaaatgggaaaaatttgtttcacaaagaaatacccaattattgttatccatacaaacatgaacctagacaaaacagtatttattcgtaacacgtacagtgggtatcagaatttgaatagagaagaagatttcattggcaagagaggttaaattactcagagtatagaacatactacttttagaaggaaacatatgtggtcccctaatattgtaacagggcccaatgtaatggatcagaaatcgttaagtttggggtattcatctccatacatgcaactttaaaaagaacaaatcaagtgctagcataagaacaatcacatt

SEQ ID NO: 37390 - DNA, 1016 bp, Bovine  19866881308550
  misc_feature (1)..(1): n is a, c, g, or t
nccttttacatcttttattgaatcctaggggtaaaaatataagaatacaaaaatatgacaagatttcaaagcaccagactagtgatatttgtatttccacgagaacttagcatttaaaatttttttctaaaaatagaattggagctatggtacactgaaaataataaatacacatggaggcaattcaggaaaagaaaagggacatagactgcgcccttttctttcctgtctttggcctctgtcttgtaatatggataccctgattcctttccaaacaactttctaaggtattggccagttcccactcctctggccaaaaatgagaattgaactggatcctttaaaataatagtcataaaatgaatgtattttaataaatgcattcagtcaggaaacatttactatgcacttaatttatcagaaagaaaataagattaattaaccacaggaacaatttatcttccaaaggatactttctctactgtaaaaaattttaatctgtcagatcctaaagaaaaacaatttgatttattttctatgtaaacagtgtgacatgctagcaaacttgaatgaaaagataactatcaaagaatgacagcatatagaaggcaaggttaattgtttaaagcaagttaattataacattaatttgtttatcaattataaaattttaattttcctttttgtgtccctttattattcttcgcatcgacacatgactctgttgttttatgaactgaatgcattcaaaattaatttgagtggaaaataaagttcttaaaactattcttttcaaaagcaacagacatgctaataatgactgctgtcctgagacagcctgtatcatcacctccctttttgaccttcatcaagaagaacgaaacacctttcaactttgttagaaggaatactgttttcaaaaaatttgtcctttaaagcattctaatgtcattggtacattcattttgtttgtatctaaagacattttgattctaaaggatatatcgcatacttca

SEQ ID NO: 37391 - DNA, 1038 bp, Bovine  19866881536851
  misc_feature (1)..(1): n is a, c, g, or t
ngggggtttaggaagccaaggaggtcccctgagcccaaggcatcagacagaatgactatggcttccgaaagatcacctcctcccaccccttgttctctaggtggtgggcacctgagtctaagaagaggcagtgacttgcacaatgacacacggtgtgtgggagacacagttagcctggggcacgcctgtgtgctctgtgcccagagggtacaggtgagcagaaggacatctacgggtatagctgagaagggtgtgaaccagaagagccatctggggggccttacaggatgcaggtaacagaggccgagtgctggagcttcaagctgttcctgcgatcgcggatgctgtcagaggactggtacacgtggacactgtggatcagtggtgtggacctgtgacaagtgcttgggcacaccaatccctccacctagctgcctccaccaccatctcctccacggcaggtgccaccccaaggtaccaaaatcccactgccttcctgtgggtttcagaccctctggcagccctggttgacagtatccttgagatctgacccaaggccctcctgcttctgctttaggatgtgatatttcttaaacagggactgcaggttctggcaccaagactccagcctctcctgtgtccctaccagccatcctcggtgcccagccacacggaactctggtaggcctcagggtcaacgctcagcaggtcctccaggctgccgcgggtgaaggagccacgactggaccgacgaagggctctcccatccatgggactggtgccgcagggaccaccaggcccgaaggagccagacagtggcaggaagccaggctcctgttcctcctctgaactggtggtctctgctgtggcctccttggagctcggggtctcctcatctgatggagacaaaaggctctttctcccactctgccaggcccaagatgtggtatctttctaggccctactctcccctcaatgcacccttctgggtcaaggtcttccactgctgttctccccgccctccagactccgccatca

SEQ ID NO: 37392 - DNA, 728 bp, Bovine  19866881691365
  misc_feature (1)..(1): n is a, c, g, or t
ngtgagcccctccgctctgaggggagacacggacccacaagctagggctctggggtccaggctgggggctcctgagacccccaaagctgacccaagaagggtggcctccatccccctgcctggcccaggtacctccaggaacttgagaaaggcaggcctcgcctccttagccacacgcacggcatccttcgcattgagaaagttatcgatgtaggcagagtagatgttgaccaggacgtccttggagaactgtggatgaagaggcaggttgggaccctcaaggtgtcccctccccacctcaccctgtccaggtttccactgattcacgagccaacatctaactcttccctccatctgaaaatgacacggtctctaagggatagggcatgtgctaccactgtgatgtctgtacatgtcatatgtatgactgtgtgattaggcgtgtgcatgtgcgtgcagacacacaggtgcactcagaccaggctctctccctcccaatggggcatttcatcccctggtctccaaccaggcaggtctccctcctcgctgtcagctgagtgacacaaacttgttcctgctgcttggcttttgctcacgtaattccctccagcaggaaggcccctcccccatccaaatctcacccaccctggcaaggcggagctccagttctgctgcctccaggaagcactactaccctgaagaaggctcagcttggaactatacctggc

SEQ ID NO: 37393 - DNA, 1424 bp, Bovine  19866880340657
  misc_feature (1)..(1): n is a, c, g, or t
ntgaggctgcagctgagtgagctgggcaaagagtaataggccaggtgtcccaaagatagcaaggaggtcagatcatgcagaccttgagtactatcagaccgactttagattccactctgagtctctgggtttctagaaacactattacaacaacatggcagacccggaaatccctcagcaatacccacagaaaaatctggagatgtgccactgctgccttgccttggcctgtgatgactgccaagaaaccagatgctattgcttgaaaaatattctacaactgtctagcttccatgcccttcgatttccagccataatgaagcctccaaaacaacacagaatgaagacaaatatgggtaagtatgcaatgaaaaaagtttttaacttgttaaaaatatatctttggggaaaaatgcatgaaaagaaggtataatattttctaaatgctattttttccctttaatgagtggatagaacaaatattgctagttggcaataaatgtgtttattacatgaaaatattttactttttaaaactgtaaactcttttaagctggtttttaaaatctcaggagattttggaagattgaacacaagaattatgctaatgaacaaaatttcatatctatgatgaaatgtacaaacttactttttaaaaatctcatattaataataacatgaaatgtacatttgcaatcaatattgagagataaggatgcattttgaattcacttttaagtgatccggtaaactggcaagaaataatgcaaaatatactcttcttcccttactcttatattttcttctgtatttttgaaattcaaataaatattttacactgtttaagaaccacgtctactttcatttttaaactgcaaattattagtattgccaattggagaacttcagcatattttgcagtatgtaaatatgccatctgtatcctacagtaatacccatggcttactccctaattagcagaaaggaatgataccttatacatagcagccatagtaaaaattatttaaatagtctatcataaacatataacgtgctgtattgtcactagacatgatactgatacatatctcaataatccaccttgagaaatcattacagcagatgaagcaggtaatggttaatacaaaggactgaagaagaagcttagaaaaataaggtttatatgttgctatgagcaggataatacagtgattaagagtgcacactcttcagtcagaacctactaattgtgcgatctcgggaaagttatgtaattgcccagtgccttaaatttccacatctttaaaatgggaaactaatagcacttactccaaaagatttgtagaatggaataaatgaattaatgcacataaatacttaaaacaggggctcaccataaagactactactacgccataaagact

SEQ ID NO: 37394 - DNA, 2120 bp, Bovine  19866880406668
  misc_feature (1)..(1): n is a, c, g, or t
nctccctggggcggggggaggggagaaggcagaaacaatgagaacagttttgctttatctgggtaaagattactatatgatatatatgaaaataaccatttatgtatcactcttcttattttacacaggagacctttagaaaggtttcatggtaaccatgaccaagtagcatccctatgtcttccaggacaaagaatcacatgaagtaggtttcaattatggtatataatgtttttagttttggacagtggcaaactctttgaaatcacacttccatacagtgacttttagtgtgatgcatcttcctttcctttctccttctacatccctttcctctcttcctttctttccctccatcctttctatcctttctttcaattagagatagtttcttttcaattagtatgtacgctgcttgcccacctgtaaaataatacataacatgtgttccttaagctgtatgcaaggtcacctttttgattgaggactaaagaatcctcagtggatttcttatatgaactaagagcactctcatttattgtatacaattaaagaaactgaggaactgttggaattagttttactattgtgaagtgatgatcattcaaaagaaattataatcttttattgactcagcagtttactaaaccctgaagtgaaatttgtcagattttaaggcatgttgagtgtttgcttactaagaacaagataaaggaatatcacggtctaaaaggagaacttttaagttttcagaaagtcttcctgcagcgagatactctgtgcaattgtgtacttacaacctgaagggaagtccttagttgtgtttttctggcgagtctttcacataagatgcattcgtctcagttcttgctatgggttgtttcttgagaatagtttgatttaaggttagagggggttaattatcccatgcaaccgaaaggaaacatttacaaattatctcaaggatactaaacaggagatgaaatccagatattcctggaagaaagttgtggatcgaccgaagtgatgattatagagagcactgacagagtaacacgccgtgcattagtctgtagtgtctggagtgagcagactgacaccgtcccccagcagcacctgccagtgctctaacatttcccagtttctctgtcaagagaggaaggggaaggaatcaagtgtctatatttggtagagtttccctggtggctcagaggttaaagtgtctgcctgcaaagtgggagatctgggttcgatccctgggttgggaagatccccgggaggaggaaatggcaacccactccaatattcttgccttgagaatcccatggacagagaggagcctggtaggctacagtccacggggtcgcaagagtcgagcacgactgagcgacttcactttcactttctttcactaggttaaaaacggctgtgtgttgttgaacacctgtgttttctaggcattgggcaaggcacttctacctgttatctttaatccttttaacaaatccctcaaacccctggtacttttctctaaattctgatgtatttttttaccttcatagtagttatcttgtttttgtatgtttattaatgtttatagttttcttcactaaactatgagccctgtcagggcagataccatgactattttgttcaaacctgtacactcagtttctagcacaatgtgtgacacatactaagttcctagtagatatttgttgaataaataaacaaatgagcgacaacaacaaaagataagggaaagatggaaggaatgaaaggcagaaaaaggcagagctgggattcaaacacagctcgtttgatttcagattacatctcctcccactgtagaacatcagcatggttttactttatctggaatattattcttgattatatccttaactgataaaattttcctaagttcttagagcacttcaaacctgtttacatcttattctgagacctcttacatcttaccctgagactgaatgccatgaaaaaggctgtcccattttttttatcattctgttggaatatcgcaaccgttctatgctaacaattctctccagaaatataggtttcatagtctagattttttggtttctgttcctcctata

SEQ ID NO: 37395 - DNA, 2276 bp, Bovine  19866880421243
  misc_feature (1)..(1): n is a, c, g, or t
nccttggctgtgttgggtcttagttgcagcacttggcatcttttgttggggagctcaggctctctggtttcacatgcaggcttagttgccccaaggcttgtgcaatctttgttccccaaccaaggatggaacctgtatccctggcaatggaaagcatattcttaatcactagaccaccagggaagtccccctgatatttaaactggggattgtgatagaagttatcagatatggttgttgggaagatcaagttggaagataatgtgtatagaagtgcctagaaccgttctagacaagtgtgttaggataaatcgacaatagttataagtaatcagtagtagaaccatggcatgaaaagggcccttaattctcatatgttttatagaactcagttttcaaagtgctttcatattcattgcctcattcagtaaaaggtatacagggtagataaccttaccaatcatactgtctaacttcctacttgataggaataaatgtttcaattgagctttgcttcaggatattattcactataaacaaagcttgtgtgtcataaattagggttggcatttttgaccttcttttttcccccaatctcttttatataatgtcagtgctcatttattttatcttcatacttacttccagagccaaaccagtactgcatttccatatactgaatgtagctgaacaataccatgttgatcagaagcattaaatgtcagtttacatgtctttatagagattgtatatgttagacattatatatgtctagacgttataatgtcatatatattagacattctatatgtctttaaaaaattagggaataatttgattataatagaataaatatggcaagtttgaaagatgacactgtttcaatcaccctctgtgtatttttggtcttttaaccttcctgaggctttcaatggctaagtcaaaatatgggttttatgaaggaggattaataaaaggatacttgatggtgaaaagatgagaaccacttgattacatgatttcaaagatgaaaatgcacgattgatcctagtgaagagttatgaatatatgtaattctatgcagtgtactagttgctgtaatggagatatgtataagagcagaagtacctatgtcaaggaaagcttctagtaggagttggcctttgagctgtgtcataaaggttaattaggaataacctatttgaagtagcatcctgaagagcattggacataaatgaaacatttgatggtattattgactattttgtaaggcatttgataccaaaatgtttcatgtttgtgtctttgtgattctagaaaggccttgtctatcataaatgtgaagtggccataagccagcagcttaacctgtgctgatttaacctcttaacttctctttcttagcttagttttgtggtcagggatattgtgagtatattttaaggtacagagaagtttttcaaattattgattcctttgaatatgttgactaagtattaaaattaaaataaatggcttattaatatttaagctgatgatctggaccataacttaataaaatcttgtatcttacactgtaatttttttttttaattggccattatcttagagaaagggaaatacctggaaatttttagatctggttatttctgagttttccaactatcaagttggcatattccataaatttttttttattgaaagatgatgagacggctggatggcatcaccgactcgatggatgttagtctgagtgaactgcgggagatggtgatggacagggaggcctggcgtgctgcgattcatggggtcgcaaagagtcgaacatgactgagtgactgaactgaactgaactgaactgaatgtaaaaataaatgaatcctcagagtgattcaaagttttgggaaaaaatacaaattattattatacagtgatgatggtgaaccagtatcagtaccagaaatagtagtagcagagcaaccactctctactcttgataactttcaaatagggatgctaaatgtaccctttatagttttgtaatctggggtctcacgttttctaataattttctgaatgccttttctctgagctacaagccttctttgctgtttttggtttgggaagttttctggaatttagtagcttgtttctccaaattaggtacacctattgagatttttgcagtttatatgaccttgtaacataatcactttctgaaaagggccttatggccacataggctggggagaagttatggccctctttacaatggc

SEQ ID NO: 37396 - DNA, 1597 bp, Bovine  19866880454740
  misc_feature (1)..(1): n is a, c, g, or t
ntgcccttctctaataatggtctcattattgttattctaagactgggcctcaggaggaggaatatttgctggaggtacgtcattattttgcaaatttcgattagctcatcatgttgtctgtagtgtgaaaatcgtagctaattagggcagccagttagactaccagcttttgagcttatgagttaaaaggtagcatacttgataggccagtgatgtgaaaaaggtggtaaaaaggaggattagagcagttgccttagtaactccaacttccatctgtgagggaacaatggacttgtgtttctcccccaccttggtgtaaaaattggttttgttttgaaaggacagggttctttttatgacaatctggaattcagcccaaccgagtgtagttttagttgttaggagagaccattggggataggaaagatgaaaggtcatggtgagcttcaaggacatgaaaggttgttgtctcatgtaacaatggtagattgttttttttttttccctaatatttctagccagcccctaagtcaggtgatggaacaaatacctacagtttagtcaggtgaaacaggaaagggagggggaaggaaaggagaaaaatggggtaagaaagagttcgtactttgtttttaaaagggggggaggggtaacttcaatttgcttttattaaacgaagtgatatttctctgtcactgtctctgagattccagtgtgctttggatgatttgcctctgtgggccatcacatctctgggaagctctccaatgtgttagaaaatgtgatttaagctttcttcctgaactcccaagaggactagtgatgcgatacttaacaataaatttagttgttgtagctttctcacattattggtgttcttaaaaggttttccttcaaaatgcacactgaataaaatgaatgataaatatgaaagaatttgtttcaccactctatagggttttatcataaattctatgactttcatcacagaaagtttacaggaaactgtttagatgttgctgcaatagcagcacaattttttctctctgttcataagaaaatgccacaattttaagagctatttgaggttttgtattaagaggaggtgataaggattgaatatggtgctatttctttaaaagcctgaaaaccaaatcactctctctggatttaaaatgcctttattacagcaaaataagtgtcttctgtttctctttcatatcagtattaaaacatttgatatgtgtgcttatatgggagctcctgtttgtgtatgtgtgtgtgtgtgtgtgtgtgtgtgtgtgtgtgtagaatcagaaagagtatgggaatattaagtttttaagcagaaagatcatcttttgatgatcagaggaaccttcatatttctccctctctattgtccccaaacaacccttgtgtaattgaagctggacttggtccagggggctagggagattttcggattctttgaatcccaggtctttgtttttttactttttctagccaactgtctttatgctgtagcttttctttttctgagaagctgcgttcatttaatttattgtaaatacttcatagactgaaataatagcat

SEQ ID NO: 37397 - DNA, 1316 bp, Bovine  19866880512010
  misc_feature (1)..(1): n is a, c, g, or t
ntctgaagcctccctcctaagcggggctcttctactctctcggcccgtccaacaccagtgcacatccttagggctgatgtgcaaatagcaggcttaatgctcagcttccccttaaggtacaagggtcctaagacagacacgttactgagctaaggggattatctctagagctgaggcccccaagcagagggctggtaaaggaggggtgtggggttaaggtcatcgctctctctcctcccctggcagtctacctggcgtagttccccctgtcagttcacaatcctgcccccattttccctgtcaccccaatatgtaagagaagagcagagaaaagcaaagcccagagaacttgtatctttctccaaggacgatggaatttcagaactgaacaacaaggtaaaggaagcttttgggggagcagcagagtggggtttcattcctgtgtccttgcatcacaatggactggaaggctcctatggacttcgctcagcaaaggtctgaactcactgtccggaagtagggacacctacaggtagcctcacctatcactgactctcacagtcacttgcacgttcttttatcctctggtttgtctactcaggtggccgtgaggatcttcctaaagccacttatctttgctgaaaaggctgtgggctttctcacagccaatgctggctaaagagaggtgagtttccaagcctcattactgagaatttgcatatggggctgcaagcctatctccagtgtcaatgatttatttaggacgctcacagcttgcctggcctagaattacaccaaagaagttaacactgagcctgctcaaaggaaggctttgtgagctccccagggcactgtggcactcagggaaagcatgagcaatgccactaggctaggtagaaatcaagctgcagggccctggcttcagactggcctatctcctagtaacttacaggactaagttctctacaaagcctgtgacaagacccacatgttgtacccatctgtttgggggaggggaaaaaaggattccaggcctgctgcgtgttaagtcaccaagaactcaggcacagtagaaacacaaatagccaataatcacatgagaagatgtttaacctactagtaattagataaaaggaaatagaagccctgatgtccttttttagcaggcagactggcaaaaactaaggaggttgataacatcaagtgttggcgaggatttgggcaaaccagttcagtactctcaggcactgtgagtgggagggcaaatgaatgcagccttttagaggggggggttttgagttacctgctaatattta

SEQ ID NO: 37398 - DNA, 2573 bp, Bovine  19866880548108
  misc_feature (1)..(1): n is a, c, g, or t
ncttgcctggaaaattgcatggacagaggaacctggtggactacagtccatggggtcacagagtcagacacgactgagcacatacacacacacactaaaaccggaaatgagccaaggaactcttaagtagggcacctaagttttcaatgtcttaaaaatcttaccttgaattcatgaggatatacttaaaatttttttttgaatagcatgttttgtttgagaaagtgatgaaaggtgtagataatttccccaggaaaatacacatgcttatatataactttgaggtggtcatggaacctttgaaatctttccatggaacctctagaggtttattgatctcaggttaaaattttctggttattgcctttttttttttttttttttaatttggatctatagaccatcaggaactaatattatagtatgatgtgagggagggagtcaagttttatttttccatatggacatttaattgacccaggattatttatcaaaacaagtaagcaaacaagatcaaccccatcctttctccacagcttagtagtgccaacttataactttgctgtaaatcaagaacttaaacttgcttaatttcttctttttcttcttcagggctcttgaatctgttcctttgtggtgttttctccccaaccagggccaattattttctgttttattactagtattttatataataagttttggtatctggtagaccaaatctggagaaggcaatggcaccccactccagtactcttgcctggaaaatcccatggacagaggagtctagtaggctgcagtccatggggttgcgaagagttggatatgactgagcgacttcactttcacttttcactgtcctgcattggagaaggaaatggcaacccactccagtgttcttgcctggagaatcccagggacgggggaacctggtgggctgccttctatggggtcgcacagagtcggacacaactgaagcgacttagcagcagcagcagaccaaatctatcctttgtgttcttcaggattttcttagcttttcttggatttcatgaaatttcaattcattttcattgcatttatagattaatttgtggagatagaccttcaattaaaattttgaatcttcccaatccatgaacacagattacaaacttggcaaactcacttgttaattattattattctgtagattcttttgaattttctatctatataatcatatcacctgcatttaaggaccatttgatttcttctttttcaattcttatgtcttgtgtatttccttttcttgcctttttgtactgttgtgatggtgggtgcctttattgtattttctatctgaaagataaaactttcaacattttaccattaagtaaatggcagaccactcccagcactcttgcctggaaaatcccatggacagaggagcctggtaggctacaatctatggggtcacaaagagtcggatacgactgagcaacttcactttccacatatgatagaatgatatttgctttaaaataatatttattgtacagttattgtaatcatttggttcacccttctaaatatgtcgattttgtcaaatttactgattgcattatttaaacacttttttatttttcctgtttttaaagttcacttatgtcaagagaggtctttaagtctccactctgattatgaattggtctattttgctttttatttatgccaaatttagctaaatattgtaagattataccattgtacatgctaagttgcttcagttgtgtctgactcattagaccccctggactgtagcccactgggctcctccgtccatgagattctcgtgaaagaatactagagtgggttgcccattccccctccaggggatctttctgacctagggatcaaacttgcatctcttatgtctcctgcattggcaggtaggctctttaccactagtgccacctgggagctcaactattccattaagttcatacaaatttagaatcattatatcttaacaaaatatgcttgatatgctaaattaatgaattgacttttttattgttaactatgttctttatctctagtaatgcactttgcctgtaagtcattcttgtttatatgattaaaattttcttttggttagtgtttacatgttttatttaaatatccagttattctttttttgtgatttggaagtatctctgataagctacatataataaggattaaaaatttaatttccgaatgtcctgtgcatcataactctaggatgccctgtcctccaacggctttacttttctctgtatcatttaccaccatttaaaatactgcttgtactacttgagattttttaattgtttgcttctccatttaaatgtaagctgaatgaagcagggacttttatccattttatttatttatatatccatatccctaggtgaataggcattcaaaaatttttgccaaaataatgactctcaatgagttgtactctgcatgctctttttggagatttctaaaaacactaatgtataaagaagttctacaggtacaaaatttgtttaaccaagaatttt

SEQ ID NO: 37399 - DNA, 1753 bp, Bovine  19866880553129
  misc_feature (1)..(1): n is a, c, g, or t
ntatggaagctttttttgctggttccttttttcagtttatgaaactacttctgtttttatgaaggagagatattttctggcagtggttttacgaatcatttgagatagcctagagatgagaaacagatgatataggcagctactgatgacctctgctggcctgggcagatcctcaggatctgatctactttttttctaagttgatttgatcaaacctcaaaatgtaatttagacaagatctcctacatagagttaggccaccttctaagagcattctatagggtcatctgccttccttaatatgtagttaggtcaccccagtacgtcttattaaattgtctacttttaaacaactctggcagttgttagttctttgctatggcaaagtttcacgttcaattaaactagtagttttgaggtgaagtaacttgtgtttgcaggttgattagtcagtgtgatttagacttgatagtatttttattatagctgcatacaaatttgctgttaattaaaacaaaaatccagcaccacagattttaaatacttgagtttaaaccactacatatgaacaaatacaatgggtatagaacagaaaaatgactacacgcatatgtatgtgtagtcctgtgtgtgtgtgtgtgtgtgtgtgtgtgtgtgtgtgtgtgtgtcctgccactcagtcatgtccaactcttttcaaccccatggactgtagcctgtcaggctcctctgtccatggaatgctccaggcgagaatactggagtgggttgccatttccttctccaggggatctttctgacctagagatcaaattggcagctcctgttcctcctgcattggcaggtggattcttttactactgagccacaaaactagaaatcagtttacattatataagagcttatattgtctaaatgtataggctaaaatgtgtgtgtgtgtgtacatatatatccacacgtatatttcccatttcaggagcgattttaggtttgttatactactatatttcattcacactgcatttgtcatgccactcacacctattcaaaagatatacgtgcttctcaaatttagggataaaataacaatagccttatatgtgcacctaacttttcgatttaaacataccgataacggcttgttttcttcttaaacatgtatcttttttaaggtcagtgaaagacttatttagatatcgttgaatttttacaattaaacaacttgagtagcatgctgatttgtaaaaagattcggttaaatggtgtttctctattaattcaggtatacatgtctgttagttttggaagcgtctatttatttatggacctgttagcttcaccttgaacagaagaggttaagaagccacttatatgttatcttcagcttttctgtttcctatgcagggaagaaagagaaatatattaaaggtttttgaaaagatgtagtttaacctaggagagaagagaaaattttccagtctttactggggaatctaactgccagatccaactcttatattggtccttgccccaaacttcctgtgaacgctcttctttattaacaaagaattatggcacagtaactttaccactgtccagtaagtgttctcttaactcatctcatatacgttcagttcagttcagtcattcagtcgtgtctgactctttgcgaccccatgaaccgcaacacaccaggcctccctgtccatcaccaatacctggagttcacccaaagccatgtccattgagt

SEQ ID NO: 37400 - DNA, 1113 bp, Bovine  19866880576666
  misc_feature (1)..(1): n is a, c, g, or t
nttcttttttttcttctgatcaatggacaaaaaacatcaacacactgttgcccagaaatacctgaccaagaacacttacagaactcaaaattccttctgctttacacagaatcacataatctccatccccaaagctgtcttcctgtcctctcagttcagttcagttgctaagtcatgtctgattctttgcgaccccatggaccactgcacaccaggcctccctgtccatcaccaattcctggagtttacccaaattcatgtccattgagtcagtgatgccatccaaccatcttatcctctgttgtccccttctcctcccgcattcaatctttcccagcatcagggtcttttcaaatgagtcagttctttgcatccggtggccaaagtattggagtttcagcttcagcgtcagtccttccaatgaacactcaggactgatctcctttaggatagactggttggatctccttgcaatccaagggactctcaagagtcttctccaacaccacagttcaaaagcatcaattcttcaatgctcagctttctttgtagtccaactctcatatccatacatgaccactggaaaaaccatagccttgactagacagacttttgttagcaaaggcattactttgcctatcctctcaacaactcatattttatagatttggaatctcataaattctagcttgtctagatcttttatcaaacattataaaactaggtaaacattccaatttgattttctgaccataattgcagagaggattttcatcacttttatttccgtcataaaattcaaaaggtctagcctattttcatgaaatactttcaacaaactctgaaaaaaccccaagattagacaaatgtccagtggcctctgggcaggagcagatctagatgtgaaaactagcttggttcccccaggtgaccttgggttagttacttaaactctctgaggtttagtttcctcacctggaggatggaagtagcaatatctactcaggagcactgtgagaagtaatgacgacggtaacatgccagcactctgcttggtacatagtgagatatcaataaatggcagcacatgttattatttttctgccttatttt

SEQ ID NO: 37401 - DNA, 1045 bp, Bovine  19866880604000
  misc_feature (1)..(1): n is a, c, g, or t
naaccatggagaggaagttgcattctcttaacaaaatgccaaggaacaccttcttgcttcccaggtcaggaagaagaaaaatcagaagcaactgaccgcatctgttcttaacattcatagagaaaaaaatttaagaaaagaatttttaagtctgaggagatagaaatgggccaagaaatttgaagtatcttttcaaggcagagacacacaaaatgaagttgagaaaagaattcaaccaactaggatactgccaatattgaaagtgggagttgaaaaacaacagcaaattgaaacaaatatttgcccagaatgtctgggttcacaggattcaggctaattacatacttcataaagatatgtgaggatgaccagtttttgaagaattagaaagcaaatacacttaacacaaaaacacaagaagcattattcttttccacaattcaatatgaaacagtggtttcagttcctcattttgatccctaattgtacaatacttgcagaaatgtatatttaaattatttggtactagattagtatttgctatgcatacaatacaaaatctttaaaataggatcgaggacccaaacattataagagagtaaagctacactttaaagagaagaaaaagtgaatgaaaatgaagttatatcagcattgctctgaatatctgattgcttcttcacccagagtaggagtgatcttgggtaacttcagcacttaaatgacctgtaatttccaacttacttaaaataataattctggggacttcataataaatacttaatgtgtttttatgcaaaagtccaaaaccttctcccataaatgaaaaatataaagaaaggtttggatcttggtattctaaatatttcaccaatataaccttcaattagaacagtggcaaaaacctaaaggagatcagtcctgggtgttcattggaaggactgatgttgaagctgaaactccaatactttggccacctgatggaagagctgactcatggaaaagaccctgatgcgggaaagatgaaggcaggaggagaagggga

SEQ ID NO: 37402 - DNA, 2481 bp, Bovine  19866880611335
  misc_feature (1)..(1): n is a, c, g, or t
nttgagtattttctatgtagaagacattgtcctagctgattgacttgtgttacttctttaatccttgcgatatgggaggtatcattatccccatttcatagctgaggagactgagtttcagaggacattagctcttgttaacatcattcttttaactgaagagtctatggaactgattttttgaaacctccaagccatttactattgtatagacaggatgtcacggaacaagctagctgctaaataaagagtgagcatgctgttcaaacacagagtagcatgccatcacctgatgacatgtgtcattttcctttttcacaatgaggtataatggtatgtggtgttaagagtttcacagtcaggaaatgtggcagaggtggatctaaaatcaggaataatatggttggatatagatgaattatatacggttactttattctgcaaatcagcaatgcctctttattaaaaccattgataaatggatggaaaggtatgggaaggtggaggatttcagcccaaattggtcagatctaggcctctactttctcagaaaactcctcattcttgctctcactctgctgtactatgtctaagccaatgatatagctatgcattgattattcagggactacccctcgggccctggaacaaacacttcctaggatgtgaggaaggtgttctgagcaggtgagcaccttatagaggtgtatctttttctatgtggtttaaggatcccctaaactctggagggcaatctcagtgcactgaggactagttagggcacatgctccactccatttagtgacagtgactgtttctctttctttttaaaaaaaatgattcgcttttttatttttaagcagatcaagcaataatccattgagaatgtgatgctaaaccacttttcctatagagtgtttaaactggacctctgagaaggagcttgatacaattcaatgactgaagtaatacctttgtccatttgagcattaaatggcccgttgaaatacagcttagttagaaggaatttcagaaaatagtactttctaatttttttttttctttcccagctgactagagcagagcttggaaaatgcagttcaatcactttctacagcctctcaggtcagcctctcaccagtgttaattaaatataacccccttagaatacgagaggttaagtgagagcaacatagcattcttctccaatatattactgtgaacacaaatggccataatctgtttataagaaggcttctttcagcacagaggtctcgctaatgaaaaattataagaggaaaagcaacataatgtgacaactgttcatcgcaaaatacattttaaactacccatttccacatccattgtgcttaaataacacatatcataaaggaaattggtgtaacagatggtttcagctctgggtagcaaatgcagacgagttttcagtgtgataaagtgaaactggaaaagccagtgcataattcagtcaatctctaacctgaagtctctcttcccctcaagccagagaacttttccccagcagctaaaggcattaatatactttctctttttagccgatgctgtatcttcagtggcacaacttggcctgacttactgaaactagaaaattgctgaaagaatggttttatactagccattagaaattagaaaagtctctttaaaactacagggttgatggttctaaaaaagttgcatacactgtacaaggctatttgtaaattacatcattttaaaataaagctctttaatactctataattagtcttgtctctctgaacatgactttactgtaaatgctccttcctgactcttctattgtcccaagattcctgagaagaaagcagccaagcgataattcaacattattgctgcttcagtgcactaatcgcttaaagagcagcaaagactctgtgctctctgccccacagctcccgcagcctcctggcctgaggctggcatcccgacccaacaacgtccagatgtcaagaggaatccccagctcctgatgcagcaggcgctccattccagtatggtcaaacatctgcttcatctgctggcatgcaacctgctgaacacgctcagagggcagcacaggcgagggatgggcagggacacactccccagctactccgggagactcatcaaaactttgaaattataagacaggcctagaaactctcaaaagaaaagaactcagcattcagcaaaaaacataagcattttcctccaaagaaagctatggaataagatatatttcatgatagctatttttattaattctagtaggcttgaaatttcttctggacagttaactacaaatttggaaaatacctgaactctttgagatcccaaaaatgtgatgttggctttgaaatttttccttttataatttaattacattacttttattcacttagatattataataagaggagaataagttgtgcaggaaaactt

SEQ ID NO: 37403 - DNA, 958 bp, Bovine  19866880617344
  misc_feature (1)..(1): n is a, c, g, or t
nttagttctggctgaagaggtaacagatgcaactcaaaacacacagagctagccttgtaaaaagttttaactagcacaatgactcactttatgcctctaaatatctatggtttcctctctccagaaccccccatgcattagaaggtagtttggtagtttatttttattgtttggtctaaatacagcacatttttggttcaacgaaaacaaagaaactttgttgcaaaagctgtattctttccaaaatgtgaggatggctatgagtagtgttcaactgaaaataataatggaacttgggttcctaatttaggatagaaactttcctagactctggaaattggtttgattcaatccacatattttaaattcagccagtaaacatctaggttagttaactaacctagatttaaatctagttagctaactaggtttaaataaaattcatttagaaaaaaagtaaagaaaaaaatggatctcgttcaacatcatttataggaactactacttccaacattgcatttataccacaaatggccataatagattattgttgttgttgctgttgttcttcagtcactcagtcatgtctgactctttgcaatcccatggattgcagcatgccaggcttccctgtccttcactatctccctgagtttgctcaaactcatgtccattgagtcgatgatggggtccaaccatctcatcctctgttgccccattctcctcccaccctcagtcatgatagattaggtactgggatctggaattaagttgagacatgaaataaatatacaattcagcccttccccagctcctataacatggttttgcctaagtgatgcatatactttattcaattttctagtcaggattgataagtaataaagtcctgggcatttagttagctttaatatccatgagtaagacattcgattaggtttcctcaccagacctcctc

SEQ ID NO: 37404 - DNA, 1085 bp, Bovine  19866880652173
  misc_feature (1)..(1): n is a, c, g, or t
ntggatataatatgcagaaagactttgattaatagattcaggtttaaatgcttctaagataaaaatccttcagttggggttaaatgatgaattttagttatccttgtatcacccatcttgttgccaatgtagctgggctctaacataagcgacagttgtcagaaaatgaatactttaaaaaggacttctaaatctaaatacatatatttaatcagagagtcctttggcttctgaaaataagttgtctaatgagaatttcatttgagcagctgtgactgaggaggtcaacaggcattgcctaggagaatatggcccagctggttaaatctggttgttgtcgtgatttaaatggtcaagtgctgcttgtaatccaggaccgtctgtttgtaaagggaagagtgagtgcttcagcataatgtacagctgttttaatctctctttaataatagtgcttcagccactatcatgtctcatgcatcatactactaagtatatgatcctagactggatgaactggtttgggacaggtcctggagtcatgtgagattgcagagaaagggatataaacagctctcacaaaataagagtttctttctttttcctcctttaagagacttatattttaggtggtaattattgtgatcaagagggagtgatgaaacttgcagttaaaaatattagaataaatgtgctatatttgatagaggccataagcttaaagggaaatatgcagggtttaggtacaatgtcatagaatgtatgctggtcagaaattagagtatttgtccagtggaattgtgcttcaagatatgataataatgaaagtatgtggattcatttgactgtttatgtggagaaagggcaggagcatttgagctttggattcctggtgggataggctttccaatggattatgcagctgttgcccagcacaagaatgaacacgtgtttatgtatctgatggattattatcattattcacatctctaaacaataatttggatttctacatatattttcactgaattatatttagtaagcatatatgttggtatgtattgcttatctgatgtcaatagcttttg

SEQ ID NO: 37405 - DNA, 2885 bp, Bovine  19866880780128
  misc_feature (1)..(1): n is a, c, g, or t
ngtcctttatttaaaaataacaatagtaactttttaaatcatgttcctggcaaaagaaatgtatctgtctttctaaaaacctctctctacttcttgaattcaattaatgaacataagccattatctttcaaaagctagacaggaaagtaaagtcatcattgaaggcaaaaattattcacatctaagcagacctcccctttacacttatatcactaatgaaattcttgttgcatctttctccttccttttttttttttttttttttgaggggggtgcacaccactcgatttgcagaatctgactagtgaccaatgcaccctgaactggaagcatggagtcctaaccacaggactgccaaggaattcctgtacctttcttctgaaggaaaagtgttttcagatctactagtacatattccagtaagaaaaggaggggaagattattgattccctctgctgaattttgagaaaatgaggatgaaagaaaagaaatcacataaaaaagctttcattttcactgagttggatgaaaatatctaacttataattagtcatgtcttccacattctattcaataggctacacttcttaaagaaaacctctcttccaaatttcatgctatgaaactaaattttaaatgtactaatttatctgaatgtttaacattttgtaagcccatggactgtatagtccatggaattctccaggccagaatatgaaatggggtagcctttcccttctccgggggatcttcccaacccagggattgaacccagttctcccatattacaggcagattctttaccagctgagccacaagggaagcccaagaatactggagtgggcagcctatcctttctccagcagagcttccctaccctatgcttttccagtagtcatgtatggatgtgagagctggaccgtgaagaaaactgagcactgaagaattaatgcttttgaactgtggtcttggagaagaatcttgagagtcccttggactgcaaggagatcaaaccagtccatcctaaagaaaatcagtcctgaagattcattggaaggaatgatgctgaagctgaaaccccaatactttggccatcgatgagaactgacccactggaaagattgaaggtgggaggagaaggggatgacagaggatgagatagttggatggcttcaccaactcaatggacatgagtttgagttagttccaggagttggtgatagacagacagggaagcctggcatgctgcagtccatgtggtggcaaagtgttggacacaactgaatgactgaactgaactgatctgaatgttaattcatcttctcctatgtccagttccttaaaataagactcagatactaagtgacaagaaaatagagacatagaacacagaagagaaattaaggtcatggaatgaatttaaatatggcattaagttcaaatttaccccagccaccttctaggacactctgacccccccatagacatgcataaatgtagggaaagaaaagtccggcaggttatataatagataaaaacacttttttaatgagctttcattcccaagtacagtggatgccaatccaaagaagaagctccaatggccaaagggacttttcacttaggggcaacaactaaaatacagatatcacctgttcattgcaaatatcctgactggcatctcagttactttaaagagactcataaaaattcctagagcactgcagagggtaaaaaaatcaacctaggcaattagtcaaaaaaaaggggtcactactatggccatttcattttagaatcctggaaacacaacagcatcataaaattacatttccaagatccccagtgctttctgggaatcatattcaatctgcatggatccaacacacttcccgatacttaactgttttcggtattcttttttgttgccgttgtaccttcagctgaaatttgctccaacagttccaccctgattgaaattaatctattacctctcccatacgtattacattttatacctgttcagcaatcctgggatgaaaagagaaatactgaagacagaagaaatccaacatttggaaaccctacagtggatggttatattatgttcccaactatctatttccactttttgacatatgacttccagtgcctcccagtagatggagtgtatttccctgccccgttgtcaggattggacaagcgacttggccaatacaataagagaagatgtgacatatgctatatccttatggaaactttatttgcacctacatagttttgttcggtcttttgtactcttggcctctgcaatgagaatagcatgtcccagatagaggctgttccttcaacctggatcacaaattgaaatgacatgtggccaaacagagacaagaacagccacagccaatctgaagaccatgactgaaaaaccaacgctcattattgtaagcaactgtgactttggaattctttgtaactacagcaaagctgaaaaatacagaaattggtaacaaatgatattacagttgatcctttgtatctgtgggttctgcatcagtggatttaacaaagaattacatttttttttaatttcagaaagttccaaaaagaaaaacttgaattttccacctgccagcacctatctacatagcatttatattgtattaggcattataagcattccagagattaaagtatatgggagtatgagaattgattatatacacactatgccattttcataagggatgtgaatatccatggattttggcatctgtgataggacctggaaccaaccctccacagataacaatagttggctgtatactgcacaacaacctcgagaccatagtgatttaataacaaaaaagctttatttttct

SEQ ID NO: 37406 - DNA, 1441 bp, Bovine  19866880914842
  misc_feature (1)..(1): n is a, c, g, or t
nggtctcctgcattgtagacagacgctttgccatctaagccaccagggaagtccacaggcttgctaatgggtggggcctggacccagggaattctggggctggtacctattcactggtggctgcacccgggtcctggggtctctatgaggctatggggatctggctctagtgcacaggtaccggtatgtggaggcaggtcctcggccatctgatgggcaggcatgtgtccagggccagctgtgggctcacggggtcttaaggcaacctttctcttggtgggttggggctggatcccagaacatgttagattttgtgtgtaccttgtaagagtggagcctgtttccacaaccctctgagtcttgtggaagtaagccctactggcctttaaactcaagtattctcagggtttttcttcccagtgcaggactcttgtgctgggaagccaatgtaggattcagaaccctctttctttgtagagaacctctgcaactgtaattattctcctgtttatgagtcactcacccaggggtatgggtcctgactataacatgactctgttcctcctatccatcttgttgtggatccttctacacaaatttagctgtagaagaacttttcaggtaggttccaatcatgttattaataataaaaaataattctgtaaatagttgtaattttggtgtacctgtgataggaggtgaggctaaggtctctctactctgccatctttggcaaaagaacctctgtggaattatctgtcttgatctaaatctacataagagagaggggagcaatacagtaaaggatacaagatgaaacaaaaatagtggtaaggttcataacccatttgtatgtatgcttttttgagttgtaccaaaagagtaaggatgccaggacatttatgatgatgaaacatttctaaatgcaaaggtggcttactaaatgatgtctagatcattagaattcaccctgcttctatgcatggatctagccttctgtggtttatataggagaatcttagccagtctccttcttttacacacattcccccctatactctggctggcatctcctccttggtgtgaaggcgcctccctgggcagtgtgccagagaagcagtaatgttggttgtttgagttagcacaaactgtttgtcaaacacacagatgatagagagaaaaaaaataattatgtgatatgaatcaaataaggaaaatagtgttttccttccttccttggtcatttatgattaatcatttaaatatttacatttaggggttaaggtagataggcttataggtacactctcctgatgcttagaaaaaaatgacagtgtctttctgctagggaaaaaaagtgattaaacaaatgcttttaaatgaaaaattctacaaaggattcccaatgtttttaaggttattttttaaacacaattactta

SEQ ID NO: 37407 - DNA, 3013 bp, Bovine  19866880944975
  misc_feature (1)..(1): n is a, c, g, or t
ntagggaagtttaatgcaaagaagaattttctaataataagctattcaataatcactgtgattaaagaggttctttgtgccattttcctatgcgtgtgtgtgctaagatgattcagtcgtgtctgactccttgccaccctatggactgtagcccaccaggctcctctgtccatgggattctccaggcaggaatactggagtgggttgccatgcccttctccagggaagtggtcaagtaacggctgtatactcatatgccacagatacttaaaggatagacataacttaaactctaattagataatgacctatggtgcattttcaactttataattctacgtttgtttaaaagtcggtgttaggaagataatgtcacatagtcattcctccattcattcaacacatttattcagaatctactatgtctacaaaggctttgttgtcaaatgaatctgaagcttaaatctatacagtgtcatttacttggcagtgtgatcttgaacagttactcagccttcctgagtctattttctcatgtaaaaaccaaagctaatgtgtactaacgtagctggtagttagcagcgtggttattgtgaggattaaataaacaagaaaagtaatgcttggggcatggtgactagcgtttaatagacactcagtaaatattagatccttagtttttcttatccagtttgctattcagtactagaaatttatcaaactactaaagaactaatacaagaaacagtggatcttaacccataactctacttcaaataagaaaacatgagtcaaataaataattcagtttggcaggcagaggcttgtttgtttttagcagacccatgtctcacagagcattatcttctcctaaatatccagaacatgaaggaaaaaaaaaaaaggtgggattaaaaggctcatttgaagatgtaatttgggatccttagtgttattcattaaacagcatctgaaaacataattttatttttacattggagcccaagctcttcagatcttcggcataagggcatcaatggcaatcaggtatcagactttaatgattaaaacttggtgtctgaagatatttcctttgtagctagctatgtaactgagagactaaagttaactaattaaggtcatttttaacattaaagagctgtaggtgtttcatactaacgtaagctgtaagaacttagggaagttcttttctgtccaccatcctctacataacaggatattttagaaagtttcaatgctgtgaggtaagaggcagtttcaataaactgagaaacaaagtaaataaggagggggacagaaggtattgtgaaaacaatgacaatgatggaatcacagacttgaagtggagcttggagtttatctaacctagtagttctcgaagtgtgggacccaaccagcagcatcagcaatacctgagagtttttaaaaaagcaaattatcagactccagcccagacctatgaaacagaaactctgggggttggggccaacagtctagaatgtagactaaaatttaatccagagaggagattctcaaacttttgtggactttggaatcatctggagggcttgttcaaacaaaaattatttgaacccattctcagaaatcagtagatctgaggtgggaacctgagtttactgttctaacaagttcctaggtgaagctagttagtgctgttggttcaaggaccattctttgagagtcactaatccaattcaaatctcacaatttacactagggaaccaggtagcttgagaaggtaaaactgaggtcacactgtccgcgacagacctggatctagagtccagaacttctgcaccctgttcagtgctttttccattatatcgcatggacttcagtaaaagaaaagcaagaaatcatacatgtacattctctgcatagagaaaatctgaagtgctgcaactgaaaataattgtatatttcagagatgtgtctctgaatatagatactagggagtatagatactgtgatgttcagtttcagtctgtttcttctcttattttgtacctacacattgatctcaaatttgtcatcaattccaattaatgcgttagcaataatcatttagatccaaatgataaagttgaccttattttaagtaaaataatgatgtgcaaattcaaaatgccttcattaaatataagccaaaatatccactagccagttagaacccaggctgagaaacgatgaaaagctcctcttatatctctaattacagaaatcatcatcatcatcacagcaactaatattttccagtatttcctctatgtcaagcatatgggaaagtgatttaaatgctccatctcatttaattctcaaaattttatcaggtacctactgttactgtcctcatttatttaatgagaaagagaaaccaatgagaaattaggtaacaaggtcacttaaaaagtgatggagccaagattcaaggccaggtatgtcaggctcaaatcctatacttttaagtactatattaagcataaagtcatcttttgctaaatataattgtgaatttacatgcggttataataaataatacaaaagatcccatgtatacctgactcagtttctcccaatgatgaaacttgaaaaattatagaacaatgtcacaaccaggacactgacattgacacaatccaacagccttactcagatttcgccaatgggataccatttctaaaaaattatgtgtcataaaaggtagcacaggtaattaaagttctgtggatacttccaactaccacctttcatacaaagttcaccagtatgacctagtgcaaataaagtgagtggaaatcatgaattaaagcaataatttcccctttcagaactttccatttattttacttactagaagattattggttgaaggtgggacaaaaatggaaagcaagaacaaggtgggtgggggaggtaaggaaagaggatttggtggccatacaagcatcacataagcatctaaaatattttt

SEQ ID NO: 37408 - DNA, 2381 bp, Bovine  19866880957604
  misc_feature (1)..(1): n is a, c, g, or t
nagccctatgttgaaaagcagagacatcactctgctgacaaaggtccacatagtcaaggctatggtcttcccagtggtcacatacgatttgtgagagctggaccgtaaagaaggcagaatgccagagaattgatgcctttgaactgtgtgctggagaagactcctgaaagtcccttggacagcaaggagatcaaaccagtcaatcttaagggagatcaaccctgaatattcacggaaaggactgatgctgaagctgaagctccagtattttagtcacctgatgcacacagacaactcattagaaaagtccctgatgctgggaaagatcaagggcagaaggagaagagggcgtcagaggataagacggctggatggcatcatcgatgcaatgaacatgaatttgggcaaactccaggagatggtgagggacagggaggcctggtgtgctacagtccatgggatcacaaagagacatgactgagtgactgaaacaacacatggatatttggtatcatgtaaaaatgaagaaggaaatggcaacccactccaatattcttgcctgggaaatcctgtggacagaggagcctggcgggctaccgtccattgtgttgcaaagtccgacacaactgagcgattaatagtttcactttcaaaaataacttaagggagaggtctatattgtcatttctaactcaactatgttataaaaagtcttgaaacataaatgtttggtgtgacttttaaataagcaaagagtgttttagtcgcttcttagtagtaagtttagccatttccacttggactattaattctctgaaataccagagaccttcttcagtgtgtgacttacaggcttcaggggagaattgagccatatgcattggttgacattaaagtgtaatttatttttattttctaaatggagattggcatgtttagaagaataaggtggcattcttagctcttaataaaaataaatctctgttggtagtgaggtttgctgcacggataggtcccaaccttgtcacttctggggaacagcagtgaaactgtttgttcctgacagcagacagccccactgcagagccctggtttcatgttacattaagtattagtgctgttctttcaggagctattatgctgtgacatcaaagattttctgacagggcagtggtaggttagcactgaagttgtctgctgaaattttaaagaatgaaattaaatatatatgatcagactttaatataggagatagagacagaatgagaatggtttaaagaaagttgaagaaatggtgaatctatatgctggcctctttgtctctgcttgtttaagccaaattgtattagcttttattcctatagaaagtacaaatggccattttgttaatgctaggatagttgatcattttcagaaagactttataaataaggaaatgtaagcttttttgaaataaaaatggttaggttgacttgtaaaatatttgatataagtggacatgtggacagtaattgcagtggcctgatttgcttcttgctgatccactaattaaaagaatcaaactacatattgtattaaagttacaggagtacaattacatggtaagtaaagatataaaagccttgtaactaaaaaggcttacgatttcatagcagttgtataaatagaggtaacttaaaaattaatctgattacaatgttgtcattttaaaagcctaacttttgttaaatgctgggaagtattattagtcatttttgtctctgtaggctttctatttaagagaagcattgctataactataacattactatgatattttcatgaaataatcttggtaatatgaaatgtcaatttgataagcacaattcagtgtctagacattttagacaatataacagttttttttaaggttatgcaaataaatcatatgttaaagtgaatatgtttgcagtattgtagttttatttttgttaaagtaatagttaatagaacattttttttcaattatattcagattcagtctgctatacataaaataggtaagcagcaaggatttactgtgtaacacaggaaactattttcattaccttgtaataacctataatgaaaaataaactgaaaaaaataactaaatcactttgctgtacttctgaaactagcacagaagtgtaaaccaactatatacttcaataaaaacaccatgatatacttgttttaaataatataatactaatagtgtcagttgagaagtaattggaacaaaaaagaaatttcttcacaggtacttgtgtatttgaccgtgtttcaagatagtttccattcggttgatcgtattctgtcagaagaaagttatttaaaaaaaactaatttaaagatctttg

SEQ ID NO: 37409 - DNA, 1676 bp, Bovine  19866880996693
  misc_feature (1)..(1): n is a, c, g, or t
ngaggaaaattggcctattttaaaaattcttttttttttacatttgtttccatttaatcaacttctgaattttgaatttacaagtaaaatataaaatgatgctagtagtggctttgagtttggttccttttttgtttttattgaagtatagttgatttataatgtgccaatttctgctgtacagcaaagtgactcagttatacaaatatatacattctgttttaaaatattgttttctattatggtttatttcaggagattggatatagtttattttaaaatttcttaagtgtagttctctcccactataaagatacatactgaaaataggtatattgaggtttaaaaaagaattttaatcttggaaccaactaaaattgcatcctatatttaatttttattttaatataatactttaagacattattagaagacattttcagcttttttgaggttagaccctttaaacttttacagacaacagttcagagaatacctctatttatactctttgtatagatttgtgtgatttacaggtatgctaaggtagggttatgtaccccaaatgctaatgtgttttaaattatgtagtaatttgtaacaggcttattttctccaaggaaaatgtatatagcaacctacattggggtgggactagtgaacttggcaactcttaattcttatgtatggcatggcagggaaagaatgaaaaatacctcagcttttaattatgactctttgggaccttttccaaagtactcatcataattagtcatgtcttagttgtgaaattttgtgtctaatttcttcaattatgtccacacagaaaactcattaatgttatcaagagctgtgcaagtaaattatatgtgaaaatatataccccttcatattgtatgctgattttttttcttttaaattttgttagcaccccctttcacatctttggatttttcattttccctttttgatctatgcctacactgacttctattaaaatctcagtaaaataggacatttgtatcaatgtccttttacttttatgaggctgtgattatatagtttttacttttggttatttcacaaatttgtatctgaggtaatttaaaaacaaatataattttattatatttagtaggaggggcattaaattatttggtcatcctaaattgtttcaaaggaagcttctatttaagtatattgctgctgcatcttaaaagcaagtaactttgactattgataaaaagtttgtttgaatgttatcacatagcatagttggtgtcctctctgcttgattgggggtgaatgtagcagtttcagtagctgaggtgaaaagatcataatttaagatatataaggagagaaggaaatacatatcttaagtggctgggacagccttagggccactggacagtactgttggtaaaagtaaggctggttgaattcctcttgacaagatgaaaattttacagcttatttggaagaacttctgatctgaatagtgatcttcaaactttttggatagagcatatcaccagtgaagtatttatgagcatgtgccctaatacatgtccatatttatttaaacttatacacatgtactattgtgctagtatatgctgtaaaacatttacaatagatattaaaagaaagatgtattgatagaataaataata

SEQ ID NO: 37410 - DNA, 890 bp, Bovine  19866881038338
  misc_feature (1)..(1): n is a, c, g, or t
nacaatgtacttactcttcttcttgaagaataaattcctattttctggagaaaactgcccactcacaggatgcctgaaggctgtggtctgctggttatggctaaaaagaaaaagagagagataatgaatgagaagtcatgtgagtggaaaggctcacagacacaacaggtcagtgatgtctgaagacccctgctcatcgcagactcctcccagggtgagcccgccggccttgccttggagagacactctgtcagaatccagctgcatttaaaaaccaaaaacctccagctcaggtgccaaagcccactaaagacatacaggggtttcaactgtaggcaagtcttgcccccaagacaacactggatcttagagagacagtccatgaagtgcttactcctacagactgactccactcctacaaagtgactcgctcagcaaaaagttactttaagacggcacgagctgagaacaagaatgaaggaaagcagacggcactttcaacagcttccgaaacccacgaagcagggcaagaattctaagaattaacacccacccagaaaaatctatcttcttaaaattcttctccctactacagaatgtcttcacttcagtgatgggatataaatgtatgggcatgtctctgcaacatgacctgtacaatttcaacactgtgcagtttctatcacccttttgatgtgaggagggatcagcttccacgccgagttgacagacacaaccagagtgtgtaggtgttttgtgtattcataaaggctgcctgcttctttgaaagaagagggagttggctttagaggctgctgttctgctccatgaataggctagggtaacctctttttttctttaaagaatatgatttatgttaaaatgttttt

SEQ ID NO: 37411 - DNA, 1424 bp, Bovine  19866881068042
  misc_feature (1)..(1): n is a, c, g, or t
ngtgaggatgataatcctttttttttctttctaataacaacaaatgaaaagtgctactccaaatatactttaaatacaaaatattttgtttgtgccaattaaggtcagctgtgaagagcatctgattgttgttgttgctgctgttttgtggacacagtggaaggaataataagcccctgcacccgtcctccctgtttgctggctctttgatgacaaacggcagatatgtggcgagcacatacctcatttacatcacatgcataatgtactctatctgggatattagcttctcagggttggcagtgtcgcctaacacacacggtgatcagcacatttcttgaggctgcaataatcagaggaatacagcagtgatgtgggaactagaggaaataacatggcataatgatgtacccatcactgttctgttgtcatccttcctaaccagtttgctctcctttagagcctaacaaaagggtcatgaatttaatagagtaagacatggaactgggtgcgagaataatatgtctatttctgagctccactttcagaggaaaggggaaaatattgactacacaggggacaaactgccctgaaagcttttgtggtctacgcatgtgcctatgtaatcttcaaacaagacgtgcagtttttcacaaatgtgtcaggcctcatttaatctcaactaagcatatgaaaaccaaaagtcagatataggaaattaactaaattttcaaaaatctgcaaaacatacgtttctaataaaatatcatctgttatattaatagcatgctgtttacaacatttattcttagcatgttaacctcttcatggttttcacacatttaataaaagataacaatctcatagcagttttcacccatttgttcaagactttagcaagagttcattcctgcaagtattttacaaagcagtttgcatgttcctgttctatagccacttgcagtattcccaaataactcttacacatgggttcaataaataattggaagcccagatgtttgaaacggatatagcagatacactgtattttcagtacagctactttccttttgtcctctcatcaactacatagcactgcaccctgccatttttcagttctcttctaattaaacctagatgagcatttggcatgtatgtgttctcactcatgcccctctcaaatgcatcatgtggaggcatcctgtgctactgctgctgacttgagacattccaaggaggaattctacttcttcagactgaactgcagcattctttgtctcttcagttcacctcctgataagaaacatgatatgagacatgatttgccacttcacatagcaaatgactagaaatctgtgtacaatcccttcttagtccgagcctcactcatttctggggtctttttctagcaccattaagctaaa

SEQ ID NO: 37412 - DNA, 768 bp, Bovine  19866881219889
  misc_feature (1)..(1): n is a, c, g, or t
nctgctcttgcttgttctctttccctctctctctacttccctcttagtttctccccttccgccttctctatttctttttctaccaatcccccctcacattcctaattttctctgtctctctttccactgttgtgcttgtttcagggttttctcattagaaaaaacttagtcatcaccatacagcagtgatccgctttcagaggacagatattaagagagtgacctgtttaagatttttatattttaaaagtcctagataggggaatgttgtaaaagaggtgaggcacatccatttattaaagtgctatctgcaaggtgcctcccatatccagatgtggaatctttagggacttcccaatgcccagtcttatttctagcaccactgattgtaattatgtatatttcacatgggcaaaattaactagcagattgtgatactaacttttaggagctgatgttttaaaaaaaaaaatttcaaacttgatttttaattttttattctatatcaagaaagggatttgtcctaattgtcttattattttacctaaattctcatctgttttgaatttctctattggctttgtacctcgggacaggtagttatactttgtaaagtttaaaataaatagtctatttctagttaatttttttcccaacttcttctgattatgaccaaaaaaggatagagggctgattttgaaactgttatggtgaaagatggtatttgaaaacttttgatgagggaaattgctgctgtatttacatttt

SEQ ID NO: 37413 - DNA, 1059 bp, Bovine  19866881270211
  misc_feature (1)..(1): n is a, c, g, or t
ngggactgacctcttcagtgacgatcgagacagcacctgagcagcctggttcatggcccggacccaagcattcatgtcctcctgggtgtcggcgctgaagtagtaggtcctcatgccggactgctcggcctgagagctattatagatgagagcccgcatcccggtgtgcacagcctggagacagaagatggagacccaggtcagagaggttagtgtgcgtttcatttccaggagcaaaaaccaagagatgccccaggccagttctccccactttcagactgaaagcccacgcaccacccagctgatttccacagatggaaaaaaaaggctgggttcccgttccttgacacagacaggcccagcaacagctgtgtctgctccccgcagcgaaagccctgcagctgtacctgtttcctgcttatcttactcccacttatggaagggtacacagtcaattcaaggcttatgtgagaaagatttttaaaatttaaaaaaaaaaaacagcaacaacaacaacaaaacacctcattccaaagaagcagactcttgggaatccctgtctcagttcttctgaagcacctgatgactggaattgattcaaaacatctgctcaatagcagatagcttggtgcagatatttactgcacttccctgcttggcatgaaatgtgatatgtgcccatcaaggaagctgctcttctggctctccaaagaggtacgacaaagtctgaccaagcagtctaacacctgactgaggaccctggcatacctactatgtgtcaggaagcctccaggtgctctcatatgttctataggtaccaggaacgacccctgaaatgcaactgggatggaccatgaagaggtaacactagttttcccctttgggctctgataagcagggtcttttaaatttgcaaggaaaaagctcaccaaatccacagaccaagatgatgcggaaagagaaagatttacggagcgccttctatatatcttctgggtacctccgtgcctttatctcattttaatcccaatagccttgaaatgtaggaacattcagaat

SEQ ID NO: 37414 - DNA, 1386 bp, Bovine  19866881325003
  misc_feature (1)..(1): n is a, c, g, or t
naaaacttttatcctgtccccctgcttagaaaccatatggagcttccatttattcagctgataaagtccaatgttctagatctccctcttctcctttcaggcttgtatctatccttctatcctacactcaccaagtactgcagggctttgtgaagttcaaggatacagcgatacatatgacagaaagaggcgtaatccttgaagaactctcaggttgttggagaaggcagacagcagtcgagtagagacaagtttggtgagctgtgggataacagaggaggaacacctgtgtaaaagtgagctgaatctgtgaatggtcccccagtgtttgtaaggtcagaacacaccaaatactgggaagaagcctagcgagttttcatattaggaggaataatgataatgaagcttttgcattatacagacctaaactaagcttgattaaaagtattaatgcttctgagcctcaacttcctcatccataaattgagtaaggcataatagcagcaccagtctcacaggattgttgttaaagtttaaatgagataatgtgtgtttgttggaacgtagtaactgttcaataaatattggctgttgtgattattattcagcgtcagaaaatgcaaggaaaaacatctccaacaatttgcttcagcatgaatccagcaagtcttataaacctatcttgttgtaacacacttcagcacaagtgaaaggagtaactctaacaattcagttcatcagtaaaagaaatctgtgtaaagagtgacaccttgttttctcaagtatgggttttgcacactgggtttttttttgtttttttttaagagaggtattttaatacttgtatggtgatttgatagagtcatacccaaagataggcaacagaatcgcctgggaaaggtttctaaaataccgattctgggattctgcctttctcccctaccctagactgttccagtatatctggacagggcctggacatctgcgttttaaataagtgcctccaggcgcttctgatctggggctcagttagggaacccaagacagaaccaggactctgaggccagccctgggcttagcttctcttggtgctacctctgtctacctgggtgacttcctgtccctccggctctgggagtcccagggttgtccggcatgggcacctgatgagatgatgagtggcagtacttttctgtgggctcagaaaaagtaagggattgtcattcctatttattcattataacaatccccttttctctaatgattgaatcagagttactgctacaacatagcttttaagcctgcagttgattttgataggatttaatggaaagtaacaagaacctgtgctctggcctgagaacacattctttgctattaaaaagc

SEQ ID NO: 37415 - DNA, 1065 bp, Bovine  19866881379609
  misc_feature (1)..(1): n is a, c, g, or t
ntcctttctgtatattgaagaaactgagttccgagcagtcatcctttgtttagggtcctaaacttatttttagaaggaccaggaacagaataatggctcccatagcactgctctttctttctgttatactatttattctttttatattcttctttaaaaatagtgaaagagaaatttcaaagcgttcagagaaatagttatctaacaatacggtaagttttttcggaagctctgtttcagctgcatttaaagagatgatttttgtcttccctgttttgcagcagctctatgccgctcagctggccagcatgcaggtgtcacctggagcaaagatgccatcaactccacagccaccaaacgcagcaggggcagtctcacctactgggataaaaaatgaaaagagagggaccagccctgtaactcaagttaaggtatttgctttgcaggattatggaaacagtttggaaaatagcttcacaaggaaggtagtgaaccaggctgtgctgggcataaacagcaggaagcaaagcaacataaaggaaccccaaaatgttcctctttatggtaaatttcatgattgagcactgagaaacaggtgtttcccttttgataacaatagtgccatattgtgagatctttacctgaatctgcaaacttacttctcaacagtttttcccctttggattctggcttttattttttaatgttcattggcatgtatggccatggttttatttccagtctttgtcatagtcgtgtgacacttctctctaactttaaacaggtggggagccaactgatagtgctagaggaggaggatctcaaaactttagattgacaagaaaaaaagagaacccgatgctgggcctttatatggtttgatggtaaaggtctctctccctcaaacaatagttataaatgtgggctttgaggaatgaatggtgtcataatctaattatgcttcaatgccatgtatagttgtgataggataaataggatcgcccaagttatgactgaaacattaatagatcctttcctcactgattttcagtgtcttaaaatgga

SEQ ID NO: 37416 - DNA, 1218 bp, Bovine  19866881416931
  misc_feature (1)..(1): n is a, c, g, or t
ncatgggcttagttgcccccaggcatgtggaatcttcccggccagggatagaacccacgtcccctgcattggcaggtggactctcaaccaccagggaagttccatatggcacttactaaattttaaaattgttttatgtatttgtctttttgttgtctaccaaaaaaaggacataagctccataaagatagagactaatcagttaatttgtttatatcgcttattagtatttccagtccttggcacaatacttctatcaataaatacttgctgaatgaatgaaaaccagatgcatctgattctaaacacaatattattttcattatatcatgctgccaccttaaaggatcttagaaattatctagttcaaatttctctttttactcatataaaaactgagatccagaaagataagttatttacccaagatcacaccataataagtgtcagaaccacaatgattccaggctttcttacttctgattcaggctttgtcttttagactacattgctttgtgctaatagccccatccaaaaatatgcctaagaagttttccacaacatgggcaaaaatacaggcaaaaatttttgcaaccatttacaacctcagattatacaagaaaggaatataaatacagatgtatgaatatgaacatatacatatttttatatataaaaatggtatacaaagcactgtcaaaatttttgacatatttgcttttgtttttaaagaaaaatttgaaaatatagacaaatgattctctattttacactatataattcacttcacaatataaaaaaaaagttttatttcatatggctaatacatttataataaactttcttagggaatcatactttgtccctaaaatttactctaagttttcccaacaacaagtaagtctctaaaattcacacaatataaaatataaagatcatgtaatcttgaaactaaaaaagaaactaagcaaaaacagttaataataaccacggatcaaaaaacaaatacttgaacccaggaatcctatatcatattcctcttagaatctaatttctggcctgtaaagcatttagccatatgtctgtctattcagttcatgaatcaatgcaatctacattatcataactgcatactatccttcagttccttccacttctttagaacccaaatcaaatagctattacaccatctcaagctggactgtcacctggtgactg

SEQ ID NO: 37417 - DNA, 2006 bp, Bovine  19866881621008
  misc_feature (1)..(1): n is a, c, g, or t
ngagcatccaacattttttaaagctcagagaatttgggtactgaaatcatctctactgctgaaagggtcagaaaatgaaaagagtgcaagaagggtatagcttttgtaggcccattttatattttctcctttgatcatagctagtaaggaaaagtacacatttttcacagaaatgattcaatatcattaaaatggttttgtcaggaatagaataaggcagaagaacacaagtattaaatgggaaggaggaactccatatcctttttgttcagtaggcatcatctggtgttccctttcaagttagtatgcaactattcgttatacatgctttaataatattcttaaatatccctctagggctgtggaagagatgagatttaaagtgaaatctattccaagactttaaaaaaatgtttcttcatataatagtaaggagagacctgtatttttatgcttaaagtgaagcgttacattcctattaacatttgtttaactaggcttctatcacaacaggtgcacaattatttttatgagtaaaatattatcagccttcaaaattagccagggcaaaatgcaagttgtctgattaaagtaatcagagctgaaccttaaaaatacatttgatttccacaggaattttaaaatgcaaagtcccagcctcttattctgatatgttgaaggagttgcaattgtttgtggtatgtaagtagcagcttgtattgcaaataagttgatatatttcacataattcaattgaccttatgagacagtctactaaaaacataatagaagtttattaccctagtctagcattttaatctgtcagtgaagtagtattgtttcacgtgcatagagcagaaaaagtgactcttttgttttgtagactattctgaattcagttaaagggcacatcagtttagaaagttaaaatccagtgtattttttaaatttaatttatggagggtaaaaaaataagaatataaatttcagttcatagaatgtataaatcgtgtgtacaccaaagttactgaatatcttggtgaaaaataaagacccctaaatggttaaaatcaaacaatcaaaataaataaaagcaaacaataacatacacacatactcttctgagcacaacaggaggcttctctaggaggcactttctaaaccatggttagaagtactacaacagtgcagctgttagaaaccaattatagccaggtaactgtttgttttcacatctaaatctgtttgtcaatcaggggaatgccgtgaatcaggaaagggtatcttgtacaaaccacagtaaggcagactatctggaatgggtccaagccacaggaattagggcaggagtatagatggaatcaaaaccatacatatgcacatggctgctgtctttgaccaacttttcaaatagactcagaagtagagactattggagaaaaacattagttttctattgagagtagtctgattttaagatttcttagaaacgtgttgttatttatagaaaagtgattgtagaagacatcttttatggatcttcaaatgtaagacatttctaaaactggctcataattatcatttcaaaatgaagtttaagcttatctttgaaattaaaaaataaccattatatatatatacatatatatatgtatcatgagagatatatatatctaatatatatatatcatcagatatatatatatatcatcagatatatatatatatcatcatatatatatatatatatatatatatctgaccatagttataaacaggtaagcttttactactttgaaattcatttatggcagtttctagcttatctagctacttatgaagaaactttagttttatctggacccaagaatacactgttactcaagttagtgaaaccacctctactgtttaaatatgcagctgttgtgctatggttgcaaaatttcaggagacagtgaattatacaaagaatgacttacataagtctatatagcctagatgttttt

SEQ ID NO: 37418 - DNA, 1357 bp, Bovine  19866881637491
  misc_feature (1)..(1): n is a, c, g, or t
ncttttcttagatctaagattcttctcatagttggcccaatcagacatcctaacaagcaaataaacttaagcttctacccatgatactatcagacggtaaaatacagagcaagtaattttgtggcaataaaactagcacgagtatgccaccttggaaaccattatgttttcactaggttgtattagtcaaatggcagatggtaaaaaaggtaaggtttatcctgcttatgcatcacatcagaaaagaatgcttaggcttccaccaagtcaatatttcctacatccacttatacaactgtatacaacatccttgaataaaagccctattggtgctgtttatagagaagggtgcatttgcagcattttaaattccattttcaaggaggaaagtatctaagtatgagagtaataaatacacagacctggatctgttgttgcaggagattaattttgtgctgctgttgcagaagttgctgctgttgtcttgcaatctatcagaaataaaatttcattaagttaaaatgaaatgcttacacctttgccattacctgaggtacatctcctggtattacaagaaagttttactgtacttctaatacgaaagaattcccataaaatgagagaggcagaatcagaaagttggagagaagggaaatatttcaaacaggtgccatctctctgcttacccctaaatcttgacctgtacatgaaaactacccaccttgtattacatttgtgagcagttcatctatatctgcactggtcatctggaaagaatgggagtttcaaaatctgatccttggagaataaagacaggaaaactctggctacatgtttctgaggagcttaatttggatttaaaaattaaaatccataagcaaggacatgaaagaactttctattacttataatatggcctactttggtgagaccttttctactgtaaagatttttagaactgataatgcttacaaatattgtcaagggaatgtcaaaagaaaaaaaaaaacagcaaaaagcaaaaacttttctttttttttgctgatgtaatgtgtaacatacaaagcattttttttaaacaaacaaaatttcatatttattcacatctttttttactgtaatgtgttagttttatagtacacaatgcacatatagttttgtattcccttgcttcatccaacaaattcaacaacttaacatgtcatctggtctataaaaaaaaacattaactacttaatgcaagccccattgaagactgaatcttcccctcaggagagcaaagaacttctttaggataatagtgtttactataaaacatgagttaggtgtcaggctgcttattacctcaaaatctgag

SEQ ID NO: 37419 - DNA, 1277 bp, Bovine  19866881667647
  misc_feature (1)..(1): n is a, c, g, or t
naaaaatagtgtatttgaatttatatctaatatgataacagtggttattttaatgatccagaggttggttacttaactacttgtttttctagttattttaaatattttataatatctttcttattgtgtccctttggcttgttcagtaataacagaagctgaaaattaatagatcttgaactagtgtgatgactgaattattttattgaggtgggagggaagagaacaataacaaatgttttagaagatttttttctgatgaggggtgggatggactcactgacaagtaaaaggctaacaaaaatgctgattatctcaccttttcaacaccaaatttcttcatctttaaaatgaaggtgttgaaaaagatttcctgtttggtttcttctagctctaaaattctgtgcttctacaactaatagactgtattattatgtagttcatatttttaaacaaaaacttgcatacaggtttaatgctttgactgttagcatacaagttggtgttttatgtatatattattacaggaagacaatttaaagataatttgaaatttgcaaactctataaaagcaagcaattaaagtggtaaagtgttttttctaagtttaacttctcagtttttaaaaccataaccctcttcagaagaaattaaatttgactgcatttaaaatcatgtgattttaacagaaataaatatttatgcaaattatttgtactactgcacgattattggtattcatgtctttgaaaaagtgtgagttgttcagttgtgcctgactctttgtgaccccatggactgtagccccccaggctcctctgtccatgggattttccaggcaagaatactggagtggggtgccattgccttctctggggatcttctcaacccagggattgaacctgggtctctggcattgcaagcagactcttcactgtctgagccaccagggactccccaagtccatatgtctttatttttcatcagtttttttttttcctatcacaatagaacactgaagaatatttgtaatttcattagctgtgcagatgaattcttaattaataactttgtttcaactatgataaatatattatttatcttatatattggaaggtgaagctgtatagtagttatacacttatgacaggtggttaaaaatgtaagttagactgttatggtctaatgtttaatacaatttctaatgtaacctgaacactaaaaagcacccaggtaaggtgtaaatataactttaaatatttggactaccacttttc

SEQ ID NO: 37420 - DNA, 798 bp, Bovine  19866881776405
  misc_feature (1)..(1): n is a, c, g, or t
natctttactccaaggaaaacttgtctctggcacagattttattcttagcaatattcccctctgttcttatgtgtttgctactattaatattttttttaccaaatactatgtaagcagtctcatttgcctccaaattgtttcttcttccctaggagccttctgaaagttacttcgttggataaagctttctggcaggcagctccttctcaaaaacgcccctttctcaaagttaactactatgtttccttgctgtcagtgcatgaacagcaaatgaaactccaaatcatttcagctccaatatattttaatatacaaatctcactagaaggttaatgttttcgtgttttattataatttcaaccacattattttacgttaacagaaaaggtaagttattcattgattttcctagatggatacactgcactttgacaggtcaactgtacactctacagtaatttccttggcagctgaacctgcaggaaaaaatatccaataaacagatttcccaaacagtgagcttttgcccaggatcttcaatcctgaaacttttcagtacattccaggaagaagagtctgggagaagatgagcttcactacaaagtggagaaacaggaggctgatagagtgttaaagaccataaattcccattccatcttcctttccagagctcagctctttactcttgtattcccacccagcaaccactgacttcagagcctgtagataaactagatacaacaatggaaaagtgaaaaatacttcttcggtgctttacaaaatttagtcatagaaca

SEQ ID NO: 37421 - DNA, 1972 bp, Bovine  19866881865276
  misc_feature (1)..(1): n is a, c, g, or t
ncatcgatagctttattgtttaaattgcgtatgactttatttaacgtcagcgtttcttctagctcctgacaagaagtcacattttataactaattaaattgatccctgggaagcaaaagccactaaacggaattattcctacccaagtgtcaatatattaaatcaaagggctaatgagttgggtcactgcttcttttattgggaggctacagcagaataggactcatattatcctctattttctgccttaacaatcaattttatttaaaccaaaggcagctaattaatagttttggatcttacagtaaataatatcttctttatgacacataaatgggaaatggaaaattttctttgatgacacatgcaatatattttttgcctatttttatgacatcggggtcacaaaaacatctaaagacgatctaaaaggtgttttgcaagcaaatgattttgagaatttctaggtttcaactattagcattatgggtttaaatcaagatgaaaatctgcctcttggagccgacaatagtgcctaacgaaagtgattaaggaatgactaaatttgtcctgtcagcctttcctatctctcctgcagctgctgagtaatactttgaatgatttcactatttacatctggacactacttttaaaattcatcacctaataaatcaagccactcactgtttttgacataacttagcttcttttggtaaaatctctgcagacagtggaaaacatcctgttttattattgccctcaattaatcgcatcaatacagtttattcagagatgcattttcatgcctaattatttatatctgtgaattttacattttattctggggacttccccccataatttatcatttcagtatttgtagagaaaatatattcataaaattggttttggaaaatcttagatcttcactaatctataaatcatgttataactatgtaaaaatctagcaagttgaaaaattcagttctataaaattagtcctagtgatgattacaacagtaaggagaccacctccaggaaacacagtggaaagaaagaaggaaaaatgaaggtgcaaagagtatatatacaagcaattgcaactgcaggacaacaaattcaacagtgtcttcagttttagggtgaggatttcattttgtacatctggcaattacccaaaataacactagtttaaaggtagtcctgagatcttttgggttgaattaacctatttatcacataataggttgtcaaaagtcagttttgtctgtaatacttaactttgttgatttaccaccaggatcaaatacatcatagggaacaccacagatgtttttgacaaaaacatgttctttcacccacacatagtttgctttttcaaacactgaattagggtttctttctttgtagacacagtggttcttttttgaagcaaccttaaatagtcacttttatccatttatagatgtgtgtgctttggaggtcaagcatgtgctgttgtttcttaccacaaatgttttccttcattttcaatggtcagaagtcacaggcgagtttgaccccacccacagacagctctgttcagtatctggagaacccaaggttggctggagatcactgaaatacacatgcttacttcacaaacaaataaaaaggtaccctaacacagactaatggaatttgacactgaaataaacaaacaaaaatactaactatatggaatgtgtatgtatttaaatgtaaagaacacccattttcattaatgcagactactactgcaaacagacatactaagatattcttgataaacacttgattttattgtgtaatagcaactgaattaacaatattacttttccttctacctcatagcttcaggttttaatttaaacacatttaaatttagaaacaaagctatcaggtttttatattagttactttttcaaggcaaagaaagtcaccgtctcaggaa

SEQ ID NO: 37422 - DNA, 1151 bp, Bovine  19866880444542
  misc_feature (1)..(1): n is a, c, g, or t
naactcaagggaccaatgaattatttaaatgcaacgttttatgcttgtgaggcctgcagcttccatattattctcaaagaaatctgaaagctaaaacacgttaaaatcttcagtttttgtagttactcttcctagaggaaaattaagatatttagccatgtttggtccccaaattcttagtttatgatgatgattttcagattaaatgataaaaagggatgtgagagtacttgccaatagtctaaacaatgttaccttcattacttcagcattcatgaatacctaagctttaatttctgaaaaaccttgttaaaaaataaaaatgcaaatagtttatttcatactaataagccgttcgaaaacagaaagcagagttatattttatctaatcccaaaataatcttatcacagttttcttaccagtcaatgactctttcgcatcatcttcttttaactcatctttggaatcatctgtttctgtgctatcataatcgaatgactgattaactggttcagaggagtgaactggctggtcatccatcactttaagtagcaagaggagaaatatgtttgaatcagcaaaaataagatccataaatattaacgtattcttggaaaattgaaatataaactcaaagaaatttcccattcaccaataagcactgattggcagtgaactctggggtcatgtgatatctgttaagtattaatactagagactataaaaggaaatattttaaaatctcaaaactatatttttagcagaagagaaaaatttaatctaagaacttcgaggatgaaagacaagtccaaccacaagttacaattcataaaggtttctgaatattattcaaagttaagttttagtcgactacctcaaattctaagtacacatattacaggaatacagaaaaactaaaatagaggtggaacttttataaaaacccttaaaaaaacaacataaacatttaagagataaatgttaagaaaatattttcaaagtagcttataggcttgattttcttttaagaatttaacagattccagttaaaaattttaatttcagaaatatggtttaaaagtaatttgtaattttattttaacatttttcagtgtactttatctctgaaattcttttaacatgtgtctag

SEQ ID NO: 37423 - DNA, 1934 bp, Bovine  19866880541313
  misc_feature (1)..(1): n is a, c, g, or t
nggaatgatgtgattgatgactattgcaatggagtggcccttttgaggaggaaacatttaagaagcggtttgcgtaacaggcatgcaaatatcagagaagaatttggggcgaaggaaactgctaattctaaggccctaaattgggtttgagggggaaggtatgagaaagtaaaaggaaagtaagcttggaaacactcttggagacgtaaacaagcacaggttacatcctgtagggttttgtaagccaatataggaattagtttattctgaatgcagtggaaagccctggagagttttaaatagggaagagacacctatgttttaataattttaagctctttgctgcagagcacggatcttaagaaggccacaaaggaagaagggagattaaaggattataatctatgtaagaaggagccccgaaatttttaatttccgatgacattgacattcctgttctaaaatctgttaggtcagagtcctggttctgtttgccatattttgttaaaaaaaaaaaaaaatctagatattcttcagttactgctgtttaattacaattggagaaataaatgggaaattttattacacgggaaaacaaatggcccccaaaaaatcattacctttgatttttttcccctccatttacaactcacagataaccacctcttctgtccaaaggtcagttctaagaatagccaacataaaatgatgttcaatgcagatatttattcctgagtataagatttgaaaagatagaggtctaaggctagaaaatggagatgtttcactaacaagaaacagagatcaggagaactgggttccaactagaagaactcattaactggtgactcagccaaatcaagcaaggtaccttatcatccgtaagtctcagcttcctcatgcataaaacaagacaatgaagtagcctgcacgcaaagtggttaagccttaattatattttggcatgcacacacccacaggagggaagctggaaagggaaatgaaatgaatttctataaaaacctaacagagtcagcagcacaagtcaaatgaaattggaagctcgtacgcgcgcgcgcacacacacacacacgtatgcacacacacacagcagctgagaaactatcaaactgattaatacagataccaggaatgcttccctaagaaaccttggccttctcagagtgtgaaaatggaaacattccacctgctcaacctcatattccctttctctgtagctattttgaacctatgtagtgtgtaataatgattcacatatccctaatcaaaatttaagaactagaaatgtttaaaagatatggagcaatattttaaagttaagccaacacctcgattttaatgaaaataagatttcaacactatagggttatttttttgaaaggaaaaacactgaatgagaaaaagtattattttaacatattaagagcattcatttaaaatgctgaaagaatcaagtactctttgaatgctgtttgcagtccttataatgattaactgaaacagctgctccatactgctaattttaatgcacaatgggctcaactctcccattctaacctaaactaatacagcaataaaccctcccaactcaagctagcaagacagtcactgttgtctcttgcggtctacaattatttctaggccaacaaatataaaatgagaagaaatcaggattgaaatccatttctacaggtgtccctagttctagataattttttattttcttttttaacagcttgattgatatataatccactgatcatacagtgttcaaatgtacaattcagtggtttgggtatactcccagagttgcccaatcattagcaaaatctaactttggaacaatttttttcccccaaaagaaaccccttatctgttagcagtcaatcctccaccctgtccccagccctaca

SEQ ID NO: 37424 - DNA, 1835 bp, Bovine  19866880578314
  misc_feature (1)..(1): n is a, c, g, or t
ntgatgcatttatgctaatctgatgaacctttcaactatttatgtttataacctccaagctattgagttaaaccatatgacattaccatttttttttgttttgtttaaaggatggttgactattagaaactctatagcactcagtcttatttcacagataagaaagtagagttgcaaataatgactcatttggtaaaaataacagagctgctaacatctcaaaactgtttttttttttttttcaggggtttgtagataaaggacaattttacgaggttcatgaatattgtctattaaaatgccattgcccttgggatttctaatttttggagctttatcactaatcatatctgtatgtgagttgtttattccacttctttcccagagagtaaaatttagtgggtaagaggatgatgaaaggaaatgaacaccattgtccaagaggaaaagaaggggtgttgctgaggaagaagtaaaggcacgcatgggggtaatgttgggggagagagggagagaaagggggagagacatatgcagaactacagggaaaacagccagcagtttcatgagagctgagtggaattttcctgaaatatgttgtctctgtagatgtcccacttgttttatgtggattaatagtcatcagaatcaatatgctctaagtgatgtaagtgaattttaacattctttcgtttaacagattcctagtgtgaaccatatttaatgatcagcctaaaattggaaatagatatttattgcggggctctaagttatgagttcattttgtaattgagttgggacaaagatatgatttcagtttgttcattatatgcactatggcttaaataatgcttctgaaaatgcatgcatgtagatgaaactgcatctgtgcatctaaggaaaaaaaatcctgtcctttttgttccagagtattgagaaaatgggtttgcagattgattttggcagttaataaaagtaaagagttacaatattgtatggtactctaaaaattagagagcgtagagctgcttaattacaagtggccagtttttcagctttgtatttctatgcttgttatgaaatcagtaggaattatttttctgatttttctagttctaaatatgccaagaaaacaatagccctaccctatagtgctgacattaataaatcataattgtgttctcaatggtaaaagtatacagtatcctcaagtgttcccatgaaatgagtatgaatattgtccccatttctcaggtggggaagttgaagttcagtgaaactgacctgctgtgaaatggcagggatgagattagagtctgaatctaacgctgattcccatgtgttcccttttcacagatggagagagggaagagggaagaactttccacacttggacttttttgagcaccagtgaatttcatgctcttgtaacagggaagctcttgccaaagttcagagagagccctcagattctgactaccagagctctctaaccttgaaattgttgctgaagaatgactgttgtaccctgccttcatggcagattggaacttatattggcatgctgtccttctgcttaagtgggtcatggctctgtgcctttccttatctagggaaatatcacattatcaaccaggggcaccgagggatgtatatgagaactagtggtacagatgtatatagatggcatttcccagtggtctgctgtgagaacctatcccagtgtactgtggactttcaagctgcagtaacagagaaatgctgttccttctgtccacaaaggaggaaagcgtgtagggaaagaagttcaatttctctttctctgtagccataaa

SEQ ID NO: 37425 - DNA, 818 bp, Bovine  19866880636971
  misc_feature (1)..(1): n is a, c, g, or t
natttgacttatgaagtagtgctccagggtagcaggttttcaatagataactttaaacctgacctcagttatatttctgcttccttacataatcttgttgcagtcagtgaaccaattatatgtgaggtcagttgaggtttactggacacactgaactcttatctaagcaattaggcccataaagatttactgcaagaattacaatattgtgcttttaaaatggtgagtttgggcctcattaacaggataagattttttagtgtctatgtggggaaacctttgtctttagtttgcaagtaattttaagcggtttgagagactcaccagtgttacagaatagcatggggaacctatgtcacctttgtgtcaggatagatagtgcactaaattgcagctacttgtcagttttaatgacttagtgacagaggttacacgaaagcctccagggaagtgttacctaagattccctgacttagtaatcagtgcttgagaaacagtctgagaacctaagcctccaatccttatgatttgccttatttttactattgtcctaattgcttctcgttatatgagaatttactttgggaaaaggatttcgtttgagatttctttagatacatttttaagaatagcactctcaaaaggatgagccccctcaacttttaaagctcttaaacatgccctgaagtctcctctagagtctctgagtgctcaagaattgatgcttttgaactgtggtgttggagaagactcttgagagtcccttggactgcaaggagatccaaccagtccattcgaaggagatcagcccgggattt

SEQ ID NO: 37426 - DNA, 1273 bp, Bovine  19866880702878
  misc_feature (1)..(1): n is a, c, g, or t
natgccgcaactgagacctggtgtagccaaataaatacttttttttaaagtcaattaaaagtttatataaaattatatatatatgtatacataataattacataaaagtattgtataaataatgataatgctcaacactcatttgtttctttctgaggcagagattcagagtcatgtattttctaataatcaagaaggaaatggcaacacactacagtattcttgcctaaagcaatcctatggacagaggagcctgactgtctacagtccaaagggtagccaagagttgggcgcgattgaatgactgagcacgcgcctgttttctaattaatcatttaggctaatgctctaactctgctgtcgaagctactgattctccacccttaagtcagagaaactggctcctaggagttaagtacgataagcagttgattgcgaaatgcttacagctctacagaaggcatccctgttttgtgcccagtctgtcaacacccacggggccatgctgcggcttttgaggccgagtctccagcactcgtccagagttatcgagaggctagccatatttggctcttatctctattgggtgtttcatcactatgactctgcatgagaatgtgtgtacacgatacaacattagtctaggcttgaggcgcttgagaatgttctgttcactgaccgcaagttttaacgaagcatataatctgaacttgggttctgttcaattatttgactccttaaaattgtttacatttgtggaaaaccatcagcaaatacaagtcaatcgttttttcttttttttttcccccttggctataggcctaaactactgatctcagttcacattggtggccacaatatcatagtctagttttttttttcttcttctgatttggtcatgacatgctttttaaaatattctttctttaatatagtctattcaatatatactactaaatttaacttttttcattatattatttcctttccttaaatatgtacacatttgtattacttttttttttttttaagaaaccaaactgttctttatttcaaaagctctcccatgtattgagggcttccctagtggctcagaggtaaagaatctgtctgcaatgcaagagatacgggagacaggagtttgatctctgagtcaggaagatcccctggaggagggcatggcaacccactctagtattcttgccaagaaaatcccaagaacagaggagcctggtgggctacagtccgtggggtcacaaagagtcagacacaa

SEQ ID NO: 37427 - DNA, 2706 bp, Bovine  19866880745035
  misc_feature (1)..(1): n is a, c, g, or t
ntaagattagaagactttatgctgattattcggagaaggcaatggcaccccactccagtactcttgcctggaaaatcctatggatggaggagcctggtgggctgcagtccatgaagtcgctaagagtcagacacgactgagcgacttcactttcacttttcactttcatgcattggagaaggcaatggcaacccactccagtgttcttgcctggagaatcccaggggcgggggagcctggtgggctgacgtccatggggttgcatagagtcagacatgactgaagtgacttagtagtagcatgctgattattagcaaataatgttgctcctgtcttaagcctacttcagtggttcctgagaataactgaactctgccactgaattactttttcttttcagacatccttgctcaaaggtcctttccttctcagtaattcttacttatggattttgctaagctgcaataaaagtggaaagtgaagtgttagttgctcagtcatgtctgacttgtcaagaccccaagactgtatcccgccaggctcccctgtccatgggattctccaggcaagaatcctggagtgggttgccagctcctccaggggatcttccaacccagggatcgaacctgggtctgctgcatttcaggcagattctttattgtttgagcccagcttcaacttggatttggactctaatgacccagagcccaggagctgagcccaagacaaagaaaacacacagcagaggccaagagagaggctgtgggaagagtccagatccctgagccaggccagtggcttccaaagtttttaaagcaaacacagactagagagccttacaacggaggtataactgcaggaagacaacataaagaactttctggaactggggagtagggaggctcagcatatgctgctgaattcctaacatatgacagcacatgcaatgccatcctgggctatggaatatataattttcactaggaactcctaaaactgtcatttgctcatgcctcattttatatttgttaagtgacacactttcattacttattcctagtccttatgtttccttcagagaagagaacatcaaagtacagagagattaaatgagctggatatgatcacatagtataaagatacagaacatggacttccctggctgtccagcggttaagactatgccttccaatgcagggggtgcaggttcgatccctggttggggagctaaaatcccacatgcctcctggccgaaaaaccaaaacataaaacagaaccaacattgtaacaaattcaataaaaactttaaaaatggtcttctcagttcagttcagttgctcagtcatgtctgactctttgccaccccatggactatagcatgtcaggcttccctgtccatcaccaactcccaaagctcgctcaaattcatgtctattgagtcagtgatgccatccaaccatctcatcctctgtcgttcccttctcctcctgccttcaatcttttccagcatcagggtcttttccaatgagtcagctcttcgcatcaggtggccaaagtattggagtttcagcttcagcatcagtccttccaatgaatattcaggactgatttcctttaggatggactgcttggatctccttgcagtccaagggactctcaagagtcttcttcaacaccatagttcaaaagcatcagttcttcggcactaaggtttctttatggtccaactctcacatccatatatgactactggaaaaacccatagctttgactagatggacctttgttggcaaagtaatgtctctactttttaacatgcatagcttttcttccaaggagcaagtgtcttttaatttcatggctgcagtcaccatctgcagtgattttggagccccccaaaataaagtctctcactgtttccattgtttccccatctgtttgccatgaagtgatgggaccagatgcaatgatcttagttttctgaatgttgaattttaagccagctttatttatctgagatcccacagagtcaaagctgtacaagaacaatggcaaatctcgcttttgagttttaatagaaattaagccatctgtggatggcaagtgtgtgctgatgattcagttctgttctgtcctgagtttgatttttccctccctgcccatctaggtgtaaaggtctgcttgcatctgacacacaaatctctgaatctcctgggtaagtgaactgtatttaaatcctcaaggcactcctcctgtgaccttcaggaacacaggttaggacctgaatcagttggccatatttactcctaaaatttctagatgttgtatcctaaatactaggcttcacatggcactgtaaaagtggtgtttagtgcttacttgttttatgtaaaaaataaacccattttgtgcttttttattttctaagaaatggtgacacaaggaatgatgctcaaggtggtcttggaagaagcaacatcttaggcttgtttgttttatagggatgcttctgcaggatttcaagtcatgacgctggtataaagtgttgtaaatttccagaacattggatatagttgtataaaaaatggatgaataaaaactgactcaaaaataaatccaaatggggtgcttcaggttatgtggagtactatattttcttccctagcccggctctattgtgtaagtcctaccatctagaagagcctc

SEQ ID NO: 37428 - DNA, 2055 bp, Bovine  19866880765327
  misc_feature (1)..(1): n is a, c, g, or t
nctccaatgactcataaccatcaccgtcattttataccatccaaaactaagccatcatgtctcctcagcctgcaaatgcagagttaactttttcactcttgctatccacatactaactagaacagtctttgaaaaacactgctcataaccctccaatggcttctcatctcgctcatgataaaatacatactcctctgcatggcttacaggtgcctgcatgatttggcccctcactgagctttacttactcctttggtcataccagacccctttggagctcctcaaaaatgcagccctctggtctggactatgcttttccactcagatctctgtttctagatttctacttagatgtcacctagagaaatttgttgaatgagtaaagtgatataattctaaacattcattaggtcagttgtctgggaaataagatgacatttcaaaagtaaaaagagcgatgagacaaaagtagagacaaatggtttatttggtaacaaggagtaaaaaggaattcttgattcctcttctcgcttttggcagctgaagtgaaatgtgatagtcaaatagacagcaacacacacaggaattccctcacagtccctgattacagaaatgcaaaaatgcccgtcacacgactcgccattactcttttctagacagaagtgccaggagctgggctttccgggatatccttggtggctacattctccttcttgtcttcaggtttcatggcaggaaacaaaagcacctcctacaggagagagaatggattctgaagctaagaagcactttttcccgcccattgacccactcggccccccgccccgttactgttatcaccaaaacccggagatctgtgttgtttcatttcagtttagtccctgtcagttacaaacaatggaaaagaagaaatgcacaactaaaggatctcacgtgctgcaactgagaccagagccaaattaataaatattaaaaagaaaattgtacagcactgcctaggtcacgatatcaaaagacggaataaacagagaggttctctccaaatgatttcttcatctataaatatgggaatagcaatagtttctacatgtctcaggttgacttaagttaaatgaggtaatgcatgtagatggctcagtatgttccttggatcctgaagaaatgcaaacaattggtatttcttctgccttgggtagaaaccccccaatttgtacaatcagatgccctgtccgtcctcctgtgaagtcaccggtaacctctccaccttcccctcctcccagcccaacgcccttcccttgcgcctccaacactggcgcacacagcggtgctccttcggggctgccgcataccttgatgttattggagtctgtgagaaacatggtgacgcggtcgatgcccatgccccagccccctgtggggggcagtccgtactccagggcggtgcagaaggtttcatctatgaacatggcctcatcgtcgccagcggccttggcctagaggacagaaccacacagtgacactgttccaggctgcgcgctctggcgtctgagtgagcatgtgaaaactgccagaggcatttccatcccagcgctgctctgactcccagcacttgctggaaactggctttccaggaactccaggatggagccatttctttcgaagacctgaaggtcaggactgaggaaccctactccagaacatatgtgaacttctctgccaaatggaaatacctccactgcctggggctctgcgagtccagggaagttgattttcagagactggtaattcccaacagtgtctgtcccactgcctgaaccacccatcgtggcaacgctagtgtgggcagccctgtgggtgctttgtcttcccatccccaggccacctcaataaatgtaccatctaagaaaacgtaacatccttgtcgacacaagtgtcacactccccccacagatcatcacgcctgagctccatttatatagaaattctagggccaaaactgggtcaagttctccatcttgaaatctgacctcctcctgtgaggcctgtggctttcag

SEQ ID NO: 37429 - DNA, 1689 bp, Bovine  19866880780537
  misc_feature (1)..(1): n is a, c, g, or t
ntgttcttgcctggagaatcccatgggcggaggagcctggtgggctgcagtccatggggttgctaagagtcggatacgactgagcaacttcactttcacttttcactttcatgcactggagaaggaaatggcaacccactccagtgttcttgcctggagaatcccagggatgggggagcctggtgggctgcaacccatctatggggttgcacagagttggacacgactgaagtgacttagagtagcagtagcatggcttagtttatgaaagatacctattcagtagatttaggactttaagaaaatttaaataactcagctaatgtttattgctaaaatttcaagctagaaaagggaaaggcactcagagaatggtgatgatagtacttccctggtgaaaggtggctagcaggcttctaagaaatctcatgggatggcattaatttggtaaatttgtcaaggtcctcagtctgctaggctcaaaatctgattttatccttacaacagagagcacacccgactcccaggagaatgttaaagacatatatttttatctatacataaattgatatataaagccagaactgcaatatattacattgcaatgaaaatggaaaatttcatatagactacatgatatatggtttctatatcagcattttaatcagaaggagacttgcatggaaagctaaatccttatcagaaagctgtttggtgaacctcctcctctgaacaggaggataaattacaggaattctctataagaaagaagatattaaagatgaatgggaccagataagtcaaaagtctcttagtttccttatctccttcctacacaaggcttagatgggaactgccagcactggcttattactgagattaaacaatctatcatttgaatgatgcaatcttttttctttttttttggatatgttgacggattcaatcaagtgctgttatgaatctccaagtcccagagttattcggtctctgagttgtctctgcgtttctgtagccagatccatcagtatgttgagtttatagttttactgtaaaaaaatcaccttatctccttaatataaagttctcgttccagtgtatcaactattaaaaacatctactgcaaagaaagtcacaataagtccctttaagagagtgatcacacattggatatttttataagacagttaacgacccttaaaaaacagagaacctgtctttgtgctctaaatgaagaacagggtacttttacagaaagatctaaacctctcccaaactcaaattatacttatggctatccaaaataaaagtagcacaaaagacaaccaggtagaaatgaaaggagtaagaaggcatgaagtgatactcagagtattatttcagtctacatcaacctagacagtttcccaaacgtgtcctgtagcacactggtggtccccaaaatgtaaatgtgcaaagagaacagaacgctaggtcctatggtgaaatacccttgaaataaaaggtaaaacaaagttacatgtttatttacagtaggaattctctgagcttttaatattcatgtcaattgtgacctcttgggggagaacctacatctggtatgcactgaaataaaggaaacatttttttaaataaaagattcttcaacacaatatgtaaacaaaatgggggagaacaaaaacattttta

SEQ ID NO: 37430 - DNA, 4254 bp, Bovine  19866880800122
  misc_feature (1)..(1): n is a, c, g, or t
natacgataaattttttatgttgaccttgtttcatgtgactgtggtaagctcacttgttagttctagtaatttatatactctaaagttcattgatttaaagtgtacagttcagtatttttagagtattgacagtcatgtaaccatcaccataatctaattttagaacatttttcatcacctcccaatccaggtagctctctttcctttggatttctagtctaactccattgattagagaccatattttatatgatttcagtgttttatatttattgaggttctttttatgatcaactttggttaatgttttatgtgcatttaaatattggagaaggaaatggcaacccactccagtactattgcctggaaaatcccatggacggaggagcctggtaggctacagtccatggggtcacaattagttaatgctttatgtgcgtatacagggatatcatttctctgttgtcgagtggagtgttttataaatgtcattatataccccagcaacgtacattgatagatgtgttggtgttggtcaggtctatatccttagtgattttctgtctacttattttattgattactgagagaggagtctccagatataactgaaggtttacctctttcttctttcacttatactagtttttgtatcatgtattttgtgcttcttttgtccgttgaatgcatatttagagttgttacgtgttgttgctgaattcatccctttgtaatgtaatgactctctttatccctgataaaacccttctgttctgaaacctactttgtctgataatatagccacttcagtgttcttttgtctagtgtttgcaagatatatcttttctgtctaatttttaaccttgctgtgtatttatatttaaaatgtgtttcttataatagacagtatattttttggtctttctattttatccagtctgagaatctttgtcttctatttggtgtttttggatcaactagattcaatgtggtgattgaataaaatctactctccttgccagttcttttctttgttttgctagttattttctatttgtttcattcgtccttccttatctttttatctctcatttatggtctgcttctggatgaattcagaatttactatgattctattttgtgtattattggagtgtgtgtatagtcactcagttgtgtccagctgtttgtgaccatatgggctgtagtgcagcaggctcctctgtccatggaattctccagatgagaatactggagtgggttgttatttccttctccaggggatgttcccaacccagggattgaacccctgtctcccgctctgcaggcagactctttaccatctgagccaccagggaagccaatacaatgtaaatgctatgtaaattgtaaatacagtataaatgcagtgtgaatagttgccacatgacaaattcacgttttgctttttggaacttctggaattttttgttgtcccagatattttcagttcgaggttgattgatgcagaaactgtgaatacagagggctgactgtaccatgctttactttctgcctagaatgtctctgatactttcattgagaaataacaaataatagtgaagaattgcatgttgattatatcccatggtatttctgattttggctacataaatatatggatacattgtctatgaagaaaaagtctaaattcaaaatgtagtaaaaatttcagatagatttttattatttttgctatagccctcattgctatatcattgattgatgatagtattacaaatataatatccacttcaataggcactgggatacctctgtttgtcagtatttgatattcaatttattatgtaaagttggaagtaaaaaatctccatttctgtttaaaatatatgttttgaaagacttttcactgtgaaaagttttttctttattatgtacaacttaatggctatatttaccatacaacttaatctgatgaaattgtcgttagagaaacatatgttttaaaaaacctaaaaatagcagttgaaaaaaatgttcggaacttctctgatctatgagtaacttacttaaggtcattaactctgtttattttaggttccttttaatggatttgtgatattaccatctaaataatcagtcacactcaatttagtttatggatgtcattccaacaaaattagttatgagtcattaaaaacatgatcttgataagtaaaaccatcaccaaacttgcatgaataaaacttattaccagtatacttttgaggatggccatcttatgttttaagatcagatctcataaaatgagcaagctaggcaattcatattttttgttaaaatcaagattgccctaagagtatgatttagataactttaaagattaatgcgtgtaatgacttttatggtacatatttcagaggagactacatgactcacatttgtgaagtgcatttatttacttcttttttcacaatgttatgataatttgacattaaattaacttcatatggcaatttctgtagctatatttcctccttggataaaagtacacttttgtattaaaattaaaatcagaattaccttaattttgaaatatgttaccagatttttttttttaatctgctacccttcatatatggagatgatggcacaggtccaatcattagcatgacctaagtacttgtttatttttctaatattggtgtccattgtaaatatagcgtgctcaggtccaccagggaagtcccagttttctcttctgtgagattttcccagtgtatgctcagcttattccagacttgactattctccgtcctactgaccagttttgaacttgtatctgtgccggtctttattcttccctctaaaacgcactctatttctcctagaatccttcaagatttggtccactgatagttctacatggaacttttctgatctgtcattctgggtgtaacttttccctcctctgaaactccataggactgaatttgtaccattgaggtagaaagaacatgggttttaaatacaaattatgtcgttaccattaactttttgtggtcttgaactccttgagtccttatttgcttgcctactaaattaaaataatacccttcaagatggttgtgaaaattaaggcagtatgaaaaggacaaaccataatatctgtacactttaggcacctaaatacttaggctaactcataaataatagtttcttgccatgtaccccactttctctcactccagatggcattgtagttaatttctgtatcttatttccatctcctcctttctgccagtcatgtctccctagctaaatagggaattttttaaaggcaggagtctggtttatttattatttattaattcatttcacctgatttttgtttattagattcctgttgtttcccaggggctgttagggcactgatgatgtacagacgttcttagtatctgtaggggatcggttccaggactcccttggacacccaaatccagggatgctcaggtaccttatatgtggcatagtatttgcaaatagcctacacatatcctcccatatacttgaaaccatctctgctgctgctgctgctgctaagttgcttcagtcgtgtccgactctgtgcaaccccatagatggcagcccaccaggctccaattacttataatacctaatgcagtgtaaatgctctataaatagttaaaaatgcaatataaatgctatatatatacagtgggtagatcacagcaaattcaagtttttgctttctggaattttgagtttcttttcccaaatgttttcaatccacagtcagttgagtcctcagatgtagaacctatgggtgtggagggctgactgtatagatgatgctattgatattgactagatgtccttgcttgcccgtcagtgggcaacagtacagcagcatttaagatacagtgttgtatacaagccaagaaagaaacatacataggttctgtgggaccctagaagagaggtacccaatcctctgagtatatgtgtgtgatttggtggaaggggtctggagaaggtgacattcaaactgagtcttcagggataagtagtagtcttctaagtgcagaacactgaacaagtcattatggttggtggcatatgccatatatatatggcacatattgaaaacaagctgtctaaaaataggaagtgagaggcagcttaggtagcgtggcacgtatgtgtgtagagagctgatgccaagaggaaga

SEQ ID NO: 37431 - DNA, 1326 bp, Bovine  19866880885847
  misc_feature (1)..(1): n is a, c, g, or t
naatttagaaagaaggtaacgataaccctgtatgcaagacagcaaaagagacactgatgtatagaacagtcttttggactctgtgggagagggcgagggtgggatggtttgggagaatggcattgaaacatgtataatattgtatgtgaaacgatcgccagtccaggttcgatgcatgatacagggtactcaggactggtgcactgggatgacccatagggatgggatggggagggaggtgggaggggagttcaggatggggaacacatgtatacccggggcggattcatgtcaatgcatggcaaaaccaatacaatattgtaaagtaattagcctccaattaaataaatttatattaaaaaagaagcagaaactaaaacaactaagaataaacataggtcaagattctcaagcttggtattattcatggaaatgcaaattaaagcaacaaatgcacatatttcagttatcaatttagaaaaataaaagtacaattgcatttaatgctggaaaaaaaaaaaaagatgtaatggaaaaacctgaacaagctttttggccaaccctatagctctgaaacccttggtccatcctactgttgttattctctttatataaacactttctaagatttccatatctcagagtagctggctttgtcactctgtgtttagtatccactgaggcagactgataaaaagattaaagtagtcttgatttcttcagtataaaaatttacctaatatgtagtagttttgtggtttctgcaaatctaccgtgatactttattgttttaattatcagatcagaccatctctttagaccatttattttatagagaaaatagcagatatatttagaaagccaacagtggtcattagaatttctaatctgtatttcttttgtatagtgagagccatactcagataaaggaagtgtgcagttgactcttacaggcaaaagttgcgtcccttgaattgattgtatatattagaaatatgtatatgcatgaaacatataagaaatatataaattctttattataaatccatataacaatctaccttagaaaaggcaaaatgtcaaataaatgcagttaaacacataaacaagacttgagtttcagcatagaccttagacccctgggaagtgagtcagctctgcaggagactgaggtatgagttggtttagagttcctttcttcctgacagtgaatgcaaatgtcatccaggatctacaaatgcaagacacgtaaatcgggcttccctgatagcccgctggttgagaatccgcctgccagtgtgggggacacaggttctgtccccagtc

SEQ ID NO: 37432 - DNA, 2092 bp, Bovine  19866880910927
  misc_feature (1)..(1): n is a, c, g, or t
ncgcagaaggaggtctggaaggaccctcctcagctcctcgtgatgatctccgctgccacatgggaacgtggtccagaatattcacaagaaacctggactgttaccaaaaggccacccaaaccatctgtgcttggcctgtggcctcatcttgtgacaatctgattgttccaatggagaaaactgaggcccagagagggtagagagtcccagtacagggtccccagtgggtggttgccttgcccagagctgcctgacccatgcattagcagctgccccagggaagctggaggcctccctggtggctcagtggtaaagaatttgcctgccaagcaggagcggagaaggtgatggcaccccactccagttctcttgcctggaaaatcccatggacagaggagcctggtaggctgcagtccacggggtcgctaagagtcggatgagactgagcgacttcactttcacttttcactttcatgcactggagaaggaaatggcaacccactccagtgttcttgcctggagaatcccacggacgggggagcctggtgggctgccgtctatggggtcgcacagagtcgaacacgactgaagcgacttatcagcagcagcagcagccaaacaggagacatgagtttgatccctgggtcaaggaagatcctctagagaaaggaaatggcagcccactccagtattcttgcctgggaactcccatggacagaggagcctggcgggctacagtccacggggtcacaagagtcagacacaactaagcgactaaaccaccaccaccaaaacgggtacctgtactatcggctgtgctccgccataaattcttagctttgtctctaaatcacatagatgaaaagatacaggaagagtcatttcttttaatggagaatatttataaacctctcaccatcgttctacaccaaaggcatctccaatcttgaagacggagaacactgccgcacgttttgtcgcagacggcacacttggcgctcacgggcaagttaccctcgagccactggtgaggcatagccacctacacagcaggaagaaagggcagtcgagttaagaccatggaggacactgttcttagcccacggaagagagacaatgatttcttactctatggaatcagcagcatgtatcattcctggcatgcatgcatttcccccacttttaatgagcatctattatgcccaagcacgatagggatacaaaaataaaactaaacccctaccctgcaggatgtgtattctcgctgagcacagagagggattatcataaactgaccaggaaggggtatcagagatttgcatgcaaaggagataaggttttgaaggtgggggagcaggctccaaagtccgaggagtgaatgtctgggtatacagctgagctgagccttacagagtaccttagtcggccagataagggtctgcagcatcagcccagcccaacaacccctcctaagcccttacacaccaatcgtcttaaaatttaagagctgaaagaagctacgaaggattgaattgaaaataaaaagtcccaatctacccaaactttccatctaatcctaataatcaacacttcctcttaacttcctgttgtaatttaactaattagatggctcccactgaacttccacgggagcagagaacgaaggagtgggggtgtctgggaggagaggggagaggaagggagcctaccccgtcctcgttctcgatgatgtccttcccgatggaggccagggtcgtccacttgcagttgttcattgccctcactgcacagcgtttgtgagccttgaatttacacactaaaaaaaagccaaccattgctaagtgaacatatacttttggaccaacgatgaaaggaaatcacagcatgaaatttcaaagggctggggagggtgagtagaagaaagacaatattttttaaagtttctattactcttcaataaccgtcgatattctaaaaagcaaatatgattatgtgcttatgaagcattctgatcaagctacagattgctaaagagatttcatttactcctaaaagaagaaaggaaataaatactaaaagaattaattcttga

SEQ ID NO: 37433 - DNA, 1709 bp, Bovine  19866880956047
  misc_feature (1)..(1): n is a, c, g, or t
ntttggctgtgtcatgcagcatgcaggatcttagtttcctggccggggatcaaacccaagccccttacagtggaagcacagagtcttaaccactggacctccagggaagtccctcttctagtcttctagtctataatttctcaaggggcatgttaaagttttattaaatggttaagtggagggattattacaaatataagcaccctaaaagcaccaagaatgtctgaaccatactgcaaaaagagtgtgaatacacattataaagaaagagaaagtggtgcataattatatttaatacccttggggacttttgttgtaacaggataaaagtcttagttacaaaccaccaaaagaaaaaaacacacatacacatattttaaaaatatataacattctactaacttctttctcaatgctgtgggatttggagctgtatctaattattttaaccagcaggtcttggttgcttctcttggatgaagcgtactgtcacatctgaataacacaggtcttaaaccaatattctgttgcttacgtattcttagaaaaagagccatgcgttacttatgataaaacaatcaaatccacaacattatacgtcaaaaccctacagtcacagaaaacagaaataaaattaaaatagtcaactgtagagaaaacatggttagcctgaatagcagtaaaatttctagaaaatgggcaataaaaaagattatagtgttttcttgaaaaacactcaactgagataaatattttgcctttcgccttccagctctatgctggaagttgatttttctcttctttcttcagctggtcattgtccaaaaatccagtgcagaaagttttccattatagataatagaaaataaataactatgtcagcacagattatacatccaactctaccaaacattgaattacttttgacatataataattgccttagtccatatggactgttataacaaaataccatagactaagtggcttataaacaatactaatttatctctcagacttccagaggctgggaagcccaagatcaaggagccagtagattcagtgtctggggaaggcccatgtcctggttcatggacagctggctttccagtgtccttatgcagcagaaggggcaaaggtgctctctggggtcgcaccatagaggcactaattccactcgtaagagcttcatgctcataacctagccacttccctcagtcccacctccaaatatccccactgaggattagctttcaacacaggaattctgtagggacacaaactttcagcagtactacttttattctctaggccaataaagaattgagctgtttcctttgaaacacagaagtctgtgacccagtctataaacaacatgattaacaatttttactagccaagtaattttttcagcttattttaaggaggcaagagtcctgtatgtttttttttttcaaaagtgaaagtgaagtcactcagtcgtgtccgactctttgcgaccccacggactgtagcctaccaggctcctccatccgtgggattctccaggcaagaaaactgcagtgggggttgccatttccttctccaaatcatagactaaattttgggaagtttattgatataaaccattagtacaatatttacaaacaccatctgcaattacaaaaaaaaaaggttttaagaggattatataccaatgatccaaaatg

SEQ ID NO: 37434 - DNA, 2449 bp, Bovine  19866880988864
  misc_feature (1)..(1): n is a, c, g, or t
ncttaagatcccacccttgccatcctgtatccggctgatctccagcacagacgttttatttcctcacttataaaatcaggatgtgagtccttattttctgggtcactgtgaagagcaaatagagatgatgtaaagcctcttcctcctccttgtaacacaaggacactgggttcctgtacccaagtcaaaattaagaatcacggtggctcagatggtaaagatggagaagggaatggcaacccactccagtatccttgcctggagaagtccatggacagaggagcctggcgggccccaatccatggggtcacaaagagtcggacagactgacaccatgtctggtgagcccagagggagcgagtggggcagggagagagcaccaaacgaagggctgggaggggggcctaagcctcatcccttttggtggcaggctctcggcccctctttgcagctggcttcctccaggttaaacccaggcaggggactgacgttcgtgaggctcttcagcccttatagttgagtgggctctggtcccgaccttagacttgcagctcttctctgaaaagcagatggggtatttttggcttctcggtatgtgtttcttccacacccttctccaaaatgttttcctgtgctaatttatttggctaaggaggtttgtggtgagagacaccaaacaggaaatagctgtcatagctgctgtctgcaacgtttgtttttttaaggctttctcctgtctagctcaccttctctgtgttgttcagtattgattgaaggtcagggtaagtggaaggggaaagggaaacacatttttagaagagaacattctccttctagttcaaagtttactgaagggtaaggattgttatgcactatggcaggattaggtggctcctttctgccacagggcctttgcacatgcaactccctctgcctggaatgcctgctcttctggtttttggttagttctgcttctttgggatcagctcagaaggccttccgggcccctgtgctcaaaaggccttccgggcccccagtctaggtcagcgcttggtgctattctcatagtgccctcctcaagtccattcatcttggtttacaatgacatgttcacctgggtgatttctttttcataggttttttaagattcatttttttggccgcatctctcagccaggtgggttccctgaccagggatcgaacccatgaccctgcattggaagcatggagtcttaaccactgaactgccaagaaagtgcctgggtgattttttttaggttaatttctctcctctttcttacaagcgggccataagccccacgcacgcagggacgatccctagcttggcatgccatgcactccagtgcacagcacggcgccaggcacacagggagtgctcagactgcttctgttgactgagtgagtgaaacgtcaccgctcacaggcaggcaggcaggctgggcatgacacaatgtctggggtgcgtgttcacctagtcccctctgcctgatcgctgggccactgttctcttgcaggtcacttctgccttcccttctctagggcctcgctctcatcctcccaaagcatctgaaacattaacccaaggccaagactggtgctgggggcccattagaatcctttccccagctccttatggtttatcgggggagaagaggtgtctgaagacagagaactttgaggcaagaaggaatgactctaacgggggaacctcagccaccgtgtttggcagtgaggggaagaggagcacttcctagccactccagggagacagatgtctgctgctaggctgactctgatcctgatacaatatttaccttttcctagagctcggcttcttaagtcagagaagttttctgaaccctgttgcggccagaacgtggtgtcagcacaccgtgggtgtgtgtgaacatatgtagttcatgtgagcttgtgtgtacgtgcttttgggtttatgtgtgcatgtgtatgcatatgtgtgtgtgtgtgtgtgtgtttgaattaaaaggaaggtgacaaagacataggcttcccaggtgatgctagtggtaaagagcccgcctgccaatgcaggagacgccggttcaatccctgggtcaggaagatcccctggaggagggcttggaaacccactccagtgttcttgcctggaaaatctccatggacagaggagcctggtgggctacagtctacgggctctcaaagagtcagacacgactgaagtgacttagcacaagcatgcacgcacaaagacaggagtcctggtgtggaagacccggaggaggacacaggaccctcagagggtctgaggttgagttattaaccgcacggtctgtctcctgggcaggagtggcccttcctctgctgggcttgtctttgcttgtcaacatttcaaaacaggatacctttgtaattgcattttcatgagtca

SEQ ID NO: 37435 - DNA, 1277 bp, Bovine  19866881036600
  misc_feature (1)..(1): n is a, c, g, or t
naactctgcagcagctaacctccttgttaacctttgttctaaaaccaagagacaatgcaactaactgaagtgtaaagagatatgcagaatttacaaattatggatgtttagacaaaggataaaaagcggtgggtttgggattttttttttttttttaacaaaatgaccctctcttccctctgcttctcaggctttataaagctcctatcttaaaggccaacacagcaaattccagtcactcctgctccctctctgtatgaactggaacataataagacactgaatgcttattaggtacaacaagttgacaggcacaaaaaggaatacaaaaataaataagacatacatacagcctaggagagataaaaatagtatataatttatatctattgtttatgtaccgtgttgttctttttccaaactactaggaagcaatgtcaattactggcagagagatgagttaccagtcacatggctgagtgcagatgagcacatcttcccaatctaaactgtaattcattacggcacactgctatttgtggtttacagttgtccatgtgtgacgtctggttcaaaaggggacacttcaaccttgatggccagtgttacatcctagggaagcccagagcttgctgcctgtttttacttgagtccagatctctggtgagtctccaggtacatttatcctcagtcctcatatcttcaaccttaagagtctttgtggtagcaaggcaagtggggttaacataacttactctttgtgtcatgatgctaagtgactgagtctaagtagtgagtatgtcatgagtaatgtgtacatgagtctcacatttgcagcaaagcttgtactctgatttgctcaacataatacacattttgaggacatgtctaaatgtttttataatcaacatgaattattcatatacaaagaacaattattttttaaagttcacatgatttaaccctgctaaggtccccctggaggacgaaatgggaacccactccagtattcttgcctggaaaatcccatggacagaggagcctgctgggctacagtccatgggccaaaaagagtcagacacgacttagcaattcagcacacacacaggcaacagcctacctagatagttctcacagtttaaacctaaaagcaactgttttcacttcttctaaagccaagaaaacagaataaaatctcacatagctgaaaatatgctaaaaataataaagaagccaactttgaacattaatatatgtcaggggatcctaataactaa

SEQ ID NO: 37436 - DNA, 918 bp, Bovine  19866881149682
  misc_feature (1)..(1): n is a, c, g, or t
naatgtcaaaatctcattataaactctagctagcatgaatcaaaacaactctgataggattagccatctgtggaactcttcccgaaaataacaaaatctcatcagggagccaccaatccaaaatgtaattactctaaaataagctgtaatctaattaatggtaaccttgcctgccataaggtaatgttgcaatggctgattcttctgcagacaggatatttaaaaagaaagctaggttggtgagcatttatctgagttaatcccaaaccagtcatgagggggatccccatgtagtttgggagcataaagtggactcagtctccagtctttaaaagagtctggaggtggtttcccagaagactgcccaatttagcgcttaccaaacctcacaaggtattttaaatggctttttcttgtaaatttaaataccactctccccacaacctaggaaatactgtgaggcatttcctctgcactgggtgtgtgcttttccctcgtatgttataaaaattaatgtctccaggtggttagcagagaaacaacacccctgtggtaaaactccttaatacagacctgcaaaaaaaaaagtgaaagtgagtcactcagtcatgtccgactctgcgaccccatgggctatacagtccatggaattctccaggccagaatactggagtgaagccttccccttctccaggggatcttcccacagggaatcgaacccaggtctccctcattgcaggtggattctttaccagctgagccacaagggaggcccccaaagccaccccacccccccaaaaaaataaaggggatttaaaaagctaggactattgttagaaacataagacaattttgttcttgtgctttctttactaatttaagaattgttggttgttggttcagtcactaagtcatgtc

SEQ ID NO: 37437 - DNA, 674 bp, Bovine  19866881161022
  misc_feature (1)..(1): n is a, c, g, or t
nttgtcaaacttctggaataatcttaaactgaaagtaagaagtatttgattttaggataagtgaataaaaatcactctccccaattcttttgtcattctattgttacatattggtactcatgttcagattaaatataagaactcttacaggtgaatcatactataaaaattaatttgagtgcaatgtggaactcacaaaaatgtcttaatcataaagaggaaagaggattatatgcagaaatggagacaaaattaggaagaaaggggagtgagaaatgcaaaaacaaaaaagaagcagaacccaggaaagattattgaaggttaagtgatgggcgatggtaaaaatagtgattttttttctttctatcacaaggatatattatctccatgagtagcatattaagaccagggtggagaatccagggcactgatgctcttgagtggcatgggggcgattcctaaagagatccaccaaacatcactaatgtacccccaccacactgccagcagttttttaacttcctcttttccttttctcaggtcaatctttctacttctgccttccttcatctcaaattttgacacatctcaccctctgaatgtacctttgtatacctcaagtattgtggaaaattgaaaaaatatggagacaatctcaagaagtttcacaaagg

SEQ ID NO: 37438 - DNA, 696 bp, Bovine  19866881491063
  misc_feature (1)..(1): n is a, c, g, or t
natagaactattttgataatactatgtcttaaagaagtaccttagattcaagggagtatgtgccaattgcctcgttcattaatatctaccttgtggttatgctgaatcactcattcagctgttgcttttcatttccctcctccttcccctttcccctccttctcctcctctttgtcctccctgttcacatctagtaaccgtgactactgccctccagtacagaaaccaactgtttttgccaaatataatggtactagccaacttaaaatatcaaaaagtgcatttaacaaaacagactcaattgtcagtaataatagaaatggctaaaatattaactgactgactatacctctaatagcttcaacatttaaactgactcatttgtttcctggccttctcctgtccattaggctgatccatgatcgggagctaagcctctatgatggctccaggctgctgagagaagacaggtacttgcgcttgaaggaggagctgcaaatgtctgatgagcagctgcagcagaggtaacggggtatactactcttactcttattgtcaagtgcacgtctttaaaaattattcttctaaacctaggctcaaaccaagatcactttgaatggcttactaatttggtgtcctagacaagatcttatttgcacactttttaaggcttgagtttgctctccaagatgtact

SEQ ID NO: 37439 - DNA, 630 bp, Bovine  19866881776421
  misc_feature (1)..(1): n is a, c, g, or t
ngccttatgtaatacggtttgtttacaaagaagtggtaagtatgctatccccaaaccagtgttgtaaatgggttcttccatatgtacaattaagtcataaaatagaaacactaaaaaaagtgaatgaatgtatgggaatataaattcttacaatgaaatgatagaaaaatgggtttcaaaaagagctttgctaatgggcagtttcaactacagaggggaaaaaatgcttataaaaaattaatttgttcaggttgcattttcttacagaataatgattttatttgatttgctgaaatgtaaaatctataaatcttatacactgtaatttcaccactgtgttaatagttatgttaaaccttaattttaaaatgttcttgtataaattaaatgtactgttctgcaattgaaatggaattattatatataaactgaccagaataaccaaccacagtgttatttatactagggaaatagtgtacatatcaacatttgatgaaccaggaatatacatacttctactaccgatacttaccatcagaatcagtgctgttgagtgcaattggaggtatgacagatactttacattggccaagtggacatacaggatgatataaatctttacaggcagtg

SEQ ID NO: 37440 - DNA, 989 bp, Bovine  19866882148577
  misc_feature (1)..(1): n is a, c, g, or t
nccttgcaatgcaggtgacatgggttcaatcccttgtctgggaactaagacccacatgtctctgggcaactaagcccatggaccataactagagaacgtgtgagccgcgactactgagccttcacactacaactagagaatccatgcactgcaatagaggatcacgcatgacacagcagagatcctgcatgctgcaagtaagactcaacccagccaaataaataaatactaaaacaaaacagaaggcagcctgacccctgcactaataggtcattgtccacagttctacagttttaaaaatgcagccctagttcaaaagtttccagtgctccactgacttcccaagaatcatctggaaagcaagttaaaaaatgtccaggacctatggaactagaatctttggggaagggatcagtgtgccattctgatcaccctccctgcataattcttaccttgaccaggcttaggaatcactgatctgatccaacctctctactcaccttagcccctagtttacagaaaataaactagagcttgaaaaggtaagttctgggcttcaagaaattgtcaacaagtttaaagaacccaactcatacaaactagagactcttaaccatagtgcagttaagttggaaattaataacaagaaatctgcaacagagcataaaacttacctctcataacttgttcaaaatatatccccacagtaaatcagcaaaactgataaccagttaaagctcagaagccaataaccgttagactgacaataagaatattaaacatctcaagactatgataaaagtttgttcagctcaatggcatgaatgtctaaaagctcattattcgatgatgacaattttttgaccatcaagaaacactgatatataacactctgattagcttaataatgatttgatgaaatatgcaatttcaactggaaatcaaattattaaagagcacttcagcttattgaaaatgattatagaatc

SEQ ID NO: 37441 - DNA, 2809 bp, Bovine  19866880752559
  misc_feature (1)..(1): n is a, c, g, or t
ntctgtcgtctctgatctcttcctgtcttcagtcttttaccacatcagggttttttcaatgactctattctttgcatcaggtagccagaatactggggcttcagcttcagcatcagtcctttgatgaatattcaggacttattaccttcaggattgaatgggttgaccttcttaccattcaagggactctcaagagtcttctccaacaccacagttcaaaagcatcaatttttcggcactcagctttctttatagtccaactcctacattcatacatgactactggaaaaaccatagctttgactagacaaaccattgttggcaaagtaatgtttctgctttttaatatgttgtctagggttgtcatagattttcttccaaggagcaagcgtcttttaatttcagggctgccatcaccatctgcagtgattttggagtgcaaagatatagtcatttacccatctatttgccatgaagagatgggactggataccatgatcttagttttttgaatgttgagttttatgtcagctttttcactttcctctttcactttcatcaacaggctctttagttactcttcactttctgccataaaggtggtgccatctgcatatatgaggttattgatattgctccctgcaattttgattccagcttgtgctgcatccagtacagcattttgtatgatgtactctgcatttaagttaaataaacaaggtgacaatacacagccttgatgtactcctttcctaatttggaaccagtcctttgttctatgtccagcactgtttcttcttgacctgcatacatatttctcaggaggcaggtaaggtggtctgatattctcatctattgaagaattttccacagatttttatgatccacacagtcaaaggctttagtgtagtcaatgaagcaggtgtttttctgtaattctcttgctttttccctgatccaactgatgttggcaatttgatctctggttcctctgccttttctaaatctagattgaaacatattggagctttcagttcaaatactttgaagcctaacttgaagaacttttagcattactttgctagtgtgtgaaacaagtgcaattgtgtggtagtttgaacattctttggcattacctttctttgggattggaattaaagctgacttttttccagtcttatggccactgctgacttttccaaatttgttggcatattgagtgaagcaatttaatcatcttttaggatttgaaatagctcagctggaattccatcaccaccactagttttgttcatagtgatacttcttaaggccattttgactttgcattcaaaacctttaattataatatttggtgctacagtctctgtatcctctaggtattttctttgaagttggctattttatttgggtatattatttattattttattgatgttcaaaattactttttagtaaaaatctaccatcctagtgtcatctatactttgtgtgctaattaatatgcaaattttaatgtatgttcctttcttaaatctaaaattgtactaagctttgcagtgcataatgatatttatctcttgatttataattgaagcaagttgctcttattaatatacttcctctaggcaaggacagaagtatagctatattttttaaactgtaataaaatggtgaaggtttgattaatatttcattttttcatcttttaaaaatgataaaactatataagaatgcctttaggttgagtatttatattcttgaataaatagccagcatatttattcctttatcataaaatgaatgtttttatcattcagtgttattctataatataaaatacatgattttcaaataatgcatgtattttgcaaataatatgggggagtgatatgatactggagaaattaaatgcaatcaaagtattattagtgacctagctctgcctggtgttttattacaaatgcttcagtttggctcaaacaagactgctactgctgctgctaagtcacttcagtcgtgtccgactctgtgcgaccccatagacggcagcccaccaggcacccctgtccctgggattctccaggcaagaacactggagtgggttgccatttccttctccaaagcatgaaagtgaaaagtgaaagtgaagccgcccagtcgtgtccgactcttattgaccccatggactgcagcctaccaggctcctccatccatgggattttccaggcaagagtactggagtggggtgccattgccttctccgtcaaacaagacagaggagggaaaatccctttctggatgttagaggatatagaaaactggtcctccaattttattcccaaatctccatcttcttcctgatagatatgtgaaaaagaaaattagaattgagtcaatccttcattttatttgattctttcaaaagagtatacattttccaagttttattctcacagaatatttgaatttcataataaaaatgttaatatcattttttgcacttttttaaaatgtagagagcctgaattcagagcaaattctgatgctctaattatcctccagctcaaggtattgaatccttatgtagtgcatcccactcagatgtagtactgaatttctcttacaatgcacacttagcacatgcacacacctcaggtgactgacaattcttcccattccgaggaagtcagttccatccatccttggaaggcttttgttatgggactgtcatacagtcaatacaggtcagtcttggtcccatttatttatttatttattattttctcctcattcggactgcagagaa

SEQ ID NO: 37442 - DNA, 928 bp, Bovine  19866880782135
  misc_feature (1)..(1): n is a, c, g, or t
ntgaaatgtattgtatttatattggtgactgcaattgccggtggatgcccataaataaactcaaattttaagcatatttcactggagcgattgatgttttatttaacctggacaagacagatatcttctttgttactgaacagccttgtggtatagccagggcaattttaatggtattgtctcttcctttgcactttcaaataccgtatccccacagctgcagtaccatataggcattttgtacaagtgatgtaagcatagttcttcttctttttttattttttaagcaacagtggggaaaatattttatactttcactgtatatgaggaaaatccttctaggttgacaacatattgagaaaccaagaataaaagaaagaagggaaggcaggtgttagataatatttgagacatttatagagttgatgactggctggttaatctgacttaccccttttcctaaaactcgctttgcatagatttgatgttgttcagttgctcaggctcagtctgtctgactctttgagaccccatggactgtagcatgccaggctttccctgtccttcaccatctcccagagcttgctcaaactcatgtccattgagttggtgatgccatccaaccatctcgtcatctattgtcctcttctcctcctaccttgggataggcttccctggtggctcagaggttaaagtgtctgcctccaatacgggagacccaggttctattcctgggttgagaagatccccaagagaaggaaatggcaacccactccagtattcttgtctggagaatcccatggatgcaggagcctggtaagccacagtccacggggtcgcagagttggacacaactgagcgactttactttcactttcctcctaatttcaatctttcccagcctcaggatattttctaagagtcagct

SEQ ID NO: 37443 - DNA, 857 bp, Bovine  19866881059116
  misc_feature (1)..(1): n is a, c, g, or t
ncccttttgagaagtgaatttaagtccatagccttttgcaaatacatgcaaacatgtttatgactaatacatacagttgaatatagcatttgttggatctcagaacatgaatttatgtttacaaaattagcaataagaaacaatttttattcctcaaatcatatgtcctgccctgccctatgccttatttactctaattctgcattaaattgaacagaactaataatattgtgcctaatagggaacttaagggtctaggaacaattccagttaccaaacagtgccatgagttctgaaactcaaagttctaactcaaagtaaaaactgacatccacctaaaacctataccttttacaccttctccaatctatttgctaactttctagcacttgtaaacacttacactgctgagtatgaatacttttctctgcaagaaatctgagatttggaacggctgctgtcttgcaacatatatttctacaaagagaatgaatttgaggagaaagctaaatcctttctgaggaactgcattttgtaacatgcaatgatttattctgttaggaaaatagattatttgaagaattgtaagcccttttggcaagaaaattcatttagtcaaaaactttaatctatcccagtgacaaaattctctattttattgcttaaaaattgagctttatgacttcctacacttttgcagaaagattgccattttatgacgaacttatggcaatcctagatcacataaaaagtaattcatcaccatataggaactgagatttttcatattgaaaataaatgtctagatgtgatgcaaatatggatttttctctaaactatggaacagaagatattaa

SEQ ID NO: 37444 - DNA, 738 bp, Bovine  19866881211101
  misc_feature (1)..(1): n is a, c, g, or t
ntccatagggctgcaaagaatcagacatgactgaagcaactgagcaagcaaaattaactaatcatcaaaagaaaaataatagtttctcatatctacaaaatttaattttattttagtagtaatgtgtgctaacttagtattaactatctacaggtcacatttttatctgttttacaatgtcttaatagatgttgtgtgtaccttccattagctctatctcagcttaaagtcagtctaaaagttgattgttatgattaatataaacactgcaatgtgtaatgttgataagaatactaaatagggcctagaataaaatctagcagaatacttcagaaagtgcctcagactgaagcttccttgcttagaaaaagaacgtgtgtgcttttaaaagatggctgatgtacatatttttttggatttcacttgatatataatttcagctataagttataaaactagagttagtattagatttaggcatgcaaaaggacctattattataaagcaggaaattatttactctatcctatctttgcaaagcagaagcagtgctctacaaaaaacaacaagaacttttatcatttgcataaagtgttccagaattgtattatagatgttttatcaacctaactagcttataagcaactggaagggaagagatatgcgtgttttctatgcccttcttaccttggaactactagttccaaatatctaacaaaataggcacatggaaaatat

SEQ ID NO: 37445 - DNA, 1390 bp, Bovine  19866881238621
  misc_feature (1)..(1): n is a, c, g, or t
nttgaatggatttgggttaatcgcttaatacccataagggcacacttttccaagcagaatatgagaatttggcagatataaacaacaaagttctttctgactgggactattattctgttcacttccttctaagcattttaagtatctttcccccaactctttgctctcagtttaaaacatactcttacaaggccagaaataagcaatgaaatcttttattctttttacaaattttaaaataaaaaaataaaataattggaacatggtagtgcttccctggtggctcagatggtaaagcgtctgtctacaatgtggaagacctgggtttgatccctgggtcgggaaagttccctggagaaggaaacggcaacccactccagtactcttgcctagaaaatcccatggatggaggagcttggtgcaggctactgtccatagggttgcaaagagtcagacacgactgagcgacttcatttcacttcacttcagtgccataaataatgttgaatcaagattataattagactattaattctcaatggataattgagagaagcttgtctcttttttctcatttttagtgtcagatctaatcctcttagctccttatactgctatgtacacattttactatctagatctttgctaattttccatttgttggccacttatttttaccaaatcacttggatgcagtttgttttgattcaactgttaaattaatcatttgtatattcgtggtctatttatggaattccttattttagtaaaagaagattaaggtgcagtttgtgtgtgtgtgcatgtgtgtaaaagaaagaattaacatgagagaaaggtacaagtattgcgaggcagaaaaaaaagtcctacttgtatgaaattgatctcatttatcttctttcccattctatcctagctccttcatcttcctcccactaaaatgcaatactagtacagtttaatgtttcccagtaggaagaaatacagttgcacattcaaattcctcaaaccaaaaagcaatcaatacactatggcaggtatgtagttcctgaagaaaattgtttttgtgcttctaaaaggaagaacaatgagcatcagtgagaagaaaaatccagccttggaagcaaccacatttatctttagtcaagaagaaaattaaacaaaaaagttaattttaaaacaattattaacttaaatctctttcatgagcattatatattgcctttctaaaggaaaaataatgccagttacctacaaagaaataaagaaaaatgttgtgtaaaatttaagaaatatgtgtatgttcagtgcattaaaattatatacacaaatcagtgttcagtttaagtagaaggctcagacagtaaagaatctaccgcaattcagg

SEQ ID NO: 37446 - DNA, 727 bp, Bovine  19866881333476
  misc_feature (1)..(1): n is a, c, g, or t
naattccttcttatttctgtgataccatcatttaaaaaaaagtgagaaacggagtatggaatgaacagttactccagccacatacaccaccagtctgaaaaggaatttttgggctaaagaatagttaattggaaatcattactgtatacatggcatttgtagctaagcaataaactcaaaatatccttacttctattggccattttacctcaaatacattaaataaagttcaggattcggaacatgtgtacacccgtggcggattcatgttgatgtatggcaaaaccaatacaatattgtaaagtaaaaaaaaaataataataataataaaataaaaaaaagccaaaaaaataaaatccaccatgattttttatttcctttgattttgactttgcatttcattgtgaagtggctatgtgctaatattactttgcaagctaatataatgccatcttttaagggagcaaatataaaaacatattaatgcctaatttagtaaaaagttctgtttatgttggaagcattagattaattttatttaaactgtgatatatttcagtttccatggaaacttggatgctaaccaagttcactgaggcatcatggagtttatttctgattcagcatggcttgtcaagttcttttcctaaagtgtttgctaaatataattatgtgagtttggaggagatacaaaattggtctgtggagcaggctttttttttttaaa

SEQ ID NO: 37447 - DNA, 1793 bp, Bovine  19866880611864
  misc_feature (1)..(1): n is a, c, g, or t
ntttggatccaactcagacagagctaccagggagcaaagtctgagcaagaatcaacccatccccacccaactggattccaaatcacaacgttcccaatcatttattcacagaaccccaactgcagtcaaggtcttataaagctaccagcccatacccaccagtaccaggtacccacctgtaccaggagagatcactgtgttcccctctctagccaagaatccccttctttgtgcctggactaacaggaatggaaaaaataaccagttacctataacctggagaccagactcaagactttctgcatatgcctcaaaatgtgaaccaaaccaggtttccaacttcacctgagctgttaaatttacagggagatccataaggctttttacaagacagaaaagaccatcagagaagggcaagttatctctgaaaagggtgtaataaaaattaagctcaaaggaaaaaaaaaaaaaacaaccagcactggtctgagcagggttgttaaatggcatttatgactgctctacattccaggaagcagcagggtgtgtttatgctacaggatccagggacacccactgggttcaaaattctgcctccacgacctaaaacatgtgatcacaggcaagttacttaaatcttggaaccccacttccttgtgagaaagtagggataccccagagacgatccgctgccaagttgggcccataggccagttatctgttccaaggagtctgtgccttgtcttgttggtctgaagtgttaaaactctgatccttgggaatggctgctgggagtcatgttaagtggctgtgcgtgctgcgctctcaccccaccagcaggtactctcccccgtcacaggggagggtctggaattaggtagttacaaagccccgtgtcaccacctcctaactacatccaatctttcccagctaggctagaagatggtcatcatggaagaagcaacgcagtagaacaaaaactgaggagcggcctctctgctcttctgaagacttctctcctgcgcagggaggtcctgcaggcacagacagaaccctgctccaacacatctactcccctctgaagaagccatcacccacaaaggaggcagcacagggaagggttcaatgttcagtttcctttaatgacccccattctccccgaagggcaggtgcaggcagctgggcgatggcaagaggtattcacttgaagatcttgccctgattgaaggctttgcccacatgctggaaggccccttcccagcagaagtattctcgaaccaacgtctgggtctcctcgctgccgggatccagtttccgccatgtgtatgactcgtagtccacctgccaatctggactcagctggggagaaaaagtcaggtaagaagcatgtggtcaggttatcagacactgtcccatacctgttacttccagctcagacacccatcatcagagcccgggacgcctgtgaacatgactgctctttcatggacacattccttgaactctccagggcgccctctgactcaggaatatgagtgcatttcccaaatccttgccccaccttccctgcaccttcctcaccggaaaagcaagctcctggcctcgaaagacccagaccccagaaatggagctgctattgttggttccaaagagaatgacactggcaaaggcattcttcctcagtttgtccaatcgctggaacattcctaaaggggaataagaacattcagcctttgaaatcacatcgcccactaccgtggcctcccttcctccccccagagccatcttctcac

SEQ ID NO: 37448 - DNA, 1135 bp, Bovine  19866880675403
  misc_feature (1)..(1): n is a, c, g, or t
ncatcttcacccaaaggcaaattctccttattcaaaagcaagaagccaagccaccgctcaaattccttcagtgacgaaagggagcactctgcccctaccacccccacggggactttggagttcgagggtggggaggtggcgctggaaggcgggaaagtcaaagggaaacacggcaagctgaaatttggcacctttggtggattggggtcaaagagcaaaggtcattatgaggtgactgggagcgatgatgaggcaggcaagttacaggggagtggagtgtcctcatcctctaagaagtcccgactgtcgtcttcttctagcaacgacagtgggactaaggttggcatccagcttcccgaggtggagctgacagtttccacaaagaaagagtagccggcctctgtgtgtgtatatatctgtatagaactccatcagccttggttgtgtttgtatataaactccaaagagaaacacgccagcagcctcagcgacaatgcaaagatctggcctctgccaggggcaagtgctgaaaagccagctgcctttaggctcctcccggagctttacagataggttccaagttcttcgtccagcccatgtgcaaaatcagcagtatttgccttcagatttcagttttttgttttgttttcttttttgcattgaatgctgagagctcctgtttactaagccagcttttgtgtttattatcttcatttttactgaacattgttagtgttgggatcatggaaacccacttttttcattgtaatgacttttgggggcttttgttagtaagggtggggtggggtagaaggcagtagaggggagccagacctttttctcctacaattgggtctactcaagcagcaaacacccaaagagggctgagaggagctagccggtggggtgtgtgggtgtttctagaactgtgtatcattgctttttgtttccccaggggtggcggtcggtcccagcctgttcggtgctcacgggggagagggaattagaatctttttgtaaattaggccacccacttgctccacacgagggcctttcattctgtgtgttgtaagagaaatgttttcttcgtgatcgccacgttcctgatattagttctgatttcctttaacaaatg

SEQ ID NO: 37449 - DNA, 2639 bp, Bovine  19866880965004
  misc_feature (1)..(1): n is a, c, g, or t
ntcggagccccctccaaagcccgggaaccgaatggcatcttaaatcaactcggtctgcctagaaccctttcatttcttgtcacgcattccatctcttcggtcctgtcccgcagtgagttctccgggttgccttctcctcttctattaacctggccagagaggtccaattggcctgacttccctgtccggagactcttctcgctcccaaacctcccgggcggaccacccttaaccgtggccagccgtacctgcccataaagaccctcctcttcgccctgtccctcctgttgccccacaaaacggtcgcaaaagttttgccaacctgcccggatcccacgtctcgaggcggcaatgaacccgaactgctttatcaagctccagactgccagaatctggcatccgttttctcctttaccccagaccctttcacctcttcggcctcccagagccctagcctcagttcccctctggggcctggaggccctactctcgaacagtacgatctctaaaccccggatcagttcccgactcagctgcagaacccctctgacgccggctgagcccgctcgggcagaggatggcgtcggataggatgagctggatcgccggagccggcaaacttaccccagccgccatggtgattccgcagagaaagggggtggggccctccgcgctgccgcaaagtaagccgtcagggagagaagggaggagggaaggggagagccgtggagaaacagcagccggaaagcgaggacggcatagaaggcttacgcacgacagttcggtatcccgcagcagctgaacggaaaaagaagtgggtggggcctgctggccagcgcggaaaaaactcgcgccggcgcagtgggggatgaccaatccgagtcaggacgcggaggtagaccgcgcggagacgctgagtcctggctggaaagccgccccttgctgctacgtggcagagctgtcagctcggcatctcgcggggcaccagaggcgtttccctccgggtcgcctgccccatggtgatttggtagaggtcgtgccagacccacatcttggtcgtgtgacgatcattggggtggcaactgcgtggagatgaaggagtcccacgctccttttgttccagctttctagaggagagattgtacatctaacccaagcccaggtctgaaaccctccgtaaaagtgaggcttttttcattaaaccactttgcagctcagagatgctgttaataagagaagaggcactcttccgggacccgcaacagaggagggactgaggaagaacacagccaagtcctgtcaccctggaggggctgacagttcaaatgaggggttgtcctttacctgtgctcagatctgaacattttttacccaatatgaagagaatggacttataaccctgaacccaaatttcaagccccatcaccattcataatctgggtagtaatgtaaatgaggaaggaaacggttcttcccaggtgcagctcaagccaccacccagcactccatctttccagaactcagtactgagggggtccaggtgccaatcacttgccctgggcatgaaaggaaacagcctgggagacagatctgttttagggtgacaagacaaggtacctctgaggctgcactaagcacttagtggggaaggagaatcatcaccaggtggaaatagaggaaactagtgttcattaaactagcagctttattgcctttcagggttcccatcttcacttaagcaggtttcgaagtgcttgagggaggaaaacctgtaagaaatgatggagatcagggaacaggccttgagaatcctggagtggggtcacagtgagactctggtcagcctgggaggtggatgccacgaaggtcaggagtggctcagcctctggcctctgttcagtactgctcagtccccgcagctcccgggtgacctgagcctcagttgccagccactctgctcccgagcgagcaccagatccacctccttccttgatttgttgctgcaggcgtctccgggcacgcctccgcccctgccacacacggtgccacaaggcgcagcgccagctcactgtgagcgacacccgcttctcggcctcggcctgagacccttcgcaggctgcctcaggtcctctgggcccctgcttggccagcgctgcggtgcctgactgcccctcttctctggtggctagatgctttccggtcatcaggggcagctcccccagctgcccagggctccgcatcacccagtcctgcaccgactctccaacctctatgaccatctcttccacgccatcttcaccatgctcccctgcacatccctgctgctcctctggcccctcctcacagctttttttctgtccatctagttttgctctcttgcttgtccctccctgggggggctccccagggccacctccctctgaccgcagtctcttggttccctgttctatatggcaccctaaggcttcccttaacacctgggccagcacagcagtgagctgggtgaaggaagcagggggtaaggggataaggtgttgcagagaggatggagctgggggagctgggctgcagaaggggaagcaggccccagtcccgaccccgggaagaccgccgctggtactggaggcttcgacagtaat

SEQ ID NO: 37450 - DNA, 1763 bp, Bovine  19866881010428
  misc_feature (1)..(1): n is a, c, g, or t
nctggcatgcttctttccgtcttggcatgtcacctttgatgtcctgcctttggagggcatatgcagaaactcaagggtccctctgctgtgtatcttgacttcaaggtgtggtgcgtggaggcactgaggcgtacggacctgactctcagggtgtgtgtgtgtgtatcagttcctgtcgtcttgacactgaccctggctgcgacgttgtctttggctgctgcagcagttaggctgcgccccctccctggctgtgttcacactggctctcgggcagaagggatttcctgggaccagtgggagaacatgcccttctagggggtcacagctggcggggaccatcttccccgggcaaagggtctgcttcctggtcttctcctgggtctgcctgggtgttgcccacccagggcagagatctgcagagatggcatgggcagaaccctgctgcatgcacatcctctttgtggttttgaatcatcagggcagcttcgttcttctctagctgcttctggcctgaatttcttgcactctgtccctgcagcctcagatgtgcgtcctctgccttgaagcgggagtgtccctgccacgtcactccttttttgccctccaggcagccctctgccttagagggtctccactctagcccttcccaccatgaaggttgctgtgagctggtgtcaggtgccaggggcagctggcagacctgggcgttctagggccccagcattcccccattctcagggctccagaccccactctccccatctgtcaatagcaggcagtgccgtcccacagaactttctgcagtggtggcagtgttctgtatttgggcttgtaatatggtagccatgcgtggctgttgagctcgtgaaatgtagttcctacaacctatgggctaaatgtttaattgaatttaagttagggcttccctggtggctcagatgataaagaacctgcctgcaatgcaggaggacccaggttcaatccttgggtggggaggagcccctggagaagggaatggcaacccactccattattcttgcctggagaatcccactgatagaggagccacatgtggcctaagggttcttccagctccaagggctttgagagcttctgacccctgaggaatgtgtagaattccccaaggctccaaagactctgctttgggcagcagcagggtggagcccctagccccccgggaaagttggcttcacctgacatgtgggagaagaaggaatgaccccctgggtttgctacaggccccaggggtgggggagaccaccggctgggatccaagtgcagaaaataggcccttgccactgtggcctcgaatcccctgtcagcacccctgtgtaccgccaggtcagatgtaaggggaggggaggggagtcttgcctggctgtgccaggaggtgaggcctgagccagggcaggcagggtggttggcagccccacctgactgggaagccagcgggtgccccgccaggatcaacctgcagcctctaatccagcacctcccgttctcacaagctgtggtcccttctccactcatgatgtccttctcattagcccctggggtggaggcatgtggctgatccccgcttctgagtttcccacttgggcttccgggggctccgggccgggggctctgggccaagcagctggcagggaagcccattgcttcttcctggagccccagcccctccggcacccagggccctggcccatgaagcgggttttaggtgtgacccttggcgtgtctgg

SEQ ID NO: 37451 - DNA, 748 bp, Bovine  19866881383498
  misc_feature (1)..(1): n is a, c, g, or t
ntctggcagcctctcctgaggccttcaaatcatccctccgaggccccaggttgccccacctgaacccggcccagccagcttcctgcgataggaattcacacgggtcctgggagagggaggtcgtgtgattggcctggagagtcacgtgtgctaatgaagaccggctctgctaacgatcagggataggtctgaacctgttcttcccaaacctacgtgctgtccctcagagagccggacagggagacgcacagggcgggttgagcagctttgcggagttctgaagatcctagtgggtttaaaactgccatgcccagttgaccagactggatctcaagttaacaaccacctccacttcatttcttttccactttgaactcagaataaaccgggagtttcctgacccaccacttcacatagcaaataatcctttcagtagagaatggataaacaacaaagtcctactgtatagcacagggcactatactcaatatcctatgataaaccattaggagaaacaatgtatcggaatcattttgctatacagcagaaattaacacaacattcttaatcaactaaatttgaacaaatttcttttttaatttttaaagtaataatcttttcttcccaccctcagctgagaagtccttcccagctcacaaccctgctctgtggaccaaggatcagcacagggcacctgggtcaacgggccgtttgcacagatctgcacgggggctgacacagggtctct

SEQ ID NO: 37452 - DNA, 865 bp, Bovine  19866881516375
  misc_feature (1)..(1): n is a, c, g, or t
ngggaggtgtgccggtgagtctgccgtgcctgtatggctggggttagagttggtggtccaggaggactggaggggaggaggtggctttttgcttcccttcctctattctaacacttccgtattccaaaagttacttgtttcttgaatagtatctaagagacgaatgcttttagctaagggctttaaaattttattgcttcttttaattaaaaaaaaaaaattgtgctgcaatcctcttatggaggagaaccagtccctctaaatactgtttttgggaactgccctttgtttgaagtaattattgtccctaaaaatgggaaattacacatactgtttatcaaaaggaaataaacaccttggactaacagagttctcgccactggatggtgattccaaaccttgccagcaacccggggaaatggccctcactgcacgttggacccacacacgcttttggtgttttccattttttaaaggggaaaccgttggattctgtgtgttcctcaaaggctgcttgccctgttcttgttatgtgatcacggagaacctttgatagggcttttctggaggccaaaataagtccaggaaaaaccatggggagtggggcgtgtctcccattcgctttgctccgactcgaattggccctttggttgctttgtgttcacgggtgtttggtgagggatgctttattgagacagcatgtgggttcacacagggaagaaaaggtcttggagggggctccgggtgtggctcagcctttcctgctccacccaaggccccagggagtgctccagtgctccccgatttttgactctggtcattgtcagccgaggcagcctcggccggcctctccagccacacccag

SEQ ID NO: 37453 - DNA, 1625 bp, Bovine  19866881848912
  misc_feature (1)..(1): n is a, c, g, or t
ncaacaggcctcagctggcctgcattcccacagctggggggcaacccttcccactggagagggtggtggaaggggcctccagggctgcctggactgtggtcagggacagtgggtggggccagttacaatgcaaacactttgattgtggactctcccttgtttattatcatccagaagagtgaatactctgaatactccaaaggggaaaagacctagggtaatagtgggtgggaggggttggcagctgctgaggaggctgaacccagaccaagagttcactttttttgaagcctggagcctccccttactccctagatgaataacagccttttctgggctggaccagaaaccaaccaagctgcccggagttctccagtttctgccactcactagctgtgtgaccctgaaaataattgcttaaactctctgagccttagtttcgatgtgaggaaaacaatacccaccttagagggatgttgcagaaatcaaaagagataaagcatatacagtacatatacagtgcctaacacaaagtaagtattccatagaaatggctgacacttccagtatttactatatgccaagcaccttatatgtgtcaacttacatcatcctcacaagaaagctataagagagataacatattattgccattttatagataagagaactgaggcacagagagttgtagtaatttgcccaagatcacacagctaggaagcagcagaactgagagctatcattatcatcattattattcctctactagactgcaggttcctttgaggaaaagggctttgcacacagtatttaggtgactcagagataaagaacccacctgcagtgcaggagctgcaggagaccagggttcagcccctgggtcaggaatatcccttggaagagaacatgccaaccactctagtattcttgcctgggaaatcccatggacagaggtgcctcgcgggctgcagtccatggggtcgcaaagagtaatgactggagcgactaagcacagggagaagccagcatgaaatctcaggagaggggcaccttgtggaccagcaggtcccctgtccctagagaaggtcttttcatccttaactctttctgatacttggcctcactgctggcaagtttttccatgaaggacaggcctcaagtttgtggtggaaaacaacagagggttttaaagggaactgaaatcaccgtgctcagcagaatgttccccacacatgtcctgcggcccatgcagggcagagcctctgctgggatcggtcagccctgggaatcaaatgcctgacacccggccattcagaggctggtaaacactctggcattcccaccccatggcaagcattcatgcaccgaattctttgtccttgggaggacggacagagagctgctctgtgctgcggagcccgaagccagaactccggtttccaaaccccagccagagagcccgccaaggccgaggcgtgcaggccaccagctctttcaagcacgcttgcaaaataaacttgcccaaacttggacttctttcttgaaaacttgggtttacttgttaattccaaagggggaaaaatgcatggtactgttacaaggagaaactaggcaatttcctcctt

SEQ ID NO: 37454 - DNA, 2390 bp, Bovine  19866880164109
  misc_feature (1)..(1): n is a, c, g, or t
nagtgtcttttaatttatggctgcagtcccatctgcagtgattctggagcccaaaaaaataaacactgtttccattgtttccccatctatttcccatgaagtgatgggaccagatgtcatgatcttcattttctgaatgttgagctttaagccaactttttcactctcctttttcaccttcatcaagaggctttttagttcttcttcactttctgccataagggtggtgtcatctgcatatctgaggttattgatatttctcccggcaatcttgattctagcttgtgtttcttccagtccagcgtttctcatgatgtactctgcatataagttaaataagcagggtgacaatatacagccttgacatactccttttcctatttgggaccagtctgttgtttcatgtccagttctaactgttgcttcctgatctgcatataggtttctcaagaggcaggtcaggtggtctggtattcccatctcttttagaattttccacagtttattgtgatccacacagtcaaaggctttggcatagtcaataaagcagaaatagatgtttttctggaactctcttgctttttccatgatccagcggatgttggcaatttggtctctggttcctccgccttttctaaaatcagcttaaacatctggaagttcacggttcatgtattgctgaagcctggcttggagaattttgagcattactttactaccgtatgctgctgctgctgctaagccacttcagtcgtgtccgactccgtgcgaccccatagacggcagcccaccaggctcctccgtccctgggattctccaggcaagaacactggagtaggttaccatttccttctccagtgcatgaaagtgaaaagtaaaagtgaagttgctcagtcgtgtccgactcttagcgaccccatggactgcagcctaccaggctcctccatccatgggattttccaggcaagagcactggagtggggtgccattgccttctcctactagcgtgtgagatgagtgcaaataagttcatttatatactttatgcaaattacctaaattgccttatcaattggcttatgaacctgaatggaatcagtccttaagtccatttaacaaatagaacagttttttgaacttgcattaacaaaaagactgctgctctctgaggaccttctccacaaccacccagaaacctccttcttcaacactgtttaaccttacaaactctacagctaaaggttagaggcaaagaaaggtagcccattgaccagtttataaagattaactttaaaattctattttcttttccccctctccttccatcaagagtgcccttgcccgtaaataaactctctaagccagataaactgataaaaatgcaaaataaaaagattctgattcaagaaagacccctaaagaatctattcctcatttcagttcacagaatttgacagtacaaataaaaaattagattcagggagttctctggtggtcaagtggttaggactcggtgctcttgctgctatgggcccattaatccctgttcgggaaactaagatctcgaacgcctcacagctcagcagccaaaaaaactggattcagacatttaaaccatgttttctactttttttacaagtgagaacagaaaattcttcctaagatcaacaggttctgtctatcacttttcttgaagggccacactgctgtcttctaagagaaaagaacaatgtaattttaaaaagggactttactaagtctacactgtagtgattcagcaggatacagggcactttccccatcttcagacaccttccttatcctccaaaaacatttccaaactgggatgtaactatcccaaagtctgttccaaagcttcctgctattcctaagtcccatgggcagggctccaaaacttagacactgctggtatattaactgtctccaacttttcacaaatgctatcacttccaggacttgttctgcctctctccactcctgtatgttcttgtttgcttttctggttcacagtgggtttctttttttcagggaatattgaggttaaaaagcctgtgactctgttatcaatttcccctcttcatctaataatagttaggactttctttttatgcctcttttcaactcaaaaaatactgagccatatttccctactgccaattatgtgggtaggtggctataattcttttcctgcttttgttttttctctctttggcccttgagagtctctactttttttttctattatttttatactactactggtagagtagatagcttcaatttgtggatttcccttattagatgcaggcttaaaataataatgaagaaatagaactagaaagcaaaacagttctaaacagatgatcata

SEQ ID NO: 37455 - DNA, 1597 bp, Bovine  19866880446074
  misc_feature (1)..(1): n is a, c, g, or t
nctgggaggaggagatggcaacccactccagtattcccatatggaaaatcccatggacagaggagcctgatgggctacagcccagggggtcacagagtcaaatatgactcagggaccgagcacatgaaaacaaaactttttttcaactccttacaggtcattttaatttcttttttcacatggtgtgttagacccctctatgcattcaatccttgttgcaaagatgcctcctgtgtatttaactgacagactacatgacattcatttgttaaaagctaaaaagtaaacaattcaaaagaggttcatggctctgatttcatggatgataacagagtgacattttatccatggacagaatcatttcacaccagggtgtcagacactcactatgaagacacagtgcttacattctgcttctgtccttggctagctggcttatgttgggcagggtcatcctctctaaaccttgatttcctcatagtgcctctgagctgcttggtatcctgaaatgagactacggagtgtgggtcaatctgtaggcatgaaacacattcccacctgcctgtcaccctatctttgcttatctttttctttttctctttacagtcaaagagtcaaaaggatgtaaaaatggatgctccctggaatggaattgggcagagcccaagaatgaaaggaacctggctgagttgacagcttcacttatcccttgttgagggctcaaagcttatctgatttgtgtctcattggacttgtccaattagtgaagttgattcatattgcatcatagtttgctttgttaagcatcatgttatattctattttatgttatgttatttatatgtgtgttttgtgtgtgtgttttgctatttaatactagttttccataagctatttgatttagaatgaggtataaacttatgcttgaaggaataagatacatggattttcttgagcagaaggctattttaaaaagacatttaacactctagtttgtatatctttgtttcctaaattgctgtaattactttgcaaaagacaaaaatgatgagaagaataaaagttgaaaataaaagaactaaacatgtttgttgattgagttaaataacattgagaggtatattaaaaatatttaaaggtttagtaaatatgaaaatgctctgcggtgtttttcttttaattaaataaaaaatttaaaatttactttcggctgtgatgcggcctccttgctgcacgaggggttttctctagttgtggtgtgtggggccgactctctagttgtggtgttcttctcattgtggtggcttctcttgctttagagcatgggctctagagtgcagattcagtagttgtggaacaccagcttaggtgccccatggcatgtaggatcttcctggaccagagagtgaacccatgtcctctgcattggcagctggattcttaaccactggaccaccagggaagtcctgctctgaaacttgtattccccatttacttctttgcctatttgttctatttttggaggaggaaatgacaacccattccagtattcttgcctgggaaatcccatggacagaggagcctggagggctacagt

SEQ ID NO: 37456 - DNA, 1038 bp, Bovine  19866880468665
  misc_feature (1)..(1): n is a, c, g, or t
nctgcagctgcaactcgtgtggctgcggcggtgggaagggctgttgccagcagaaatgctgctgccagcagaagtgcagctgccagaagcaatgctgccactaggctgccagtctggcctctgggaaggtgctgctggtaactgtctcgttggtaagattttctttctttctgccagtcctccctgatttgaatgtcatataggtgacttgagatgaattctcaggctgaggaatttaattcatatcctctggtcactgagattctgcctccaaatgaaaaacacccacacagtctttctccatccgtcaccaaagtatgagccccacaaaatggagtgatgatttttaatgctatgctttctcgaaattttactgttgaaatgtttgttttatctctttctccttctctctgtggtttctgcattctctgtctctgctactattttctgattctgtaaactgtagacagttcttttcctaataaaccataaaactggcattcaaaaatgtgtcaatatctcctcttttttcattgtttgaatgtgtctcatgcaaagatgcaactaaacccactgaagtgagtaagaccccctgacgttttctgagatggatttaaagtaattaatgaataatctgtccctaataggttttcacatgatggtaaaaatttggtggttgtggttcatatatacagtggaatgttactcagccataaaaaggagtgaatttgaatccattgtaatgaggtggatgaacctagagcctgttataaagagggaggtaagttagaaagagaaaaatatcgtatattagcacatatatatggaatctggaaaaatggttttgataaacccatttgcagggcaaaaacagagacgccgatgtagagaacggatatgtgaacacagtgggggaaggagagagtgggacgagttgagagagtagccctgacatatatacacgaccatgtgtaaaatagagagctggtgagaagctgctgttagcacagagagctcaatttggtgctctgtgaccac

SEQ ID NO: 37457 - DNA, 1412 bp, Bovine  19866880629810
  misc_feature (1)..(1): n is a, c, g, or t
ncctcgttgtaatgcctttgaccttagttgcttcctttcctctccacagagaggtaaagggctggtcagggatctaacccatgccttggtgacatcgccttgtatcaccagcagcgtgcataacagaaagcactcattaaatactggctggataactaaatgcatcatctttctccaccaaagagaagctactggcattttaaagggtttttctactggggtatttcaatctccacttaggactggtaaaaaaaaaaaaaagttatttacaaagttagaagctataaaaatgggacccaacaggctaaatacacttctttaaatagtgagatctttttatataagttactactactactactactactaagtcacttcagttgtgtccgactctgtgtgaccccatagacagcagttcaccaggctcccccgtccctgggattctccaggcaagaacactggagtgggttgccatttccttctccgatgcatgaaagtgaagtcgctcagtagtgtccaaccctcagcgaccccatggactgcagccttccaggctcttccacccatgggattttccaggcaagagtactggagtggggtgccactgccttctctggtagagtagcaaatgtgatcataaaggagaaaatgcagatttattatatcaccattgatagcagtcaagctgatgagaacaacatagggtagtataatgcatggtcatcagggagatgacccgaggtgtactagtatatatagtacatgtgtatatatagttatcaagaagatgatagagatatagtttaacatcatatgtggtgtcaaggaggtatacaaaccttctacagcattgcatgcaatatcaagaatatgatccagacacagtgtagtgacatgcgtgggcatcatagagatgaggcacatgtcgtttctatcatagctggtcatcagggagatgacttatgatgcagactcacctatgtttattaaacaaaacataaatccttccataaattaaatgtacaggcagattacctaccatcggctgaagcagttgcaataagctttccggtgtaatcaaaacagctgtctagtatttcatcatcatggcctgttagtgttgccacacattttccatttacagcatcccatagctacaatttaaaaaaaaatgatgaagactatgacttcctctccaacacacaaagatggccagtagtctttatgacatgtttacagctgattaaataaactgtaccaaaatcatgtgtataattttcactttttgttcattttcttttgattcacaaccagagactgcaaccaaccatctaacaaggcaagcttttgacatagagaagatcaaagacagacttcacaatacaaatctgtcactattttaggaaaaaaaa

SEQ ID NO: 37458 - DNA, 1822 bp, Bovine  19866880783064
  misc_feature (1)..(1): n is a, c, g, or t
natggtctcagctgagcatgactttcgctcaaagactattaaatatgcaatagcattatgccaaaaaatagtatataccttaattgaaaaatattttattgctaaaaaaatgccaaaacaattacaatagtaacatcaaagatcacttatcatagattccataacaaacataataacaatggaaaagctttaaatattgcaagaactaccaaaatatgaccaaactaaactaaataaaatgagcaaatgctgctggaaaaatggcaccaatagtcttgcccaatgcaggttgccacaaacctttaatttgtaaaaaataaatgaataaaaagaacaaaaagtaaaaagcacagtatctgcaaaacacaataaaatgaggtatgcctggactctagtgtgtatacagttagtatagttcacattgggcttccctggtggctcagtggaaaagaaactacttgccagcacagaagatgcaggttcgatccctgggtcaggaagatcccctggagaaggacatggcaacccattccactattcttgcctcagaaatcccatggataagaagagcctggcggactacaagtccatagggtcttgaaagagtcggacatgacttggcaactaacccacaaagttccgattgcacgggaagctgatgtattcttgtattgaaatgcatgtagatgtataaagtgggtttttgagggggtgggggagttctcctttcctagggtttccttgaaaatcagttttctattctgttttctcgtcatatgaagataccctatctaatcagggcttccctgctggctcagatggtaaagaatctgcctgcaatgcaggagacctgggttcaatccctgggttgggaagatctcctgaaggagggtgtgggacccttctccagtattcttgtctggaaactccccacagacagaggaacctggcgggctacagtccatgggggtcacaaagagtcagacacaactgagcaactaagcacagcaccctatctgattagatacaaagttttatattgggcaagccacatggatcaacactttagtaatacacaagtctgagaaaggtaaccctcctcacttcccagtgcttcgtggtcacagaatccattttccacctctgcagctcacaaatgagatcttccccgtgtggacctactcttacctggcactactgcttccagtctttgtcctcacggattatgtccgctacaagccagtcatcatcctccagggcataagcttcatcatctgctggctgctgctcttgtttggccaaggagtcaggaccatgcaggtgctggaattcttctatgggatggtcaccgccactgagggtggcatactatgcctacatttatagcatggtcagcccggagcactaccagaaggtgagcggctactgcaggagtgtcacgctggtggcctacacggcggcctccgtgctggcccagctcttggtatccctggccggcctgtcctacttttacctcaacgtcatatccttggcctctgtctccgtggccttcctcttctcacttttcctacccatgcctaagaagagcatgttttttcatgcaaaacccagccaagaagcccttccaaagccaccaggaacggacgctgtctcagaggaacctcaaaagaatcacaaaccagtgggaaaagtagtgttcactgattcagggaacccagatgatggccaggtgaccaacccaaagccaggaaatgtagctctgagagtttttgtgcagtggttacaagatttgaagcagtgttactcctcaaaacatcttttt

SEQ ID NO: 37459 - DNA, 738 bp, Bovine  19866880861678
  misc_feature (1)..(1): n is a, c, g, or t
ncaccctgtctctcaccatgggtatctgccccctcccttctcctctgctccccttacaggtccttcttttccaagatactatcttaactgatgtcaatcaattccattcaaagcttatgctcagttccacattaagagtaacctttaataatctgaatatagaattcaactgtttaaaggaaattattcataagcccttggtagttacatgtatcagaaacacaggagttgggcacaagatatggcttactcttttttttttttttaattagtgttttggagagggcagggcagaggaaagtaattggtgcttcaaggaaatctttttagggaccacagggaaatctattcactatttcaaggcaactaacaaattatcatctttcagttgggacattagagagacagcctttacagatcatgaaatctgcatgacaaatgttgaaaacaaatgtgggttaataataactttgtatagcaaggcagatgccaggtagcataagagcacacgcagacagtgttaattctgaagtcctggaagctgtgaggtgctcatccatcacatggctgtcacaaccaggtaggaatgactgaggaaagcagcgaagctggccatgccagcatttacacatggaacacttcctgggcagccaggtgtcatggggcacagacccacagttctctttgcaagagtcatgctcacagttgcgtccatagaaagagggagggcaggcacaa

SEQ ID NO: 37460 - DNA, 1204 bp, Bovine  19866880965657
  misc_feature (1)..(1): n is a, c, g, or t
nttagggatgacttatttaggatggacttgttggatctccttgatctccacgggactctgatcccacagttctgaagtgagaccaggtacctctatatttctaaagctatgtgggtgattccaatgtcctttgggaaaccattggccagcaaattttcatcactgttccaaaggtgatgatgaaaagtttgctcccctaaaagtagtctgagatatagtacctgtcaggaacgatgtgttccccagtccagactcctctcatctggtcccaggtgctcaagctcagctcccctcaaggggaaccagccctcggggaagtgctgccaggaaggcaaggagctctgcaacctctggctctttccttctcgatcagaaaaatcaccaactaaagcagcttctgtcactgagaataagaaagccaggagaaatgactggagccatgaagtcccttctttataattttcctgaatactttagattgagtaaaatagccttaagaaagttgcatctatttccgtcaatatatgcatgtgagaacagattttcaacaataactgataaagattaaatccaggaagaagtaggatattgtcacttcatgtcacaccaccccaaaaatagatgtgcaaatcgacaagcttgtataaaacaaagtgcactcaaataaagtaagaaaaactgtcatgttgctatttatttttatctatccaaattatttaatatattattttttaaaaattttaggtatcaacagaactttacttcctatgcttcttaagatggatttcccagtattctgaaattgttcttcccatacttatggtgtggaagcatccttcctttaataaattcatggtgtatttgttcatctatttgtttttgatgactttgccttgaaaaataaaggattggtaactctgttcatcaacctcccttcattgtgaatgcctcacttcttttttaaaactgatttatgtgatgggtaaatcagaagattggggttgacatatatatgtggctacatgtaaatagatagctgataagcaactactgtgtaccacagggaactatgttcaatactctgtaaagacctatatgggaaagaatctttaaaaaaaaagtcagtatctgtataagtatgggcttcccaagtggcaccagtggtaaagaacccacctgccaatgcaggagatgcacctttgat

SEQ ID NO: 37461 - DNA, 1094 bp, Bovine  19866881054505
  misc_feature (1)..(1): n is a, c, g, or t
nattttcaaaatctagcaagcaaattagcaaaattgttttccttattcacaactatcttattcttaataagatgaaaaacgttaaacatttgtatgccaagtactaaaaattagttgggtttctgtaaaaatgaatccagaaaatagagtgcaaaatctgaaacgtgtacatttatatgactgcttcactgtgacaagacattacggcagtatgctcactgaactccaataccagcaagaggctgtgacgtgtgcaatgaaaagtacaagcagaaaatagataaagatgcttccaggaatacacgttgttcgtcagagactgtttcacacagtatcttaatattcttgatcttctcctggctgaaccataggtaatgtgtgatttccaaaacacttgggtaagaagatgaccacccctccccaaatctgcaatgtaccaaaaggccaagcttcaaaaggtaaaatagtattgcttacccagctcatattcaatcaacagaaacctttaaagcgcacaaaataccaaccagttcaccctgccgcttatttagatccttcttctggccaaagaacaaggggcccacatgcaataaataaatgacaaagatcgtcatacctgagtcaactgaaaagcatgtattcaacacctactctttacaaagcaacgagattctgaagaataaaaaatagggaaagccccaagtttgattacccacattactgctacgttcctttagtcttcgggaatctaggttagggagaggaattattcagtggatgccaacaaaagaatgctcctgacctatatgctattcaaaagagggtgggaggactgaaattaaaagattaggaggtgagacataattgctttatgcacagaagggataaagataacatgaaaattattcagtggtgagccatacttttcctatttgataatgttatttaacacccacctgctattcagtagtaccttggaaacttgcaatatcatggtggctttccaaagatcagaatttaagtatctaacatgctaagtgaggatgatcttatttattataagacaatcattaaggcaatagtcacaaccataa

SEQ ID NO: 37462 - DNA, 567 bp, Bovine  19866881634546
  misc_feature (1)..(1): n is a, c, g, or t
nttggctctgtactcatacacttatctcttatttttagtcaatgcaggatatgagtctttgacagtatctgcaagatattaaaactagagtagtttgtgaatgatataaacaccatcatatataatatagagaaatttaaaataacagatttttaaattagttataaaggtataaaaactacttttgcaatggaatcctaaaaagaaataacaactatgtgaagtgccaatgtaaactcatcacttgcaatatatgtgctgccctggtgggaatgctgacaatgggcatgctttggaggagaggtggaggaatatatgggaaatttttgcactttccactcaatttttctgtcaacctcaacttctctaaaaaataagatctactgaaaaagataaaaacaaaaaagtaaaacaaagcaaaaacaaaaggaatgacaacataaaaatataataaaataaatatactcactatttctgctgtatgacccctaaaggtatggtaacattttccagtttctacactccatagtttacaagtcttatcaaaggacccagtggcaattttgt

SEQ ID NO: 37463 - DNA, 714 bp, Bovine  19866881765763
  misc_feature (1)..(1): n is a, c, g, or t
natggagtgacttgctataaaaatggtatgtagtcgtatgggatttaagtctagatagtcttgactctagagttagggtgactacgtattttaaagtcccaattggaacagttttaagaattaaaaaaaggtgctaataagaattactttggggatacatccatacagtaagctatctcggggaaaaaataggacatatggcatgaggccaaatccaagcttctcgacactctgctatgctgcctctcaaaaggaaacccaggctcccaagtccttcagccattgtcctttccatcacagcagaactgtttaaaatcagatctagccaattccctgcaaaaataacaacagaaattggctccatagatatttagaaaatggaaatgggaaatgtgatctggtttcagagctgaaaagcagttgaattgggcccttggggacttgggagggggctgtcattagcaggaggataaagcctcattcgagttttgtctccaagccaaagaaaaaaggctaaagaatccggagacgtgagctcttgctcctgatctggaactaaatcggctggttgatgggaatcacttatctctaacacgtgcactccgcccctgtaaaatggagctatgtctactccttccccaccctgaccacctcaggaagaacgaatgattacactgtgatagctactttctctcactgctttatatccacgat

SEQ ID NO: 37464 - DNA, 928 bp, Bovine  19866880159474
  misc_feature (1)..(1): n is a, c, g, or t
ntaagaagaggtggcaagaatatacagaagaactgtacaaaaaaaatcttcacagcccagataatcacaatggtgtgatcacttacctagaaccagacatcctagaatgtgaagtcaagtgggccttagaaagcatcactatgaacaaagctagtggaggtgatggaattccagttgagctatttcaaatcctgaaagctgatgctgtgaacgtgctgcactcaatatgccagcaaatttggaaaactcagcagtggccacaggactggaaaagggcagttttcattccaatcccaaagaaaggcaatgcaaataatgctcaaactaccacacaattgcattcatctcacatgctagtaaagtaatgcccaaaattctctaagccaggcttcagcaatacgtgaaccatgaacttccggatgttcaagctggttttagaaaaggcagaggaaccagagaccaaattgccaacatccactggatcatcaaaaaagcaagagagttccagaaagcaacccttgccccccacgaaaaaaagaaaaaactctattcctttttcagctaagaaccgagaggtctctgataacactgtttacattggataaggggagccttctctgaggttttagaattttatagtggtctcctggtatctgtaggggattgttttaaagaccctaccccctacagataccaaaatctgagaatgctcaagtttcttatataacagatttttcatgtaacctataagcactctcccatatacttaaattttttttttcttttggctgcactgcatggcttgtgagatcttaattctccaaccagggaatgaaccaaggtccctaacagtaaatgcaccaagtccaaatctctggacagtcagtgaacttccccctctcatatacttcaaatcatgtctagatta

SEQ ID NO: 37465 - DNA, 2137 bp, Bovine  19866880349863
  misc_feature (1)..(1): n is a, c, g, or t
naaataatgccatttgcagcaacatggatggacctagagatcatcatactaagtgaagtaagtcagacagagaaacacaggtaccaaatggcgtcactggtgcgtggactctaaatgcgacaccaatgaacctatctacaaaacagaaacagacttcacagacatggttgccaaggacgaggtcataaggatggactcatagtttgggattagcagacacaaactgttacatatagaatggataaacaacaaaggtcctactgtctagcacagggactatattcaatatcctgggataagccataatggaaaagaataggaaaaagaatatatatatatatgtataagtgaatcactttgctatacagaagttaatacaacattacaaatcaactacaataaaataaattttggaaaactctgccaaggtttataattgatttgaattgacagcactattaaatttttttttttaagatgaaccactgttaagattgtctttgattacattgtatactttcaacatgcccaaggcatgattcattttttcaatcacaagcttagtgaaatatagttgttccattggttattaagaagaaacatgactggtgaagaacttatatttttgcctaactgaaacaaaatgtttgccaagtgttaaacttactttttcacacttgatcttacaccaactcaattacactatactcaagggagctatgagtgtatatgtgtgttttcttgaggaactacagggacagtgataggaaggggtgtgtcttctacgcaagcacagtgcagttttacacatcagcaatgcaagggagaattcagtcaaggatgctcaatgactctgaataggtatgacaatataagcagacaattattagaattctgaacagctatggtttcaaaacccttccaaaatgagtgaaggattttcccctccctcttttcaaggattatgctgaaagaaataagtcttacagattagtggcagaaggagacagtttttcatgttagaaataatagaataacaactgggaaggcaattttatcaagctttagtcacaaaacgaacaggtaagcactgtgtgcttagtcgctcagtagtgtccaactgtttgcaaccccatggactgtaaccctctaggctcctctgtctacagggattctccaggcaagaacgctggagtaggttgccatgccctcctccaggggatcttcccaacccagggatcgaacccaggtctcctgcaactgccaggggattctttaccatctgagccaccagggaaaccctagaatactagagtgggtagcctatcccttctccagggaaacttcctgatccaggaattgaaccagagtgtcctgcattgcaggcagattctttaccagctgagctaccagggaagcatgtattaggcatgttaaaaatatgaaatataagaaacataatatataacgttaaattgtcttttaaaatgtagcagtatgtctaacaagttctgtattcataaaacccatgcagacatgaagactttaggcctgaaggggaaaacaattatgtcaattttttaaaccacaaatttaaataattttatagaaattatttaaaatcaatatgaagccacctctggaaatacactccatattttcatcaggataaacaaacacatagttctgactagcaggtacaaaataagaatgggcactgatatgtccacaggtgatcatgtttcatgcatgtttcaagttcatgtggtatctgatcatgttgattctgcaatcttttaaccacttatcaaatactgcacatttatttctaggttgtcatcagcaccaagagtgcagttatgagaatccggtaaatacttatggtttgctggtcagtttacggttgttttcttgagatacacttcccccaactagatttactaagtcagagtgattagacagttttatatttcttgttacatcctaaaagttcattctccagagaagatgaaccagagggacttccagctactgcaatgtgaagagggcagtaaatcctctctgtaagagataggttacaaatagatgaaattatcagaaacagtcccttggggctctagaaatttaccaaatgggg

SEQ ID NO: 37466 - DNA, 1614 bp, Bovine  19866880367724
  misc_feature (1)..(1): n is a, c, g, or t
ngctcttctggctctcacattccatgttcctctaaccatgcaaaggcctctcctccaccttcttaaaagataaattccatgtccctagcatgtctaccttgccaccctctgagtgcagcaccacctagaaacactcagaaaccagtgtttctcaatcattttttaaaatcatcatcctgccacaaaagaggctttttatacttttttccttaatcagccccaatgagattttaataccatgaatatattgtatatatgtttatgcactatatatttaactgtgcttaatacatgaaagtttttttttgtgtgtgtgccgtacacaagaaccaattcgcatcccccttggaggcaatattgcccccattgaaaattcatgacctagatcgagctgaaggctgcctcttgaatgatataagtggagctatttgccctaaactctaaaagccacaaacatattcaaaagccagaggttttttagaaaaaaatccattacacaagccagagtggaatcagccagaatttccatttccccaaggcaaagaatggcttcccatccctgcccccacaggccacactgtcacctgttccagggcctgtcctggtcctctacggctggaaacttcacctctgcccatggttccagcatccagcttccactttgttcatatgaatcccagcagtaacaatgggaatgctgggaatgaggtgaacaataggtattgacgtaacagaaataattagaatccattccaagggcagacagcttacttgcatcaggccagcttccccctctctcccctgcagaactttcaccttaccttggcacgctggccagataggtcaccagtttccgcaggtcttcctgtcttattctgtcatgattgctgcgagcagggaaggtcaggatgggtccacctcgcttatcacggccccctgcaaggaagagaaggatgtttaagaaaaaccagctagaaactgccacagaggaaaaagaattctcctgagtgctagataaaacaggcagaaagatggtacccagagaaatctggtcactgccttgggcaagggcaaggagtttagattcgtgaccttgggcaagtcttttgacatctctgttgcctcatctgcaaaatgcagatgaaaataatgatgactacattacagggctgctgcaagacttgataagatggcacatggcgaagcactttgagaagtactctctacaaatacgagatgataatgaaggaggtgatacttgctcttactgagaaaacaagccaatcaaagtgctatggtctttggaaattcaacctccagtttacttctctttgcagacctctatgagcagagtgctcagggttaactgaataccgtggtgagaagcccctaaagcatccagctgggacatcattgctaggaggtttttagggtcatagaaaagacctaagtgtggtctacacagcccaaggatccacccctgcctgcctgcctaagtgccacctgtcactcttgctggagaagcccatgaatcttcattggaaataggatgctcaaggtcttaatcactgcaaatgcatatgtacacactatgattacaaatgtcttctaaca

SEQ ID NO: 37467 - DNA, 3403 bp, Bovine  19866880450084
  misc_feature (1)..(1): n is a, c, g, or t
ngttctactttatgcccctacctctttgcaggtcactaagggatccctgagttcgcccaaaacctggtatcaatttattgtggggagttcttggtgatttgggaatcagcaggttggcaggcacacaggtttttgttatatcctatctttgaaaagcacttcattctctaactagagaagggagttaaaatataattgtgggcttataattgtgggcttccttgatggctcagttggtaaagagtcctgcctgcaatgcaggagacccatgttcaatccctgggtggggaagatcccctggagaaggaaatggcaactcactccagtattcttgcctggagaatcccatggacagaggagcctggtgggctacagtccatggggctgcaaagagtcagacacaacttagcaactaaaccaccaccaacttataatttataagagataatttatagaatgaatagaactttgtaggctaggcctataactgtttttccttcttgtactaaaaaaaattgaagtaaaatttgcatacaataagatacacaaatattcagttctgtgagttttgacaactttagataccagtgtaaccgccaccaaaaacaaaatacaggacctttccatcaccctagggactcaccccttccagtcagttcctgtccactgccttcaggtactactttctgatttctatcatcacagattcttagattctgtataaatgaaatcatacaatgtggactctcatgtctggcttcttgtgttcaacacactgtatttaagattcagttgtgctgtatctgttcattccttgctgctgctgagtactgttccacggtgtagagacaccgtgattttttttaccagccctcaagttgatgaactcctaggttgttttcagtatttcgctattatgagtaaggctgatgtgaaagacttacacaagtcttttgtggacacggcttttcatttctcttgagagtcacttaggagtgtgactgtagggtcataggataagtatatgcttaacattcccaagaggaatttcacattccctgtgaaagttacagttgttcaccatcatttggtactatcagtctatttaattttagccatgctagtgggtgtgaagtgatatcttatgactttaggttgtattttcctgatgactcatcatggtgagcacattttcatatgcttattgaatctacttttagaaagtgtcaagttttttttctcatttttcagaacctaggttatcttttgattatagatttgttagagttcttaatacatgctggatataagtcatttatcagataatatatgggaaagagcccaaacaaaatttttagtccatttccttgcctacaaacttaagggaagtaagaataagacaagcatgaaagaaagagtctttttctttacatttctttttcttaacattttagcttttgctttgttttcatgaaactgagtcaatgaagaagctgtttgttgcaggaagaccctagagaggtcccgagccatgagtctgtggagcggaaaggcaagtgccaagagtcctgatcagcgcagagcaatgatgaggtgctttagctgtgagaataaagctcagaggtctggtatcttgagaatctgaatccaaaccaaatgtgaaatacacccaggattctatatctggtgtttctatattccttccttccccttctctacctacactacccaaccccattaagctgaggggcccacgtctgaaatgaagcctgaagaatgagaatttcaagaagctactcaatgcaacagcctgacttccaagctttgctccttgggtctacacattctttactatctctgtggctgacctttcccaacctccaagaactgaagcccagagccttgaaatagtctgatttatgtatttcaaatgatggctagagtttaattattttctttcctgagtattttctgtttcctcaaggaatattctgttattggcttccccctctcgaccttctttctagggcacaaggctggcacagagcaggggttcattttttaagggaaaaaaatttgttttcaaacctgaagttcactttactgctaatgaacaaacatagcattctagccccatctcatgctgtcctgttatgtgaactaggcatgtggcttactctctggtgtgagaagttgctctgccctctccagccaccttctctggtccagcagccctgagacatccttgttcctcctcccagtctgctcaagtcctcaccacccttcaaagtcaactctggcatagagtttcatgacaacccccaaaacctgatgttgttctctggcttatctcattacacgggacaagggttaatttgctagtacagaaacaaaaccacgaaaagaaaaacctgcccggtggactaatccagtgatctaactccatttggaaaggaaacctggaagaatttgttctgggcagaaactaaggcctgaaccaaatgagtgaaagatggaacataaggtacccacaggacattcagctttcaatcaacctatttttctttctccttccactcaattagctccatctcagctcctggctcactcagttcctctcttggctctgatggccactctctgcctcgttcttctgaattaattgaagtgttaggatatgatgacctctttgagagatacattggcagtgttttctattctaacaattatctactccagagtcacagccataagggaaatcagagaaaagagctaaacaggcatttagataggataagaggcagtgggaaatgggaaggcacttcaaaaagaagcccaaagctttcctgccagatgagattcactgaatccagtattctgcagcccaaaattgactccagggacttggtttagcagtggccttgggctctgttctcagaaagccctcttctttggctcctctcattttctgggtccttcccagtagttatggtagaggatactttctcccctcacccccaagtgtcttaaagaagatatttgaccctgaactgtgtattcattatgggatagacagtattttaccacaaccttcccaggtggcactagtggtaaagaacctacctgccaatgcaggagatgcccgagacaagggtttgattcctgggtgggaaagatcccttggaggagggcatggcaacccactccagtattcttgcctggagaatgaatccccatggacagaggagcctggcaggctacagtccataggatcgcaaagagttggacatgactgaagcaactgaagaatcccagggacagggggagcccttggtgggcctgctgtctatggggtcgcacagagtcagacacgactgaatcgacttagcagcagcggcagcag

SEQ ID NO: 37468 - DNA, 1600 bp, Bovine  19866880455436
  misc_feature (1)..(1): n is a, c, g, or t
ntaagctggtctctgggctgtgtgcttagggtgcctggaccaaattgcactgtgtgatctggggtgaggcttccattgcctcttcccagaaaagagagagacactatctgtgccattcacaggtacttcatgagataacacacctgaaacccactttggaaaaggttttgtttgatttatgtatcatgtggaattattatccagttaagtacttctgagttgttcctgtgtgtttgattgcagcgagcctaaggaagtgtaggattcagtctccgggtgcaggcacttatttgagtaaatgagggcatatcacatgactgaaactgtagagcaataaccaattagcaaatccatggtagggcagtctcccttcattccatgcttcagtcttcattagaatcatgtgtgcctttcaatagcgtgtaatcttcttggatttctactggtaagctatacatttacaccttctttagtcactattaccaggcatcaccctttgtgagtaatagaatcctgtacccagaacacaggaaccagatcaggatccctgggtttggtgtacaccagctctgaacaattatgtgaccttcggtcattgcctgggcttctccagccttctgtttgtttcttgaagttaggctcagtacttagtttctgaggccttctccaatgatgagatctttagaacaacagttacggtatggtggactaagtgtttgcagtaaggagagaaactgagttatgtcctccggtcgtgtccctcatgagtagggtaaactcggggcaaaccattccatctgtgtgagtgagtatcggctgctttctctgtgagatggacctagagatctccactcggcctctgtctcaggttattgcaggtggagtgagatggagcatgcaaaacctttctaaaccataagtcatcatttaagtatttgctgctgctgtagacactaaagcacagggagaacaatttttttaacattttaattttatattggagcatagctggttccaggtgtgcagcaaagtagctgttgtagacattgaaacacagggagaaccctattaaaggcatgcatacatgggtgcctggcatcattgcttaaacgtagtctaggggtcaggaaagagatgcaaagcagagtcagatctgacctagattagttaataaggctcagaatcagtgagcttctacatagctgtctcttgtgaaccagtgaagctgcactgacggtggttcccttacaggtgacagcagagctcgacgcttggaatgaggatttgcttcggcagatgaatgacttcaacacggaggatctaacactggcggaacagcggctgcagcgccacacagagcggaagctagccatgaacaacatgacctttgaggtcatccagcaaggccaggatctgcaccagtacatcatgggaggtccaggcctcaggtaggagacctgtcctgtgcttatgtgtccagcagggagatgatgaaaacaagaacatcaatcagcttaactccaagggccatttccactccactcattcattctcttcccacaggtacaagaaacagagagttttgtaccatttaaaaaca

SEQ ID NO: 37469 - DNA, 1085 bp, Bovine  19866880517871
  misc_feature (1)..(1): n is a, c, g, or t
ntggagagactgtacagggaggcagccagggtctgaatggacctgccctcctgtgaagagcatagtggcagcattggaaacggtaataaaagagaagtggggccccaaataatagggaacaggtccaaattccttccacagaccttttttgttttgataaaagcaaattagtatctgaaaagctcttaagaccccaaatagaacaattgttgtgcctaaatggaaaaaggaaaaccctcccaactttccattctgtataatgagatatttctttcccaggagattggcctcagccacaacccggccgggctccttgattgcaagcatcctggcggacaagcagcaccaatgtctcgggtaagcgtgggggaggagaggggtagggaggtgggaaaacccagacagtgctcttcacagggagctgctaagacactttccgggttgacagcaaactcattctagaaagtgaaggtgaaaatgtcatgtcagacaagtcactcagtcatgtctgacactttgtcactccatgaactatagcccactgggctcctctgtccgtgggattctccaggcaagaatactggagtgggttgccatttccttctcccagggatcttcccaacccagggatggaacccaggcctcctgcattgcaggcagattctttaccatctgagccaccagggaagccaaaatcatcctagcaccacaagcaaactgacagatatgccgaggtaacatgcaaagagatcctgcccatcacctccatgccctccaaaggtccttgtggccgccagtgaccccgagaccgggcgggcgtccccagtcaccgtcatgtttccctgctgtgtggcactctccatttctccagttgtcgccatcgatcgctccacatccccggaagtcgtgctacggttggtgagagatcgcagtgtgcgctccccaactccagcgaacgtagccaaagtgtgcgggctgtgggtgcggactccaggcactccccaggaagccccctcctcagctttggtaccagcacccagctcaggactgtcttcggggctacaagaggacaggaaagaggaggg

SEQ ID NO: 37470 - DNA, 1002 bp, Bovine  19866880526053
  misc_feature (1)..(1): n is a, c, g, or t
ntggtgcgatgtgccctgagtattccagtttctaaattgattcctggggaagaacggactggaagtccaaggaagagttgttctgtcttcctgaagtatactgaatcatgtcaggaaattggttctttcaaagcatactgatctgataatctaaggatctcaaaggccaataaatatgaggaaaaggtttaaaaagtctcagaatgctagagctgagtggtactctggagatcatctgctcagatcaccagcatttggtgtgacagatgaggccactgaccttgtgcaagtcactttaggaaaggttaacatttcattcatatatttattttgtcatcaaatatttattgaacatttactatgagtctgtgcagacatgtacctagtagtgaaaacatgttgctatttcattggttctgtttgagttagtgttcaatgaagttttcctttcttacagattatgtatgacaactggtttcacaagggccatggggttattgatacataggatctttagccagtgcaaataggttttctatgcaaggtcaccaacttctgagctgctagactaattagtttagctctacttggctttacataatacatacattgttgaaaagttatttgtaattcaatttctggcaaataggaaactaattcaaaccactaaggcaacttttatttaaagagaccctggatcacatccttttataatgtgaaaaatgttgttgctgttggaaatgattatcctttagttagggattttgtaaacctggaccctttaggttttcttatggctggacacacaacctaggaaatagctcagctgtggtctgaattggatggggaaaactccggcctgggaagagaaaggacccccaacccctgccaggaatcatagaccagcccaacccaagatagtgacatatacttggagcagtaactgcaagctgcctggataagctgctcctcttctctcaggccttggagtctggagtggaa

SEQ ID NO: 37471 - DNA, 1695 bp, Bovine  19866880529470
  misc_feature (1)..(1): n is a, c, g, or t
nttcattctcacgtggaattcttgaagccaaaaaaatagcggttggtgagacaggatctccatggaacagagataagtagggccacctgctgcagggtttggcaattcaagagattggggaggcggggagctgtacccaaaatgctgttctctctcaaaagagtaactttgcactgttgctgtttttcctgttttccatattctatgtttggctgtcagtgggaggcagtgggcgggaagagggagaaggcaggcctttggagaaagacagttggtttgaaaatactgctgaaagccttggggcttgtggacttactttctcttctgttctatcctgaaaagggcagacaaaaaaagatgtgcctgacccagggaaatgggggtcaggtgaaagggggaatgagcagaggggctggtccacacttctgcttctgccccagtgagcacagtgcttctcgagccctttcacccccatgtggtcacatatagccctaagtgtccacattccgatctgaagggagcccactgcctatgaccctctttatgaatggtgttcctgctcattttcaacttcatggaccctggacccctatctgccctgttcttatcatagctaacctccctgggtttcatccatagactctacgaaacagggtctcttaacagcagcactgatatcattttgggctggataattctatgttagggggctgttatgggttgagttctgttcttccaaaaaggtatgttgcaaccttaatggccagtacctgagaatgtgactttttttttaaagaaatagtgtcaatgaaggtagaattagttgaggtcagactggagttgggtgggctgtaatccactatgacttgtggccttataaaaagatgagttcaggaacatacagatacagagagggcactgtgtgacacgaaggccaaggctggagtgatacaaaggaataccaaaaactgtcagcaaacaccagaagtccagagagaggctcggaacagattctcccttacagaaggaactaacctacaaataccttgattttagtctttgagcctccggaactgtgagacaatacacttctgttgttttaagccacccagtctgtggtcctttgttacagtagccctaggaaattaacacagggctgttctctgtactgcagggtgtttagctgcatccctgccctcgacccacaggatgccaaaagcaatgccttccccagatgccaacccagaatgtcctcggacattgacagacatgccctgggtggaggtgggggatgggcaaaaatgtcttccagtgggagaagttcttttagatcataagaccatcaaggaagctccagtgagggagcccatacaacctccttagcttatactgcttttctgacagtccctcagatggcagaagccttaagaaatctaatcctgtggttcgcataggacaggactgggcagtagatcaaggagcctgggggagaaaagcagtgttcaggtcctaccccagattactcaaatcagaatgggagctaaggaggaggtgggggaggggagtatccagcagcatatgtttttaaaaacttaaacttatatgtagagtacatcattctaaacactaagttggatgaatcacaagctggaattaagattgccaggagaaatatcaataatctcatgcagatga

SEQ ID NO: 37472 - DNA, 810 bp, Bovine  19866880620264
  misc_feature (1)..(1): n is a, c, g, or t
nttctgcaggactctgatttctgatgggaaacatcaaccaagagaaactgggtgttgcatgggaaagaaatctctgatcctctattattgcctcttaaggtgactatttctatactaggaattcccaaatttctccagttgcagactgaatgctctaacagaccccccccaaaccatctgcctccccagccctctcctcactagaaataacgaggaaattttgccccatattggttgagacctcagtgtaaattatcaggagcaagttgttaatatcatcaacctcaggaggctagtaacttccagaccacccaggacaccaggcagacctcagggagctaggacatcgacctgactgttgccagaaaaaagcagcccagcccaatgcccctccttgctaactgcccatacctctttggtgtgagtatggaaggagacagacatgtccagcagaagcttccgctgctccaccctgcgcacgaagtcttggatgcgcacctccaggtgtctagctgccttgtagatctcctccgggtcacattcccctgtctgagccagctgctctgccgcttctaggagcttgtccgcattggtgtatgtattctgccagcaacgacagtgaggaaaagtcaacttgcagtcacgaatggagcgtcacgtcttcccccagcccaccagggctgcccagagctggagcgcagtgcgtgggcactgagcccagagctccctaatctggcacggaagagctgagtgcccagctcacccaccacctcccagcaagccagcagcctgccggcagctcagcacaag

SEQ ID NO: 37473 - DNA, 2442 bp, Bovine  19866880653370
  misc_feature (1)..(1): n is a, c, g, or t
ntccgctgcaggcagcggtgatgctgaggttggaggagtgccaaagcccaagcatcgagtcttcagacaacttttcaaaggtggcagggatgtgggaacccatgtagcctgggtcctgggagaaatccaatacagttcagaaaaacccagactcttcagagatgggtgtgttagctgagagggtggaggctgagcctcaagtcttcagccctgcctcccgcctgggtgtcagtgcagatatggggcaggacagggtgaggagctggcaggtgggcatgtggtacctagcccaccatcacacctgcctgccttgtcaataaaagacaactggcagtctaagctctactgggaaaaatgaattaacattcacttgttcccaagtgaatgttcccaagcctcatgtttgattttcagcctgatttgactcttcttccacgtacagacacttctctcatttataatatcccccgccattgccactcccaaagtgtaatcagtgcaggataaagaacaagactaaactatggagagatctagttgtttttagaatggttccctctgagatgtgctcatggatcagcaggagacaagggggctgtgagctgtgaggggatcgcagagaccaagagccaattcagcaggggctggtggtgtggcttgcggtcctgggagtgggaggggaggttatgcttgagaacactcatgagcatgtctctataggggaagaaaaaggaatgtacacgtcagagcagaactgcctccctttacaaaactgggtgttctcagaaagctttgaaaatcagattcctaggattcaaggtgctttattttcctcttactagctttcagggatgtgcctatatatctccctaaaattgtatcttaggcacatgttaggatatatgcctgccatgagggtagcaatcagccaatgtataagcagagaccccagaaaactgccccttgaaggaacccttcaacccactaattgagaataaataaagaatgctttggaaatcatattcgtgcagaggcaggagataagagcctatacatgacctagcttggaatcaacatgctggcatccggtcaagggtgggcagagagcagggcaggacttcgcattcagagatctagcattgagcagtgcacaggatgtgtggagcgggtgtcagctggggggctcaggcccaggggatcttagcagaggtcataggaattgcagctcagctcagcggggcacagggacattacagtcatcaggtacaaaaagcctggggccagactgggcctggaaatgatgcccaaagctctcaatttaacagcaagagtcctttatgaggtggacagcccacatatttctcaaaccgggtctttaacatatagctcttttcagtaggcacccccaagccattttcttctgcaagggacattgcaataaagtgctacctatacttatcccttcagaaaattcatattgaataggttaactttgtatatcttattcgtcatctgtgtctgaaaacgctagcagtgccatgatgcctgctttccctcagcacctgcttctgtgctcagagttaatttcaacatagcaacacagtttagaagagcccgataattcctacaaggatccatatgaatgttcaagggctgcaggcacttctactacagaaaactagattaaccaaaatatttgcagcttccaactccttcaagagttccagttctgcctcaactgttacatctaaaaacttttcatacatgcatcaacacaatttttggctttctttatatcagcactgacatcctaacatctttccttatgcaaccacagcacctcccggtgctcaagctcatgtgaagccttggatgaacaagaacccaagaaatgtgtgcaattcacaaagcagggctacaacatgcacacttgcaagcttttgttcgtctaaacgcagaacagagaattaattacatcagtcaaccttctcagtgttgacccatgagaaggtcaccttgtcccacacctccctgtgcccaattcttcctctaaagagcagcgaaggaaagtcatccttctccccctagtccaccagagctgagaaacgtcccaaactgccttgtagaacgcagatagctggctctcccccctccctccaggtatttgcagatgacattttcaggacatgccagcaacgctgagatctggagatacaggcgccatgaggcatatctccgagctgacaggtgtgggcgtcccaggagttggtgcttgtcctgtgaaatgcaaggaaagcagagccagaaatttcccccaccttcctcactctctaagatacatttagactacgaaggccatatctgcttcctcccccaggggagcaccggactggcccacacctgccagatttagctccgggcaacacctgcagccacagggga

SEQ ID NO: 37474 - DNA, 1280 bp, Bovine  19866880675658
  misc_feature (1)..(1): n is a, c, g, or t
nagtttgctgccccagtaagtgatccagggcatccctgtatccctgggcaccgacatctggagcatcggggttttgacatacgtcatgctgagtggggtctcccccttcttggatgagagcaaggaggagacatgtatcaatgtgtgcagggtggacttcagcttcccccatgagtacttctgcggtgtgagcaatgctgccagagatttcatcaatgtgatcctacaggaagactttcggaggcggcccacagcagccacctgcctgcagcatccgtggctgcagccccacaatggcagctactccaagatccccctggacacctcccgcttggcgtgcttcatcgagcgccgcaagcatcagaatgatgtgcgccccattcccaacgtcaagagctacattgtcaatcggctaaaccaaggcacgtagccatctcccagccctcgtggtttcacatggaagtgcagtgtgaaccaaagcaagactgaatgtgtctgtaaataattctgtccatcattcactccatgtggttctctggattgagagatgtacctcttaaacttcctcagtggtttgtcaaggtctgagcagcagtgaaatcaccctaaatccagggactttccagaaggtcgttcagaagagatacagatgtagagtcacggaaattattcagaagagaggcggagataacaagaatagcagctgttatgacattttaactgtgttccaaaatgagtggttaacttggcaaaacataaaatcactgaagaaagtataaaggttcctgcctttgctgaaattttaagcaagaagttctatttaacagagatgtcatgtatgtcaactgtgccggtttagattacttacatatagtttcttaataggatacatgtacacatacagtaaaaatatatcacattcaactttcagagttttataatatagagatatatatgaaatcaatcttaagtaactttgagtgctccagttaagacagtaacttatgtaccgaagcattacattgttttgactaagcacaattagatgacaggttttgtttttttttttttagagccttttataaatcttgtatagaactattttaccagaacctgtgcattaagagaaagcaatgttacccttttgcaatctgtgagtgagaaagatttttctctcggtcacaggtatttgactaacttagggttctgtttatgaaatgctatccccggattcactggcagctcagagttcatctggcaggaaagcctgccagggaata

SEQ ID NO: 37475 - DNA, 1605 bp, Bovine  19866880676379
  misc_feature (1)..(1): n is a, c, g, or t
ntgaagcttgtaacattcagccgtcctgagtgaagatcctgggacttttgtttcccacactactacaacaaaaatatgagtgcctttcctctttctggttttcttttctcttttcctttcgtattagctgttagctatagctttatgtcactttgtcaaggtagatgatacttgtattctactttgcagctaaacttaagtcctctgggctatgtctgtgactctgtagctgtggttcactgaagagcaaagtggtgggctacaaccccacttccttggctgcatctgacgtggcccttgtgtcatttaggggagaatgttcctaatataatggccaaatggattcactttaagacttttttaattagttgtttaaagtcatgtcctattttagtttccttcctatttacatgttggctttcttatttacttctcctcgagtttcagtaagcgttttctcttgttgccaaaatacgcagtcagcaaacctttaaaataattcatagtgtcctttgtgttgaatccagtcctatccagaggcatccctaccggggtctccgttcttctgcttcagtccctgcgggtttctctgctgcaccactgttactctgggactttgttaactcctgacttgtcaccactgctttgtgaaccttctctttttctctttcatagcttatatcctcattgtactaggagtccttgctttagtgtcttcctcagaaatgatgtgtgggaggtaaattttctgagcccttctttgcttaactttactttcacttaattggtaatctggctaaaactctagtttcaaaatagcttttccacagaatttaaaaatcagtgctcttttctagaactcactgttgctgttgagaagtctgatgccagtctaatttttgttcctttgtaactgttcggtttttatctttgaaaatatttaggatttctcctaaaattgcacagtgatgatttagttgtgggcctttatgttgtttactttatgggatatttcagcctgaagacttgtgtcttcttcaggttgaagacatttatttctgttgtttacctgcttaatttatctttgttctctctttctggacctcctcttagttggatattgtaactccaagatttcttctctttctcctattttttgctgaaaatttttacccctttgtctttctgttctaaattctgggatatttacttaactttatcttctagatactccactgcatttttagtgtaagtgatcatgtttttaattttagtgatcatgtttttaatttccaaaagtctttttcttgttcttattttttgtttttcatagcatcttgctttataggtagaatattcttcttggatgtttatggagctactaattagtattttcttcaaaattttatcctgtgttctgatttttatgtttcttccagcccaggtggtcctgtttttgccgtgcacgtgtctgtgtgtttgctgctgggtttgttatacacgtgaccacctttggttgctggcgtggatctcctgctgcagtgtggggggggtctgtctcctgacggggttcttccttcatgaaagggtgacagcagcacattt

SEQ ID NO: 37476 - DNA, 1190 bp, Bovine  19866880696493
  misc_feature (1)..(1): n is a, c, g, or t
ncttctgagtcctgcatcttttacatgttgaaggtttgtggcaaccatgcatcgagcaagtctaccagggccattttccccacagtactggctcactttctgagtcacattatggtaattgttataatatttcaaaccttttcactattattaatattacatttcttatggtgatttgtgatcagtgatctttgatgttactattatgacttgaaggcttagacgatggttagcattttttagcaataaagtattttaatagtaagatatgtacaatgttttttagacataatgcacacacttaacagactgctgtatagtataaatatgacttttgtatgcactagggaacaaaaaaaagtgtgtgacttgcgttattgtgatattcattttagtgcagtgatctagaactgaactcacaatattttcaaggtatacttgtcttttagtagttgcttagggtttgtaatacacctttttaacttaccacagtctatctttaagtgatattctagtacttcacatacaggataagaaactttcaacagtctattcctatttcttccctcctggctcttaggctattgttgccatccattttacttctacgtgtcttataaacctcacaatttattattatttttcatttgttatcatttatgcacatgccatatttttttctcctagactgtcagcttgaaagtgggatttgtatctgagtcagtgttggcatttaataggtgttcaaaacctgtgcttttcaataaatgctgaaagagaagaaaggaggtggtggcagaatggctgtattgctcaccaaggtgaagtccgggatttgtccgaccaatgtagaaatatacaatggcagcaacacctatgttaaccagggtatagacccactggataacaaacatgatgagaagcgacccaacagcctgtggaaagagaaggaagagcaagtcagctcatggctgaaacacgcactaagcaagccacaagacaagggccttaagcggaggaattccctgtgctccagtggttaggactccacgcttctactgcagggaaccagggcttgcttcctggtctgggaactaagattccgcaagccacgtggtgtggtcccctcaaaaaacaaacaaaaacccttgataagactaggacctttagaaacaaggtcctctcatcaa

SEQ ID NO: 37477 - DNA, 801 bp, Bovine  19866880704110
  misc_feature (1)..(1): n is a, c, g, or t
ntttggcttaatctgcccgatctgcctggcaggcactgtggggaaatgccaaccgcatctggggagacgtgaattctctcccctttcctctggtcactgcgacaggatgagagggtgactattttcaacctggaaagctgtcatgttgttgtggctggtgaacaggtgccatattccatcctcagctggccactgttcagagcctggagtagcactcttgatagacagagtcggtgtggcatgtgacaagagtgggccacgctgaagcctggctgccagaagcccagccaagccacaagatggcaggaagcagctgccaagagaagagaatcccctgagggttagggtaggtgggcttttcttaggtcaaggctctgggccaaccaccaccagtggggagcatggccaacatgccaatcttctcggccacagtctcccccacaggcctgatcagtaacagccatctccaactcccggtagaggaaaacaaccaaatgagatcattcacatcaagagcattttataaattaaaacaggctaacaaaggctcatttaaggaaaagtgggtccagtctaatcaataacaatagccagacactcaatggctactaaggggaatggtctgtgcctctcgagtaacagtcataaaaccgggcgcctcggctggcctcctggtccacgagtgtcctttagcctggtgtgtgctctccttatgcaacccagagaaaactcactgagcaaaacagagactaaatgtttcctaaaattttgaccaaaataaagcgtacttattagggaaga

SEQ ID NO: 37478 - DNA, 1442 bp, Bovine  19866880719232
  misc_feature (1)..(1): n is a, c, g, or t
nttgatgaagtcttttactttactttcatctggacaggttggaggaagcacacagacattttatttgccagctgagtttatctgaaacagaggtaagggatggttcagccaaggtcactgtttaatccggatgcagtgacagctatagaaactgattttgtccatttaagtatgtgagaaagacactgcttcttactcagaatgaccacagaagagattgggttcaggctggaccgtgtgtaggctatgaaagctttgaccatccccagcaggaacagatgttgcaactgaatcaacagaaaaacagtggcttggccaggtaaggcttggtcatgcagaggaagcaaatcctcaggaattaaaaaaaaaaaaaaatcagtcaggtggcccaggagaagactgtgtgcagggaagctcagaaggaggagcacaagcttagaagctggctcagagcaagcctgcaggtgaaaaacaggaccatggtcaagggccacccagcccaggggtggccacttctgacgttaaagggacaaagctcatcaggacagtcatcagtacgttcttcagccagaaatcctctgaaattatctcaggatcttcctagagtagaccagaacattactactgtctggaatagagacaagggtttccagaactgggttatctttctaagctatgaaactacaacttatagtcctttaagatcttcagatattactttactgaataacttattcttaaactcccaagaggacatcaatcctccacattatctagtgtttttctacagcttctcagtgtcttttataaaattatccaattttttttccaacccttgagtaacagtccccaaattcaatgtcctgttgtaatatttatacatctcttctatctttctatcatttccttttccttcttgcgtaccctcaactctcaaacctatttctctatgcatcttagaacctattttcctcccctacctattttctcgaatgcatctggcttataaaaatctacaaagaacaccgacaaaaaatattttttaatgtcaacaggtttaggctacgggatgcacactctgatgcagcatcagatggggacatttttctccaaactgcttccacatcacttgcaaggtgatttgtcaaaacaaattaccgctcttctctggaggatttcatctactccatacatggtggtcgccttccatttttaatgattctgaaaacacaaaagatgtttcaagtgtcctatgacagaatctgaggttccctctctctgtgcaaatgatcgaccctccactgcaggagctgctggctctcatgggtgctttcattgcccatgtgttcacagcctcactctgaagaggtttgctaacctgtcctctgaacttggggctagtgagcacctgaaacatctagctaaggtccactttcaggcat

SEQ ID NO: 37479 - DNA, 1526 bp, Bovine  19866880728270
  misc_feature (1)..(1): n is a, c, g, or t
nattaaaaagcagacacatcactttgccagcaaaggtccatatagtcaaagctatggtttttccagtagtcatgtatggatgtgagagttggaccataaagaaggctgagtgttgaacagttgatgctttcaaattgtggtgctagaatagactctagagagtcccttggacttcatggagatcaaaccagtcaaccctaaaggaaataaaccctgaatattcattggaaggactaatgctgaagctgaagctccaatattttggccacctgaatcgaagagccaactaattggaaaagagcttgttgctgggaaagattgagagcaagaggagaaggaggtgacagaggataagatggttagatagaatcaccaactcaatggacatgaatttgagccaactctgggagagagtgaaagacagggaagcctggcgtgctgcagtgcatggtacacaaagaggtggacatgacttagcgaaagaacaacaacatcatatgattttgtttgcattctttattttttatttatttttgttacagaattcatagtagagccaactttctaattatgtttttcttgactgtgatgaaaatggaaatgaaatgaatttttaactttccaagtatacattctgtataggatggggagctaaaggatgataggtagtttgtcaagtggggaagtagattaaccaaatatggatcatccaggcttgactaattgcatacattcccattcagtatttcatgaattatagagcaaaaaaaagttctggaatttcaaattccagaagagaaaattctagaatgagaaaattccttcttctcttcaccacggcaagaatgacacatgggggattgtagttcaaaatggtactggatggctgagatcagcctttaggaaaccacgaaggccttggcagcggatatcagcccttgcaggtgccgaggggctgctgttccgttaagccattatgcctcattaaacagacttgttctccttgtcagcgtgggctctttctttagggagtcatcgaatccagtttcagagaaggcattcggggtttgatggaagttggtggagcaggaaatattgacttggaagctgttgacacttggaaagagggagttaatttagatgtcagtattgatcgtgtgggctaaatttagacaccagcttgagagtttctctttggaatgtactctcaaaaaaaaaaaaaaagacaccttaattgaagtgccattaatagagacagaaagggagaggacaacactgtgttatgtctctgtcattatagcgcagaggttaaaggtttagatttggccttcataacctatgtgaagttataccacagttatattaaactggagctctgaggagcagtgatatcacagacgttgactaaaaataattttcaagtatttagaacaaatgaaactgattagtgcaactgatttgctttctgagggattacttaggattttgtgtctaagataaatggccccagcatctccagagaaatg

SEQ ID NO: 37480 - DNA, 1033 bp, Bovine  19866880767676
  misc_feature (1)..(1): n is a, c, g, or t
ngatgtagtgattcatctaaatggtggttgaatattttccctcctcaatttgtatactcaaaggccagttgttttgccgatcttgaataaagaaattgttaatggaaaaaggaatgatttcattgatgatattgtgctattctttaataactttcatcagtccaggtgatcttgcctaaagaaacccatatttgaaattttgatcataaacacattgtgatgttttacgaagttaaataatttgctagttttattgtaaatattctgtatatgtaactttgacagtttggaaatagagacatttaacaaaacagtaaatcatagcacattgaagattcatcagaaatttaaaaaatatatttccaaagtggattatcagaaagtataatttagattatccaccttttcataaatacatgccaaatttatactatagatacatcttgagttggttgaaatacataattttaaaatggaatcaacataattttttctttcccaggtactaaacggcttatagaaggggctgttaatccaggagacacctgcttgatcattgaagatgttgtgtccagcggatctagtgtttgggaaactgctgaggttcttcagaaagaaggcttgaaggtcactgacgctgtagtgctggtggacagagagcaggggggcagggacaatctgcaggcccgtgggattcgtctccactcagtgtgcacattgtccacagtgctgtgtattcttgagcaacagaagaaaatcaatgctgagactgtggagagagtgaagagatttattcaggagaatgcttttgtggcagctaaccctaatgattctctcccttctgtgaagaaagaacccaaagaactaagttttggtgcacgtgcagagctgcctgggacccacccggttgcagcgaagcttctcaggcttatgcaaaagaaggagaccaatctgtgtctgtctgctgatgtttcagagtccagagagctgctgcagctagcagatgctttgggatccagaatctgcttgctta

SEQ ID NO: 37481 - DNA, 2207 bp, Bovine  19866880784127
  misc_feature (1)..(1): n is a, c, g, or t
nccttaccagttttgctaataaactaagtatcgagcttacaagatttttttctccttgttatttctcaactagctaagcagatggaacattttatttttcacaaataggtccactgatagttactaaaattcttgaagtgcttcactgtttgattagcatgttactagattatttccatattgtaggtggttggttgagttaaaagttaaaggtttttgtttgaaaattgacaaacatctttttttccctttctgaggtggggtctttaaaatagcttcctgggcagatcttgtgaatgctcacgccgtgcccggctcaggagttgtgaaaggcctggaagaagtcggcctgccactgcaccgggcgtgcctccttgttgcagaaatgagctctgctggcaccttggctactgggagctacactgaggcagcagtaagtgacagaggagagggactggggcaaggaaggcaggactgtggcactagatgttacagggaaagaaaatacctgcatctggggtctgtggacttgccgcccaaaacaacaaatcacgctgctgttactggggcagtatagtaatactagttggctagaatgcactgatggttagtagccttttatgtcttatagcagacactaaagagatttgaatggtactacaagagaaacattgaaacacagatattgggtcaaataaacatatgtgtccatatgtacctggcctttaagatagagtttttaccatctccccatgagttgaaattgaagagcttttttccagtttcttggaatcttcctgagtcacaaagatacacgttctcatgacagcagcccacgaagtgggttatctttttcagtctttgatattgattggggttctataggagagctcttaattagagtccagacacgttatttcctctagtaactccccattattaaaaattcttatgtgtgtgcttagtcgctcagttgcgttcaactctttgccactccatggactgcagtccgccaggttcctatgttcgtggggattctcaggcaagaatactggagtgggttgccattcccttctccaggggatcttcccaacccagggatcaaacccaggtctcccacattgcgggtgaattctttaccgactaagccgccagggaagttcttatagcaccatatatgttctaatgtaccatacccagctcccaccccctgcacaccagaacagcataagagatggataatcatctgcttataaagtccctcttcacattctcctctgggcaagtttcctagttggatagtcacctagaaagatgagatggattacctttgcatatattttaaagactactttttaaagtagtaggaacttttaataaattcccatgtaaaaattaaaactttatttttcatatttcaaaggttgtggaactgtgaaaaactcatggccctagggccaggtattaacccttcccttgatttgaccataaatgtctgtgatttcccagctgacttagcagagggtccatgagtcagtgttaatatttggcattctggatctggctcaaggacagtacattgattattggtaggtggtagtacttagtagcaagaatgaaacagtctgggcctcagggaagaaccaaattagaaagttaggcagggggcggaaaaagaggcagacctagggaatcttctaaagatgtgaggtaatggaagagaaattgtggaggcagtgttaaagtatagggaaagctgtggaggtggcttcacacctcttcacacctcttcagctagctctttacagcacagctgtttttatgtggtggctgtccttggatatctgtgtagatgggcaataagacttcagtgtagctttatatcattataaatgtattctagggtatgatttatatcctttttggaagtaggtaggtccctaaacattattaaaaatagataataatggagcatctagatttttgatgcaaatagtataggatttttagtgtttttagtgtttgcttatgggagaaggggataggagttattttagggtcttagtggagcaggtatgtagattcatatctaagattacctgtttagatatgagttcaatgtgacatgagaaaatacatccataagacagcagagtttcttatgtttggtgtggttaactgctgtcttgtcatctgtttattacatt

SEQ ID NO: 37482 - DNA, 1015 bp, Bovine  19866880784520
  misc_feature (1)..(1): n is a, c, g, or t
ntagaaaatctcttagagcctctgcattggctgttccctgtgccgagaatacttttccgcaacggttcaacctccttctggtcttcatgcagaacacttcagtcagaaccatttaaagctgcagcatggccccatccatactcctgatcgcccttactattttttttttccagcttctaacatactacatgatgtattttaaattttattgtatgatttctcacattaaaatgtgaacttgccacgagagcatggacttttcttttgttgttattgtttgttttattcctgatatatgccaagcagttggtacaacagatattcaacaaatatctgttggataaatgagtggctaaaacttgaagacaattacatccattcttgacttttttcttctcctggacagataactgtctgttttcatcttttttccatggagctcccatttaatactctgaggtcttactggattgagtctcagttctctattcccctcagcctccagcctcatgtggggtttacaattaaacacctacacatcatctctttcactgtggccataaattatagcagaataagggcaatatacagcaaaaggaatgagtcattctaacagctggctttttgggacagcacgggatgtggagagatacagagctaagcgagggagagagggggaagaagcaacaaacttttgcctctcggatcgaaattagacaaagtcacgtctggaagcaagacaatgactggaagcttaaatgactgtttacaggctcttacatagagataggctttgccaaggagcacctgtcatctcaaaggtcaccaccctgatataagcgttcatcttcctgatgaaagttttgctttggcttgacaagactggaacctcagcttcgaccctgcctcatctatgtaaaaacaacctggaaagctaagagaattagctttgtccaaatcctaagaaatttccctttgggggatgggatttctttacctctattctattctttgg

SEQ ID NO: 37483 - DNA, 4138 bp, Bovine  19866880790384
  misc_feature (1)..(1): n is a, c, g, or t
ntccatctagtcaagctatggtttttccagtagtcatgcatggatgtgacagttggaccaaaagaaagctgagtgccgaagaattgatgcttttgaactgtgctgttggagaagactcttgagagtcccttggactgcaaggagatccaaccagtcaatcctaaagaaatcagtcatgaatattcattggaaggactgatgctgaagctgaagctccagtactttggccgcctgatgtgaagagctgactcatttaaaaagaccctgatgctgagaaagattgaaggcaggaggagaagacgacgacaaaggatgagatggctggatggcattacctactcaatggacatgagtttgagcaagctccgggagttggtgatggacagggaagcctgggatgctgcagtccatggggttgcaaagagttggacatgactgagcaactgaactgaactgagttttatagaacatagaagcagcaatggggaaacagggcatgattgtctagggttgcatatctgaccttatgtagaaaaaagtttagagcccagagttggcttcagtattgaggatgggctgactgatgcgctgcattactaatcaaggggagcattttaggaacttgaaagttggacttgctgatgtggcaccccaggcaggtgtagctgcatcttggggctagaaatgtatttcagcaacttgtaccctactaaaataagggtcgaatttgaaaattgtttaaaatacagggatcaagtcaaagtgttattttttaaggtagaaaaatctgagaatatagacatcagtcaaagtcaagacatgctcgtaacctattcctagctgcaccctgtaggaaataagcaaggagttttctgtttaagaatggagacggaaatgattttattttgaaacagtatggaaaagtatacttgcccagagactcaaatgccaggtttccagttccagggtcagcatgtacagcacaatgactccctgagcctcaatttcctcatctgtaaaatcagattaccacctgctctgcttcccactcaaggatattatgaagagcaaataaaataatgtatttgagcaagcttgggaagtggtaggattcttcagatgggaggtgtcctttgacattaggtttctaatctcttggaccagaactgaaagcaatgaaagtgataaactactctgaatacagagcaataattatgggtcttttaagagtaaatcaccagtgaaaaaattgccctagagccagatgatgtaactgcagtgtgaagatgtgactatgcctgggggacactgtggagccttattcacgttcacacggatgcagaggccatgtttactgcgctgattgagaagagatctgtacttgccggttaccatatgtgtgtttctgcacagagagtctgggtgcagacctagacctgaggatggagtggggggactgttctggaagcctgtgtgtggagtgtcccacaggcaccgtggatcaggaggagagccgcttactgtgttaacaatcatctttcccttttcaagtcatttagcttcattgttcataaacatcagaggaacatgcaaattagagtgtgctgaaacgctttcatttggccaagaatgttttcaaagagctccctgctgctcagaaagagtcctaagcagctggcttcactgaactgtagaacaagcaaaaagatgttaaataaggattaagggctttagacagtaagtatacgatgttaaatgttttccctggctcatttgtgggcctttttcttaattcagcaggcaagctttctgtgaaagagcagcttcatgggtttctgtgttgagattttttttttcttgtccagagggagagataagaatttaatctaaaggaagataagaaccagatataaggcaggctaccctaatttttgattgcctacccatttgtaagttccattcccctcaggcccaatcagcacaaattgatgttaactggaattttattttaggagtgaaatggaccttggaaaatggggctacatgcttttgtgtctgaacccaatggtatcttgaatatgggttgttttcatatacagcttatcatcatggagtctgacagctccctggggtggggtcctgctgcagatgtttgacacctttctctgcagccacttagttgcccttagactgttggattcctcaggggtctgtgggtttagggggtagaacaccttggaacatggacgcacgtgatgttaaatgttaattttggcccttgggagctgggtgatcctgggaagtaacccagcttctggaagcctcttttatcagtgatagaacagacatttcctctgagcaagaggaatagggattggatagaggtgactaatgagaagaggaaatcagagcacacccttgaagttagggcttgcttactaacttgataaaagacctagaaggcaagaactttgcttcatccaaagctttataggggttgacaagtctttccagccccaggtctccctcccctcctccttgaactgtgtccttagctcacctctcttctctgccacagcttcactgagcatccaaggtgtgagagcccactggagaggtgaggaaggcttgtgctcacgtaggctaaaggctccttggagcctctcacccagaggtctgctcagtctcagccttcagctcaactgagtaggtgctcatgttgctagaggagccctgaggagggagaggtggtctccaccctccaggagaaagaaatgtttagagagcatcctgggaggtggaggaaagctgggtgccctgagatttatagatgctcacacttgtgcaggttgaccttgtgaggtctaacaggttatgttttcattttcagttagaaccttcgtgacagagtttaaactaaagaaaacatttcttaataccactgtggaaaaacattcagacctccgtgaagttgaaaatgagatcaccaaaatggtaagtttcccaagaggcatctccctgctactcctttgttttctagaacagattttattcagagtggaaacttcctgaggatcacctgtatcttcatttctatcatacttgaaaggcgaatgtcagggtaaaattaaaggcctctcagaaatagtagggaggtgttgagaactagtgatgttggtagaagcatttcttctaatgtgtcttcctgaactgcttttatcaatgccttggcatttatttcttttccatgtcacacacttagatgacatgcactagtaagagctgttggtaaagaggaaagacctagagaatcctgccatcccatctgctgttaacctgctatgtgacttttttgtgtgtgtctcagaacttggggcggagaaggcaatggcaccccactccagtactcttgcctggaaaatcccatggatggaggagcctggtaggctgcagtccatggggtcgccaagggttgaacacgaccaagcgacttcactttcacttttcactttcatgcattggagaaggaaatggcaacccactccagtgttcttgcctggagaatcccagggatgggagcctggtgggctgccatctatggggttgcacagagtcggacacagctgaagcgacttagcagcagcagcagaacttggggagaatgatgctttttctcaagggaatgacaaaggtggaggttaatcccattatccagggttgagaattcactgaatggattatctgggggcctttgattcttcttctttccctcctctcctcctttttgtcaggaaaaaagtaaaaatggagaggaaggaagaagagtcagaaatgaagctcagacagtattttgcttctcagctgctaccagagtctgagttaatgctcagaaacttgaaatttgccattaaaataagttttagagattgatttctgattttaattttacttgttctttatgggtaagagtatattagccaaaacctataagattttagaagaccatgggtttgatttgtgtaaaaattagattccagttccctttctgtatgagcatctactctgtagcaggcactttgcctcctgtaggaggtattgccaacacctttacagatgaaaactggagggctctcttcca

SEQ ID NO: 37484 - DNA, 1904 bp, Bovine  19866880809565
  misc_feature (1)..(1): n is a, c, g, or t
ntttttacagcatcggaccttgcttctatcagcagtcacatacacaactgggtattgtttttgctttggctccatcctttcattttttctggagttatttctccactgatctccagtagcatattgggcacctactgacctggggagttcctctttcagtatcctatcattttgccttttcatactgttcatggggttctcaaggcaagaatactgaagtggtttgccattcccttctccagtggaccacattctgtcagacctttccaggtgttgactagacttactgtgatgatgtatccaaatactgtttccaaatacattcataatgtataatgtgtccaaatactgagtcatgatgtacacctgaaactaatgtcatgtgtcagttacacttcagtaaaaaaacaattcttaaaaaaaaaaaaagccagaattaagaattaggatctgtacataatcgaagcatttggtagagttgcagggaaagcttcacacatgtggttgtggtcagggcagatgccttatgaggacttttccaacagcgtggcgcagtgattctaaaatgtatactagatagtcttgaattgtgaggtactttttattgcattatatttagtattgaaccttttagggcaaaataaatttttttttttatactgttaaagtgtaaatgctctaaaattagacatcaaaaaggaattggtgagcatctgtttccactgtggagatctctggccagtttaagagtctcttcacctgcctttattcagttgctgtgtagaaggggcatggtgaacaagagcatattcttatttaaatcaggttagatacttctcagaaaggtgacgtttcaggtttttttcattttctgtattaaacagacttctttgcgtttgtaggtgataatctcggccagcagtaccacagcccacaagaagtcatcggcaaacgaggctctgatatcatcattgtgggccggggcataatagcatcagctaatcagctggaagcagccaagatgtacagaaaagctgcttgggaagcttacttgagtagacttgctgtttgagcctcttggatgtgcttttgggatggccctggagctagatacatggactcctaagatgctactggcttgaaacaataagcagcctttaatcctgcttggatttttccatgggtcctgtgtggaactggagttaccgtggtctacaggaaatatctaatgacttgtgatcactacactgtcactgtaatccgttcaagatttctttactgagactgatggtagttaggcagtcacaccccgttctgtcagaatgtcacattggaggactgtgccccccaccatctccagatcagaccttttgattcttttaactgccgtgagacagaaattttaggtcataaagagcctaaaactagtacaacatttctgtgtcctttattctctaatgtggtaccctaataatacttaaatattagccattctgcctaaaagtaatagtccaggtgtctacatggtgctagctcccagcactgctcccgaaagtgtctggctttcattgcaacagggagagggcttctctgttacatatggagcagctgctctttcatttatttaaaaagacaacagtgtcaagaggtctgaggtttcaccttggaagtttgtcaggggatcccacatgattgtcccaaagggcattgctagagagagagacgtcagccttcagattccgaaatagaaaggagcccagcaacagagttgaagttggtagtgacaaccatctgggtttccacagtggaggcgctaggcacatccacctttcctcacacatgcggcagttaggcagccctcttattctggccacaactgcactttttcctagaaattctcagtt

SEQ ID NO: 37485 - DNA, 1856 bp, Bovine  19866880842515
  misc_feature (1)..(1): n is a, c, g, or t
nccagacactgtaacatgtaaaaaatgaaccaggcaaaccatgagtcaaccttctcaggagctcacaaaaggcatagtatggcatttgtaaccttcaaaaggcagatggttacaaatgccataaagagacaaagtatactgcacataaagagaaaggcaaggattcacgtaggaagcaacacatgactgtgaccgtttaaggataggaagacttctaagggtgtctatgtgtgcctgtgtgcagtgtgtgcaaagggctcacggtctatcttaggcagtgagaatagtgtgtgcaaagataaggaggcagatgagtctacagcctactcagagcacaggatatgtatgttcagaaaaatgtgaagtggaagacaggacacagtacatttaaaacttcaaaaagactcttctagatactattgataaaaaaccagaaatatattaagagaaacacattattaaggagagagaataggagtaaagggcatctaaaatgatacccaataacttctgataccaagtcagagaagtgcttttcttgagttttcagtttaaacaaaacctcacaaatttcactttgggaccatttccatagtaatactccatctttaaaaatcatgtctgttttttcttgtctggttttcacccattcaagtattattccttcactgagcaacaagacacttgtagaatcatttctgttacagcaggtaaggctagaaagatgctcagagaaggattattttgtaaacttgagtatgggaaccatgtttgaatgtctgtgaccccatgggacctggcacattatcttgcttacagtagacattcaaatatttagagaaggaatgagtaggcagaaagttagactgatagacatttaaaattttctgaatttcaagtgtttgttacttctgctatgactgtcagaatggccatcattgctatcacctatctctcattgaacttcacttttttattctcatttctttcttcccccttgttctttccatgcatcctacagtgatccatttgattctgttcatgttatagccagtaagtcactctctggggaccagtatcatatacacatcatttgccaacaggactgtgctcacccaaaaccagaggccctgacaaggtgcatcagctctgaatctcctcttggcttccactacagaacaagtgctcgaccccggctgcacgttactctcacctggaaatgtttaaaaatctcaatgcccaggccaaatccaggctgatcataacacaatcagggctgggactggaaccagtatttttcatagctctaaggtgattccaaggtgcagtcaaggttgaaacaatcgtattagagtagttagtgattctcaaacttgagtgggcatcagagtcacctgaagggctccttaaaactcaagattgtttcattccagccctggggattctgattcaatagatctggagcagtgtccaaaaataggcatttctaataagttctcaggtgataacgatgtagctgagctgagaccacactttgagaagtcttgcatttgaggagctatagaggtggctcagatggtaaagaatctgcctgcaatgtgggagacctgggttcaatccccgggatgggaagatcccctggaggagggcacggcaacccactccagtattcttgtctggagaatcccatggagagagacaggagggctactgtccatggggtcacaaagagttggacatgactgagcgactaagcatgcacacacacacagacacacacacgctgtagaaatggaacatcttaattggcacctgcatcctagtacacctcttctacacatgagatttatggctag

SEQ ID NO: 37486 - DNA, 1228 bp, Bovine  19866880850452
  misc_feature (1)..(1): n is a, c, g, or t
ntgatgaggaggtgggcgttgaagtttttgtagaggctcggatgttgatttggggtgctgccaagggctttcgagttgttagctttggctattagctctcatttacttcaaaatgtgtggttctgcctttttcctgatacaggtgtaaattcctggtactgatcttgcacttcagtcatgactaggattattttttggctcaaaatggaacaaagcagggaggagaaggtagaagggagggagaaggagatcttttcctaaggtagtttggagagaattggaaataaagaaaagagacaggcctaggatgttctgtgaaaatacagtttatagtggaaagtgattcctcttaggaatataggagaacagcatctctttggtgggaaagaaagaaaggaggcagtagaaaagggtgaaaccaagtcaggtgggagagtgagtgccctcgtgttttagaaacagggtacagagaccttgtgcagatcaagaatgagaatcctgttaccaatctcagtttgaatgtttccacattgactgttctgagcccagaatgcctttatagtgactgtatccttctgccataggaaatatcaatctgatgaaaattatatataatataaaattatcctaaggaaattaagcccagatgtggatattggaagatattaattggtcagaaatcgaaaccataggctggcacattttgggggctagagagaggacttgaaggtagtgtgttagttatctatttctgtgtaacaaattactctgaaacttaatggcttacagtaacacacagttttcatcttacagtttctgtgggtcaggagtgtagacacaacttactgggtctgctgcctcatggcccctcatgaggctgcaatcaaagtgtcatccaggtacccattcaatgataactcttcattgtcccctcccctagcaaccaccattctacctttttctccatgattttgcccagtctaaggtaccgtatctgtctttgtggctgacttatttcacttagcataaggtcctcaaggttcatccttgttgtagcatgtgtcagaagttcttttctttttagggccagacaatatactagtatatacataccatattttgtttattcatttatctgtcaatggacactttgagttgcttccatattttagctactgtcagtaaagctgttatgagcataggtgtaccaatatctcattaagacctg

SEQ ID NO: 37487 - DNA, 1232 bp, Bovine  19866880852284
  misc_feature (1)..(1): n is a, c, g, or t
ntggacctagtttgtagttccccagaaattccctactgaagggagtttgataccttgcctcttctgtatcctgcaggcctgcagaccataaggagctcaaggttctgggagatagtctttacactggtgtctatagacagggaggcagttgggacttgtgcctgacagacagttaataaatacctactgaaggggagaaggtgttctgggccctgtctgttcttctttaggcttttggaatgacagcaggcatagctgtatatatggtacaagaaagaagtcaattttatctatcaccataaatccagctcttcttagaggatggctcagcctggttacctgggagaccccagcactgacctcaggaatcagtcagggcaccaaacaatatcacaggccaggctgtatctctgacctgcagacatgctattgctgctctagcatatttcttacccactctgacccgcaattccctaattcccagatctcagatctaacatcctaactcacatcatgatactcacatctagaactgcccagtttctctataaaacagataaatgtccctgtttgctcccattgtgagcaaggagttaataaaaccctttccccttgagcatgctaatctgaccttcagttaacaccctagttctgtttccctggaaacagataaagacagtatgtgccaacatgttactaaatcatgttgcctatggttaaaaaaaacaactactctcccaactggtaaactgaatctggattggaaagactatcaatgaactataaataactggtggggataatgttccttgatcttccctgaagagggtgactcttgtaactaagggtgtgtccattgccagaaccctggaagctgtgtcaatagagttgctataagagatactggctcgtgtgagacatgggttattgagccgtgagagcttctgcagctgcccaccatggatcttgtctccttgcacctgaattggcccactgcaaggactgtacagcaaggaaaccatagctcccatcttatattgtcctgagtggatcagcaccaaaggtggcccatagcagtctttgagtgtgaatgctcagtggagtctaaggagactccttagtatgtgtggtatccatattgcagagccaaatcctgtgtacatagtctctctttgtcttccctttccccaggctcctttctcactttcaacttctctcaatatcagcagtaa

SEQ ID NO: 37488 - DNA, 1088 bp, Bovine  19866880864664
  misc_feature (1)..(1): n is a, c, g, or t
ncattgacatggttaagaaattctttcttgatatgaaaccagacctgtttttgtagttttatgctatctgctttttcttcctctgagaatgacagtagagcctggtgacatttagactgtggtttaatcattgttcataaacttaaaatgctggtttctctctgaccactgtctcagcctttcttttcctggctaaccagtaaagtagatgtctttcatgtgtgtgtgtgtgttttccccatttggtcctcactgtcctttgagataaacaagggtgcccattccacacagggaaaaataggagtgtgttgagagaggagggtatcatatgttgttttttaagaaatcccaagtcctgaaccaactgacatctctaagtgtaggaaacagtgactaatgctgctcttttgttctagaagagcaagaaaggttggggtgaagatgaggcagatgaagagtcacacacacccctccccccgcctatgaagatctttgacaacgaccccacgcaggacgaaatggtaggatctttttcacacttgaaagagccatgtgtgaaatgtgattttgtttagtgtgtgtggtgagggtagtaatgctctctctcccttggtatctcttatgcctcatgactcccagatgatgcagattccgtctgtattgggttatggggactaacttcaatctgggcagtgtaggggtgggttctcaaagggagaattctcaaagtgagaatctgcctagtaccaggtcctgctgatgaaggataatgtctctctcttcggaaacagcagatcccgaaagaaactacttgtctcaaagaggaagctgagatggctctaggtagtgatcgttctgttgtacataaccgttcaaccaatgttttagctgatggtttttctcatccttaactctaaactccaaatcacagtaacttccagtcaagcgtggtgcagacagcatgagggatggagatgctgctagggggaggttttgccatagatagacaaacccaatatgccaggttgccccagttctttggtttgcaaaaccccctggctcagtggcatgcagaggctcgctggcgt

SEQ ID NO: 37489 - DNA, 1152 bp, Bovine  19866880877721
  misc_feature (1)..(1): n is a, c, g, or t
ntggatctctgggaacaggagcagaggctatgtacaaggtgcctataagcgcccccggggaggaggagggccctcagcagtctccagggcctggtgatgaagactgggggcacagtgggctccggggccatgggaggaggaccggaattctgtggcagtcttcgaattacagagtcgttctatcagcagggactccaatccactcactgggctgcctctgctcctctccagcaaagggactcatgagaacttagccaagaagctaattaatggctctgaggaggcggctatctctgtcctgagggatgggcagtgctgagtggggggttcctgaatgggttgatcttggcctgagtttcttgccccaaccctggttcagccaaaattgagcagcttacttcaaagtaggcgtcgtactcggcgacgatgtactcggagcgcggcttgttctggcagtaccacacatagatgtgcagcttccgctcctgcaaggagggaagagggaaaggcgctcaggcacctgagctgcgcagtcaacctgagagcgctaagctggtctaagcgtggagaagaggacacagatctggttcacgctctggggatgcaccagggtggctgaacaacagggacagaagagtaaacacagtgggcaagagcccatcttccaaactgccaaggaaggcaggaaagaaccccaacagctcagaaaggggtgaggaggaagaggagagaagggaagggattgtaaaatgcatgcaatgagcctgctgtgagggggaggggtggggcgtggggcaacactcacatatttaataaagagctgtgccaatctgtcttgctcctggatacatttttccagttcacccaggaaaacactaacggaggatggagaagagaagaaagccacattcttcagaactgtattacttctcaatgaggagataaatgacagaagactccccccagactctacccctaaggtcagatgcgggaggctggaagcgccccaggttccaggacaccctgatcctcagggcaatgcagcacttactccttatgccaatcataaatctggtgaatatttccaaacacgattttatcctttcctcgcatgtcctcggggacacccttttcttctattctcttcatgaa

SEQ ID NO: 37490 - DNA, 2411 bp, Bovine  19866880958783
  misc_feature (1)..(1): n is a, c, g, or t
ncaaagagacgtcagactgaaattaaggaggaaatgattgcaactgcccaggtgggagaggatttctgagcatcaaccccagactgtgagctccattaaggaagattctatgctggtaagacgggcacagagtaggactccaagaatttactgaatgaaactcttgggtagaggtcaaagttcatctgaaaaaacaacagtcaagggtgctgatccagcatcacccaccacaaccaaccttttagctgtcctacccttttatacaagtaagtatgaaatatcttgacaaaaaatattacgatcttagtcactcccaggcaaattgggggcaggggtagggaagccattttaaagtagaaaaactgaagtctggattttccaggcaaatgacattacacatttgagacttcagattaaatttttttggtggaaatctaaactattctattttaacaagctcaggaatcttttccacagaaggatgccagaggaactcagttcttgaaagcacacattttcacaatggatatgatgaggccattatttcctcccatctggactgttaactctactgtacctttgacaaagcaagctgatttatctaaaggagagcaaagcatacacacaaatgcagcctggacctagctacgttctgtgacccacagactgacctagggaggtgaatactatcaaagtagaagaaccagagggaacgaagtcttgctgaagcagatagggccaattctcagggtgtcaggccaccaggtagaccaaacaagagctcaatcctggccagcctcctccctaaagatggaggattttcagtcaagggcccagcagtgccaccatgagcccagtgaactactgtgacgtgccacctggggacaggagttcagtgaggaggctttccttcttgaggcctagtccctggtgggtcagacggtaaagaatctgcctgtaatgcgcgagacccaggttctatccctgggtggggaagatcccctggagaaggaaatggcaacccacttcagtattcttgcctgggaaaccctatggacagagaagtctggtggggtacagtgcatggcgtagcaaacagtcagacacgactgagtgactaacacttcactctttcatctaaggtaggtggtagaatcctgggctgtttacaaatacagtagattcccacaaagccaggaagcccttgctcctcaaacttgaggcatgctaagtcacttcactatggactgcagtgttagtcgctgagttgtgtccgactctttgcaaccccctgccaggttcctctgtccatggggttctccaggcaagaatactggagtgggttgccgtgccctccttcagcagatgttcccaacccaggaatcaagcctgagtctcctgcactgcagggggattctttattgtctgagcccgccagggaagaccttcaaatttgaggaataaaaccaaaatcacatagactgctaaagctactaccctgcatgcaacattcacccaaccacagatctactaactgacaaaatactgtgtccctgtgttccgggtgaagataaagtatgactgacttccctttccctgcccttcacaatgcaaataaggtggttaagagctaacatttgtgggatgctcacctaatcagtttacaaaacacattcataccttactcagccctcagtgtaactctcttgagattagattcgagtagacagaatcatcactgttgataggcaagatacaagagaggcctccaagtagactaaataacttgcccaaagctacacaataagtagcagaggcaagattaacattatgtcttcctgattccttaggtacttagtagcaccacagccagtccctacatctaggaaaaactttataaaaatcacacagaaaaacaagagagtccttagtcctggcttaaagaccataccttaatacaaaacccagaaaaagtatttgagctctctttgggggaagatgtgtgggcatgctctcctgataaacaaaatcactgattaaagaccaaactggggaggtgagacctcaggagcatccattaatgtccagagggactcaccaaaggagttttcagggttttatctgcactgcaggtgagtggaacctctgtcctagctccctaatggcatctctccagcaggagagatcacaacttctggaggctgtagccccgaatgtcatagacacgtgaccataacataccaagggcagctttcagacccagggacatgagggatctcatggcttttgggtggaccttggggccaaatgatttctaactacagcatctagtaccatctcttgagcaacccaaaaagaacgcagaaagaatctaagccctggatgtaaaagtccaagcacgccagatgctc

SEQ ID NO: 37491 - DNA, 765 bp, Bovine  19866880998499
  misc_feature (1)..(1): n is a, c, g, or t
nagataatgctatggccgcatagtgactggaaagagtatgaaccatgttcaatacatggtggatgggtgaagagttgtaggtacaacagtgtgactggaaatctctaaataatactaataaacactagacagtcctacatattcattcttcttaatttctagtttaaaaaacaggaaaagtaaatatttgtcttgtagttttggttgtatgagattttctgccagcagatattttgtgagaattatttcacatggagatgtatttttgatgtattctgccatcttgatctggctccccacagatatttttcttcttacaagaaaattagattccatctctccacaacttcaaaatcttcatttctagggcgtacaccagtgggcactccctctctctagagatccattcagaaagtaacaaagggaatgaggttcctctgggaagcaattttgcctagaagccccaaatttaaactgtgaccactgctctgagctaatctgagaggaaaatatggttttctgaacatctaaatttggagatttccgaataggtgactgatgagtgaagatggagatgggcaggaactagagagaacctgaggaccttgtactagcagcctgggcccagcacgcccacagctctcttcctgagggatactgctgacctgtgggcccttgtggaatttttgaggaggcgaagcaaggtgacagatgtaacttctccctagcttggctctcgccctgggatacctgcaggtagagaat

SEQ ID NO: 37492 - DNA, 1016 bp, Bovine  19866881024797
  misc_feature (1)..(1): n is a, c, g, or t
nctgacggcccttcagcctctatctccctcctcgggtgcactccagcaacaaggctttgggcagaggaaggcagaagtgcttcctgctctcctagggctgcttatctttttttttttttttttttcctgctgagcatgaagtgttaaacctgcattagttaaatatgcagttttcccaacacattaacagcttattgaaaacactctctgcaaaaaatagtctctccctttgccacaaattgtctaagtgcttctacaactctaaaaatattctctcttaaatccacttcctcttctcttggtagtgccagcctccactggcggaggactgcgagagtgccactcagcacgcacagctttgctgaacgcaatctgttgctgttcagttgctcagccatgtcctgctctctgcaaccccatgggctgtagcctgtcagcctcctctgtccatgggatttcccaggcaagaatgctggagtggcttgccatttccttctccagggaatcttccccaacccagggatcgaacctgcatctgctgcattgcacgtggattctttattgctgagccaccagggaagccctgctaaatgtggtcagttttttttacaaatctgttctccgcactgagctgtgaattccaaggaccatagcatatttctctctaggactgaacataaacttttattgaatggatggatggagggaaagatggatatttttaacaacagctgtgctaggcagctcaggcttagcggaagaaaatttttggaagatgaggtaaattaaaattgtatattttaattgtgagtaagtgaggatgaggcaaagcagtttatcattaaagggctaggtagactggagctatttaaattccttaggctcagtcccatgaaatgcgaaggccccatggctcacaaacaagacattgggaagaagcatcagtacttgccatcaagatctcctgaagctactgccggaagaattaacggggaatcggcggaggaaggggactc

SEQ ID NO: 37493 - DNA, 1425 bp, Bovine  19866881025462
  misc_feature (1)..(1): n is a, c, g, or t
ntgcagtcataatgccagccatgaggcatttaactccagggggtgggtattggtgcttgctgtgtaagaactgggttgggaacctgtgggagagaaagcatgtgggaagatgaagctaatttgaaaagaaatttccaactagggtaagaatcatggactttcagagttgatggaatcttggaaacctttagttaacactgtccccttcatttgtttgttttttattgtgctgaaacatacatgatataaaatttaccattttacctgttttaagtggcattaagtgctttcacagtgttgtgcagccgtcaccattattcatttccagaactgtttcatcattccaaactgaaactttacctgctgaacaataactccactccactcgccgtctctccagccccttccaagacttttagaagaggaaaccgaggcagaggaagttgtggctttctgttcacaaaatgagcaggtgccctgaagcctgtttctggttttccctggcccttgttcccccacccacagtatcctgctctccgcttggagctgcccacccccatcttcaggttgtttttaatctaaaacacagattctggcagacaagaagacgtgccttccagtgccagttttcctctgttcattttttattcagttttccagctcaacaaagaagaatatattttccacccatcccagccctgcaaggctgaagcaggacttaaataaagatcacacaaaggcagtatcatatggaaagaacactggcacaggagccaggaaacctggactccagtctagggcctgtcaactgtaaggcctcaggcaggttagcctttctgagcctgaggggtttctctgtgggagatcacagagctccaggagcacgggtgtttatctaagagatgttgaaccctttgagcctcatgccggttgtagaatcgaaagaccttgctctgctgaacttctgactctgagaacaatgaggccccaacagaagagaaagtaaaagagtttgtgttttgcccctgagacttgttctgcaggggctgtggcaggagtggcctgggtacatttcctcccgagccccagctggagcgtccacttggggctctgggaagggtttgagtggccagaattgacctttctttctcgcccagacccacaattccctagccctggctttcatgtcttcaaagagctagcctgctgctcccaccttagctgcctcggcgccttgtcccagattcagagcttcaaaataacctggccagacagattcaaggaaacttttacacccctggtcgggtgactgacctcccggcatcgccagtgtatttccactggtgcctgtttctgcgttttataaaaagaattttttttttcttttaatgaaaagaactctttggagaaaagaaagtgaagcat

SEQ ID NO: 37494 - DNA, 1919 bp, Bovine  19866881146353
  misc_feature (1)..(1): n is a, c, g, or t
nggggcgtgtactttgtgacacttggctgctttgtcactagtgaatgtgacccctgtgaaagtcctggcacttggatcagtcagaggactgatgctgctcactagggcctggggaggatgggggtccttattcgaaacatgaagggattagaccagctgatcctgaagatccttctagttccagcatctgttattccagacacatcagcctttgtattctgtgactccttcacttctcattctgctgcacacagatgtacacacaacatagcctttctgaggcttgggtagccaggagttgcctgctttcaaaaataaattacatgctaataaatatatgcattaaatcaagtataggcctagacagctaactcagattttaaaaaaagagatcggaagccatttgaaattttttgcttcctcctttttttttccttctctactttttatattttctcgaatgaccatgtgctatttgataattagggggaaaagtaagcaaagcaactaatagggaaaaaagttctcttttaaaggtgaaaagagatatgtgtatgttgaactatgtgagagtggctacagttgagcactaaatttagtaccgagcttcctggaaaccagggcacagagggaaactgggttgggtatgatatattgtcagataaagtgagtaatacaatttcatccataggcttcagtgttttgggggcagtaccttctaagaggaattttatgtaacgaatattgaggatcataatagaaaatgccttcaattgctgttttgtggaaattgtgctaatgttctttaaaaggtgatgttttctatatatactaaataggagcagagggtgtagtaatggatctcaactcatgaaagtgtttctgtgggcagctgagctgatatggtccaggtaaattgctctgtggtgatttcacttggtagaggaagagaatataaataactcagaaggttgtagatttagcaatacccttgccaaatatcagctgcttcagcaagatttttggcaagttctgggtcacagccaagtcgagggcaagcatcgtaacatgtgcccgaggctccagtacactgtgttgtaatgggagagggacctgtgttctttccccagaagagcaggtgttcttttcaccccttattataaatattagggaattagctttttctgctccaaaatggatggtcttctcatttttgaatggctgcttcaagggtagaaaatgagcaaggaagggcaattattaaataatcagcagtgctgttctgctgattataaacatagcacatttccccctagatgtattcagcaggtgcgcatttggtaacataagtggtgactgtagattagtttgaccaagccttttctccttttgttaagaagcaccaactctgcagaagtattcacactgcttagtagctttgctgtgaggactgaatgggattatacaaataaagtcttaggcagcacaatctggaggtctacgtaaagtatggcacattgttattggttgaaaaggcagcttgtaatactgatgataatgaaatggtgaaacagtgttccgtggagctcagggtcagggaaaacctagccgttttccttttgtgactttcagcggttgtgatgtttacggttgtatttctgaggccatttgctttgctggacaggtattcaggctgagtccaataaaaccgtcactgtgcactgagtcgatgaaataatgcaatttactgggaatagaagtgttttgaaggagcactcagcagtccgatggggctgtaattggtggatatagatggtgactctaacgaagttaggcccaagaagcgaagtaggtggagtgaggatttgggacatggtctgtgttgtgctttgtttttttttttttttttaaatactgaa

SEQ ID NO: 37495 - DNA, 1993 bp, Bovine  19866881155797
  misc_feature (1)..(1): n is a, c, g, or t
nagaagaaccaggaaatttgaggtcacatgaagaccaggtaccaagctctgatccatgtggctggagtggcttcaggttggcagggctcacactgacctttcacttgctgttcgggtcctcgggtgtggctggcagcactgggcatgctgacgttgttcctatggatgtacttgagaaagacctcagcattccgccgtgccagggtgcaggcctgagagagacaaagtgtgaagtcccagtccagaggtgcacatgatctaaggcaccagagaagggatgctggcgatgaggcttctgggtctctgggtgagcagagtcctggaggccaactggagcaacatggatgttccagttctaatggaagaggttcacttattcttttaagtgcaaagcttaaaaaagaaaagctccctgttcctctctcctttccatcacaagcgaaaaaagaaatcagctactccttgactactacatgtattgattcagcatgaccaccatccccttgcagcctgatttccctctgccacatataagagtgcctcatatacgaccttggtgtaagtcgctttaacattagcttaatttagactcaagaaagcaaatttagtaatcaaacttattaaccacacgttccaaatataaatggaaattacccacattttagaaacatgtttgtctataaaacccaactccacctcaataagattaataaacatcctactgctgggcacagtatatcatgtaaaagagtaagagccattgtaccatccccttaaggctcacagagcagtgggtggcagagaggacaggtttgtcccatgctgctgtaccggaaggaggctggggcccagcaagggcgggagtcatgatcaagtcaggactagaatctaggtctactgatagagtgcttctagtttctctcaagaccagagagtttctgaaatttctttacaaagcagtatttttcctgttggtagaagtaatacatgttattccattaattttcagtccacagctttcagaactaaattatctctaaacaaaattgttaacttctaaactttttcctatttagcatctgattctacaaattatatggtcaaaactaagcttttttatatttagcatctgattctacaaatcacatggtaaaaaattattttaaatgttgctttcacaataacggtttctgggagctctggtaagattgttcatggttctaccaccctaaggtccatgaatttaacagctggatagtggtccacaactaaagaatccaaaatacatccactgatgtgtacagagagcttgatcttctgtccatttggcttgtaatgtccacaaaaacagcttctcaactatggttttaggcacatgtggaaaacctcagaacatttttttcccttcttcaaaaaaaaaatttaattttatgaagaaataccttcatacctctatttaaaaactttgacatgctctacttaaattgtttcattttaaactttgttttatcagagggaagacttttaaaatcatcttaagccttatatggaaggatttctatttaatcttattagtaagagctgattactaagggttcagatcaaatgcaggtgcagatactagatagatgggaggagagcagcaggaggtcatctttaaaaaagaataaaaataaaacttaaacaagtggtcaagtagagaaaatccctaatgaaagaaaagcagttaattacagaattgtagaaaatcaggggcaacatgttaaggtgtaaaaagtctctagtgtgctttcagaaacctgaaaggaagcagaacataaaagcaaggaatttgagagtaaatggatcctttgaaaaagttttcacacttgaaggttctgtcagagagaagatcaaaggcagaaggaaagaggcttaagaggtcttcccacaccagctgaaagctgttcagagctggactgtgtttcccccctgggaagctaggtatttctgt

SEQ ID NO: 37496 - DNA, 2774 bp, Bovine  19866881271858
  misc_feature (1)..(1): n is a, c, g, or t
ntccagcagccagagccacagcttgtgttctaggtatacctggttctgtggtttggtacgaaagtagaaggagcctttttgtttcctgtgctcgccctctatgtgtatgtttaacttttatctgtgcttttgttaggactgcatgttggactggtcttcaaagaaacgtttataatgaggactttattttttttcctttcctgggtcataattaacagtttgaagcttttcattttataggtatagagagtactttttaaaaaatttggcttaaaaagagaaaaaaagcgctcttccttcttgcctctgggtcttcttgcccactcaccaggcttccctgcagtttattcctgtttggcatgaggctttcagtgcacccttctggaggtcatttctcagggtgtcctttggaaagttctttgtggaagggaaccaccagcaagccactgtacttctgtagagcagactgtccactttgaccaatggtgtgttactcagctcttgaggctcttgacaactgttccagtgtctgccatccatttcatcagaaatgctgttcccaacctggagtccttgggacccgctggagtactgtgtgagccagtctccaaagcttcatgaggttaactccagggatggagcctgttgcttttgggtggaattaaatcaaatcagtggggtaatgatgagtatctcctgctgattagaagctctgctacttaataaatgcagcttggttaatagtcttttgaaatgtcagctttacaatggccctgaggtggcaagtaataaagaactgtcgctggcggcaaggctgggaatgactgttctaggccaccattgtcccgactgtggatgcagagcccaaggcctcctcgctggggacacggtcccctgtaatgcacccacttttatgcagttttaggtataggctttaatctataatagcatttgaacaaaaggcttacgtggctaaaacaaaacaaaacacagactgtgtcacagtggtctgtcctatataggttataaggtggactcaagaacagaagtttttagcttcttctatatagactgacgcaaatcgggtctagaggctttctgctgtcttcctcttagcttgatctgaagctttctctgtgctcagtgaaggatctcatgcttcttcacttagctctgtgaaaagagggagaatgagttaggtgtgtttatctattagatccatattacatatattcacctaccaaaatgtaattaccatcatttgtatccagatataccctggctagtcttaaagcatattttcttccgttctagcttctggaagtacagaggatttaaacaactctactgctgtccacagctcctcggtgagtgggacagagagtgtccatgttgccaccacgttccccaacagtgtccaaaggacgccccagtcttcagccaccagtctgcgacctctgaatgagacagaacatttccccgaggactctgaaattgccataacttcatcatcagtccattcttccccgtcggaggcagagttgagaagaagcagtggagtattcgggagcccagggaatggggcattcacagagctgtccacagaaattgcatttggtcctacatcttccaacatctcaagggaattttggcaaaatgattctccaagtaagtcttcaatctctatttgatctattatggacatttaaaaattgttgaattttttcaaggggtcacttcaagaccatttgtaatcttaaaaaaaaaaaaaagaaaacagctgttttcttggataacactatctcctttatctggtagaccacattatcacattttgattttcagccccatgacaatgttgtgaaattagtgaaacaggcatcattcctcctgctttcttgtaggtgaggaaactgaggctcagctggtttaaggagtgcgtgcgtgatctttatctcactcaccgcagagctgagactcccacctccgagctcccggtgctgatgcatcttgtggctctgcagcttcaactgcagactgagagctggccgctctttaaagccagcttcagttatcttatgtacagatcatcttcacaaataaatctgcagagtatgtaaatatactcctcaagttcatggttttagtgagcccccatggttgattttttttttctttttttgtggtatttcagaattagaataacctttatttataatagaactgccttaggaaaatactgactaagcataatatttgggcacattgtgtttgatggacgtagcagcatactcactggctcgtactaccccatgttttaggggaaagaataaaacactcaagcctgtaagttactctgagactttgcacatgctgtttaaaagctccgctcttcaccagtttttggtattgctgtcttattgacactgaatagttttgaaataattgtttagaacatggaagtgtatgtcacgtcacacatatagtaaacactgtacaaggtccttgcagagggcaccttctcttggggagctcatgtcttagttgtggagggatctctcttacatccacttaatggccttttatgtctgacacctttcagcctccggaggaccccagctggccagtggctctggcgcagggaatggcagccctgtgtctcagacagaaacctcctctcggtccatcccaccagtcagaggtgaagagagcaccgctctctggttttccaccggcagcgagccctttgcaggtgcagcaggaagctccacttc

SEQ ID NO: 37497 - DNA, 1412 bp, Bovine  19866881318594
  misc_feature (1)..(1): n is a, c, g, or t
nctttcacatgcccttcagtatccctatctgtatgtaatgaaaatattttttatgtctgcagagtattaaacaggcatcatgaaattcagcacactctgccaaggtgctggggaagcattataaatgagctctgttatgatgaggactccttgcttcggccctctgggtgttcccgttccccatgcagctctcctggtaatagatgggttattgagcctggggacgggacccaagtggcccttgtcattttaataacacatggtcctcctaggacattagggcattaggagaggccctagggctgaccagaggatgtggaaatctgcatgtgtgggtcgagggaaaggcaggttgaggcccaactgcagggtctgagatgtttgggttaggatacattgtgaccagatttacatgcttggtgacactctgtagaggtcacgctttctggaggagacatggaagcttaggctgagatggcgcgtggctgtgccttattgccagctcctctggttgggaggccgtccttggaggacggtgttgagggtgattctgaggctaatcccaggctccctggcagagactcccctgattagacggtaggatctgcgtgggagtgaaggagggcaaggtgcgtgcgccccgcgtgcgcccctctctgctgtagcttctttccactgtcttgggaggcagtggatcacctgacggacaaactggggccatccagggagtccctgaggacagcccttaggcggattcagccactccaccaagcgtggcttctctctagtgtgacttgctgggactttgcattggaactggcaactgttagaagccgaagagccccatggatgaggactttccagtcctgtggcctctgtgcctcccacctgctgcccccactaatggcacagctcttgtgtcctcactcacaggctctttgcacagcgtttccttctctccatgtcctcgctgctcaggtgctgggggcgcggcttccagggatggcttacatctctggccatgagtcctgcccctcaccatggagccacattggtgaccactgacccctagtatctcctgcctgtgactcctaactctgctcacaccccagatccaggacacattcaactgctttgaccttgggctggcttttggagctcttgggttctcatgggtcatatgtgcccgaggcagctgggtttacttgccagtcaacaatcatgggggaaagtacgagcagttggcaactttgctatcttctcattgagcagatcttttcacgtgagatgctcagtcacaatggggagcaagttcttctttcaacacacacatacccacacttcaccacaaaaaataatatactacctcttctccaaaccactgacagtcggaatagtgtcaggttacatct

SEQ ID NO: 37498 - DNA, 1761 bp, Bovine  19866881342378
  misc_feature (1)..(1): n is a, c, g, or t
nttagttaattggtctagagtgagcccagattttttaaacttcccaggtgattctaatatatagccagggttgaaaatactcatctaaaaacctgattaaaggactttgtaatttcagaactgggtgttaattgaggtagtgacacagaaagaggagtggggggaggagaaaagaagatgttctctatctgaggcagacacagatatttaaagaacatacaaacagttgaaaaacatgttacaagtatgggcagcatagccagaaatacctaactctaccctagaccacagcctcctctctccatgaggaaattaaagtgatactctcaatctggcagcaaaggaaaacaaaataacattttattactaactgtgggcttgaaccctaagtaattgctatgctgaacggtctggtaactcagtggtaccctgaggaatgtctctgtccctggatcgctgaccattgtttcatcttatccagtggatcccaatcttcattgcacgttggaatcaccctgagaactttaaggtgggaattcctgttgcctggttcctacccatagagattttgatgttattggtctgggctgtggccaggacatggtgacttttaaagttctccagatgaatcttatgtgagccaaagttgagagcctagtctagtagcatccaaatcatcatttctaatgatatactttgaacaagctcataaacatctgatggtaagattttctatttacattttatataagtcattcaatagtcccatcagtaatcaacacagaatataatttcccccaagggaaaggaaaatgtggggatatgggtgtttttgagcctactaaatgccaggccctgtatctaccttatctctcttagtcctcataacaatcccgaggactcaatgttcagattcccatcttacacaggctcagaggggatttggaacccagagcctcactgttaataggttgcagagcctgcattccaacctaactctgtccccagagctctcaggttacccgagttcttcctaaagaggcccctgtgttcattaaacaggtattttgggagtattatgtgtcaagcactgtgctaggtcctaaagaagctgagatacatgaaatagaaatggccctggccccagggaacctacattactgtgaggacacagacaagttagtaaggaactgacctcaatggaagtgttctgacacaaggatatttgcaggacattgtggaggtatatcagaaagaaatttcaatacagctttctctagagaggctgacaaactatttcagtatgaatatatttcattacttgatggaaaagacaaacatcttattgcatctctggagagcccctaaggaagacaattaggcctcagattagattgaaaggagtaatgtcaatacacgaaaatactctttgctattgattgatgctgcttaccagttgatgggtattagctgagactcatgtcagtgtgcttgtgggcaccaggaaagaggcatgagtttctgttcttctaggtattgctggagtaactctgcatgttcctcccattcacttcattcatgtgatgagttgttgagtgtagaaatgcaataggcattgtcttcacccattttatttcctgttcatctcattaaaaaaaaatcaagtgaaattaatgaaaataaaggactggagtctcagggcaggcaggttctagaatggtgttctaagcaggtggctggcccctttgatgaggtacgagg

SEQ ID NO: 37499 - DNA, 1378 bp, Bovine  19866881344390
  misc_feature (1)..(1): n is a, c, g, or t
natttacttcactgatagaattttggggcctaaacacctttcttttgttatactaaaagcaaggttccttattcaaggagctagctgtgtgtatggatggctattatgcagtaaaaggtctgcctttgacccaggccacagtgtctgtgcttaccttgaaattaaccctttgcagattgataggattattaaattacacatatgcagtagttccccaatcggaatgtgtataagcattagcaaggtactgatttaaaatgtagattactaggccaaaatttgagaatcttattcagacttttttaatgagcttctttctaggtgattctgacgcaggcaatctccagaccacactctgagacatgctcttcttgtagaagattgcaagcttctggcccagaagatgtgccgattccctgctcattgtggaggtcctcctcgtacaccaggggtgtcaccaggcacgtatggagggctggtctgtgactaggtttggaccactgcatcagcaaggctatctttacagggtataaaaggcaggtaaaccatatagggcataacaggtatagagccaagtgaaaccctcgaagggcctttgtggctcagtggttctcaaatctgtcagcacagaaagaatcacctggagtgcttttatgactccgtctcccaggcctcaggccagtagggaatatatatgacactattgatactaacggtttcccagtggttctgacacacagagcttgtttgttgatggtacccaaaggccagagggtatttcaatcaagatatcagaccactactgtaaaaatgctttgaaaaaataagatgctcttaaaattctccagcaaaaaccaatgaacattagcagggtttctgctggcttttctcttccttctcctcctccttgctcactgtagacactaactagagaaggtgggctacactggaacggcctgaatgattccagatggtgagcatctggacctcttggcctgagtgatcctccctttaccctggagtcttgtacaaatattatcattttctggctgtgcagtgacatgaaaacagttgggagccactaggtcaggtgtaaaagaaacttgtggaaaaggagggactgtttggcccagaagtgattgtttttctgaatctctacgaggtggaatccacacaaacaggaagcaacaacatgcccaagcttgtccacacagggcctggcattcaatcggtgggggcaagatattgagagaaatgctaaaaaggcagcccatctcagactgcttggcacagaggcggtaacagggacatctgggcacagaccacagctccaccaatacagagaggataataagataatatccataataataagact

SEQ ID NO: 37500 - DNA, 1461 bp, Bovine  19866881345069
  misc_feature (1)..(1): n is a, c, g, or t
ntttcctcttgactttctcttttctgacccggctcccctgggggtcttccccagacttgcccatgcatcactgagtctccctctctgtgtctgcccatcccagacaagcatggtgtccgtggagggcctcacgaagctggtggacccctcccagctgacggaggagttcgatggctccctggactacaaccacgaggagtggatcgagctgcggctctccctggaggagttcttcaacagcgccgtacacctgctctcacgccttgaagacctgcaggagatgctggcccggaaggagttccccgtggatgtggagggctcgaggcggctaattgatgaacacacacagctgaagaagaaggtgctgaaggcgcctgtggaggagctggaccgggaggggcagcgactgctgcagtgcatccgatgcagtgacggcttctcagggcgcaactgcatcccgggcagtgccgacttccagagcttggtgcccaagatcaccagcctgttggacaagctgcactccacccggcagcacctgcaccagatgtggcatgtgcgcaagctcaagctagaccagtgcttccagctgcggctcttcgagcaggatgctgaaaaggtaggggcgtgccggccagacctgagtggggctggggtgggggcacacacagatactgctagtccagctttttaaagctcccctcgtgtagtgtttattatgcatcaggtactgttctgtgcaccgtgtgtaaattaacccattttaatctgtcaggagtcctacgaggtaggtatgttatcatcatcccattttacagatgaagaaactgagaagctaaatatcttgggcaaactaggaggtgcagcgtggctgcagactccacacttttgcactgttggacactgcccctcttggggcgtgctgtgaatgggtcaagccggccgagcaacagaagtaacaatgctattaccagccgcaacatgacttagtgattattgccctgcactatacttgactattgacaaagcacttctgcatacagagtctcatttagtctatacagtcctttggccctttgagtgggtgatgttgggtgttctttgatcttggggctacaataggagcttgacatgggaatctagctgtcttccatttgaagtccagggctctcttcctgccataccactttatttctggaggtttttcctcactgctgcacattttctcaagcaagatattttttccagcagtaaattttcaaagctttccccttatcagtgaaaaagagaaaagtgaaaaaggaaaataccctatagtgcctcttggctaaggatgcaaaatatcttctctagatgctctctgagctaaagaagagagttgactgctgcatatacttttaagaggagtgaaaggggctctcttatcaattttctgggaataaaatttaaatacataatatcaca

SEQ ID NO: 37501 - DNA, 691 bp, Bovine  19866881350334
  misc_feature (1)..(1): n is a, c, g, or t
nataaattgctgaaggcttgtgcaccgcatagtacaggagtctatcaaagggaagtcctaggaatggagcataagaaatgaggaaatgaagtgacaacaaatggagtggagtcgggggcacgcaggcagtgtgtgtcatcagccccattctgggctccaggtcagctacagcgggagctgtggagggagaaggagagatggcgtttgcccttgcaggcactccccggctggcagaaggctgggggagactgctctggagctctgcgtgagattcccctgacattggttcggtagaggagacctggggcagaaagggggtctgatcccagtgccatagagctgtcctctgaggtgtgcaggagccacaggaatcagcctgagagaaaagtgtgggagctgaggggtccctgtcaggaagcctgcctccaagaggggactggagcaaggggcccacatgtggtggagaaatcacacagactggaaacgggtttttttcagggttcgacgagaacctggacgtgcagggggagctgattttacaagatgcctttcaagtgtgggaccccaagtcgctgatccggaaagggcgggagcgacacctattcctcttttgagatctccttggttttcagcaaggagatcaaagactcttcaggacacacaaaatatgtttacaagaacaagctactgg

SEQ ID NO: 37502 - DNA, 1795 bp, Bovine  19866881353087
  misc_feature (1)..(1): n is a, c, g, or t
ntctttctgagcctttccctggagtccggatatgtctgctaatctccaccttggcctcattagtgcttgtgaaagcccagaagatacagtcatggatctttaagatccctctaatttttccggctccaatcagattctttcattacagaggagaacttaccctcactgccttcccattttctgagcatcgacagtgacagtaaagcaaagaatgcatctcacagtctgtctggtgcttctggtggcagaagtctctagaagtgtggctggctctccatcaccgctctgcctgcctctgagccagtgtttcatctctgttctcatcacttgtacatcttcctccccccgtcaagtccttagcttggaatgtatcttcatatgcgatatttcttccccaccgtttgattatatccacttaaattcagacaaggcaatccatgctccctccattgtgacagagttatccattccatctgatcagatcagaagaggtgaaaggttttcttcatattttatagaaggggaaagtgaagatcagactacccaaggcacagagcaagctccaggagacgaggaatgaaggcaggggcttttaggtttccacttacactcccccaacccaatttaatccttgtcaaacaaaggtaataataataagttaaaggcaccaaaggtaccatgtcaacttgaggaagccaatatactgagggctgtgtaccgactggagtttttaagaagtccacctgcatcctgaaggcacagcacagagaaggctgagctggaagacagaatacaaactcccaaaggcctctagtaagtcacaaaagttatcagaagccaaagcacaatgaccaatgttaacaagtctaagcatatgaggaggtgagaacttaccgtgtccccgatcttcaggccctcgcacttcctctgaccagggtaggatacaccgtcctggcaggtagcagtgaagaagagattaagatcctcaggctgatcccagacagacagctccactttagaccggatgctctgaacagagagagaagaagccggaaccactcagtcaaggctacagctgagatgctctccacactggtcctctgatgcccacatggcttcctctgactctggggtctcaagccaaggtgagagccagtgagctaggttcgctgctcctccctcatccctttcctcctctccacacccacacaccatcgtactaggctgggcctgaggtctccctctgggagctcagagaagtggctagtggtccacctgccgcacgataacctcatctgattccaagggtgatgaactgtccctgctcatctctgcagagccatctctcatccccaccctcagctttagacatggagctcttcatatcttgccaggtgctccctagactatgggccttgcacatgcctggggttacggtcctttgctcaactgctcctctctctcctcccctgaccagctccttatcatcccttcccatcagctcagcaggcactttctcctggaacccaccctccactgctcaccatcacatccatcccccatcagatgaggtccacattcatgagctctcaactactttctgagagaacataacatcttatgtgtggatatgtcctcaagacaatagatgaaaccaaaatcgagttaaaattatccatcagaatagaaaagataaaagactaaaaacaccaaatgttggaacggagttggggcaactggggctctcaaaccctgctggtgggagtgtgcacggtacaaccctcaagaaaaacat

SEQ ID NO: 37503 - DNA, 631 bp, Bovine  19866881373330
  misc_feature (1)..(1): n is a, c, g, or t
ngaaatcgtgactgtcaaatcaagagtgatgagagttttccctgtgccatggctcatttttccaggcatgctttgaagatactcctcctactaatctgttcttattctgctagttagcaagctccagggctcctaaaatatttggtctttttgatgtgtaataaacacttcttcttgggcttcatataagttcattgtgaaacaatcagtctatttcattttagccctaccaatacctgctgtttatacaattcctttttctatagtaatatcgagattgacactttgggggtttttcctattcagtttaacatgtggattaataggggaaaaaaatgtccccacctgaaaatgtgcactgtctgtaaagatatccccataggagtatgtctgtgtccggtcgctcagttctgaccacctctttgcgaccccatggactgtagcccactaagctcctctgtccatggaattttccaggcaagaatactggagtggcctgccattccctactccaggggatctttccaacccagggatcaaacccacatctcctgctcctgcattgggaagtcgattctttaccactagcgccacctgggaaacccataggagtgtgtcggggaatcaaaat

SEQ ID NO: 37504 - DNA, 901 bp, Bovine  19866881386126
  misc_feature (1)..(1): n is a, c, g, or t
nttgctcttgcagcccaagcttgcatatgctggcagaaggtcacagttaaatttagacctgaccacctcactgggaaggagctgggaagctggctgtttgaggagatccaccagacactctgggagaggtggctgattatattccaagtggaagcaccatttggtggttaagacataagttaaattgggaagggggtataattttcaaaccaaagcataaagaaacagggacttaaaaattagaaagacgggaaaaaactcaaaaggttactgaggtcttctctgttttcacacagaatccaagtaaataaatagaattgtctgttttttaaacccttgtgtggaatgggaactggaaagagtctcagaagccatcgagtacaatgtcctacatgttgtcaagtcaagtctacaacactactgaagacgatcacttcgactaggctgaaaactgtcctcacacacgaggggggtgtattcctacaagaagtggcagctgtggatggtaatgccccaaagcagaaactagagccaggggcaggggtggggaaacccaaggtgggtgggtactggtgagtgggaatttagcccctttctctggatcccagtttcacagtatggaggaatatgacagctcccgaggactcaggtcatgaattagaaagtgaggccctcaccagtggtcctttgtggacactgaacaggttccccaggtacttgtggatcacagaaaggcacataagctcttgaagcaagccagtgtcaagtaagggaacctccaaaaactatctagctttatgcctcttttactttacgcccctgtgtttgttttcccatgatagtgagcaaaacttttgcaaaagactcttttaaatgaggctcagaatgcaaatgatacaca

SEQ ID NO: 37505 - DNA, 1651 bp, Bovine  19866881424532
  misc_feature (1)..(1): n is a, c, g, or t
natggaagaccgactgaaactggtcaatgcctcagtggccttttataaaacttctgagcaggtgagggagagggctgtgtgggcctgagaccaatggagggcagttttctgccacacatggcaagtctgtaggatctaccttagcaagaagccaatcctctcagcactagcctgagagcacaagaatgatttgtggaaacaccatggtttgcttccatatgattatttccattaaaggagtgaaccacgtgatttgtttcttataaatttctcaaactcactagatgtaggtgttgaagtagaaattggttgggcatatgctgaatgctaggtttcagtgatgtaccagttagctctggccacaataatgctgtataacaaatcacccccaatcccagtggtgtaaaacaatgaacaactatttttgcttaggtatctagtattcagctgatcttggctgagcatagtaaaactaggctccaagctacaggttggaactagatctgttcctgtatttctcttccttcttgactggcaggtatttgagccacatttatggtgaaaggcaggggtgcaagagcccaaaatctactgtgcaagtgcatttcaagtttgcctgtgtcatgtgctgtaacatccttttggccaaaacaagtcatgtgtccaagccaacatcagtgaagtatgcctcctgtgaggattgtgaaaagagagtgatgagttcctgaacacagtttgctgctgctgctgagtcgcttcagtcgtgtccgactctgtgcgaccccatagacggcagcccaccaggctcccccatccctgggattctccaggcaagaacattggagtgggttgccatttccttctccaatgcgtgaaagtgaaaagtgaaagggaagtcgctcagtcgtgtccgactctagcgaccccatggactgcagcctaccaggctcctccatccatgggattttccaggcaaaagtactggagtggggtgccattgccttctccggaacactagttaggctcacagttctctgatgacagagagccgtgtttcctgtactacaccgggaatcccatgaatgagatgtaacctgtccgtcagtgggccctgcagccagcattcacctttacaccttctctcagtcctcctttcaagcatttcagagaggtggcatcttacatggcctcagaagtgagagcagcagactaacataataaagagcttctccagttgttttataaattaagcacagcccagtcacacctcagcaagctttttttaaaaatagaaatcgatatgctaattctaagatttacacagatatgtgaagaacctagaatagccaaaagcaatcttgacaaagaacactgtaggctttataccacctgactttaagactctaaagctgtagggatcaagacaagatggtattggtgtgagaacagacacagtggaacagagtagaggttgcagaagtagacccacatatatacagtcaattgattcttgaaaaagcaattcaacaagtaaagttttttaaaaaatggtgccggataactggctatacatatgaaaaaaatgaggcttaatccctttgtaatatcatatatagtttttaatttgagatggctcaacatgctgagggag

SEQ ID NO: 37506 - DNA, 1491 bp, Bovine  19866881429671
  misc_feature (1)..(1): n is a, c, g, or t
ngttcctccatccatggcattctcctttcacacacatggggtctttgtgaccccacggaccacagcctaccaggttcctccatccatggcattttcctttcacacacatggggtctttgtgaccccacggaccacagcctaccaggttcctccatccatggcattttcctttcacacacatggggtctttgtgaccccacggaccacagcctaccaggttcctccatccatggcattctcctttcacacacatggggtctttgtgaccccacggaccacagcctaccaggttcctccatccatggcattttcctttcacacacatggggtctttgtgaccccacggaccacagcctaccaggttcctccatccatggcattttcctttcgcacacatggggtctttgtgacctcacggaccacagcctaccaggttcctccatccatggcattttccttttgctcacatggggtctctgtgaccccacggaccacagcctaccaggttcctccatccatggcattttctttcgctcacatggggtctctgtgaccccacggaccacagcctaccaggttcctccatccatggcattttcctttcgcacacatggggtctttgtgaccccacggaccacagcctaccaggttcctccatccatggcattttcctttcgcacacatggggtctttgtgaccccacggaccacagcctaccaggttcctccatccatggcattttccaggcaggagtactagaatgcattgccatttccttctctaggggatctttcccacccaggcatcgaacccaggtctcccgtattgtaggcagatgctttaccatctaagccacgagggaagccactcttttcacacacagggctcagcaatttttaaggaaactctttaagaatgagtctccttagcagtgttctgttttctcagcaaaaacgactttaggtaattggtggatagtgaatcagacaattccatggacacaaactgggtggaagtagtccacctaccacatgggtgggagtatggccaggagactataaaggtgtgtgtgaaacagaaaacagggaagaaatgaacaaaagaagggtacagatataagaactcaggtggcaagagagaggagaaggcaagagaaagggggaaaacaaaagtggttacttaaaatacccccacaagggcaaaaatgtttacgcttatattgtgtcacctatttctacctctctagccatttagcaaacaatagtatttagttctagggcatatttgacattgcagacacaaaccattatcataaattatctataaataggagagtattacaaattttagcaccatcaaaaagaaaaggaaaaaaaaaaaaactattagatttatctacagctataagagagaaaacggtttttggttctataataagacagtcaacagacaaagtaaaaagaaattgattcagaggaaaagaacaaagag

SEQ ID NO: 37507 - DNA, 5006 bp, Bovine  19866881573524
  misc_feature (1)..(1): n is a, c, g, or t
ncctgccattagagtatacaaataaagtgagggaatattataggacattaatttcttctagtaataaagtggtaaatagcgtagggtgggataggcataaattcatgacactgaagtaaagaagggagattcattggggataaagatgaagtaatgcatttaaggagaactaatccacactgaattaaggaaaaggtaggctctttagtggaccttaggcttatccacaaaacttctgacctcccctgactgtttgagggttattcacctatgtgaggtcttgaagggagtgatccccattttttattataggaccccaaatgaccagactcttgcttgcctgtccctttgtgcccctggtagggcatgtgacttaggctgggcccaccagatgcttcagatgtcatgaatgatgcaaaggtaaggtgatggtgagaattcatctttggggcagcaggtgctgatagcatcttgatcagactgctcctgttcaggaatctgaatgtgctgctagctttgggtcttgcctttttccaagcctcatctttcagccttctgatgattctgtgaccctccagtatcctgtaaacacatgcttaaaaaatatttcctgtcaagaatcctggctgatacagatttttggtgctagtttatggccagtgttcagtatagcttgatgcattgttaaagcaaggaaataaaaactgcggtgaggaacgtcttcatggagaagggtataagggacaaaacggaagatgaaatctaatgcagctgtaacagctggacaaatgagcgctaaaaatacacggttcagggcatttgcctaaagtaaaatatcaatagaaaggaaatggcacctcaaatactttcctgttggtgtagatgaagttcagctcaggagggggctatggactcacagactcatgacagagtgtgggacacagctgcacacaagcagcactgatctttgcaaggggacaccaagcagagcaactcttccctctctcctatctgctggtaccttgtgggctatgtggatctcactttctcatttaacacttacatctctgtattggcaccaagtggatcaggatgaactaaataggagccccatggaagtgaagccagtggaggaaatagtgtgtctggtgccccccaacctcacattgaggtgcagcagagccctgaggagcacccactcatgtcaggggctggagggtgcgctcatggaggaggagaggtttatgctgagtcttgaagcacaattgggagtttaagagacagacagtgagtggcttagggatgtggacagagggttccagcaagcagagaaatcatgctgatggattctgagtgtgcagagtgtgggactggaagtgtcacagaccatgaagggccaggtatgtcagggcattggggagtcattgatatttttatggcaggggcattcattatgaccagtgtgcatgtaggtcatgctggcagaggcctggggacagagcttagcccttagcattcttgctggcagtggttcacaaaggatagtccccaggccatcagcatcagtatcacctgggcgcttgttagacccgtggagaagggaatggctccccactccagtattcttgcctggaagatcccgtggacagaggagcctggtgggctacagtccagagggtggcacagggttagacatgactgaagcagctgagcatgcacacacttgttagatatccaaatttggggccatataccagacctactgaatcaagaaactgtggggtaagacccagaaaatctgtgttttaacaagcactctggatgaatctgtgattcacggggtcgcagagtcggacacgactgagcaactgaactgaactggatgaatcagaccagtcaatttgagaagctctgtgtaggccgtacaagaagtgatggcgggtcaaacaaatggtggcagtgccaaggtggtggggtggatctgaggtgtttggaatatatctaagatgtcgaatctggaggatttatgatcagatggggtgtgggtgggtgggtaccaggggaacagaagggagcagaagcagattctgatgttgagtaatgaaactgcctcctcatacaggtgtccctagtgggcttcctattccttttgggcttgtacatctcatccttggcctcctgtatgggaggcctctatggagccccccggatcctgcaatgcatcgcccaggagaaagtgatccccgcattggcctgcttggggcaaggggtgagtgaccttttctttgagaaatgtatgtttttgctgctcaactgactgttggccaataaattgctctaagtatttctgataagagccactggtctggttctggtagggagaaacaagcctgcacccctgtcctctggattctttggtctggggccactggacaaagcatctgtcaatgtcataacttcagcactgggtgccgaagtcacagtagcaccatggaccatataactgtcacagtagcaccatggaccctgccacagcagagagaagtagtgccacagcctttagtaaaaataaattccggatcctccaagtttagcctagaggggagaacctcttgctgaggagaggacctggtccttgcagctctaactctgtcctggagattcacctcccctttggggtcgctttatgctgaactctcacacttctggtctctgggctccctgttaatcttcatagcccgaaccctaactgatacaacttggtcgagtcaaatcaaatgagacattcctaaaactgaaggggtgacaagagaaggaagccgagagaaccccacttcccgataatgtgttttgcaagctgtcagtcagttcagttcagtcgctcagtcgtgtctgactcttggcgaccccatgaaccacagcacaccaggcctccctgtccatccacaactcccggagtccacccaaacccatattgcaagttgtagttgatttctatgttgtggaaacacgacagggtttctccccaccccagtcccatccccagccccactcttgtttgatgccacgtaggtacaaatcatctttaatccctctctctgccttcctctgcttcttatctaccagtcagtgtggacgggtaggacaagtgactatcatctctagtaacttccctgtggtatgtgccttttattttattttaatttatttttattaggtaacaggtgtagttgttcagtcgctcagttgtatccaactctttgtgagcccctggactgtagccggccaggatcctctgtccatgaaattctcgaggcaagaatactggagggggttgccatttccttctccaagataatgtgtgtacaggactcaaaactaaaaagataccctgagaatttttgctccctcatgagtcgttctactttttcatcacccatagccacgtcctatcatagctggttttattagtttttcatgaatccttctctctctttacagcggtggtggtctgtgtacattgttctttgccttgcttttcttcatttaatatagcttggaaatctgtcttttcatatgaatatagaaagaactttctcattgttttcccatcatgtggatataccgtagtttattaaccagttccctatagatagtatagcttccagtaaacagtgctacaaaggatactctttgtgtgtgtgtgtgtgtgtgtgtatgtgtgtacaattttacacatatgcagatagatatatctataggatcaattttcctaagtgagtttgctggtcaaagggtcagtgcattttaatattaatagatattgccaaaacaccttccatgggagctgtatcattttgtatttctaccagtaatgtatgacagttactgtcttccagcagctagcatgactgttagacctgggccaaggaccttgctttataggactctgttctggtctctaggagactcctgaggtcaaggggacatgcccttagcctgtgggcttacataaacagatggtgaccacatctggcccagggaccatggtttgccagctctggattacctcctccatatgtatatctaaacaaaatagttcagttttgcctgctttttaaactttatataaatatggcatgcttttcaggcatcattatgtgactcacccatgtttttgctgatagcagcggcttgtttattatcatctctatatagcatttcctcatttgctgcagtttctcactaatccctgctgtcgtggtatgtccctgtttgggactgttacggacagtgcagggaacagcctttagtagactggttcacgtgtggagttcttccagacctgttagtggaattgctcagttgtaagttgtatatatctttgcttcgtagatagcactgaactcttttctccaaagcagttgtgttaatttaaactcctgtcagcagttggtaagtgttcccattcttctgtgttcttgccaatacctggtattatcagatgttttaatttttgccaatctggtaagtgtttaatggtatctcactacaggcttaatttgcatttccctgattgctaatgaggttggacatctttcatatgtttaatagacatccttttgcacattgtctttagtgggttatctgtcttctaattattttgtagggattcttgtacattctgaattgctctttgtcagctacatgtgttaacaaatatcttttcccattctgcaacttgacttttatttgtgctatcttttggtaacagaagtccacgtgtgactgttttatcactttacaacccacccttatcatagtctttcctggatcactagcatatcctacagtttacctaagacctccttccacttatttcagaccctccttttatttcattagtttttgacaatttactttgttctttatagttctattgttagagtatgttaaatagctaacccactccagtactcttgccggagaatcccaggaggaagagc

SEQ ID NO: 37508 - DNA, 724 bp, Bovine  19866881712964
  misc_feature (1)..(1): n is a, c, g, or t
ngctggccctcgcttgctccagcagaacctggcaatcagtaaaaggcacgctttggctcagagcaacagtgcttgcgggggcacctacctgagcagaggacacctttgttcctggcgcaggagaagttgtcgcactcacagaaggacccgtagatcttgccaaactcgctctcgaagcaggagcactggttgcagctgcactggccgcgcccgctgcacagtggcttaccctccgcctcccggcacaggttctggtacccgctctggctctcgccttcctggcactcgcacctggtacccaggtagccggggttgcactcacacaggccgcagacgtaagtcccgttgctgctgcacctggcgctgttcgggttccagccccgcgctgcagccgcacctgcagttgtaggtgacccccacctccaggctgtcccggaagcccacgggccgcagggtgaacgtgtgctgcacgtgcttgctggggcagctccgggcctccaccgacacctcaaaggacgcctgggcaggagaaagagaggggatgctgtggccgtggcgtgactgggcctcccgctccctgtactggcctccccatcacccaggggcctgagcacagttcctccaaggccctcagtgcagagctgggatcaaatctggcccctgcccacacgcagggaggccactccagccacccgaggaggatgaggccccaagtcagcaagcc

SEQ ID NO: 37509 - DNA, 1943 bp, Bovine  19866881740863
  misc_feature (1)..(1): n is a, c, g, or t
nttttcactctcctatttctctctgattgcttcatatgtgacctcttggctccaaatcagtccttgatcctggatcattttctctcacttctcccactatgccgtgggcactgtaagcactagtgaacaattagtttgagagacacagattcacactctagttggcaccctctttctggggtacagaatttcaaaagtcagaatttttcctaattctacctttttggctccttttacaaattaacagttgtgtttatgaataattctaaagaaatgggaaaatgcttatgataaaatgtcaagctaaaagagaaaggatgcaaaaataaatatacctgtctgagttcaactatgtaaaaaatacattaaaaggttggagaaaatatattaaagaaaaaagaaaataaagactggaaggaaatataccaaaggttaaagaggggttatctctggtaggactattaaagattgctatttttccatttagttttcagtctctcttttggaaatgtcagaaactgcacttaaattccagaatgaaagtcaaattggattctatctgtagaggagtcggtgagagtgaacttggtggtgaaaaagagttacgttagggaaaaaaaaattctaaaaatatttcattcagggtccaaacagacaaacaaaaatcactctaggaactaaaaatggaggaaaattgactacccaaacaacagaaaagctaagacgccaaataggatggcgtcagagtcacccatggaaacttcccatttccaggacaggtgggcctaacttccttcgcccagaaaatggagccatcagagagagaagagaataatgccccatctccttttttcctccacccatcagtttcctgccagtgtcttccattagtcaaattcagttagaggccagatctcacggggcctgggaaacacagtctgcaggggctgggcaacctgcaaaacccaacagggcaggacaagctgggagaggaggggatccgaagggaaactctctcaggaccagcacgaagggggctaaattagatcaaatatcaaattctaggtcaggtcaatacagaataaaaggacacatgttgacaattttcaggagtatgtaagttttgcacacatgcaattagttcaaggcaaacacattctattttaacagccatctaaatatcagtatttcccaaactttcctgatagtaagagtcccctggagttatttgttaaacacacaggttcccaggcccctacctgaagatatgaattttgatctgcccagaccttctgtggtagactaaaagacggcaacaaattgtttgctgctgctgctattgctaagtcgcttcagtcgtgtccaactctgtgcaaccccatagatggcagcccaccaggctcccccgtccctgggattctccgttgccatttccttctccaatgcatgaaagtgaaaagttaaagtgaaatcgctcagtcgtgtccaactcttagtgaccccatggactgcagcctaccagggtcctccatccatgggattttccaggcaagagtacttggaagtggggtgccattgtcttctccaaattgtttgctagtcctcccattaagagacagagtccactccccttcctttgcatctggaatggttttagtgacttgcttgaccaatagaatgaaatggaaggagccgtctacggccttggagcatctgccgagtacccttgaaatactcacaatgagaaagccagccacgacacaggaaatctaactaccctgagacccccatcctatcagaaaaccccagagagccttgtggaaggaccacacaaagagagggaaatggctggccagctcagctgttccccttagcatcagacatggtatgaagagctgtcctagacatcccagcctctgcacacacaatgtgagagtgtgtgt

SEQ ID NO: 37510 - DNA, 4058 bp, Bovine  19866880415214
  misc_feature (1)..(1): n is a, c, g, or t
ntggcatctcgaaagacactcttgattgtcttaaactggggtttgtcttactggcatctaggtggtagaggccgtttgttgctaaaaatcctacaatgcacaggacaaccaccacagcaattgtccagctcaaatgcccatcgtgttgaggctgacaaaccccaaagaaaaatgaaagccagcctaaagcacaaccatgcgcctaccatattgtcttggctcagaggtcaggaatgtggctaagactgaagttcatgctgaagcagcctccacagagagggggctggatgcaccacaggcccatatcttattttcatcagcagaccctccttttgtggttgctggtgctggtagaccgattcctatcacttgagtcagggaaaccaaaaaggcaaaggctcgtggttggtgaatcattttaaagaaggacgtggtctccttttcccctgactgatgtttattattgaagacaaaaagcagagaaaagggaagaagtgaaatgtctatcagttcctttctgtgactcttcaaaggactgatactgtgaagtcatagaaagggcttgcctgctggatgcctgtgggatcatgagtttatctgcatcaaatcatgaagactaataattttaagagacaacacatgaaaacgagaacctcttctctgtatcagctaagtgaggtacatcggtgtcgtgcacgtgtgctaagttgcttcagtcatgtccgactctttgcgaccctctggaccagagccagacaggctcctctgtccatgggattctccaggcaaggatactggagtgggttgcaatgccctcctccaggggatcttcctgactcagggattgaacccatgtctcctgcattggcaggtgggtcctttaccactggcgccacctgggaagctctcacattggtgccagttctcacaaaaagaacaaagtctcagttgcaaggtcagtttaaaaaaaagaagaagaagaatcatttgttctgagaaggcaaattccaagcaagacaacactcagcagggagggatgcgctacctgtaccagaagggctatagagagaaggatcagttgctcagacagataagataacagaacctaagacagaggactcaactcaacaggaaagtgaaaagttttcctgaaaacaaaaaatggacctgttgaatttaaagagcaggaaaaaaaaaaaaaaaaaaactgggtctgaaagaaaatgggctttgggagctgggagagaatctaggactaaagaaaggttgctgatccatctccatcaaggaactccattttttggcctttcctgagtagaggcagtgtccctcaggagcctgagtcttcctgagataaacaggatccactttacatcggggaccactgaatgatttctcattcatccgtcccaactgcttctcctcaccaggtcattttcacagtcaaatcctctgcaggcccagtggcccctttctgtctggtcccacaccacttagcccccactcaccctttccagctaaccactgcaaacatcactctgagacaggcagggctgaggagctgtgacatccggacttccttggccgctcctatccttggtgatcattcatcaatagcaacattttaaactcacatagcacttaatacctttggccttaagttctctcattcagtctcggctccatctctaggttgacttattgtcctcattattcttacaagtaaactagagctcagatggactgagtgatctgaaagagcctgaatatgaacccaaatcttcttcctcccaggtcagggctctttctacacgacacacatctctgtgcatcttcagcaccgttacactacaccctgtaatgcagctttcttcacgccttttctttttatactcatcaatatgggtactagtgtcttcttaattaggttaccagttttctaaggatgtaagtcaggtctcatattgctgttttgtcaaatgagtaatgctctgttaaacactcaataagtgtctaagcatttaatttgctttttaatccattacaaaatgtaggaaataagcaaccaagatgaaaaacacaacatatgttctttgatgtgtattgaaaaccagtgaacaccctgaggcattagtggtagttttcaaggcccgattcattgcaaagtctctgaaaccactgagggcctgaacatgctatttgggtgtcagaattccattagaggtgattagactcagtccctaccaacctacgtaccaatgcctcagtcggcctatggttcatcaaattcttgaatttcatgccccacgtcactgtgcttctgttgaatgccaatgagaatactggatgaagaatcatggacaactcattccttataaatcaacatcaaattctactctcagtctccatacacaatagcaaaaaatatgtgtttttcttcaatcccaaggattcagctaaatagtcatgacttgctcctatcatttttaatgggtcacaaaaaagagaatcgatctttcagtcccattagacacagaggatttgtccacgcagtagtattctgcaacaataggagggtagcattgccttcttgcaaagctgtgtaacttttaaagctaaaccatagcagtagtccccactccaggtcaatgaggtatgtcaggtactcatgatttgagaacaaagacaagaaagaataagaaatcacaggcatttttctaaatgcttagctcagattttaaagctgaaatttctacattcaaaacaaagtagagattgtgtgtgtcatactcatcaaactgcatgcattgtagtgtgcaccatttttgtatataaattatacctcagcaaagctgtcgaaacaaagtgatgatcctaatagtatgtttcactttgagtgttactgagaagaaaagggagaaacaaaaacgacagcaacagttttcattagaatcagaaactgttttaaagtctaattggctccagaggaaatacttggggtgagatagcaggagtaggtttcttaggagcaggtggtcacctttaagaaattcttcagcctggaaattctccaagtgccagaaggcccacatgcgctgcccaactcttttaaggtccacacacctaaagttttggtgtcgttgcaagatttacagtctgaacatggtacaaacaagaaaaagaaaaaggaaaacatttccatacagctgtaattctacaagacaaggcgccttctcttctcccagaaatcttagtttccctgccaacttagtaacgacattacttcggggtcagaccatgagaccccacatacttgaggctcacatccaaccacagtcttcatgtcagccagcctaagggccccagaatttgaagctcatccattcttttgggtagaagagacaaatttacttactttccaggccagaagctcactcaccagacccttcatagaaaggtcaattctcacttaaactgcagtctcaaagaagagcttcaaaagacacaggttaatttctgaagaaggcgaaaagcttcctgagagctgctttgacctccttgtttctcaaagtgtagatgagggggttgagagtaggactcaacatagtgtatagcacaccagccaacttgcttttctccgcgctgtagctggagacagggcttatgtaggcgcagaagacggcagcatagtacacgcacaccacaacaaggtgcgaggagcaggtggaaaaggctttcttcttcccctccgctgtccgcatctttaggatgctggcgatgatgaagccatatgacacgatggtcatcaggaagttcagtataccataaaaggcatcagccaggacaatcatgatgctgttcacataggtggagctacaggagagaagtagcagaggagggacctcacagaagaaatgggcgacaacattggggccacagaaatccaagcgcagcatcagcccagcgtggatggccgtgttgaaggcacacagtgcccacacacctgcgaccagcatgccacagaatgccttgctcatcgcggtgctatagtgcagcgg

SEQ ID NO: 37511 - DNA, 1612 bp, Bovine  19866880784619
  misc_feature (1)..(1): n is a, c, g, or t
ncatcccgggcgttctcacccacatcatttagggattttgagaactttagtgttcttctggctctggtattcttagtaggcttcaaggcctggacccactctgaaccacaggagtttctctttgacgcctgcgctgtgtcttgacagacaactgtcacagtgagcccttgggtcagaggactctggcagggaggagctttcaagacaacagcagatggcacgggactgtggtgacaacactcagaaaacactgcactggaactgcatgcagagaacagtgggataaaagcacagaaagtaaaacaatattaaaagagaacagacatcaaagtgaagaaatgagactcgcatggtaacctggtgagcacatagcacataaaaccaggctgactgtttagagcagaggcatatggagaatcaagaatctgcagacattaacgcgtgtccccaggatgcacacgagccacggtagcgtgcagagtgttacctgcagatgtcctgattggagggcgtgacagaagtgcgagggaaggaggacactggagccgacgccaccgaggagcccccagcctgcaatacacagctctggtcagtgtttaggaggagccaggggaccacgaacaccacctcctgaatggcgctgggcctgctgctgcccacggctcagtgaaccatgctcgtgttaggtccctacgagccaaggcaagaacagaacaagcagcattcttcttttctcagatgaaggtaaaactgtagtcaagaatatctgagagcgtggagcagcagcatccaccttgtatggattcaatgggcattcatcttctaagcagctaaactgaaattactcgtacagaagccgagaaaccgagcaccacaggtacatgcaaacacaaaaggaccgcgaggcgccttccctgcggccttacttcccccagctggcactctctacccccgtgtctggggccatcctgtgccctgcggccttactcgcccggccggcgctctctacccctgtgtctggggccatccttgtggaggttggcaggacacaacagccctcaccacttggcagtgggtccatgaacccccaagcccctgccagcgctccttacacagaggggagactccctgaactgccaaacttagagaaaagatccgggagggtgaggaagttcatggtgggaagagaagcagaggagagaaatagaacaggggagtacagctgagctgaggctgcaggacgactgttctgggcgtcccccaacatctactccagcccctgcggggcacctgcgaggcctcatcaagactgaatcctgagattcctcggcccccgcagcggcacgtgcactcttccctcctcaggatagctattctgagggagcagctgctccgtgcaacctcaggggccacacagagacagcactgagtctgttaccagtctgacagcaagccagcatgtcctccccacccgccccaggccctgtcccttgattctggaaagccccactcttgcaaagtgttgcccccggggcacgctctcatcccagcactgcagctaaggaacccctgacttgcaacaccaaccccccttgcctggcatgtgcatcag

SEQ ID NO: 37512 - DNA, 1552 bp, Bovine  19866880842844
  misc_feature (1)..(1): n is a, c, g, or t
naacatatcagagggcccacctgttccatgccaggcattgggttgagtgccccaaaaggatgcccagagagaaatgaggcagatatacctaccatagggcagatatttggataccttgatcacaaagtgacttgtaatggactctacaatagaagtgagttctggatcctgaagggctacgaaggagaaaatggtcctttgtttctagggaagggatatttgaaaaatgtggggtgctggtaaaagagctggctcctgagaaggagggcattcctggctgagtgggttgcaaggatgaatgcacaaaagcctggtgtggttcatgcgttgacaagactgggagctgtgggcgtggttgggctttgaggggtgagaccactaggaagacattggctgaagaggaggtggatccaggagtagcaggtgggagcctttcctctgtcagtgatggggagctacagaagaattgttagacagagaattccatgatatacatgccttttagaaaggttagtaaatggaaaaatcagaaaatacagagcagcaaaaacgacaggaaatcaactgcaatccatcctcactgttgaaatccgagtccatcactcaccagccgttttttcctacaggtacgtatacagacatgcttttttaagactcaaaatgatcaaaagttgtacacacttattttgaaccattttcgtttattttcacaagcatcagagtttcataagcattctaaagcttcattctgataagcacactgcaatatattatatcaatgtatcatacagactcatctttaagagtataggctactttaaaatgttcgctattataaataatgctgtaatgacaacttgaagatcctcttatttcttcaggataaattcccagaagtgaatgttgtggctcaaatgaaatatgaattgtaagaggcctatatcttggcacctgcgctaatggtagtcagtatcatgcatttccagttttgccaaatcatggctgataaagagtggattatttatttggcatgcatttctttgaggttgagtgatgcttcaagagttcagttggacatttttacctgatttttatgaattgaatgttctaccctttgcctattgttatatttttgtgtttatcttaactgagtcttaatacatctatttaatattgctgtgcatcatgttgggtatgaatgaaacgggatagcagctttcctcaggacaccttgcttctctctctagccccgaaatcacatgaagctgtggttggagattcacctcatagtcccagaaacctctttcagcctaaggaccatgagtaaccagactctggtaacaaagtttgtcctgcagggtttctcagagcacccagaataccgtgtgctcttgttcagctgtttcctctccctctactctgtggcactcacaggaaatattcttatcattttggctatcgccttcaaccccaggctccgtacccccatgtactttttcctcttcaacttggcaactatgggatattatctgtacatcttccatcatgccca

SEQ ID NO: 37513 - DNA, 1268 bp, Bovine  19866881078347
  misc_feature (1)..(1): n is a, c, g, or t
ntctcttggaaaaaatctgttgcttgggagtggcctgtgtctggccgaccccctatcaggggcagctggtaccagcaggcactacaatttcttccttggccaacttcctgccatttgctggctaacaggtgctctcgagggcccttttaaaggttcattgttttccctgccaccttcctgctggccctggctggtgatcgaaagttgtagccttgggctgcagaacaggggccttgggcttcccaggaatgcatggcagtgtcccagcacctgctcttttcttgagaaccgccttcctccttctggtctgagtagcctgggctcagaggctcccagccgtgcccctcacgccctgtcccttttctttggctcatcgtgtcatggtccttaacatatttaaatttcatcctgcttgcccgctcctgtattcttggctggaaaactccatggacagagaaacctggtaggctacagtccgtggggtcgcaaagagtcagtcacagctgagcacccacgcaaggaggaacatcagagtcgtaattttataagacgtaagagcagaggttaccaagcattcagatttcacacacatcctcagcacattttaatttgcacactgataacattttccttctgccaagtgaggacaatgaccatctattgttgccacaagtttatgaaagagggggcattgtgggaagcacatcatcttgaaatcaaaggctttccgatgcagtggatttagcctcaggaaaacaccactgcattagccttctttttctgcttcagaccttggcccataggaagtgggctatagtgatggcctgaagagccatctgccttctcccatgataaccggctccacaaccccaaagaggaaagatggtccaaaccaggcagctgaaaacctccagtggcctttgttccaaacgaaagaccagggacaatggggagggcaggcagccggcccactgtcctcacggcccctcctcacggctggcagagcagctactgaagtggaaagcgaaaacaattccctgcctgttcactgggacaggtaaccatggctggcttgctgccctggggcccctcctctggggacagggaacctgggctgcagcctgagtccttggattggggacagagtctcctccagccagggaagcaagagtggagcctgatctgtgtgccctggggcctgggggaggggagccagccaggacaaagaaagctgggctccgcagagccacagggcttggcctgcccag

SEQ ID NO: 37514 - DNA, 1105 bp, Bovine  19866881112002
  misc_feature (1)..(1): n is a, c, g, or t
natttaaaacctattcctttacagacagagtctctccggtttgtgctgacttcacactgaagaagcaggcatgtgtcgcccagctggggcgcgcgctgaaggtgctttcaggggcctgtgctcctggcaccttccgtgggccgctgcccggggcagagaggcagatgggctgcctctggctgagggccaggactgagcagagactgccacggcccaccgcgtcccgctcccagccacagccctgcccatttgccgccttaactgggctgaacccctggccctgctctcagtccattctgttgttagggattatctcctgtaccattttttcataaaaccaaaatcactaccatcaaatggcctttgtacctttaaaaaggtctgcttaaaattctgtttttaaagaccagtttcatcataccaggcaaaagagagtcaactccagaaaaacagcccagggagttctgcagtgtgagatgagtgtgcccaggcacttactctccgggcagctctctggatgtcttgggtggaggccccgggtcctgccctccatcctctgagcctcaggtgtttgatccagcctgtcaagagtaaggagcaaacagaagacgattcctctgcatttcagcgtgaaatggtttgttttgaaagcctcgggggagggctttgccctgccaatggctcctctggcctggcaggtgctatccagccatagctcaccctggaaataggtccgctcgccctctccgcctcccaggccacatccagcgcgtgcctgtgctcactgtgccccaaagtgcaattacctacgccccctcccagcctggggacaccaaatagctacagacagtctgctcaggagagccacatcccaggtctgccttgccggtgccctttaggaactgcccgggcaaggccccttgtccctcttgatggcaggtgagtcgtcagggaatactggatttctgagtgggcaccattccccttcccacagtggagctccctgtgctgtccctgaaaagcacggagacttctgatagagaggagagtgtgctcaggtgggggtggccccaggacatcccagccagtgtggctggtgccccac

SEQ ID NO: 37515 - DNA, 999 bp, Bovine  19866881267578
  misc_feature (1)..(1): n is a, c, g, or t
ntttatataaggggaatctagagtatttgtccttctgtgactggtttacttcagccagcataatgtttttaaagtacattcatgttgcagcacgtgccagaattcccttcatttctaaaactagtaatattccatgtacatatgcatcaaatgtttatccagtcatctataaatggacacctggcatgctttcagcttttggctattgtgaataatgttgctatggtcttgtgtgtacaagtatctgtttgaatgtttgcttttgcttcttttgagtatatacccagaagtggaattgctgaatcgcatgataattctatgctaaagttttgaggaactgctgacttacagttttaggtataaaatagtagacctcaaaattgctaagtagaaacactattttttaacattctagagtaaagaatgcttttcccagcaagagagaaaagccaaaactcacaacaggaaatattttttaatttgactacatgaaaagttcaaaatttctatacacacagatacacacatagatatacacacactaaacaaaagctatttgtagtatgtggtagataataacttctaaatatagcaagactccatgcaaataattgggaaaaataatagctatgcaaattgaatatgtatgaaaagctgttcaacctttctaattaaagaaatagaatataaagcaagaacgtattttttcacttagcaaagatgaaataccaaaatagtatgggtgtagttgtaaaaacatttccttgcttggcaattaggcaatatgtatcaaaactccttgtcatagaattttagttcttaacatttgtcttatattgctatatttattgtcctgtaaccacagattccacagttgcttagtgatgattttatatttaaatgaatttcatccttactcttagtattttttctttttttgccacagcttcttcattctgaatcctttattttgattcattcctagacaactgcaacttg

SEQ ID NO: 37516 - DNA, 1169 bp, Bovine  19866881338757
  misc_feature (1)..(1): n is a, c, g, or t
ncctagaaaacccccatggacagaggagcctggaggctgcagtccatggggtctcaaagagttggacacgactgagcgacctcacttttgcttttttaaaattacctgtcttcacgtcaagaaagaactctgagaagaatcagcctttatataaaaccagaaaggaaaaagggattcacttctaatttctaaaatatgcctcccagttgtgtgtgtgtgttttttaaatctaaagtaagtggaatttacattaattttaaattattgattgttgaaaccaatatttgaacgtatagggagtgaaagatatgaagtgaaagtagttatagataattacatcatagaatcagtgaatgtacactccagtggcccaggaaagcctcatgcatttggttaaaccctgtctttgtacataacaacatatttcttttctctcatattaatacagcatagtaaatgttgtactaactataaaaagaccaaaaacttatttgaagaatataatatatatgtattgtatgcacaggattgttgttcaaatttgacatgttatatcctgatggtgtacaaaaatgcattgaacttgatataaattgaaaacttatctatcagtgtttccatttgtagttcctctggaagatccacttaaggacatggctgaatacatggattccagccgagatgaggtctgggagaagacctcctgcaacaagcaagttacacttctggtataccaagaaggagatcagttgaatttcttccgtgtagtagacaggggagacggcactctaacaccgttgtctgaatctttaaggtaaagaggtttcatttacatgtctcacttaggaaaggagaacgtcatatgatacacccataaacctcaggtttaccttgtgttgtcaggataatcttactgtagtcaaaagattgactaagttttatgcgttctccccttctccccatcccacctcagttgtataattctgaaattgtccttcctatgattgataggagtaatttctaaaactgaagtttctttatggagtaggattttttataaaaatatttgtcattaacactcgaagatgcctactgggttattgagttttgttataatagtatgatgttatatcaatatagctatggcataatataaaggattaagccta

SEQ ID NO: 37517 - DNA, 1864 bp, Bovine  19866880392883
  misc_feature (1)..(1): n is a, c, g, or t
natctggggagattttacatgcccatgagccacaactactgagccagtgctctagggcacatgctctacaacaggagaggccaccacaatgagaagctcttgcaccgaaactagagaggagccccactcgctgcaactggagaaagcccacatgcagcaaagaagacccaaaagtgcaagtgaagttgctcagtcgagtcgactcttttcaaccccatggactgtagcccgccaggctcctctgcccatgggattttccaggcaaagaatactagagtgccatttccttctctaggggatcttcccaacctagggatggaacccgagtctcccgcactgcaggcagactctttaccatctgagccaccaaagaagacctaatgcgttcaaaaataaaaataatcaatttaaaaaaatatcccataggtatttatgtgtgtatctatccacttatttatctatccttctattattattttttgaactagaatctggatgtgtttcttcataaaacatttgttttatgcctccaaaatatttctacattatttataatatatatctataactaaatcatatataacatcatcactatgcattaacattagttaatattcatttatttgtaatccagcataagttatattcaggtggttcaaagttggaaggagaaaaacagtttattttggaagattgcacatttttctaatttcctaaaactgaaaattttaatgagtctcatatttgaggaattattgtaatgaagttgttaatccacaaacccactaatgcaaccatcaaatattttttgactgccatgctatcttgacacatttaatttgcggaggggttctaaaacttggatcccaattgtattctggtgataataacttagtcggtttcttgataaaaagatatttgtttaggtgatgttcatatatgctgctaagttgattttcaatgtcttgaataactcctttctgatattcttcaatgaggtttaaaacctcctcaactgtgccaccaaaaattgcactatggtagtagaaatctccctcttcaaaagggatgaaagctgctgatttacttcttctctcataagggaaagtgtcaccatctttaaaataccaccatgcactaagttgagctacagattttcccagggtttccactccaaaatcgtccttgaagatctggtctgcattcataacgaagagaaagttgacttcatactggatgtgtgatatgatgtagttaaataagttcgtcatgtatgtgaaataaaaatctttctctataccacttttgaccaataaaaatagtttaaatgttcgaaggggacctaacactatggaaggcatggtggagaagccatccagcaagatgtaaaagataacattgtagccaaacatgaagtgcttatttgcagattggatgaactcagtcaagctctgatttgaaaacctgtgaaacatgaagaacaaacaaacacataacaaaaaagacttattttgctggaaatcatcaggaaattacctgtcatttaaacgtgctaacattgcttcagtcatgtgcaactctttgtgaccctatggactgtagcccaccagcagacttttctgtccaaggggagtctctaggcaagaatactggagtgggtttgaaaccatgtgcaaatccctgcatccttgtcttttgaagtaaactgctgactcaagagttaatgactgggaaatgtgaagatgtggaagcaaagaatagctgttgggctaaggaactggtaacaatttagactataattctgctacataacaatcaccaaatcctcagtttcctgaaagatataaaggcatgacacacattc

SEQ ID NO: 37518 - DNA, 1675 bp, Bovine  19866880494980
  misc_feature (1)..(1): n is a, c, g, or t
naatgaagtcactgaaaaaacatttttcccgaggtcacacacaatggaggacttgggcttcaaagatagatcatctcactccaaagcccatgttataaatcaactcactctttgaccctttgcctctgtataataataattaaaaaatccttattaaagaagctgttgtgtttggagcactcctcaagacaaactccaaactggaaaagcatggtaggagttctgagaatgaaatctcatattcttacagaggaagtcctcttaattccagttgtggctatttatagcaaaagacagtctcaaggctcattgccaggctcaggcctaggtttccaaagtgaaaggaattccaaacaaggaatagatggggcacaaaaacttatctgacagcgtctggtactttctcaaacactgctccaagattcccttactccaggcaaagctccgtgttctcaacatcctagacgataaacaccctgaaggcagggctgtttcttttttatgtttatattttcaatgtctagcacagttatctcccagagagaggatataaaacacttcttagcttacctgctggatgtataatttctttacgcatttgaatcccttgtaagatgaatttccagtttcaactctgtgacttcttacttgtgtggtctttacctctctgaacctttgtgtcttgaataatcagactggccccccaggattgaggcaatattgctcaataaacacagatgacagttttctttcactctcctattttattcaagtgttctatttccaccacaaataatggggaaaaaatcggagaaggcgatggcaccccactgcagtactctagcctggaaaatcccacggacggagaagcctagtaggctgcagtccatggggtcgcgaagagtcagacacgactgagcgacttcactttcacacattggaaaaggaaatggcaacccgctccagtgttcttgcctggagaatcccagggacggtggagcctggtgggctgccatctatggggtcacacagagtcggacacgactgaagcaacttagcagcacgtagcagcaggcaccttttccgttcttgataaaaacctctgaaactacttaattttcccctcactttgtgcctgactggctaggcctggagagtcaaagaccttcaggaagctcatttatgaatgaattattaataccagatgagtacatgggatttgactgccaatcaagaggaagaagaaattaagtggattttcagaaaactgggcttggtctttcacttttcaaaggctcagttagaaataatttgagcacacactctggggaatcagcactgtttcaccctgaaactcttccccacctggttatagctttaaaagatgtataaaatcacattccttggaaaggtgaggtttaaactccaggctgtaattgaacccttaatcatctacagttactacaagtcaaggggaaaagaaatcctcagtaactccccccaaactgtaggacattcatttcctccaagattcccattcattaccttgaggactggatcctccctcctacctttatgaggttaaaagacaaataacgagtaataggtatttctgagatattctggttgagatacctgttgatattgctgggtagggacaattgtaaaggtcagg

SEQ ID NO: 37519 - DNA, 4687 bp, Bovine  19866880497865
  misc_feature (1)..(1): n is a, c, g, or t
ngggatgcattccaagggtttgagactgccttcacaggatccaaggacagaagggacagtggggctcagaagggctgggcccagggtctagaagccctgggaactgagggtcactcggtctgtgtcgccagggccacatggcctcgtctctgcttttctctttgcacctgcttctttctcctctcttagtagactggctgcctttgcttctctgtgcacatggccaagcacagctgcccggctctggcgtttgatccctttcagttcaagggccggcagaggctgctgggcatctctgatttccatattcctggaagagagaatctggttatctcatcatgagtcagaggactattcctggtttgttcatttattcattcaaaaagtctttgttgaatgccaggaacagttttaggctcccaggaatacatcctgcccttggggactgtgtatgtgtgtgtgtgttgagaaacagagagagagagacgttgtgagaacttgttttaggggcaccagtttgcacattgcagttttaagagaaagagaagtatggtttggaattcatatagacctggattcagatccgcctgttaccagctctgtgcagccttgggtgtgttaccttacctctctcatccccgattttctcatcagtgaaatggatatcatcctttctagaatggttatggggattctaatgaatgggtgcctataaaatcacttgtagagtgccagccatgctgaatcagaaccctgcctctcagtggtcatgaccctgagaaagttacttagcctgactgaatttgttctgtaacacaggaaagaatgtcagcaacttcacaggcttgttacaagcatccagtcacatgatgtgtgccagggcgtggggaattagtacagaagagacactcagggcggtagttaatcacatttcccctctttcttccagttcccatttggccgacgcttgccttgtgacatctactggcacggagtttcatttcacgacaattgacatattctccggtcaagtgaacaagtttccaggtatctactgttattgctggcatttaaaaatgtgtctagggctgagtctcagggtacactcttggacaaaaatatgccagtgttttgagatcaaactggagggctcttaattgggaatggctgccaccgtgctgtgatcttgggagggaagatgatcaggacttaacccaccaagggcttaaagactggaagttccaaagtgtgaagagattggttcttctggtctaattccactggtggaagaacatgactttcactttggggtttttgatataatatgggtgtgtcatgaagggacgatattttcaaaatgaaaaaaactcaccatagtttctggaacatttcaatgactcagtgagtgtggactctgaatgcctctatgtgtgtggctttctctagtagatcatgagctcctgggaggggccatgactcccgcacctctgtagattcctgtggctcctgcaacccttctggacacacctgaggtgctctgtaactgctttctcactgactgactgaaactcagaggcagccccagttttatgctcatcgcagggaacaagaaagcctgacattaaagcaataaaatgaaccatttcccctacagagttagtctaacattaataaaagcttcatgttgcactaaaataagtaaacaaaccatttaaatttctaattaatttgcaggagacagaggtactaaaattccaggactttgtcccagaaatgggattcacagttgccatttcctttaagtgccatgtctggaggtgctgttttaaaatcaaaatgcagcatctccatcctgggaacaggaggtctggacagcgtctgtcttcataccctgagggcattatctagtgagatgattatctagtgagactgcatgggagacttggtgccagataagtgccacagccaacactctaggagacttccccattccgttcccagccaccctatcgtataacttttccctttccttttagcctctaccaccttcttctgccctgattactattcattatttccattggttaagtggagaggaggggttaaggtgagtggggagtgtgtaaggagaaatgaacatttggttaatcagggtatgatttcagtgaaagaggtgccactcattttcagaaatttttacataagacacaaaccatttagaatacaataacagataaatttttaaaagaacagggacttgactggcagtccagtgattaagactttgccttctaacgatccctggttgaggagctaagattctcacatgcctcacagccaaaaaaaccaaaacataaaaacataagtaatactgtaacaaattcaataaagactttaaaaatggttcatattttaaaaagagagagagagagaacatcacccaaatcccattcctcattgaacgaaaccatgatgtgaatatttctatttattgttgtttagttgctaaatcgtgtctgactcttttctatatttatttcctcccaaaccttaatcatgtttgtgtgtcatttttacatagttgcctgactataagatgtttgctctagtgtttcatttatgcttatttttaagaggagaatcaactggtctttttctttggcagtccgtgccatatggttaagaaaatacctcttagaaaacccaatatccatacattatacagtggcaagttatactatgtccactagggggggttttcaactaagccaacagactatcataggccccttggctcagattcacttggaaggacacaggacaggaagcacagcttgccagccagtcaatgtcatgcgtttctttttagttgagtctttacaagggttccagagctaagtctttggctcctgcagggaaagctcaggtgcaaggagacacgatccatattggtggctgtggatcggccttgactcagaaacccggtaggagccaatagcccacgcagctcctccgtagcatagcttccaacgtccccgccagggtcatgctaagttacaagattcgttacactcaggaaagcccagagctatggctcctgacaaggtatttatgtgagatgccagtaaatgatcattttaaccatatgctctgttgtctagtcacagagctaactttccccctttatcggtttcctggggaacagagctagaaaattaactcaagatcagataggttcttggaggaggcaggtttttgtctgaggacgaggagaactcttgcagccagggttcttgcatggttttaatgggatagctatcattttctctgtctggctgctcataaaagatgacttttgggggacttccctggtggtccagtggaagaatccttccaatttgggggataaaagtttgatccctggttggggaactaagatcccacatgccatggggtaactaggcctgtgcagtgtagagcccatgtcgcacaagagagaagcccatgagctgcgataaagaggctacctgctgcacccgatgcagccaaataaaataaatacatagataaatatctttttgagaaaaaagatgacattttaatgccactaacaggacttactgtgatattgggggagcaaaatttggaagaaagaaactctttgaatgagggcagagttcccaagacatgaatcatcaaatgggcttcactgacattttgcccattttctcgtttcatctgacggctgagagcaggaaggaaggagtcgctatagcttgacatttgggatgcaggtagaaatacaggaaaaattaccttcagaggactagtttcattaaaggtgatataagaacattcattctaaagaagaacgctcgccccatctcatattccaagtgccagtgataggaacatacaattatcctctttactaacaccaagctgctgctgctgctaagtcgcttcagtcgtgtccgactctgtgcgaccccatagacggaagccaaccaggctcccccgtccctgggattctccaggcaagaacacttattagctttaatgacaaagaaggctctggaacctctaggcagcagatcagtgctgccacaccctctgccctgtgaaagacaacatgcttagcgacgattccagaactgtgctcgggttggtgtccacgcttatcttccgtctctgatacatcccattattccaaagctgcatttcatatgcatcatgtattacttagagcaagttccagaggatgtgccaggcaaggataagcactgcacatgctgaataagctgaaaacttttggataaacatatggaagtaatttattttgttcatgtcggcatgttagattttagccacttttctatgggcaattgtcttcaagatatgttattatatcttaactgatgaattaaaactttcactaaaaataatctgatttagataggtctttactttaagaaagcccagaactgtcagttctcgactttacaaacaacggggttttgttttttcttttgctgagttgccggctctggaatatatgacagcacgtggcaggtggcacttgagagcccaccatgaggaggggactttgtcagaggaggagggggccccagggagggatctctgggggcggctgtctgctaatctcggtcgggctagggatataaag

SEQ ID NO: 37520 - DNA, 2894 bp, Bovine  19866880501879
  misc_feature (1)..(1): n is a, c, g, or t
ntatgtgtgggtttatgacaggcagggagggttagtctttggtcctgattttaacttgataccatctggcctgtagccagtccagcccagagaataatttcttccctagaggttctaggatacgggcattcaaagaaccatcaaccatgcctaattaaaataatcatttgaaagatggattatagagtgctcttgtttgctttcagagcttctgccccgtgaattgcaagttgcgatcatcagtcgagtaaatgccatcattttctcaacagacgtttgtggataccctgctgtgctaatctgcctcctccccgctctacctgttttcgtctttctctctgtaggatgctgcctgcacttttgttgtttctcttccttcctccatttctcgtatttgcctttcttctatgtttccttcccttctgtgtctcctaaaatcccagtcgattgaaaaacgcagttatttaaacttttggttaattgaagacacactcacatccacgtgttttatctgccctttgcttgttctccgccttgcgttctcacttagcaggtcttccaaagacgctgtttcaaaacagtataagggaagagaaactggttctgtgggaaatatacccttatttgaaaagttggaagaaagagccaatgtcttatttaacttatgctttcctcttcctcaaatagatgaatatggtgtagaacaggactgggtcgtatacccatggacccaatctggctgaccgcctgcttttgtcagccccacaagctgagaatagtttttatacatttttttaaaaagaggaagatctgaaaattatatggaactcagattttagtgttcataaattacactttcctggaactcagccttgtctcctcatgtatgtgtagtttgtggcttctttcgcgtagtattcactggttgtaacagactttatggccaataaagccttgtgtttattctctggctgtttacaggaaaagttgccacaccttgacttggaatctccagtgaggccgaaaaagaacacctgtatgctgaataaatatgcttttaagaaaaactcaaaaaatgccaagacctttcattttgacctactgttaccccttaaaacttgctgttagaaccagataacatgtttttgagactaaattagccaggctatctttcatgatccaagcaacactgttcttgacaatttctgatacaaagtatttcaccgcattctgggaaggagaaaggaaaaagtcatgctttcagtcttctctctctctcttagtcgctaagtcatatccgactcttgcgaccccatggactgtagcctgctaggctcctctgtccgtgggattctccaggcaagaatactggagtgggttgccatttgcttctccagctttcaatgttggtatttcagtattcgctgccacacctcttctttctgtgtgagtaatgtgtatgacttagtcagattttcatatacgccagaaggtatttacttgaagaggaaatccagtatcttttgaactttagaacagagtcacaatagtaaacagaattgatcatttcacataatttctagtggtgacaaatttaatcatccttaaggaaattggccgatatgggatcatgatcagcatgcagtgctctgatattatgcatgttatgatcttgaaaagactgttttgctccttgtctggaagccaacccaacaacaattgctctacaagttggttttgttctttttttctctctcatttgtttcatggttttgttttgtttttttcatttgtctcttcccagaaagtctttttctttagtactttggtactctgagaggaatattttatgcctactttatagatttttataaatacgagaaataatgtatataagaagttagcttgtggctgacatgtaataggcattcaataaatgttattgttagtattcataaaagatacctccagaatgagagaaatttaagaattgtgtaatttcatcttttcagcaaaattagtttacactatgaagatgtatagaagttttactacaagtatattcaaaacaactgagtttctaattgagaaaactggacacagcctaaatgttcatcatatgaaacaatggaatattataataataaaggatatttaattgcatctttttaataataaaggatatttctttaataaaggatattaataaaggataataaaggataaataataataaaggaaaagatattaataataataaaggatatctcctgatatgaaaagatgtccacagtatacaggaggaaaacattttaaattattacatataccactatatcattttggggaaaagagaaaaaagcaggacagaaatttacaggacatatatatcaggttcagtcgctcagtcatgtccgactcttcacgaccccatgaatcgcagcacacaaggcctccctgtccatcaccaactcctggagttcactcagactcacgtccatcgagtcagtgatgccatccagccatctcatcctctgtcgtccccttctcctcctgcccccaatccctcccagcatcaatcttttccagtgagtcagctcttcacatgaggtggccaaagtactggagtttcagcttcagcatcattccctgcaaagaaatcccagggctgatctccttcagaatggactggttggatatatatatagcaaggcagaaaataatcaccatctagagataatgaaggaatagatcactttttccttcctctgttctgaactgtaagtttgatatagtgataatatcttgcttttaaaataaaaaaagaaagtaagatttttttaaatgtgtgcaagtttcttagaagaaagcctaatggaatgctcaattaaaaa

SEQ ID NO: 37521 - DNA, 1118 bp, Bovine  19866880521211
  misc_feature (1)..(1): n is a, c, g, or t
nacttggtgctcatgctaagaagctcctgtcactaatcagcctttgccaggtcatagtgggctggggtgatgaactcattccagctttccagggacttcccgttgtaacacaggaacactcaggttctgggaaatccctcggtctggagcaaaccagggcagttgataaccctacataaagcccagatctcactccattcaaactcaaaccagaactgggtcacatctgtgtaaaactttcagtgcacatctagatttctgttctcaactcccacccgtgtgcccagttgccacgtcagtggagtccgtctcctctgtgtcacctgtcttcattttctcctctacgttctcactgcaaaagctacgggagactacagcaaccaagacaagaggggaccactgaagattcagagtctccaggaatgaagtctgcggtcataccgcctggtatagctgctggctcagagcaaaggaaataggaatgaggaggggaagaagggagctacaagtatcaactgcaggctcatgaccagagagaagaggggactaatacctaaatattattttcttctttgcttaatgtatgtctataaatctgtgtttatatatttgtgtatatagaaactaattttttcttcttttgcactgtaagaattaatggcagtggttaactttacagtctcatctttagcttacaggatattcaagagggactctaataactaaagttgagaagtaactgacatcacccaaagatcactaaaataacatttgcgatcttttctttttgtggaaaaggtgagagtgcctatttctacaaaggacaattgtattttgttaaagaaaagttgaagtttgttcttgctatatcggaagttgaaatagatgtaaaaagttgcgcacagatattgagtaggcaaagtgacgagctgtcccagttattacaccatcatctctcagtccaaacccacacttttaatactctgctttgtgatgccagggttgggactatgagaactatatttctactttgccagttgactttctgtttgattctgcaaggcagaggagggagaaaggacgcagtcttctctgacaagtggttaactgttgggggc

SEQ ID NO: 37522 - DNA, 1155 bp, Bovine  19866880530430
  misc_feature (1)..(1): n is a, c, g, or t
ntttctgcgtgggctttctctggctgtggagagcagggtgttgctctctagttcgtgcgcaggcttctcactgcggtgacttctcttgttgtggagcacagggtctaggcacacaggctcgggggttgtggcgcacaggcttagttgctccacagcatatgggatcttcctggatcagggatcgaacccgtgtctcctgcattggcaggcagattctttaccactgacccagcagagaagcccagttattatttttcaaacattcagaagccactatccctcctaacacttctggaatcctgagaaatgacccaatcctctgcccattttactgaaggggaacgtgaggcccagagagggggagtaattggcccaaagccacgacacgcagagggcagagaccaggtgataatccaggtcctctaaccccgcagcataatttttcctcctgtaatcccagtcagttggctcattgattccacaaacacttccagaaagcctgctctgtgccagctagagatgggggcgcaggctccccagccgcaggacagcctagtgtggagatgagccggttggttagtgcagtagaagaagcaaatgaagccagcgtcatgatagtgctccaggcagcgggaggtgaaagggcaggcattaaagcagggagatgactggtatttttcaagcgctgcattgggctttttctagggagtgcttgataaaagccactctttacagacatagaaaccaagccctccagaggagaactggctcccgaaagactagacagctagcacgcagcagagagggaaccaggccagcccaatcagtcattcctccatggagccagatgccatttctcgggaaaggcccagttttcatctcctgcagtggagccctttgagaccccagccccaggcctgggggaaggactatggtaatgcttcgggggaccaactgcagctacagatcagagcagactgcaagccaccccaacaatggggagaagacagatcctcgtgattaaccacctcggagtcggtgcagccttcacatagctcttctggggagcgttctgctgcacagagaggaaccactaaagtaattctagtcaagatcactcagctttatttcccaccaccgattccaaacagaaag

SEQ ID NO: 37523 - DNA, 4435 bp, Bovine  19866880675476
  misc_feature (1)..(1): n is a, c, g, or t
naagaatggcgatgtaaatgatgctgtgacttagcgccctcccctgcttagcacgcatgtgctgtggagtgagcaggaagatgtgagttagtggtctcctgtcctgagtacacctgccgcacacggctgatgctagtattttttttttttttatgctagtatttaaggatgtgtatttttgtttttaccgatatggtccataaacacaggccagctgcccgtcaggaccacaacagcaggaataactctgtcccaacggtgtcagaatcatgtgtgacgtcttcgtgagatgtccttctccaggctgggaccttccttggagattctcaagggtcatgatgactgtgggcactttccgcctttacccaccgactgtgctgtgagtgtgctgtgtgctgagtcgcttcggtcgtgtcccactctttgtgaccccatggactgtagcccacgaggctcctctgtccatgggattgtccagtcaagaatactggagtgggttgccattcccttctccaggagatcctggggacccagggactgagcccacgtctctcttgtctcctgcattggcaggccggttcttgaccactagtggcaccttacccaccagctggagcagaggaaacagcacctgagccatcaccaactacacacaacagagctggtatgagggtcacgtgagctcaggcacgcagatgcgcttcctgataccaggccaccatatctgctgtccagattcactctccccccagttacagcccgatccagccctaggtctgaccctggaggtctcaccccaatcatttcaacataaacagaacatatccacagtcccacattgaatatcattttttgctgttaaaaccccaaaaggattttgaaaactttgcttggtggattggttgactacaagactttaacaattggctgtgatttcttgaaagcttgtgtgcacactggagaattcttgaaaactgaggaaaccaagcccacaaattgatttcaagtgtaataacattgtttgggtttctaaatttgatcattaattcaggcttaatgcattaattatcacatttattaatctcagtgtcgcagtttcccgtttcaagttcccgagtcagtcattttccccatgtctcttacacttgaataagccttgacaagcctgtgggtgccgggctctgcccctctattcccagtgagtgaagcagcctggcctcacctgcaccgcccccccattcctcccgcaagacctccacccacccagcccagaagatgctcctttttggggaagcaagagtagcctgggcctcccttcctgcccaatagcaggctctgcctgggcagcaatccctcagtcaatattggccacgccatggccttggcctctggccacaccactgctagccaacttcaaagcctctttcttgtcgggcattggtgaccgccctcactgtgggcactggctcaccgggggcctagccctgccctccagctcccaaagccctgcgtttgtacagagggtgtggctggactttggggcttcgggttcggctcctgcacccctcctccggctggggcgccaggtctgccatgcagatcccaccccagcccgaagccatggttcataaagcgcgtctgagcatgcactggccttgaccccggggaaagagggcagttctcacagtccagctcctgccccagagcctggcgtggcctggtgttctagatgcgcactgggctgtcactgcaggtgggatgcacgccctccctcaacgtctgaccacacaccgcagacccgggtactcagacaccgcctgccacgcacgtgtctcacagacaccacatgccacacgcgggctgagggtccccgaaggggactctcttctcttcaccaggcacctcagacacagccgcctacacacgcagcacacgccgatgcatgcttgaacacatttatgctcacactagggtagacgctcacatttggagggaagcacaccgcttgtggcagcctcagtgagggtgatgcccacaccagccggctgagcttttcccctccacgctggtggaatgaagtggggacatgccttcaccgctgcttaaacctccatgtcctcgtcctaactggggcaaccgcgtttactcactaaggtggggacaggtgtgaccctcttcccacagagccccgcacctccctggtgctcggccactgtgaccctcgtcccctttcccgaggctggacacctcgattcatcctgaactcttccctttcccagtccccacccgaggcccctgcatgccgggtgggcactgcagagcgctggtgaccacaggtgcggttggcccaaaggcctgccgagagctagcgacatcgggcttgtgggtacctggtgacctgaatccacccctttgccttctctgggcctgcctgccctggcctgcccctcgctttgaacaaaatcattagctgagctgcagctcttgatccttatgatgctgatccttgtgtaaagacctcctcctccctggttcctccctgcaccccccatagggaaccagaagtcccaagggtgctgagttccttaagaatactcccatgaaggtatccagtttgggaattaaggacccatcaaaatgatgatcctaggctcatacctcctgggtgcccacccagggctgttcagctccaccagtccccactctgccctttgccagaggtctggtgaaaccccctgtatggacaagctcgctcagagaggggcagtgacttgtctaagatcacccagcaggctggcagctgggctcacataggacccagaactcctttccagcctatgctgtgtggtcacaggtgcctgaagtcctaccttgtgatgacagtttctgtccatctttggtttgggcgcatttcctgcaggcaacatactaagcgcttttggaaatgatctcgattgactgttccaggcagccacctctgcagacgaggaaatgacacccagatgtgaggccacttgaccaagatctccaagctagcagctgctgtgctccaaagttcatgcccctaacccacggtaccacagtgtctccctgccagccatcaggggagccaagatggccttgcatttgctgttcgatttgcaagacacttcttcccctagccctgcaccgatgtgcaggctgcacgaatgccaccccgggtgacctgggccacactcggtggcctgtgcaggcctgccttcattgtgaggtcggccccaggtcagtcagggctttgagcttcctgagcgtgcctggcgcccaggtatgagcccagacaacccaccctccccgtgcggtggggctgccccgtccatggcctccagacagaaaaggaaaaggagccagcggcctgggtcctgcacttggcatgtctactttgccctctcagctccatttgctgagggtggagaagaaattctttcccctttgtctcaatcccacagggtaattcttacttttatgtccccaaatttacatttctttcttcattcattcaccctgtatttattaaatacttcttaagtgctcgatctgcattgggctctgaagaacagaagtgaattgatcatggctccccttggctggcaggggtgaccgtgaccaataccatgaccttgacctgggtcagagaaagtgacctccaggcagggcccaggtgcgggggaagagggcttggaggacacacgttcttcagggcctgaagtcagaaccatgtgaggcctgaaagaaaatcatgtttatgcaggcagccccatttcctgaccacaccgtccttaatgcactgtggatttctactcctttgacagaaattctagaatagcacttttatgttacatttggttctttgtgttaaaaacattacgttgttaaactgtgtttaaaatatattgcaattgttattactcatgttgaggtcttccttcacttttacatccagaagggtccagaaatgggacgtgccctgggcctctctctcctaaaaggaagagtgtccccctccctggaatggcgtgtacgaaagcacggggcactgagcacctgcctgtggccaactgcaaacagggtggctgcatttcacagtgtgaggcgggctgggcaggccagctggaaaggcctcaaagtccaggcgaaggagtgggcagcctttgcagggaagacttctcagcaggggaccctgcgggcagatgtggagtctctcttcccagtcacttttcgtctctataagatgcctctttctcctggtgatgggtgagactcatcgggtcaggcaggggaggggatgtggggaacagcggggtcacttccaaagtttgagaaccagaataaagaaatctttgtggccccagaggtggaatgaattgggagactggggttgacatatatatatactcta

SEQ ID NO: 37524 - DNA, 749 bp, Bovine  19866880685169
  misc_feature (1)..(1): n is a, c, g, or t
ntgattagatgagcctgtgatttttgcacagttatgttgtctcaagtaagtcacctgaagttcatctgccatcaggattcatagctgcactctctaatcgcagggaattattttgctaataacagaggtaccttgatctaatttagttttaatgccaggaggtgccctcctagaataatcagctccagggcaattccaatttccaggtttgttacatgttctggagagaagattcgattcaaggaggctgaagttacttctttatcacccaaagtcatctaggggtgaaatggaatctacctctgcctgcttgcagaaaaacgtggggagaggcccagagagagggaggtgcaggggggctcccagataagaggaacccctggaagataccaccggcaggtgagggctgggctgaattaggaccacaaggcattccccgggagaacctggattttccttgcgtccattcattatcttcttcattctggtactgcatttctgggatctctcctctgcaagacctctgctgttacttgaacacaaatattgataacgaacccttaggcagccccattcttgatgctttacatgtattaactcattacatcccgtgaggcaggcaggtgctactcttattcccatttagggatgggaaagctaagacacagaggctacaaaatttgccccaagtcgcccagctagtaaagggcataagtgggatgcagacgttagatggtgaactttaagtt

SEQ ID NO: 37525 - DNA, 902 bp, Bovine  19866880686555
  misc_feature (1)..(1): n is a, c, g, or t
nattagaattttaaaaggaattaccaggactttcctagtggtccagtggttaagaatcagcctgtcagtgcaggggacacgggttcgatccctggtccaggaagattccacatgccgagggacagctagggcccctacaccacaactcctgaggcccacgcaccccagagcctgtgctctgtaacaagagaagccactgcagtgagaagcccacacacagcagctagagagtagcccccactcgccacagcgagagaaagcctgtgcagagcaacagagtcccagcacagccaaaagtcaatcaattttttaaaaaaggcattatcaacaattacaatccaaatgtgatgggtaggggtatatctgaggatcttgtatcaaattttggttatcttctttgtttttgaatgttgagttgtattgtcaacttccaaatctcatttttcacagctcaacatggccaatatctgtgacaaaaagtcctgctttcactagctcctagagatgaaagttgttattcctctaagtatttaagccataccttttaatttacttaatgaactcagaacaaactgattgatggcccagctcagttggcaataacagctgctatttctctgatgaccagataattaggcaattgcattaagtgcatgtcaccccgatcaagcgacaaggtctattaagacaaagccagcctacttgtggctttcagtcggcttcagcagagcacaggtttttaagcactctggtaccagtttaaacacctttgtgttttcagtgtgatgaatcaagtgctttctcagtgcactctgaagaaactgggccagtaaaattagctttgtatcctattgcaaataatgattagtggaaatgttattagattaagatcaggagactga

SEQ ID NO: 37526 - DNA, 1302 bp, Bovine  19866880785053
  misc_feature (1)..(1): n is a, c, g, or t
ntgtgacagggtgggcaggagcacctggcctggggccagggacacagctgagcaggctcagggcagcctgggtcagacctgctgcacaggactgggaccatcagcgaggcacgccccgcttccacaaacaggcgtggccccatctgtctgccgctgcagtccccccacccctccccccgcttcagtcccaatggtcctgcaggtttcccgcggccacgcccctgccaggtggctccccgaccctgacgctgtgcccacttccccactgcccgtctgggttttgtccagcctttaggataaagctcgctaactaaaaaccacgggctacatttggtccacactcatgtttgtttagcccacacggtgtttgacatttttaagtttcgaatccattaccaacactgaaagatgtgaaatttcaaaatgtcacccaagcccactagagatttctgacttgtgagtccaaaggcccagtgccatggggcgggggctgctgtcccttagcaggacacccaccctccagactgccagtgtccaccacatctgcgcttgcctcagccagggggtcctgtgtggcggccagcaggacggggcagggcccaccacacagcccagggacacacctggcgcacggtaaggactcacttatcacgtgtggaattataaagagacacacagcttcagcctggccgggcccagacccgagtgctgtctgcctccctgcaggaccgcaagctgggaagggacgatgctcctccgtcctgcgtccctctcacacagctgggcacaccccccagaggggacactagggctgtgacgagacgttcaccaatgtctcatctttgctttggaagccatgtcttctggagtccagccaaggtgagagtagatagagctcctggcatctcctgccttcaatcaaagtggcgggattccaagccggcccacaaacaacgatccccaggacttttattaaactgagaaggagagattcggcagcaagaactaacaaagccaaggcttcctccattcccacctgcaggaggcctgcccccctttgaagcccatagccagctcttccctttttctgggttttcaaggtcagagtcacattggctgcaagggttctctttgttctcctgcctctgacttcaccccgacacagtcactgtccccaacggccaggtccttagtgggtggcagaggatggccctaattctgggcaggggagggcgagaggggatcactgacagacagccaggtgttggtcgcacccctggggccctgcttcctgggaaacag

SEQ ID NO: 37527 - DNA, 2467 bp, Bovine  19866880788163
  misc_feature (1)..(1): n is a, c, g, or t
nttttctgagaagctgctgcagcactgctgtgtctgaacgctactggcctcctctctgtgacgtgcatcagagggaggcaccgctgttcccattttacagacaggcccgctgaggttaaacatccagtccgaggccacacagctagaaaaggaggggccccaggatacaggcaggtcaacgagacacacggtctgcccttgagaagctggcagtccagtgggggagggctgcacacagatgctggtgccaagcaaaaacacacttaacaggccatgggcccaggggaacccgtgaaagtatccagggcagggtgtggcccaacggaggacctgtgacgacggcaagaagagccccagtctgggtgtgagcaactggggaaggctgcacagagaggaggcatatcccagtgcaacctcctcctaagatcggggtcccccgccacactctacgcctggcgccccgtgcgaggacacgagtgtggacagatgggctgactgggggaaggccccaggcacactgtgccacgtggacatcgtgattgcctagccccgggaggtgtgtcgaggtcttatgcctcatttacaagacgaggagacagaagtgcagagcagtcaagtaccacggctaggaaaggtccctgtagtgtctggctccgggcccacctttccagcaagcgcttaatttctctgggtctttgtttgctcatctgtaagatgctccacggtcagagacacctccccctgcagactggagctagccagccggggactggaaggtggcggccaccagaccccgctcctaccgcctgctgggtgaacgacctccttcagggtcaagtctgccaaggaatggccaccagtagggagttctaattggtgaggctggcggcacagagcccagcaacgcagccggtggctgatgctgttgcacaggaaagcgctgagcacagcaaatatagccgttgacccaattcagttctgttctgtcttcgagaaaataattgagtttaaatgaataggtttcccatgtcccctccggcctcgggaagggtggaaaaggagatggcgggggtggggggcagacgggaacggttccctgggctcactgctggttatttttgagtcattaggcctgtgaaaggtttccttcttgccttggcggacagtgggcttggacatggctgagaggcagtgaggtgcagtgaaaaccatacgaggtggtcagtgcggatggaggtttaaggccaagctgacaacagccttgcgggggtggtccactcgggtctcaagctcgtcatctccagaatgggaacacttccccccgtatactcgtcctaggatcactgggaagagctggtgcaggctaagcaaactctaaggctttccaaggagtaaaggagtctggtgtaaaccacggaggccagttctctgccctgcaggaacataggcccagtgttactgcatctgtgtttttggattgttttcaagaaaagctggaaatccagatttttttggtgactgttgaaggtgaatgttttaggagtgcttaaatattgggaactgattttttaaaaacacaccaaaaatcaccttaccaccttcccagaccaaaacgaaacctgcctatgggctacgcgtggccttgagccacccatgtgcaacttccaacttagtgacaacgcgtggaaagccgttcaggatgtgcggtgtcctcccacctgttcattgcctcataatcgtccttggcagtggggccaagcccagccccgctggagtgggagaggcgagggacaccagtctctccagacctcaggggaaactgcagaaacagagacgcagacgtagagcacgaacgtacggacaccaagggggagagggggcgtggggtgagtcgggagcctggggttgtcgtacatacaccaccacatacaaaacagacagctaatgagaacctactgcacagcacagggaactcgacttgatgctctctggtgacctaaatgggaaggaaatccaaaaaagaggggatatatgtgtatgtacagcagattcactttgctgtgcagcagaaacgaataccacattgtcaagtaactatactccaattaaatttattttttttaaaataaaggcctctaagaccttgggaaggtggaggggcccccttctccctcaactcctccagccacacacacacacacacaggtagatggaaatatgaggctggttttaccctagaaattaagaggtcatgggcttgcttcctgcactgcctccagcaaccggttagggtctcaggtccctcttctgcagaaaggggggcgctcctgagaggaccaaataagaaccagatagagggagcccgtgacaggtcttcccagagcagcagtgctgcagagtggaaggagcgtgacagtcagcgagacctcaggttctcccctccacttctaggctgtgtgcgcccagg

SEQ ID NO: 37528 - DNA, 1080 bp, Bovine  19866880870720
  misc_feature (1)..(1): n is a, c, g, or t
nagtccatttcagcaacagtgtctccctacactgattcacttctcaatgacttagtaaaagaacgtgtcctctatggccttcccctcctccttggaaggggaatgctttgaacatgataaattcactccgaagttcttatcttcctaaacctttggatttcttctacatcatactgtggaagctatgacatcttaatctcattgattatagaataacactgaattcaaattttaatttagcaactaagaaaactcttagaaccacttatagttgactaagaaaacattaaatccagaatcttgggtaagtgcacctgtttcagtaactatagttcaatccagtattatattccattcatcttgatctaacatcactttgaatccattctcacatgtgtttccctgctactataaattagcaagagcttgaaattcttttaatgtaactgtctcctactgaagcataatttaaattctctcctaggggcaagcaatatctgactctaggtgttaagtattgaggcaatgagaatatgcatcaccttgtaaatcaactatcttggggggatcattatagcatcttaagcaggaaatgcttgtctcctcagagttgaggaggaggaggaattgattctattgacaaaggaagcaaagaaggattacagttgcaaattctcagattcatttgaatctgatagggacagagtaaagggacggagtaggtgattaaatagttaatcccattagggagttgtaagtagaaaaatatgggagacccctgtaagtttaatgattactcaaacaaacccagatttgtttaaccacaaaaccaagcaggcttgcttagcaacaaaaccacataagagaagcacaagacatgcctcaaaacaatgagagagtggtggcacgaaaccctcaccccgctcagtggctcaggaaattaggacgtgctctctccacacataaaaaacagtaatctgtggacctagcttgatcatataggaacaagaaaattcccctgtccaacctggaggaagaattgatgatggaagcctagtgtctactcaagaatgacaaaga

SEQ ID NO: 37529 - DNA, 855 bp, Bovine  19866880897682
  misc_feature (1)..(1): n is a, c, g, or t
ntcagacccagagagccctggaccactttgcctttaatctctccctgcacttgccatgcgactcgccatgactttagggtcaaatggaggctgggaggctagtatctcacccccagtagtcactctgctccccatgtgcttggttcacttcccttctggacccaagtttcccctcctgtcgagcccccacctctcaaagtgctctgatttcctctgtttacctttgtaaggagaggtttacctttgtttattaggagaagctgaagacccttacttgcgagatctgggtttgagtcttcatcccgctcataggtgtaggtcaggcttgggggtgggagagccctggacgggagccaggcgttgagtctcaccccgtaccgcagctctagctggggtccctgggcgtctccccgctgtgtgaactgggctgggctagtgatgacccctggggcattccgagccaggcttcctcccactgggctcatgagcctgtgctttctgtcctgggtgctgtgcccgtggcacgctgccctcctggcaggacctggcagtgctgcaggacaagttgcgaatctccaccaagaagctggaggagtatgagaccctgttcaagtgccaggaggagacaacccagaagctagtgctggagtaccaggcacggctagaggagggcgaggagcggctgcgacggcagcaagaggacaaggacatccagatgaagggcatcatcagcaggtgagggcggccgtctggtccctgctccaggcccagccctggccccacacgcgcagagtggcagacctgcccgctgccctccaggaggccccagatccccgggacgggctgctcagctgc

SEQ ID NO: 37530 - DNA, 1806 bp, Bovine  19866880906160
  misc_feature (1)..(1): n is a, c, g, or t
ntatccaatcgcatgtctccccagtgccttctctactctcaaacacctagaggaatcttagcaaccccctgggcacactctcttctctctcccacagcctgggccagtaatcagcagaatgatatcagtcacaactaccgattgctgaacaggcgtcttgagctgggtgctaagtacttttcatacttaaccccatcttttctaaccctaattccagattaagtactactataatgcccattttacagatgaggaagctgaagctccaagaggagacaagaagtaagctatgcatggtcacccagttggccagtggtggatctgggaccagaggacaaccagagacgtggatccaggtcctgggcgtttctctaccatctctctgagctcttccggctctcaagcctcctgcagtagggagctcctatctcagtctctgttttatgtctgctgtgttggttggaatattgcctacactgagttgctgtcttttatgctttatggtcccaacagaagctgcatcagggtggagtgagaagactacaggacttgtaggaagagaggagtgggttagagtctcagcttcaccatcactggtctatcattgatcactccctgaccttgattcctaatctcaggacacgcccattcccggctcactggatgcatgggaagtttccatgagacacagggctcaaaagctcatgggctttacggcaggcaccttaaacgacagatgctggggattccctggcagtcctgcagttaggacttggcactttcgctgctgtgatcttgggttcaatccctggtgctgctaagtcgcttcagtcgtgtctgagtctgtgtgaccccacagatggcagcccaccaggctcccccgtccctgggattctgcaggcaagaacactggagtgggttgccatttccttctccagtgcaagaaagtgaaaagtgaaagtgaagtcactcagttgtgtccgactcctagcgaccccatggaccgcagcctaccaggctcctctgtccatgggattttccaggcaagagtactggagataggtctctacacaggtttaaaaacagcaaaagacaagacacaaattattaaatgtaagaaatgaaagaagccacctctactaatcccatggacatcaaaggaataaaagagtattacaaatgactatgctcacaaatttgataatctagatgtagtggattgattccctaaaagacaatctgttaaaacccacaaagacaaatagacactctgaataggactatatagattaagaaggctgaattaataataatttttcaaaacaaacaacgccagccccagatgtgtcaatgatgaattctaccaaacatttaaggaagagattctctacaatctctttcacagactagtggtaaaaggaccattcctaattcactctgtgaggtcagcattaccctaatagtaaaaggagacaaacacagacaaaaggaaagctagagcacctctcatgaacaaggatgtaaaaattgtcaacaaaatattagcaaactgactccaacaatatataaaaataattatacacaaccaagtgagacttaatccaggtatacaagcctggttcaacattcaaaaatcagttagtggtaacccatcccatttaacaggctaaaaaagaaaaaccagatgaccatatcaaaagctgcaggaaaatcatctgataaaattcaacactcattcacaataaaaactctcaataagtaaaaaatagagtggaactttctcaacttgataacacatctacaaaa

SEQ ID NO: 37531 - DNA, 1490 bp, Bovine  19866880912223
  misc_feature (1)..(1): n is a, c, g, or t
ncagagctgggaagcggccccccaccgcggctagagcagcccagcggccgccagctgttgggggacagatgttgggggagctgagagaggcgttcggggaggggcttgcgctgggacctccgaaggagtggggcgttttaacctcttaaatgctggttctgttgttttcggcttcttcttctgtgggtttgcaaagcagggaagaagcagaaggcataggaccatcccccccgcaacttgtttgcttcatagaatctcttctctagggccctcaagtgatcgtcccgaacgcaaaacaagcgaacactggttttgagtgtcagcgccttgtctcactagcttcctaacattggccctcccactctgagctccggtttccagaaaaggggtagcttagcaatggggacaggagtcgtagtgaaattccgatgggctctttcgttgaggctcattcacgcaacaaataactgctgggatcctgctcggtatccaggagagacaggccgagagagctagcttgattccgtccctggcgcacagctccctccgcaaagccacgaatacccagatgtctgcgttcccggcttccgcggagagaggacaaggcggtgcgcggcgcccactccactccttgcagcagctgccaggctgtgcttcctacctccgacacctctccattcccaaagcgcctctgtgttttgcgcctttgccccgtggcgtgcgcggggacccagggaggggcgcgcacaaggcagggggaggcggacagtggcctcgccccctaatccctttggcgctcccttcgcagctcccgaacacccctttcttgaagtttcgttgtctctgccgccgatttcgctgcttccggaattcggcggctcgggcctagctgcccgcctgggaaaggagtctatcggtttgtcagagcctggatacgtagcctcctggtgccccttgtttacgccaccttccccgagtaggggacacgcttcaggagccgcccgaaacgcatcccaaactgcaaaatgactcccatccccatccgaggatctaaccgggaggatggtttcattgactgggcggagacacgacgcgcgcagggagatcctagagcaggggacaggtcccggcatttggggtgatacgagatgggagataacgttgctgaaaggtcgcctgcggttcccgcctcagaacaaggcgatggggctctgcgagcggccaatggaggcgcagaacgcgcccggcgtcgcggactcgtggagcgggaagatcagggatgcgcgaggagtcttggatgcatcctggcggaaaacgacgaatcctgcagagccaagcgctaggatccaggaatttaaactccggttctgcgcaccgatcccggaacacggaaaccgctggctggagacgcaatagcttcgcctgcatctcaaggccgggaccttcctctaccatctctttcaggatctctctacccgagcctgcggagg

SEQ ID NO: 37532 - DNA, 947 bp, Bovine  19866880914178
  misc_feature (1)..(1): n is a, c, g, or t
nctagatagcatattgaaaagcagagacgttactttgccaacaaagaaaagtctttggtttgatttaaatcaaattttcacaagagttatgtagtgagcaaagcctcaggtgtgtactgagatagtcctgagtacaaaatctttttttttttccaaagagttctgtttatgtatttggccacactgcacggcctgtgagatcttaattccccaaccagggattgaaccaacacaccctgcattggaaggcagagtcttatccactggattttgggggaagtccttgaggacaaattctgattcccctattgatttatggaattgggcaagactgggcagtatcgagtttctttgggcctcaggttcctaatctgtaaaatggggctaatttctacctaccttgcagaattgtcttgagaaaccaatgaaatcaatatatcaagtaagctgcttgacatcgagtgtgtacagtgtgttcagtcgctcaatcatgtccaactttgcaatcctgtgcactgtagcccgccaggctcctctgtccatggaatttcctagggaagatactggagtgggttgccatttcctcctccagggtatcttcccaacccagggactgaacccgcgtctcttgcattggcaggcagattctttaccactagcgccacctgggaagccccaggagtgggtctccgataaatactagtgattttcttttcagacagaatggtggtagggggtttttcacaggggttttaataaagcaaaactccattttatttgaaaacccataatagataaaacattacaggattctttcccctgttttagtgaatcaaagatacaccaaattcaattgtttttaaatgccccaaaggactagtaagcttgatttatattttctttaccagtcacttctatttcataagtctgacttttccattaaaatg

SEQ ID NO: 37533 - DNA, 895 bp, Bovine  19866880990978
  misc_feature (1)..(1): n is a, c, g, or t
naacccctcttcccaccctcccactactctgctggactgaatttctctgtttcctagttccctttgcattccacatctcctcctttctcagtaacagggaaatgcaatgacagagaaaaaaggagctggagacctgggcttgacgcccagctccactgtaagctactttcttcctctctgcctcagtctcctcatctagtaaatgggtataaagtggttgctgagaatccaatccgtctgtgtgtgtgaaaatggcctggtctgccagtgagtaaacgggagttcctgtcctccttccccgcgagctccagtcatccgtcccagctcctcctggagcccagcttctgtctaatcaggctgaagtttgccctccatcacacacaacttcctcccatttaagggggactgtgggtcagataaagggctaaaggaacacacacagaggagataaatcagactgcagggattataagaaggcttcacggacaaaggcacttatgacctgggccttgaaggacagggaggagggagattgagaagagaggcgtccaggggaggggacagcatgggcaaagggcaagcaagcgcaggcccccgcagtgcccgacaggggtcccgcctgaaaccccggacaggaggagacgaggctcgagagggcggcagaggccacggggcccgtgggccacgctcaggactcggaaaggtttttaagatgtatatgggtatgggtgaagagtttctcagagagcctgttttttgttttatttatttccttatttttggctacgccgggtattcattactgcaagcgggctttctctagttgcagcaaaagggggctcctcttcattgcaacgtgcaggcttctccttgcaggggcttctctcgttcagag

SEQ ID NO: 37534 - DNA, 1526 bp, Bovine  19866881020467
  misc_feature (1)..(1): n is a, c, g, or t
nagtgcaggcatttgccatgttccccaagggcacccagtgggtgaggggtatctcagctccaggattcagctacaacatcagctgacaattccctttgtacttatttcagcgctgcaaagcaaatttccgatcatcattgaattgttgttgttcagttgctaagccatgtccgattctttgcgactccgtggactgcagcactccaggcttccctatccttcactatctcccagagttttcttaaactcatgtccattgagttggtgatgccatccaaccatttcattgaattactgaataaatttccctgcaagaagtagaaaccctcatcagccaacccaggccttctggtctacctggcagtttctttcacagtacacagtagagtttcttgaccagggtatttagaggaaccatcaacccctaaaaccatgtgcaaaatggtgtgtgtgtacacatgaatatttgtgtgtgtgcatatgtgggcattttttgagggggagggttcatagattttgttattcctagtagaactgtgactctagaaaagagaaaggttaggaatcatggtgttaaaggaaaatattctcattcttatttgtacactgctctcttgcaagtttggtcactgtaaatcagtccttctcagtttgatcagcttgtgttcactcaccaaactgaggttctggatcctccaaggtactcccctgcttgaagagcaggcttcttggaccacatggcatcactcactttccaggcctttacctgtgctgttcctctggctggaaaccctcttcccacaccttggggtcaactccccatcattttttggatctcaagttggctgtttccttcttgaatcctcaggatgtctggttctggattaggtaccacttctttgtgctcccacagcatcacttccatctctctggtaccccacccccttctcttctactcttacccttcatctagggccactttttcccattcattgtgcttatgccatgatgcaattaactgtttatagtgcttgtctgctatttgccaaacaaagagttggacatgactgggcaactgaacaacatcaagaagctccatgaggaaggggtttgtgactagttttgccctgctttggtgcccagactaacagagtgtctggcatacagcaggcactcattagctgcagggaaacatgtaaagatgggtacttgaatcctttcagtgctacacttatgatctgtcacagttagacctctaacatcctctgccccactctatgactaggtatagacttgtcagccatgagaattccaaagagtgaaacactcacacgatcaagtttggtctttcatcagcagaagcttctttcccactaaatgcatgaatgtgtgtgcacgcatgtgcacaaacctatgtgtgatgagagaggagaaaacatatgccgcagagtttggaataaacatacctgcatttctcagaaagcgataattatagtccttgactatcctcgtgttcgggttataga

SEQ ID NO: 37535 - DNA, 1490 bp, Bovine  19866881037652
  misc_feature (1)..(1): n is a, c, g, or t
nagcgaggcctctgaattctggagtaaagaaatgtccttttgagcagataaccatcattccctccttttatttttattttttccttcctttggaaagataggagttactgtaatgtttccccctcttccttccttgccttttactactgattctcatgtgagctaaatttactatttattttaaagattgcagaacagtcagatgggctttctaaggaaccaaaggcaaatggttattacctggagatagtagaccctgagaaacttggccctctgacattagctatggattctgtggtctactcatcccttccctggtggctcagatgataaagaatctgcctggaatgcaagacacccaggttcaatccctgggttgggaagatcgcctggagaagggaatggctgcccatgccagtattcttgcctggagaattccacggacagaggagcctagcaggctacagtccatggggattgcaaagagtcaaacatgactgagtgactaacattttcactttctgtggtcgattaggtgagggaggctgtgctagaattgtgcataatgtttttgaatcatggtagcagggaatattttagatatctggaaagaagtgatcgacagccagacagctataagtaaatgttgtagacacttttagagacatcaacgcagctcacaacagcatgtccttctctgagaaccaccccagagagcaatctaccctccagtaaacctgctccaaggtgcagctgctgaaagcatgaatggatgctacaccatttggcttttcttttccaggaatttagagttctgaaggaagaaaccttgagtctggagatagttggagcttggtcatatatgcagacctttaggggaagttcacagttttcaactcttgaggcccctgtacttccctggctcttgcttatggcctggttgtagtgacgtgctagtaaatttttacacaaccactttctttaaaaaaaaaaaaaaaacacatggaaatggaaaggaaggggatggaaccctgatttctagtgtttgctgatttccatggtgcaaatattcccactgtggcccatatcaagctaccgcatgaagtcactgaacagggagcagggaagtattgcacttaacaggttctcataagcaggtatgaaccggcctcagtgtgccactatctggctgtcaactgtcccttatattcagtagaactctccagtagcctcccaggaacctccctttgggatttacacaactcaaggggaatgtcagtcctttgcaacgaaaatatctttaaaacacctagctagcataacccccttttattctgaacagttttgttgttattgttgttcttcatgataagtcatgtcccactctctgagaccctgtggactgcagcatgccaggcttccctgtccttcactatctcctggaatttgctcaaattcatgtccattgagtcggtgatgccatccaacta

SEQ ID NO: 37536 - DNA, 1418 bp, Bovine  19866881054021
  misc_feature (1)..(1): n is a, c, g, or t
ngccccactcccctcccgccccaccttttgtaagtatgtgaaaaggaaaaaaatgcaaacgttggagtctggccagagtgcctccctccagctgtgactctaactatgtaataatgtacagagaaagttgttggtgttctaagactgtgtggctgtgcaatttctgtacatttgcaattagaaatattaaagatttatttagctattttaagcctgactcgcctctccatgcagctgtgtctcgagcttttccagaggtgacccccaagtcatagactgacactgttctgtaccaggggcccccagcacttggttcaccccagtggcagttgagggcagggaaggaggatgggatctcttcctccctctagtcccccagagcgtgaccccctgggctcacctgtagtggacaccagcttctgccagactctgctgccccagcccctgaaatccggctccaggagggagggaggttggtccagggtcaccagcaggttgtgactgaactaaacataaaaaaacccctgatacctgagatgccccaatgcgtgacctccttcctgcccgcaaggctgaacccagggcctttgctgggaacaagccagtgcccaagcccctcggctgtacctgcacaaggtgaggactgcagaagaagcactcccctttcagaccaggcccctgggctcccatctgccctgttctccaccgtggtgcctcttcgcagacctcccagccagatgttcttgctgctctgagagccaccctcctatcccaaggggcgggggtgggaggtgccacagtgaccctctgccctggtcaccgccagctgggcagccctgccctcaccgttccatccctgcagtggcgatgagagaggcagccccggccacctgctttcatccgtcctcactcttcggcccctgctgctgctgctcacagcatttagaacaccagctctccacctgctcatcacctgctccaggaaggttttcttccctcagacaacgttttttaaagtgtactgcgtgcggggaccagccatctccacctcctgccctttccccagccctccgtcacctggcttacctgtcacacttctaccacctcatagccaaaccgtgggccgcctcagtgcttctgcaccactgaccctggtccctctgctggggtgatgctctgtaaatacaaaactcaaggaaatagcaatagatgcaacagaaaaaattttcttgttgacagaggcacttacaatgaagctacaggagccacgaacttccacatgtggattaaggagcatcggatagaaagcaaaatctgccagaaatgcaagaggaaaaaaatcaacaaaaacacaattgcatttgagactaacacaccaccagtattagtttatgacagatcaaggaaacattaagaat

SEQ ID NO: 37537 - DNA, 2957 bp, Bovine  19866881185060
  misc_feature (1)..(1): n is a, c, g, or t
ntttctgcctgctccgcaaactgctgtgttgggaaggttattttttgcgccgggatcctctcatctggaggttgggaaccagttggttctgttctgggatctttcggctccctgggaacaggagtctggtccaggtgtggaggcggcggggaaagggatgttgtctgattatgagcctggagtcaagccagccagggctggggagggggcacagctgagctctgggaggtccgagggccatagatttgagcctttatacttatttccctgaaaacagcctgggggaggttcccagctggtctccaagatcactgggcccctcaacattcatttcttctttggaggttctggagataagcaccaaggacaggtaatcgttccccgtggataatagaaatgaatgccgctccgaggcgtcccaggtgaaaggtgtgctggcaaaagcttttttttttttttttgcagactggaaattttcctgcctcatttacaagacagttttaatgttggtaaaagtgatcttggatgtggtgtttctgccctcccagaagataatttcaaagtcactcatttatttattaatgttcctaagtagctgggagggtcagctggcaatacagtgccttcctcatttttttccctccgcggtattttctctgggtgatgctggccctccacacaggtgggcaacccaggtgccggtacccaaggctgatcacgtggggagcaagggcctgaccaccccttccagggagtatgtgtgttgctgggagttcccacacctgaaagttactaaggtaggattccgggcagtgtaagactaagggagggagataattgggaggtagggatgagggccttcagggacccaccactggccctgagtaggcagaaatcagttctgtccctttgggtgaggcatttcttggagcagggagaaggagcttggtgaggaactggagaaaatggaagaggggatctgttttctgttgacagtagatgcaagctgggctgggcacccaggcctgggtgttcttgactctctccctcccctgctgtagacagcgagtgcctggtccttctccgccttctcttgggtgatctcaagatgatcgtgcatttcagtgtctgggagtaatgggaagtacgtgatctttggatttaaagccaggcagttcctggggcaagtcaccttaactgttctgagcctcagtttgcccatcagcaaaatgggtctgatgataatcacgtcgttggaaacattaatattaatatattcatcgtgcacttaatagaaaatgtcctgttcagtgctgtttccttggcaactaacactgggttttgcacatttctgaaatgtttctaaaattttattaaataagttataacacatgaaagcggttagacagccgtgttgtaggttttcagtaagtggaagttaatatttggagggaaaagtcagtccgtcttggtaagcctccgttgtcttctctgcagtgtgggaataataatgtgcaatcacgttattattattcaagagatggaactagatgctacttgtcccttgaaaggtgaagagggcctgtgtggaggatcacagctactttgaacacaaaaaatagccgagtagaaagaccctgggacttgtctgcacccgagaaagcaaacctgttctatatgtgttttaaaaatcgatttttgatgtttggaccatacttctttttagtaatctaggcgtttatgttatgtctagtttttctttattaaaaatggtgctggtatttaatccttaaatatgcatcatttgtctccatctgtgattgtttccatgagataaagtcttagaattactaggtcaaaaaataagagcagtttcaggcttttgataagtatgcttcccatcgagagcctgtagtaatttacactcccccaaagatttttgagggtgcccacctgtttcttcgcgcctttgaaacattgggtgtcatcggtaacacgatctttgtcgtttgtgtaggcagaagagtggcatttctttgttatttgcgtttcttgctggttagtcactgaacattgttttcctgggtttaatggccagtagtgctgtgctgctgctttaaagtcttgtctgttcctgtcctttgccttctgaatgttctgacaagccctttgcaagagtcttccttgccctgtttggccttccttggttccttcaccaccatccatgtaggtggatctttgttaaatgggcctctgccttccaagtggtatggcagggaattcattaatgacctgcaaggagtgctccccagctccccctcccctgctctgctctccataagggaaccagatttaattcttaatccgataattatcgtaaggaagcctggcacttacacagcactttgagaggtctgttgctgtgcagcgccggtaagcagtgcaggggttgttagattcagggaaactgaggcacgtgggcaaaggcatggtggtgggaccgtccccagaagcctggccttgcgtccaggtcccagcccccctgcagcgtggtactcggagccccatgggcacctttggggcagggctgactggagccttgccaaggagcacgtgattctaggcttcgtctctagagggagggggagccacagaacatgacccggacgtggaaaagaaccaatttatttctgctttctcgtttttatcaccctccttttagatctgcagctccctcgtgtgtatcttccagagatccgagctgggcaatatttttaggaatggcggaaattagctagtaaggatgtgatcagccccaagctggggttttaaaggctagagaagccttttcctgtacaggtggctgtaggcatgtacacatgcctttgacatgcacacgagtgcacgtctttatatgtcttacaagtatgcatctgccctcatgaaggtgtgtatat

SEQ ID NO: 37538 - DNA, 1231 bp, Bovine  19866881301788
  misc_feature (1)..(1): n is a, c, g, or t
naccttcaaacacgactcttcactttcaacttcccgaggaggaatcaattggctgtcaagtttcccagcgcctctgccacctcccacacccaggccctgccagctctcctcaaggtcggtgggagagatgggggcagaggaaggagggaggaaggacccagcccacaccagggggaggtgaggtctgcccagggtggtgggctgaagggacacatggggagaccagtagcagtcctcatctccttatcctccaatcacaccatgaattcctcacacatggggtggccagtgagcggggacagcctgctgctgctgctgagggtcctggggcttcggggtgaggagtaggtccacacagagcccctggacccaacccaacagcttatgcagatcccagtttgctgcctgcctgctgtccctgcctctgaccctctctcgtttccaggattcgctgctgagaagacagagcggtgcttgaactcagcctcaccatctctttagtgttagtcgctcagtcgtggccgactctttgtgaccccatggactgcagcccaccaggctccactgtccatgagattttccagacaaggatactggagtgggtttccttcttcatctctttggagcccaagaattggaggccagtgatgggcaggaggtccatttggtcccctgttcccagctccttccccatcctgccctcatccaaggccccacagagctctcagggtcctgactggatggccagctggcactgggtgacctggagaaatggcgcccccacccccaactccccttgtagggagaagggagttgtaccaggcaggcgaaaggttccgtatcttgcctaggtcacaatgctggcatgagactcggtcccaggtctgctgacgttacggctcattcccttagtacatcaaaatgtttaagcaccttttgtatggccaaactacaaaatccactccccctcttttatagaagggtaaactgaggctctcccagggtcacatgatctccaagagacagacatgcgaacaacactgggtccctgatcccctgtggggcgactttggtcctaggctgactcacaaaaggggtgagggccagcatgtggggtgcaaacagcccagactcaggagcgctcccaggtgagtggtgcccaggtcaagtccagcccctccccggcctcagtttgcacagaggaggtagatagaatgaggcctatagatcc

SEQ ID NO: 37539 - DNA, 1468 bp, Bovine  19866881329515
  misc_feature (1)..(1): n is a, c, g, or t
ntttataaaatataaaaatatatgcctataagaaatattggagtcaaattcttcaaaataaaaagtcattgcatctcagtggtgggatgataaatgggtttttttctattttttgcaaatttttaatatttaagcaatgtacaaggatgatttacataagtgataaatatggttttaaataaaactaacaaccaggctcaaagcccagtcctgcactgaacgatttcagtaaacaccaacttccagtggtcttgcttccaagagccaggaaatcatactccacttagggaaacagtatgatccactgaacaagatatggccagagagccaggactctgccctcgaattccaagcagtgtgtgacttaacacctttgaagaaggggagagttgaaacagatgacatacttactgcatactgactttggaatacggttacgtatgttattaacgtgggacaagtatcacaatgccccctgtgacagactaatagtggtggggattcaaacgcaaacctaactccactccacactgacacctgtgaaacagaaataaggagtctaccatgcttactgcacaaagtaaacgtcaactgggataaatgtatgtgacagtcccccaaaaatatctagttccttgaaaggtaagactctaacgccctccactgctgctgctgctgctaagtcacttcagttgtgtccgactctgtgcaaccccatagacggcagcccaccaggctcctccgaccatgggattttccaggcaagagtactggagtgggttgccattgccttctccgatctatggccacacagctgacaaatggcaagactgagcctggaaggtagatgttgttcttactaccctctgcaggcagccagttgctaagccccatgggcctctggcaggctccaaggtggaaggggagtttggttttcgattgtggagaccaggtgtgcaggaatggcctaatctgatatttcctgtttaatgccaggggcacttttaaataagacactgctcctaggggacttaattgagactatttgggtctggggaatctgagggatttgttcatttctattatttttcctgcttttctagggatagggagtgggatggccagtggtgagtaagaattaagaactactttccaaaaaaaaagaatttctttccagacataaaaggaaagagcagggatatgagagaaaagtcttgttagcagtatttgtatttttattgtttttgtttgttacaattgctatttgtagaataaaatagcaatatatacctattaatttttttaaagtatataaagtaaatgaagtcattcgatcatcctaatctcatatctgagagataagctattgttcactattaagccttcttccttaatttttataactaattaaacatatggatgcttactcacatacatacatacacacacacacatttacactcttcca

SEQ ID NO: 37540 - DNA, 2161 bp, Bovine  19866881335670
  misc_feature (1)..(1): n is a, c, g, or t
nggagactgtagggtccctgataaggagaaataagatagtattgagggacatgggccaggagaaggccagattatgtcaggatgccagtaaggatctgcgttttggttaatagccgtttaggagtcaccgaaggttttcttaagtagttaatttggttgtgctgggtcttagctgtggcatatgggatctagttccctgaccagggattgaaccgggggccccctgtattgggagcatacagtctcagccactagaccaccagggaagtcccagcattgaagcttttcaaatggtaggggcacggcacaagttggagcgtggtccagagggcgagagggtggcaggagaccaatttggcagcagtattaataatccaagcccagggaacaaaaacaggctaggaacagtgacagggagataaaagaggaagtaacagacgtgagaggttatagaaggacttggtgtgggattggaacacggagagcagtgagcggaaggagccacaggagcggcccatgttttgacactggaaggatggagacaccattccctccgatagggaagacaggaacaggcctggcggagcaaagggggcagataaatttcctttgggagcgtaaggagtccatctcattattcttaagccaagccagcgggaagattttctgactattatttgaagccccgctcggagattctttgcaccaactgctttcaaattgttccatgaccttttacctactgaaattgtaaatccatctgtggcatgggattttaggaattctgtctttacttaattatgactcttcagccctagaaggctgtgatgtggtgtaattccatcaagaatacaggaaagccagaagtgagtttctttgttcaaggaattcaaagcaaggtaggagggtggtgagcttctgtccaacttgggcaaaagttaaaacatccttgaattgaatttgaagccattaacagttcaagacttgttgctctggactctaataaagaggtgatgaactttcagggagggcctggtgttagaccctgtagctagatagattaatcatagatgctatccacagcatggtttattctctcgttacccaaagtgtggtccatggaccagcagcgttagcatcaagaaacttactagaaatcttaggtgccactccaggcttatggaattagaatcttcatttaataagacctaaggtgatgtacatgcagtcatacagattaagaatataggctttgggaatttccctggtggttcagtggttagaattccgcctcccaatgcagagaacgtggtccctggttggaggactaagtttctacatgctgcaggccaactaagcccacgaggcaactactgagcctgtgctataaagcccagagcagacaaaaaaaaaaagagaagagtatgggatttggaatcagatgtatctggctttaaatctcagcttagccatttaactaccaaacctcttgaacctgcttcatgtataaaaccaatcagtggccctagactttggtttcaccttaagaactggagagctttccaaaaccaccatggcctgggcatactgcagaccaactacatcagcatctatcccaggcaggctcctgacgtcagaatttaaaggcctccaggggattccacgtctgaagcgacttagcagcagcagcaggggattccaacgtgtaaccaaggtggacagccactgatgactttgaaggacaagggtgtggccatcggaatcaatcttcataatgtattccaattctactatttcacatacgaggacttaagtttccctaagcttgagctcctccatctatgaaatggcacgacatgttagaaactctaagggctctgggcattgaaggagttgacacatgtagccacgatgcacagtgctcaatgagtattttgttgttttttatggaaatggcaacccactccactgttcttgcctggagaatcccagggacgggggagccttggtgggctgccatctctggggttgcacagagtcggacacgactgaagtgacttatcttaccttaccttatgcaagtcccagcttcctttgcagaaagaacctaggaagcaacacttggttttgcagttatcacatgaacgccagtctgtggtca

SEQ ID NO: 37541 - DNA, 964 bp, Bovine  19866881575820
  misc_feature (1)..(1): n is a, c, g, or t
nccttcacacactcacgtcttagagtcagagttagttgtttgtttgcttatgatggactgtctcacccaccagagtcccagtgccacaggtaagggtgtcctgccctcgtttaccatatcccagcacccagtcagtgcctggcagaccgtaggcattcaacaaccatttttttgattgattaatgaatgagtgagtgaatgaactaatgaatgaatgagccaaatgaatgaatgaaagaaactgctcagatatttgacgataagaaaatacttaggcaaataatggcaaatgtcagccgcagctttagccgtgtaggataaacatcatcctggtgatgtaacatcaaggaaactagtgcaagcctggtaatcacaatgcttaaagactgctccgagtaaacaaggcctgggagaagctagagacaaatgagaacagctgtgatgctggagtcatgagatcttggttgagatttacctctcaggtttggcaaactctatccatcctctttctagaggtttctgttgtgaaccagaaaggcaggctaagtcttccacggtgacctagtatccatgagaaccctctctgtcctgagcactcactgtactaagcattttgcatatgttgtgtcatttaagcttcacagcagccctgcgatcagcacattttacagatggtgaaggaaattgctgcccagagaagttatttgcctaagtcacacagctcataaaggcaaagatacaattcaaactcaggattatctgacacttacacacagctcccaaacccacactaacccccacaccaagcctttgttcacaaaacataagccacatatgtttaaacataactgtgtccatatatatgtatatgtatttataccatatatgtgtgtgtatatatatatacatatatatatttgtgcttcccaggtggtgctagtggtaaagaacctgtctgccaatg

SEQ ID NO: 37542 - DNA, 1283 bp, Bovine  19866880098748
  misc_feature (1)..(1): n is a, c, g, or t
nagatggctggatggcatcactgactcaatggacgtgagtctcagtgaactccgggagttggtgttggacagggaggcctggcatgctgcaattcatggggtcgcacagagtcggacatgactgagcgactgaactgaactgaaccatacttcctaatgtggcagaaacccttctcagaagctctccagattaattgaatcggtttgaattgtatccacatgtccatatgctattgtaatctcactgtaattaaaatatattattgactatttaaagatttttctgcaactaatttctcataatctaatctagaaattggaaggatgaagtgatgactcctcaaattcattagccttagttggtatacacttaggaaagcaaaatttaggatctttagaaatcaaaaccaaagttcacattgctagaaagttgtacctctgtccccgccctcctccagaatatcttagtccacatttttttttaaacaaatagatttaagtgaatatatgttctgcctgcaatgcaggagacctaggtttgatccctgggttgggaagatcccctggaggagggaatggcaacccactcctgtattcttgcctgaagaattcccgtggacagagaagcctggcaggctacagtccatggtgttacaaagggttggacattactgagtaaataagcacacacagcacaatatgtttttatggatattatagattctcacagtcacttctaacagttttcatttaaatgcacagtggttagctaaactgtctttttgttagtgacaaattgtatagcaaagaacacaaactttagagtaaagctctctaaggtcagatttcagctctgctgctctaagaccctaggcaagtcacaaccttgccttggctttctcatctgtaaaacagaaacactgttaccacttgtttcattggataaggaagattaggtaaattcaatatgagttcttagtagagtgtctggcacaggggaagaactatatggatgtttgctgttatcattgctaactaaattcttcctaagagctttgccctaaaattagaatgtagaagagaatctcaatatgtttttatttagaaatttttaagtttgaatcatttagtatattaaactcctttttgatcttttgtgtgtgtgtgtgtgtgtgtggtggtggttttggttaactttagtaatttcattagtacatgggaaaatttaagggataaaccactgaataaacctaaggcatcccaaagtgaagggggcaattaaa

SEQ ID NO: 37543 - DNA, 718 bp, Bovine  19866880129992
  misc_feature (1)..(1): n is a, c, g, or t
nctgggtgttcattggaaggactgatgctaaagctgaaactccaatactttggctacctcatgcaaagagttgactcactggaaaagactctgatgttgggagggattgggggcaggaggagaaggggacgacagaggatgagatggctggatggcatcaccgactcgatggacttgagtttgagtgaactccgggagttggtgatggacagggagacctggtgtgctgcgattcatggggttgcaaagagttgaacacgactgagcgactgaactgaactgaactgaacatgacgtacagatatatgttgcccatgagccagagtttgaaaaatattattataaaaagcaacaactttattgttaaaaaataaataacacactctatagttacaaaaggtctcaataatcataggatgttaaatttttaagagactgttcagtttgaaagtctcttttccactcttttaatctttcttcaaaacattttattttatattctaaataacatgatgtacttttagtacatgcacattttgttcaaatttcaatttatagtattctcccttgcttatcgcatattaaaatgttgcagaactggggacatggattctgaattgtatttccacttacccatgctctccatattcaagggttctgcttcttcactaactagaatataataaaatgatgttaaatttacattttgaatcagata

SEQ ID NO: 37544 - DNA, 1688 bp, Bovine  19866880410169
  misc_feature (1)..(1): n is a, c, g, or t
nactcccagaaataaaacggaaaagtgttaggtcaaagaatatatatatatattatagatatgaaactcatatatatatatatatattttttttcccccagattttgataattctcgtaagtagctcatgaaagggacatatcatactgattttcccgcactcctgcttcattcaattataccaatctttctaggttttggcagtttagcttctgactatctggatccaggccctgtcctaaatcctgaccactggattcttggcactgccccatcctgacctctgcatgtctctgtctgcctggtgatagagcccttagatttcttactcccactttctggtgaccagttgcctggtgcaggagcaaagatgatagacccattgcttctttgggcttcatacagtaatcagtatcccatcttgtattttaaggggaggggaaaaacataaaccaagtgaacagctcacaacaagtatttagaagacaacactggtttcagagaacaaaagacttgtaaatgtttcctgccttcagggatgaaaagcaaatggttgtgttttccaaaggcttgtattggttccgctgacaggctggggcccaggccatctgttccaatatttctaaaaagcatcccaaaggcattgttatgtcagaacagtctgttgttcctattgtttttctcaatagtaaaggaccacacacctactcctccattttgcaggcaacttaccataataccttctttccagatggctacgttccaacccccaacagtgaggataatgtccttgtagaaaggtgacctctgaacggtgtggacagctccatcatggactgtgtagaggctcacaggcttctttgctgttggagtggaaaaggccatttcatctttcataacactgtttacattcctacaatgaagaatgggcagatctctgatggacagataggtcctgattaatgaggtctgagagtggagaaccagagatcagttgaggtgaatcaatctgtcaagggacagctcctccttttatggaaagtccagggaaattcccatcgaagccactttggaggctcaaaggaacactttctgttcttattcatttactcatttattaacccatcacttagtcagtgttatagattgctagtcaatagatatttgtggactgtttgtacgtaccagctgctatggatggctgggtaaaaaatggttaataaacaaacatgatctgccctctcagaacttaaaatccagtggaaagacagatactccacaaacaaatcccaaggtatataataagaaaatgtgaaatgtattatgaaggaaaaaaatatcacaagaaaaaataacaagggacatttcgaaaggattctctgaaggtgagtcatttaggcctgagttcggcacgggaagattttggtgtggagtaaatggcaccccactccagtactcttgcctggaaaatcccatggacggaggagcctggtaggctgcagtccatgggattgcgaagagtcggacacgactgagcggcttcactttcacttttcactttcgtacattggagaaggaaatggcaacctactccagtgttcttgcctggagaatcccaggaattgcagagcctggtgggctgccatctatggggtggcacagagtcagacacgactgaagcgacttag

SEQ ID NO: 37545 - DNA, 2425 bp, Bovine  19866880452428
  misc_feature (1)..(1): n is a, c, g, or t
ncttgtgacccccatggactgtagtccaccaggcatcctctgtccatggggtttcccaggcaagaatactggagtgggttgccatttctttctccaggagacctttccgaccccagggatctaaaccccatctcctgcactggcaggcggattctttaccactgagccaccaaggaagcctagaggcatgttaatcaaaggagtgaaggaaatagcagtctaaagctttcgtgttcactgcaagcccaagagaaacctcccctttcccacactgcccatgtggagttgggctgggaagttttatagaagctggttgcttagggaggtagaaggcagtaggttcctccaagacagacacagagactctgagagacccctcccctcgagttcagtgagatcatccaccaggtctccaaggcttggcaccctcatagggacactgccacatccaaggacagcacccacactgcgcaggcctggctcctctccccatgaccagcccccctgcagccaaccacccattcctacaggaacatgtgtccccttctgcgcaaaatgctcaggagtatttccaacggactggcttcttctgggaagcttctgagaagcttcaagaagagtacaacaccacaggacatggacatggaatccctggttgctcagatgctggccccaaacagggtgctggctccaagcacgaccacctgctgtggagacatcaccgcccgagtttacaggacttccttcatgctacagatcagttaaatggacccagtctgaaaggacacagggtccactgggtagcttaggaaggtaggaagctaaacagccacaaaagccttagatttgtaacttaaaggaaacctgcatcacacgagtggcttccagtgtttgaggggtgcccacatctggacagttgtcaggaagatggtcaccccttatcaccgaaacttagcactcaaagccgaagttccaggacaggcacgtacgcctgtaagcactaagatccacagcccaactacctgatttaccaaattcagcccatccttacggggcttcccctgtggctcagtggtaaagaatctgcctgcaatgcaggagacaggggttcgatccctgggtcgggaagatccactgaaggagggtatgacagcccactccagtattcttgcctggagaatcccatggacagaggagcctggcgggttatagtccatagggtcacttagagtcagacacaactgaagcgacttagcaggcaggcaggcccatctttacccatttcctttctcttttccactatacctccaaaccagtccaccccaatctgggcaccaaggacaatgtcctaaatgcatatttaaaatgaacccccagcatctaaaaagtttcttttctacaaaatctcaaaaatctaagtaaaactatagtattttaagtaagtaaaaaactacagtattttcctatgttccaatctatacagaatttgcaatagtttttggtaggaaataatgataactgcttaccttaatggtgtcataagagtctgtaataattgcaatgaaaaggctgagaatcatgtatatgaaaaggctgatgaaggaatataaatacaggcgactgaacagccacaccaagtggctcttctgctggatgtgagcaaaggtcgcatacatgtcatcaccgttgaccagagaaaacagacactcggcaaccgtgttcagattttcaaactgtggaagagggagaccaaaagtagtctgagatatgctagccaacgaagtagagaagtatctagttagctggttttgttgaagacgttgttgctgccattcttattacaattgacattcactttagggcacctggaataccatgcattgcaaattgttactcaaaactctcctctacattcacaaagataatttcttggcacctctctcagttttttccctttgcactctttctgttgttgttgttgttcagatgctaagtcatgtttgactctttgcaaccccatggactgtggcacccatgcttccctgtcctctgtctctcagagtttgctcaaactcatgtccattgagtcaataatgccatccaaccatctcatcctctgtcacccccttctcttcctgccttcagtctttcccagcatcagggtcttttccaatgactttttatatatttgtgatcatgtcacctgacaattttggatcagatttttctttcttttctacttaacacagtcttgtattattcatacccagagatgatttgttggaaatgtcaactgtaactatttccctttcactggacatcctaatcatgtttgctcttgtaaagaacaatgcaaatcacacttctcggcactgagttttttcctattattaggtctcagtatcaacttttttttttttttttt

SEQ ID NO: 37546 - DNA, 825 bp, Bovine  19866880556450
  misc_feature (1)..(1): n is a, c, g, or t
ncttggctttgaggcctcggatttctctccagtgccaagagtcccttcacgaaaatcagattttttttttcacctggcaattctatcactttgcagttggtgggtttcgtccacaaaaattgtcttctagaagataaaatccagtagagcactacccagtaaaagctacacagagaaccataattcaaaatcccaggccagtaatcagattcactccagatccgaccgcaccattctaaactctttttttagaaactagaaatacttgttttggaaataaatatcttttgggaatgtgttattaacttcacgagcatttctctgtggataatcaaactaatcagatactatttgcaaaaggaaaccaagattatagtcacaaaagaccaccatgagtgacttcgttaaagtaaaaatttcagaaaagatctattgtttcttcttaccttgaagaaaatgttatgctaatatgttctaatataagcaaacccaaaagtatgaatatcaacatagataaattagggaattattttagttgctttactaaggctttcagtatataatttatataagtagataataactatggtaggatgcaggtagaatttgatttatttaaaaatgtagctcacatatgatattttttaattattgaaaaatttattatacattcagaagagtgttataaaacataactaaacagcttaaagaaaaataataaaatgaacacttgtgtatttattacacagattaagcaatcaaaacttagaagacccatgaatacccttcctcactcatagtcttcccataggggtaactactcat

SEQ ID NO: 37547 - DNA, 2120 bp, Bovine  19866880598810
  misc_feature (1)..(1): n is a, c, g, or t
nttaaaagcttcaattaacatttattaagatctcaaaaatagcatttactaattttagattaattaagattaatcagatgcttttttttttcagatgcttttaaaaagataaaagttacagatgacatttgaatttcaccccctagtttagctgtgctcatactgtttacatggagaactatgatatagtataatcattgaagttctcaaacaataaacctgaaataatcagccagcattaaataacgttcaacatgctgtatttatgacaaacacaaataacacgttagatggatttagtttttttttttttttggatttagtttttagcagttaaaaaatttacacgtgaaaggctaaccttgaattatttttaaaaattgctatatgatgccaactgcataaaaataatgtgaattgctcattagagattgtcaagggtgttaattcaagagaaatatcaatgctatctcttattgagaaaatccaagggtgttatataacctagaggatgtattttgtgtccagtatactgtcaataattctgagataatatagatattgtagaagtgactttcagactgtgccatggaaacttttagagcccctgaaaagtgggcagaggagtcttccctttccagtgtgtggaaaaccagagcaatgtggctttgatcaggttcaaaggcaagggattccatataaactgtggcttgaaaaatgcattctactgctaaattagaagtctaaaaattcttggacttacgcccaccacactggggaggaagtagggtggatatgtgtgagaaaggacagagaacataaactaatcatattttagaagatctttcaatgtaaatatgtgcttcttctatccaaatatctctaaaagaaaaaatattagcccagagcaaagcagtgaaggcaggagaaatgaacccataccagaatctggagaatgcattgagcaatattctcaagccaatagatgacttctgcaccaagttctttgtgggaacagaggtgagttggaattacctgcttctaaaattagcatttaaattacatttaaatatatgattatgacctctatagtatgtttgtcttatgagggcttacaatacattttttagtcttctatcttttggcttacaatatttatcctgttttcatatttttatatgcttgcttacatttaaaaattttaacctcaatgtctcataggttcatatttgaatagtctatcaagttcttagatgtctttaaattcataaatgtgaacagtctataaaattagatatgactttctactaataaaagactataaaagtaagtatgactctttttactaataaattaccaacttgcaaatatttatcaaatacctataccatatggaaaaactatgctaagtgtttcagatttactaagaaaatatattgctttgttaggccagtacaatctaataggagagtgaaaaactcactcaattcaaaaggtaaatagcaattggatatagtaacaataatgacaaactatgcataaacatgaaatttaccatcttaaccatttttttgtataccattcagtggtactaagtatattcatatcattgggtaactctcaccaccatccgtcttgagaactatttcattatcccaaattgaagttttgtcccagttaaagcagtaactctgcattccctactgactccagctcctgcgaccacaattttacttactttctcaatgaatttgactgttttagtagtcaaatgcaagtggaatcatataatatttgtctctgtgcacaccaaagttttataggccaaggatgacagcttcagaaagaaaatctttaagatgatttatggacggaggttactgacattgtacaggagaccgggatcaagaccatccccgagaaaaagaaatgcaaaaaagcaaaatggctgtctgaggaggccttacaaatagctgtgaaaagaagagaagcgaaaagcaaaggagaaaaggaaagatatacccatttggaatgtagagttccaaagaacagcaagggagagataagaaagccttcgtcagcaatcaatgtaaagaaatagaggaaaaccatagactagg

SEQ ID NO: 37548 - DNA, 1188 bp, Bovine  19866880602336
  misc_feature (1)..(1): n is a, c, g, or t
nttaaagaaattctgcttcctctgaaaataataatgtttattctttatgcaatggatctcatccctgtaggccatgacagcctagtgtgcttcaaactttcatagagattgggttatacgttcatcaacatgtgcccaaaatattgttgcttcttctgggtgtgcagaaaacgactgtgctgtcttacagatgaattgtatatagagagatacaacttgtagttagtgctaaagatcatgtttaccggaacaagcaaaactcttgcagacgatatatatgagtatgaggccaggggagggaacagctcaactcaaataacagtgctgaagggcaatgtggtaaacacaaaaattctcaaccaccaagcacttaccaaatgcttgactcaataaatctgtagtatgttgagtgagtaacttgtaggctggactgggaactgtaaataccacttagagccttctttttgctgggaaatttgttccaagttccaaacaacttattagcaaagggattttggcaactcattatgttgtaacttgggaacttcctgaactggagcaacgcaaagtggaacagggatcttgtaggccagatgtgattacctttgatgtatgaatccttaaaagggagaaaggagaaggaaagatggtgaactgtgttgcaacaggaaaaagacattctaactagatggtttttaataaatctgagcagaagacaaggaagtgatgcgagaaagatatgcagaggggatggggcaggaagaacagctagtttattgacctataggcaggaacaggaaaaaggagacagaacacaaagggcaagtaaagagacaaatgtggctctaaattctagttttttggagggattatccaccagattctgtaaatccttgtagggcctagagtgtctcacttttctaaaaaaaaaaaaaaaaaattttaatcagtaaaaccaaattaaaattaacagcaaaaaatggtaaacacaaagcctgaggatatactttgccttaaagatcactggctggaaaatcattcaaaactttttcaacaaacatttgctgatcagcttcctgtatacaaactggtctagtttatgttcctggagacccaaagatttataacattgtttctatgaggggaaaggcaggccagtgtaggggatggattctacaatacttgata

SEQ ID NO: 37549 - DNA, 1830 bp, Bovine  19866880603421
  misc_feature (1)..(1): n is a, c, g, or t
natgagggggagcatttaggagaagacgacagtctagttctaagcagttggagagactgacacactgtactttttagcttctgccttcttatggtggaaaaaacacacagtaggtccatgtatcagttctttgtcaacgaaaaattagttcttgggaaaaccagaaaaagaaaaaaatgcagttttgttttttttgatatatgttatgggtagaactaagctttaggattgagaaatgcttgttacaatacccagtgttataccaaactaacttttgttcattctaaacatttagtttatataattatacgtataagatgttttaaatactacccagtggatatttcagggaggttatttttgttcccaatcaccaaaaatagcaagttttgtggcagaattcttcttttaatgatgatgatgtcattttcagtaaaaactttaggtaactgattactgaatacaagcactgcagctgtttgggaattttctaatgaatgcatgagcataaaaacatatgttttacatttttaaaagggatttaaaaagcatagtcagtagagtaagccaaactaagccagtcataaaaatacgtaatcaaaatgtcaagaattaacaggattagttttaaaaaccaaaaagtttctttctcatatatggtagagaatatcttgcttctactcataaaattcataattatttaaagtggaagatttttaaaaaatcactatttactgatagtgggcaagtaccagtatatatgccaaattcagaatttacctttgtcacagagataggagataaacatgtctgaccaccagcactgaaattgcagaaaacctcaatggcatctgaagggcatccaagatttggatcaatccagtattttcctgtttattgtgaaacaaaaacgtttaaatgacatgctaaaatatttctgaacaatccttaaaaagtatcatacttaaaaaacttagaagtttatgaagatcatacatttaaatcaatacatttagtgaaaaagtaaaagctgcaagcattatgttaaactgatagtgaaaatactatatttttcacatacctatcaatttaaggccatttcataattttaataaaaaataattgaatggctatatctgttacttcatgctatagataaaatgaactcagcaagttaagtgaattgtctacaaagttaatagagaagctgaaattaatgtaggataggtgtgtatttttgttctatgtccttacagagcttaaaaatgaatatatatattttaaaaatagaaacctctttagtctccctgaggaaaaatatatctttgtttaattgataattaaaaagaataaccatttttgtttccagaagaaaagtgtacaattaaatggttatttttgtgctttcttttcagatttgtgagtggaaaagactgaagtctctatagctagtgtaagcctgccaacctttgcatccattgagtggccaggagaatcaaatggggcataaagttggactttaggacatattcaaactgaaaagtactggggtagcatcttaattctggaataacaggctcagaatattcaaacagcaccttattctaaatgcaaagagtaggaatttttgaatgagatggccctgccttcttgcattaaaaaggcaagacaaaacacatagtatttgttaaaggccattttctataataggtagaaaacccttgtttgtttcattttttttcccatagcaaagatttcctcttgctcattctgggcttgccctggtctgtcatagtagatttacacacatcctcgaccattccccctcta

SEQ ID NO: 37550 - DNA, 835 bp, Bovine  19866880642428
  misc_feature (1)..(1): n is a, c, g, or t
ntaaagaaatggaaagagaagcaactttaccttactaaattttgctgcatattttctaccttcattaaaatttggaccccagtctgacagcaaatgtaggctttcaacctgaaataaaaaagtcatattaaaggaagtaaaactgctttttggtgtattttaaaactgtgtctatggaaaactaagcatctatgagtagctaattataatacttaaaatttacctatccaagcacagaaaaagtgttaaagatattttctaaccaacaatctaagtgtaaaaaaaattatctatcttctctctgtacacattaatcttgctaatttatttaattttttaaaaaagtatccaatttgatcacaggtattttgccttattgttaaatatatgaccagtaataacaattagattgttcgtagcaagaagaaaggcttccctggtggctcagtggtaaagaacctgcctgctaagcaggagatgcaggtttgatccctgggctgggaagatcccctggagaaggaaatggcaacccacttcagtattcttgcctgggaaatcccacaaacacaggagtctggggggctacagcccatgggattgcagggagtcagacatgagctggatgactaaacaacgactacagtaaaaggaaaagaaacatggtagcggtcccaaagacactgtgtggtatgcaacatagatagggtttgtgtcaacattttttatgaaaagcagaagataagatttaactagaactgaatcagatgctttagaattcacccaatttaaaatttaaaacaaaccaagcatgactatcttaagcaggtatcacctg

SEQ ID NO: 37551 - DNA, 1273 bp, Bovine  19866880663412
  misc_feature (1)..(1): n is a, c, g, or t
natcacattttgctatacaatatgatttgtgaggatattttctttcaaaatacagtcatagttagaatttataacacagaacaactattatagggggatagagatacctagtctacataggtgttttggaaatttttgagaccatatgacaaatggaagccaaagtggttttctgttttgatttctggctcctattaagaatcattaaaatttttgatattataatgctgccagtaatctgatgcagaatgtagtgttcataggttggccagtttgttactagttgagatgattatttaagaaatctaaagtcattccctagtaaatactgttaagtttccacaagccataaaagggaattttaatttatttactatacttcattacaagtctttataaatttaattagcagatagtactcaaaaataaatggaaaagtttattttcaagttgagcaccaagttgagctagcttggccttttaccgctttaaaaaacaattagcctactttgactgtactcttcttgttccatgatctgtgaaagaagaaaaattagggcaggtaacaagtagtattaaatagctggtatgatctttgcattatatcttaaattgaagttgacgcttaatgcagattcctaccaattctgttttctgaaatatatgtggctccatttttgtaactttatgagctatattttctttatgggtttttccaataaattctttcatgcattagccctttcaagactagtaaaactatgtaggcaagtaatttttgtctgtcttctacatctaaatccttctgttagaaattctgccatcgtggccccagaagcaagcaggtccatgttttagtttctgtttttttgttttgggaagagtgccataaaacatcagagttgctggtggcaggaaaacactgagaattacaaattcagcagaaagcagtgttgtgttgatttttgaaagtcctacatttctaaatggtgcttaatgttttgggaatctctaagactattggttgttaaaatgaaggtttaatatatgtgagggtgggaccttgaggttctacattttaacaaactaccagtatagatgttatttggtatacacttttagaatagtaaggctctgtaattctgggtacctccaatcacctatcttgatattttgttaaatgttttgaaaaagcattctactttattctggcacttggtacttatgctaacccctttattagagcaaagtgcttgagctctttctgcttccg

SEQ ID NO: 37552 - DNA, 2358 bp, Bovine  19866880851465
  misc_feature (1)..(1): n is a, c, g, or t
nagtgagagttgtctagaagaagttaccccaccttgcgactgtgccttggttaaacaaagtggatattttaaacgtatgcatgaatttgttataacatttctagaagtcatgtctactataactatcaaagttgttcagctgttctttcagtgaacatattgccagggtctattggggtctatcggggccagatcttttgttagtagaatgccccgaggaacatgggagcatacagaaggcatatctaatgcagccagggcttgcagctggggcgggagcagggttctgctggcaggcttctgaggcagcttagtacctacagtgtatgaattgtgtatactggacacacaaaatatttctcatactttcagtctatttgcctttataaatgacaacatgcaacttctctgaattcatagaaaattatgggcacttcaagcttgatgtctggtgcttactttggatggtgtgcccagcaaatttttatgcttctcaacttttgggaaaattagtttaaaattttagaaacttgtcagttctctagtttttaacatactaaatcttgcaggccctttggcagctgacacttatttccctttggtatttggtgataaatcatatttgtatttgttctctgcagacagagtatcagtggctcttagaaactcaatagacgtactgtgttattatcatcaacaaggaaatgaaccacttgaatgagtacattatatcaagagagtaacaagaccagccagagctcctgctttgcttttcatttaaaaactacacgtttccagccttcttcccagaaactgtcttgctgtgatatcttaatgcatgggcctttgaaaatctagaactttgctgttatgtcttcatgttctctccagataatgacaggggtcttgcccagttttcttcagagctatttttatttatcctgtgtactctgaccccactgggtttctttctgttttcctatctaaccttcctattcacattcctctagatctaagtcctggttcagagatgagagtgctgaacagtaacttccaactctgacatatggaactataacaattgtgttttatctacagattaaggcaatgtaatacttcctggggtgcttttcactttacaaattatttataatctgttttctatgagcagagtgatcttcatgtgataagtgacatttgatcaacatgcttatcagccaaaatactgggtactatcagttaaaatatcatcttacatattgtgtcatttgttgaatagcaagtcatggtgtagtcctagagagagaaaattactaatcttccattagtagttgtttctacatcaggaatttaatgagttttagtagttttgtcttgttatggactctaggctactacttatcaattttgttatataagcaaatgagtttcttttagctgcagctaagagaaaaatcaaattaaggaaatgaagaatctaatgtatcagaactccaggggttccaggactggtccattcatcagctcacaatgtcatcaaggatccaggctctttctgtcactctgtcctgtcacgctaggtgatatcatggtgtcagaccagtccagttccaggcaccatacaggacaatggaccatacagaaagaagtgagattatgtttctttctatgtctccagaaactcaacagacttctcctccatggctaaaagtaggtcatttgtaccagtccctgctaagagggatggaactgccatgactgccttagactaggagatacctgaagggatgtggcataattaactgtgataatccatgtaaaaccacctaccacaatgcctgggacttagaaagagcttaataaattttacttaatgatgaaagttaagtctgtggcagtagtgccagagttacgagtagttaagagagagatttctcagaccttgatgatactcattctgtgtttaggagagagatgacaaggatcacttgcatgtagcgagcacctggaaagcccatctacagtgctggcttgtagaactaaacctcaggtttttagaaagaacatatagaaagactctactcataggaagagacttgggtaagttactagaacaggactccagggaaaagaatcaaaaagcaatacctagggatatagtcttaaatgggacaaagcgtaaagaaagagttaatactacatcccagagcattgacctggagcttgttaaatcctcctttttcaggtcatgattgatcctggggattgggtaggaatgaacccaaagctgatgaaatctcctatactttatatggatatgagcaagcacgcagaagttagcagcaaagcaaggcctac

SEQ ID NO: 37553 - DNA, 732 bp, Bovine  19866880914651
  misc_feature (1)..(1): n is a, c, g, or t
nttattctgcctttcctattttaaagggctcaaactgacttttaaaatccagtgtgaataatagtattagtgattgagtcggacacaactgagcgactaaatgataacatcttttcaaatcatgctcctaaatgtggaacatatacatggcgagttcttgacctatcagttccttgactgttctggagaccaggcctctggggtgatcccaagaaaggagggcctagcagaatgatgcattccgttacagcacacttcaaataaagaggtcaatttttcttcatgaaaattggattttaaaagctccccacaaaattttgaccatctgaaatgtcatgtttcactcacccaatacctaatgatccttacaatgctaataaaagattagaaagcttgtttgaaaacacagttactcaaagacaaaactttcaacattctagaaattctgtttcttgggatctaaaattgaagtcctttttctctactcagaagaaattaccattccattgatctcctccccattaggtactgtattttattgactctcaacaagttctaggaaaacgtcactccttgaggttcttgatgaacctaccttaattgtttcatatgtatcagtgatcagtgcaatgaaaagacttaaaatcatgtatataaaaaggctgatgaatgagtaaaggtaaattctgctaacagccagaccaggtacttttttgctgcattttcgcaaat

SEQ ID NO: 37554 - DNA, 1737 bp, Bovine  19866881000000
  misc_feature (1)..(1): n is a, c, g, or t
ncataattctacacacagtgtttactatatatggggagaagatccctgaagctgctttagaaagtatatgtatttttcaaacgcctaacctttactgtctatgaatcacatttctaccactactctatatcaaaggtctttgggccattactgtctttagatgctcttctccaatttctaccccaaggttacatatatttgtattctataagtttcttctgtgcttataatgttctcattatcttttcctatttctaatctttccaagtctcttttaatgaatatctctggtttctttttggtctaaaacttttcttaattgtaaactaaaaatgaattacattgatattcaattttatcatttgttttcttaaccattaagcacacagatgcaatacagatgtaataatcttttatagtcatattgcaatttcataactataaattccaataaaactaggaaactttaattttaataagtgagatcataatgtatacagagctgccataaggtaaaaattaaatcatgtatatacataaatacacatacacattccaaaagtactttgaagagttccaagtgtttcttctttagctattgttagatgtttccaaacacagcattaaactgctcatcacaacaccctgtgtggtaatgccaagaggagagttggaatggggtgaaaggcacagaattcacagtaagacacagctcactgtgtggacaaggacagccagattcgcgagcactgatggttcaaacaacaatgcggaatcgctgcttttctgaactgactgtaagaaatagaagttcctagtacttacacaatcttttacataggacatcataccaggtgccacccaagtagaagatccattcagttgtctcaagaggttaagttacacacaaatcccaaggacaagaatgggcatctgagagaccagtcctcctgtggctagctggtgtgccacatggcccttcttagtgaggttccgctaaagagaatgccaacttttggctaacgcaggatccttggatcaaactaacacagttttcagcctacagaataaagcatattaaagtctaagcttttcaggaagctagaaaatacattaaaacattttttttttccaagatggtttaatcacttttcagagaaacaaaactttccaatgaccaagtgaaagtacccccaaatcttccaacaaggtcctctgccactatctgggtactgtcacattcttcctccaaaagaagtgctcaattttcatcaccaatgttcttagtagattcacttttcactgaaaaagtaagtaaacatacagtcaagagtgtatactgtttctgtttagcctgttctgtttttccctcttctctcctcccttctgattcataccaacagcactgctcatggggacagacaaaccatgtcatgtcccaggcagctgagatatacaattctggccacaataaatacagaaatgatgtctgaaagtggcaattatattttgtgaggtaacatccttcctgactctgcggaagactcaggaatggtcacttcacagtgtgggcaggatccgatacttgcaccactgaacagaccactattatcactcaggctggccaagtgtggttggaataaatttttccaggattttttttaaacttaaaattgagggtcagtatatattgaatgaatgtgggctgacagaagactagctaatcgccatctcctt

SEQ ID NO: 37555 - DNA, 1428 bp, Bovine  19866881108309
  misc_feature (1)..(1): n is a, c, g, or t
naacaaaacagacaagatctctgctgtcatggaacatgcagtgtagaaggacagtgtgaacaagaataataatttctgatagttataagccctatgaggaaaataaaacatggtgatgggattttgaatgccctgataaaggggctactttaattgggatggccacagaaggaccacctgaagttacattgagctatatgcctaaagataaaaagaagccaatcatgtgactatctgaaaaggagtattctaggcagaggaaacatctaatgcaaatgtcccaaggtagaaagggtatttattaaatgcgctattttaaaaaaggaagggtccaagtagtaaataactggaaaacaggatgtcagagaaataggaggtggcagatcacataggggactatagaccatgataagaggtttgaagattattctgattgcaatgggaagccatttggaaggttttacataaggagagatgtttgattaaaattgttcatgatcatttgggtcactctgaagaaatggaacctaagagtaaacgtgggtcaaatcacttagaaggctgtggcagtcatgtaggcgaaaaaacgatagagtgacttggaacacaggggagcaatagagatagaaaatactagccagattcaagacatcttggagatatagttgactggatttgctcatggtttggctgttgagaaagaaggaaagcataataaagaataaatctgagttttaggtgagcaactgagttgttgctcattacaattacgtgtgtaatagggttacagattggtactttgacatgtgcaaatataacatttatttctggctaatctggttttcctcacaagccctaacttagattagtggggagtggttggggaattgaaagagaaagaaaggaaacttttatatccaattcagttaaaagctcaatctattcctataatttagtagtctctttgggtaaagctcagactcttatgatgcttagtctctcaaatgtatcagtcttccacctccctcttttcttacttcctaatactgactctgtgtttgcagtggtggcaaggatgaggaggccttggatctagaatactggacaaaagatgggaactagtgattcccatatagatgctgaattactgtataaagagatattcattcttcctttataatcaggaatatgtgaattgaaatccataataatatatcattttgctcccttgagatggacaaattttaagtctgatagtaccaaacatgtaagatttggagtaattggaactcttaaaggttgcttttgggaatgtaaataggctaaaactctggagaataagttggcaaaatcttatgtactgaaaggtacatgtatcctgcaagccagcaatccaattccagagtatacaccctcacccaaaaaact

SEQ ID NO: 37556 - DNA, 2075 bp, Bovine  19866881111723
  misc_feature (1)..(1): n is a, c, g, or t
nagaggttttatatagaaagcctattaacatgtgacaccactccttgcaatgaagattaatgcaagacaattactatcactttaagaaataatctgtgtgcttatcatatttgttaattagttggttaggttcagacttagtggaacaggaagtatacctgagaaagtatgtaactggaagtaaataaaaattttctgttttggaggagaaggtagatgacagaaaaggaaggagagacaaaatgagtaaaagaacatttttataatgcatcactaatcctgggttaataaattgttccagcaaattacatgcagtgtggctatcatgggacatggctatgtcaaggccatgcacgctccttttttccctcatgtgttttttattattggccaaatttaattacaagctatcaatcttaccatcctgtgatctagtcaataaactcagggccaggaaagatggtcaatactgctcatccatctgaacaaacatgcaaatacctttgggccttgaactcctgggcttcctggtgggcctgacgaaccctttgctccttgaggacctagagatccagtcagtcctattcttcctgggctgcctctgatgccctaaaaaacagataagaaatgaggactggagtagttcttaggatatccatccagagactcaataagtaagggaagggttgatgtgctgaaaggctgctattgatacactgcccgggtttgggagttaccctgggcttctttcgcaaataaacgaaatgcttacatgatgttttggcttacctgaaatctctaattatagtcaatgtaatggtcttgggtttttaaaataaaaatacctaggcagtacaaagtccaccagtatctcctgactaaagagcctagatatgaagcatgtttgttgtattctaactttttgtattatactctggtgtgcatgacaaatctaataactgattaatgtatccttaagaaggattttcttcttattgtggtcattatttctcaatatttaaaaataccaaatcactacattgtacacttgaaacttatataacattatattaacatttcattaaaaaataatattctttttcaatcacattattccagaaaatttgcttcaaatagcttaattagaaataaagtttggggagcatgtgtatacctgaaatttaaaaatgttaaaaattattaaaaaaaaaaaaaaaagaaatgaaaaaaaaaaaagaaataaagttaagtaagtaaacaatatttcctcaaagccaaatcctaaaacaaggatttttgtagagcttgtgagtgaaggatagttattacattttcatatgtttaaaaaatcaaaagaataatatttcaagacacagaaattatatgaaattatagtttccatatctataaacaaagctcattcatttgtatattgtctgtgactgttttgtgctaaatggtagagttcagtagttgtagcagaggctcaaaggcacatattgcttcccacctctgactgttgtgctgaaaattcctgtgacgcaattataaatggacaaatgcttcaagcagaacatatattgacttgctgtgagattttattatcactgcatatccattgtatcaaaacaaaaaaagaagaaaaaagtcgactttgaatgttgtatttttaaggtacagtggaatgtggattattttgtggtcaagctagatgtcaaagttttgtgtttattatgtgatgacacgacagctgtgcttaaaaaaatactatatacatcaacactattataccaagcacttgacacaatattcccacttcacagaaatgtaacagaaaaatgaggaaaactaaaatggagtatctcatcacaataaaaaattcttcacaaaaatttgaaatggagttgcaactaaagcgaagtttgtaagtggttcatttgttagtccaacaatgaaagtcacttattgatagacaattaaatcatgcagcaaaaataaacttgtttgttagccttttggcaagaacagttgcttgaaatgtcaaggacattcgagtactatcaatagtcaattaa

SEQ ID NO: 37557 - DNA, 1669 bp, Bovine  19866881154146
  misc_feature (1)..(1): n is a, c, g, or t
naaataaaaattcagtactgtataattactaggctgattctcataatcaggatctccctcagcagattaaaaagggagaaggggaggaggataaacagattttttttgtcaattttcatggccaaaagtttgaatctgaggaaaatagaggacctctgaccccccagactgtgccttaaccagctctcagatgaatactggatctcataccttaatgtgcatcaaagttgttaaaaatacaggttcctggactcccgccctggaatctgcagtatcagcaagcacgctggtcactgaacttaattggggaaatggagctctggatcgttcatacctacctcttcagccacatcaaccatgtgatagtgggattatcattaactgcttctgaattcagccctgggtctatcaccaaaaacagtaacactattcgtgtttgtagagggctttctcggtgccaggcactgtgcctggcgtgctgtatgcattaccttgttcatccattacagccgcctgtgcaggcactaatattattccagtcttacagagaaataatcccatggggatgctaattgactgaaatcacacttgaaaccatgagttgacagaattggggctggaacgcagctctaattccaccactcttaattaaccatggtactgaattttaaggaaccaagtacactctacagaagcctggtggattggttttagacagtatattttcaagtgatttttttttttaaacaatatgctttgatttatcatcagagaaaaatctgtttactgtttatttgaaggtttgacacatgctttctttctattcatgtcaaaagatgctctaaaattcacacctgtcatttaaaagcactttgacctgaaacccttcacttaaatcatattttggcaagtgtttctagttagcttgttaaggaaagaaacattatagttgagagggttttaaagtgtggagagagagtcatactcagactgaaattaaggccacagactttcatatatcacttaatccagcactgacaagggcagaataaaggcctttctagtaacaaccacatttctgacacatctttggctttgaggttagagcagagagctagtggttaaccaggctgctcgctttatgggttttgctgtgggcatgggtgtggtctcagtgacttgcataccttggggttccatgtatggaaagcctaaactcacaagctaaatgcattatctataccaggcagagggggtgagggtggggtggggctgggggggagccagggaaaacagaggcagaaactgaaccttctctacttttccttgattcctcctgcaggtttatgaaaagctgaaggaccatatgctgatccccgtgagcaattctgaactggaaaaggtggacgggttgctcacctgcagctcggttttaattaacaagaaagtagactcctgagtcgcagtccctcccttgcatccggcagtactgcactcctaaggccggtaactgtacccactcctgtcgttttcactgacaatctcctgtgccactgcgccactaaccctggtttacaattctaaattgcattccttcgttctgcacctcccccaccccctcccctgacagtggtacctaaactgtggatttgctcaacaagttaagcaa

SEQ ID NO: 37558 - DNA, 729 bp, Bovine  19866881187665
  misc_feature (1)..(1): n is a, c, g, or t
nccatgatttgaaaaaaagaaaataaaaaaaggagaaaccccccacacacacaaaagaccaacagaatgatgtccttattctttgttgaaaatattccaggtaacttgctagtatttagaaattatactgctttctcttaagtagtttttctatcgccatagtagcttttagaaataattcccttagaaatcacatttcctaatgactagtttagccactgtacttagtttcacagaacagactagtccattattaagcattataattctagtttcattacgaatattctacggggagcagagacatttgtaaaaaatatttctatatccataaataccaatagcatgtgtaaaccttggggttaaaaggggactccttaagggaaagttattttgcttttatttcaaaggttacaaaatgcttcaatatttttaacctcctgatattctaagtatgcatgtaatttttttcctaacattttttgaaaacactaaaaagtaggagacaatgagttatgatctgatacctaattgcttactaatagaaataccagatgccgctcaatttcatggccctgggaggtatattgtacaatattcaatattattgtaattcatttcatcttttcatcacaaaattcaatgagttttttatactcaaatataaagggatatgtggctcaatctattttttaaatgaccctcaattagaagtaggataaccttcta

SEQ ID NO: 37559 - DNA, 571 bp, Bovine  19866881439743
  misc_feature (1)..(1): n is a, c, g, or t
ntccccatccccacccccacacttactttttgaagttaaaaaagcactcacaggtagatgtttcactgaaaactgtattttcaattttgtcctatgtaggtagttctactttctcccccattcccaggagagtcagaatattccaatggcaagaaaaaacaggcttcttccccccccttcgtattatggagaattgggagaggggaggggagaagaacctcacattaaaaccatgttctttacacttgtcgaaaatggtattagtatctgtagtcacagaaaatttctaataaataaaaatactgtaaaatctgaaacagtggacccttttattcaattaaaacaatccagctacacatttcaacaaaatacagggtagcacagagcagctgttagttcccatccttgaacaaatgtgtggcattattttaagaactccacacagatggaataaagtacacgtaggagatgttatgatttataaagtacaaatttattttaagcacattactgaattctttgtactttatttctcaatcaagagatactcaaagttcaataactacccatg

SEQ ID NO: 37560 - DNA, 2896 bp, Bovine  19866879993312
  misc_feature (1)..(1): n is a, c, g, or t
nctagtcaaggctatggtttttcctgtggtcatgtatggatgtaagagttggactgtgaagaaggctgagcgctgaagaattgatgcttttgaactgtggtgtaggagaagactcttgagagtcccttggactgcaaggagatccaaccagtccattctgaaggagatcagccctgggatttctttggaaggaatgatgctggggctgaaactccagtactttggccacctcatgcgaagagttgactcattggaaaagactctgatgctgggagggattgggggcaggaggagaaggggacgacagaggatgagacggctggatggcatcactgactcgatggacgtgagtctgagtgaactccgggagttggtgatcgacagggaggcctggcgtgctgcgattcatggggtcgcaaagagtcggacacaactgagcgactgaactgaactgaactgaactgatgtgtgctattaaaaaaaaaaagtagatcttcccaacttaaggcataaaaaaataaaataaaataaaaacatttgacttaccaaagataaatcattcagaacagacaccaaaatgctcctgttttaattaaccctctcacagatgaacactgctaataactactgttaacaaagcagattgacagacacagtcacacataccagcacagctctggagactcgactaattggaaatcttttcccagtccaaaagcaaaggtgaggcccaaggttgggatactcactcgtgtatggaaatattgctgtgatgaatcagaccaagaatagcacctaccaccttcagtcctagggacctcaaagagtgaaagctatgagctggataaaacttgggtcttagctctgaatctttcactcttggcaagtcatttaatccctctagaggcccagttccctcttatctttatactctgccatgttccctgaaggatttgatatagctgtgtgtcaactgatctgttttaaaaatgagggggttgggtttccctgggaggccagtggttaagaatctgccttgcaacgcaggggatatgagttcaatccctggcctgggaagacttcacatgccgcagggaaactaagcctgtgtaccacaactactgaccctgtgctccagagctggggagctacaattactgaagcctgcacgcctacgccctgtgctctgcagcaagagaagccgccacagtgagaagcccacacagggcacagctagagagcagcccccactctccacaactagagaaagcctgtgtacagcaacaaagacacagcacaaccaaaaagaaatagatagatatttggggactaactaagggtcaaagtaaaggtagtatgttcacacaaaaatctgcacccagatgttcacagcagcattactcagaataatcaagaactgcaaacactcaaatgtccattagctgatgaatagataaaatgtggtatactcacattatagaatattattcagtcataaaaatgaagtgctaatgagagtttattttgcattaaatgctcaagtacaaaaaggagggaatatgtggttttcctgtgtttgattctttaaaaaacaatcagtggtatttgtagttgtgagttacatgggtttttgcagagagaacagtttgctagagccaccaaaaaaaaaaaaaaaagtcttgctaacacttcccaagcactttgagattcctaaacttattttctgatatacaaaatgtatttactggcattactttgcatttctcaagacaaaaatgacattaagtaaaagttgtgtgtaaatttgattcacaggtacttaaaaactttaaagctgcaaatgaaacgaaaggtccccaatattcagacaatgatattttctttttctgactaggagtttatatctcatttattttataaatggtttagttaaagcaggcttcaatggtggctcagatggtaaagaatctgccagcagtgcaggagacctgggttccatccctgagttgggaagatcccctggagaagggaatggcaacccactccaatattattgcctggagaattcattggacagaggagcctggttcgctattgtccatggggtcgcaaagagttgggcacaactgagcaactaactctccttttcttctttaaagccctgttccttttgacattcaagttttcattgtactacatttttcatgtaagaccaaatccagaactgcattttacagttttttactgtttttttcctctcagtgctgctaaaaagaaaaagcagctaacattttgaatttacaacatgccaaaaatgacacagaaattattacatttatttttgttcttgttaaaactctgtgagcaacatttaccaagacagcatgttaaattactggcattctctgggtactaaataaaaggctgcaactctctaacattaatgtatatacacaacattccctagcggtccaatggttaggattcttgctttcactgctgagggcacaggttcaattcctggttagggagctaagacccaacaagctgcaaggtacaaccaaaaaaatatagacatagaacaaaaaagaaaaaatactaaaaaaataaaaagaacaaagtactgatacatattacaatgtgggtgactcttgaaaacatgctacatgaaaaaagccagacataaagctctatattacattccatttatgtgaaatgtccagaataggcaagtttatagagacagaacgaaataagtggttgccaggggacaggaggttggggagcagagttgggggtgttgagggggaggactgagggtgtcagctgagggtgcaggtttctattgattgtaatgaaaatgttctgtaattgatagtggtgaggtcacacaact

SEQ ID NO: 37561 - DNA, 877 bp, Bovine  19866880851796
  misc_feature (1)..(1): n is a, c, g, or t
nctttctttctgccagcagactgtctggaccttccccaggctgtctctgggcattcatgaatgcagcattcactcagctgaaaatccaaagtgactaacgggtggacaatttgggctgcctgcagttgcatgtaatgtcctcttatgccatttatcccctttcccccatttagcccggaaatgggaacagcacataaaatgcagcgaggctagtaggaatttggcgacagtggggacataaaagtacagaagtctggctagtcctgtacaccatctgtgtatcgatggctcaccagtacacagtttgagaagtgttgcctctgagctgacattttcatgcaatcttatgaaccattaaaatacctgtaagttaatcagttattttgagaataaaagatctccctgaatgctttagatcagcctttggcaaactatgactcattggctgatttctgcccacagactgtttttgtaaataaagttttattggaacacagacacactcatttgtttacacattgtctatgttagttttgcgcaaaagtggcaggtgaataattgcaacagaaactatgatattgcagggcctaaaatatttactgtctgatgcattcctgttgtagatttcatacatgttgttggatatgaacttattcatttctttcttccttcattcagtcagtcatttcatagatatttaatagtcaaagcaatgaaataaatactatatggaatataaaaaagcataaaataatatcttctcctttcaaaacatacctggacatcaatagtcattttgtttccattacttaactatagggcttccctggtggcttggagcttttcactttcattttctttcacttacctacaaaat

SEQ ID NO: 37562 - DNA, 1362 bp, Bovine  19866880017299
  misc_feature (1)..(1): n is a, c, g, or t
ntgcagatggtgattgcagccatgaaattaaaagacgcttactccttggaaggaaagttatgaccaacctagatagtatattgaaaagcagagacattactttgcaaacaaaggtcagtctagtcaaggctatggtttttccagtggtcatgtatggatgtgagagttggactgtgaagaaagctgagcgccaaagaattgatgcttttgaactgtggtgctggagaagactcttgagagtcccttggactgcaaggagatccaaccactccattctgaaggagatcagccctgggatttctttggaaggaatgatgctaaagctgaaactccaatactttggccacctcatgcgaagacttgactcattggaaaagactctgatgctgggaaggattgggggcaggaggaaaaggggacgacagaggatgagatggctggatggcatcactgactcgatggacgtgagtctgagtgaactccgggagttggtgatggacagggaggcctggcgtgctgtgattcatggggttgcaaagagtcagacatgactgagtgactggactgaactgaactgaagcttcccaacagtttttctggctgtgcatgtacaactgactgatcaaaaatcttaagctgaagatcatagctttaacaatgccaccttgtacctatagctgcagctttggctcaatatgtccaaggaaacaacaccgtatgttcaagccctgagctgtctgccagagcagatccaagattacatggatcgctgccactgaacacttcaaggtcagaaaatctcccagagccaacttttctgcttcagactgtataattatcttgcatctcaggtcagcttctaccttaaaatgtgggttgagcaatgcccatttctaaagaagcaagaggaaatgcagctgttaatcagccaccaaatgttactcacccactaaaggacatcttatcttgatttttgttagtttatatgtatttaatgaacaattatgcctttctaatttcacaatgatatgaggtggcttgctcacatagcacgtggctcactggcaaactattctcaagagagagtgggccagacgccacgtccaaaagctatgatcaagcacgtaagtgtatgatgcacgtccggtctcttgaaaggcaccctctttttcaggggctgtgacacaagaatctcagtgaaaagtcccaatagttgcaagaagccattccagaaaccccttttttgactatattagccactttcctacaacagggtccggtgtagccctggtgcatctcacatctcctaggacagggccggctccacacttaccatctgctgcacatggtggctggccttca

SEQ ID NO: 37563 - DNA, 2223 bp, Bovine  19866880401560
  misc_feature (1)..(1): n is a, c, g, or t
ntacatcttgcttgtgctttactccttccgaatttatctcccagacctgtttgtctctcctggttctctgcccattcaccagcctcacccttccttcaaaccagctctttcacagagtgattcaataactaaagccagagctttttaatatcctgttgactctggtttgctctattagcttaatggtaaaaatcacccaccacctgcagaattctctcttttaaaggcctagaacttcacacttcattaggaatattttatatctgaattgcactgcttatcaatttgacaacccacaccagcattcttgcctgggaaatcccatggacagaaaaacacggtgggctacaattcatggggctgcaaaagagtcagacacaactgaacaactaaacaatcaactgtgagccatacctttgttttttgtttgcttgtgttgtttgttttaacacagcaaaattgaacctaccagctacctcctctgacctcctaggttaaattagttcctctagtattctttctcataatacgctgtgtcggtcaagtcctgccccaaagccacaggtgcaaagtcttgcaccaaggccacagaagtggagtccagaaacaaggtcatctccagaactgactgagcccttttgtaatcattgccacaagcccctcaatcatcaccagcaggctttctgaccccaaattaggcaagaatgcccaccccgctagtagtcgccctatagtgccccaaccaatcacctaatggcaactttccagcagaaattttctaacttaaggctataaatattggctactaacccacgaaaagaatcaactctccctggtctgtcaggcccaatgtgcttgcagtgcccaaattatatctgctctctgttcttaataaactcactcctttctgaaatgctctgtgtctggaaattcttttccaatccgtgttcagactgcctcaacatcctttacttcttgtatttatgggtgtgtaaaaaactgtttgtctaattacctgtttaatagttttcctcggcaacctgtaaactttatgagagacagggaaaagccaggtggttcctccttaagctgtcctctcttctgccctcctcattttctgttgccagcacaaacacagagcttggcacatattagatgattgagagaaacatatcaactgcaccatgcactcacaaaaagaaaatgggaactatgggaggcgatggatatgtcagttagcttcattgtagggaatatttcacaatgtttacatatatcaaatcatcaaattatataccttaaatatatatacttaataatttttttttcttttttttggttgagctgggtcttggttgctgtgcacaggctttctctagttgtggcaagtggaggctactctgcattcagttcctggacttctcatggtggtggcttctcttgctgtagagcacaggctctaggcacacaggcttcagtcgcatgcaccaccggggctcagtagttgcggccaacaggctcagttgctctgcagcacgtggaatcttcccagatcagggatcgaacccgccgtgtcctctgcattggcatgtggattctcatccagtgtaccaccaaggatgtccaaatatatatatatatttttaattgccaattatacctcataaagctggaaagaaaaaaaatgcattttgaatggacaaatgaatggatgatacctttcaataccacacctagttcttatctccaaccacgtggcaagttggccctggtaggaccagggaagcatatggccagcccctggttgattatatggacaatgcttctgaggtccttcctggaacagcattcagggcacggtcctggtggtaagactgtgcttaactgcaacaatgcctctttctttaatattttccaggaaaaaataaccttcctttataaatgttctctgtctttgtgtcaatgtattaaactgacatctctgggctctgtggtgacaggttttgccatatatacaggaaattcttcttcaaacgtgaatagaagttggcaaaagattgcttttctgcactactttgcaaaagccactaatgtgagatgagttgcacaataataaattattcaagtcataaatctgaagaaatcagttcatcatgatcaatataatttaagagaatggggtgtgtgggattcaatttttataatataattagtttttaaata

SEQ ID NO: 37564 - DNA, 4999 bp, Bovine  19866880508068
  misc_feature (1)..(1): n is a, c, g, or t
ncatgtgctctgagaacatgagtctttgatatcaccctaatgaacacaggagacagatgacactggggtgatttcatgaagggctatgtggatggtgaccatatatcctggtttctctgagttagttccaatttacggcacaatttcatttattatgctattttattaaatactattttagtgtaattatgatagcactcccttttactctcaaatgtattttggtctgggcaataaattgtaggtcatgtgtatcagactctcctctgtccatgggattttctaggcaagagtactggagtgggttgccgtttccttctccagggaatcttcctgacccaaggatcaaacccaggtctcccgcattgtagacaaactctttaccatctgagctaccaaggaagtcttcacccacggcagacattactaaattatcgtggtatacattcccgggaaagcccacacttgtattctgaaccttcttagaagtatcgctccagacatagattgaaactggatgtacatattccttccacagtatgggccagatagggtacaaactggcagctcacaaactatatctagatggcatttgtattttgtttggcccacactagattttctaaaatcctaaagccaacatttactatcacaagatttaacttagaaatctatttttctggctttatgtgagaaatggaaaaatccagcaacataggacctgtgtcccaccatacggacaactggctgaagctggatggtaatactactgttttgtccaaacgctacctgagttcatcagccagcaagatgtccctcagtgatcctttcttcttagcacccacacccatgtagtcccctcccacactctatccagtctggtagatataaccaacagaacagtacagaagtgataccataccacttccatgtctgtgtcatatatcgatgtcacaaaacacactgtgactctgtctctcttgtgtcacttgctctggaggaaatctgctggcatgttgtgaggagaggagcacatggtgagaaggtgcaacagccgtgtgaataaacctatttgaagtggatactctagctccagtcaagtattcagatgactgaagtccccatagacatcttgactgaaacctcataaaagatctgagcgagaaccactcagctaaaatgctcccagactccctacactcaaacactgtgtaagaaatagggtttgttgttttcagctgctaagttttggagcaatgtgttacacagcagtagataattaatacaccaaccacaactgagtttcttacaatctacttgcctgtaccaattctgttacttacattacgctaaagacagttgcggttacatccggggctgtagaggaagtagtattgttgaggattctaagcaagaaaatgagatggttagatctggctttcctcatagtaaaactgatggtaagagactgatgtgtgttgttcagacaaggttaatacttaacactggcatgtctgaaaaggcagagtcacaaggaggttcaagtttcctgagaagcttatgaatagatcttgcaacctaacacagtggggatgtgatactgtattatgtctaagagagtaagctctagaatgagaatatgtgagttagagccctttatgagaatatgtgagttagagccctttatatacaaattttatataaatttttcaagttacttattacaaatagcctttggtttccttatctgaaaaatgggacttggaatgcattcggctgcaaataattgactggccactaacaaaggcttcaaaaattatttttcttacataactggaagtacagtggtaagcagttgctggacacagtttgtctatttaacaataccatcaggatcccagatttttctgccttttaactctacctctcttagcatgttggctccttgctttatgtttccaagatggctactgctggtccatcacatttatacctaaggcacaaaaaaatggggataggctaagagcgttactctagtctgtgtgtcccatttcatcaggaaagaataaaacttccaagaagcaggccccacccacaatcttctgcttacatctcattatcagatgagaactggatcacaaagccacttagtagtgacagaggctggtaaagtgagtatttagttggatacactaaaaccccatgaaaaatttggttctgttaacaaaaaagaagaggggataatgaattttagatattcagttgccctaaatggtacagtcaacttcagattattgatataagggttacaataaactgaggcatgctttagaatatagtgcctggcatgtattaatagtaagagcacaatagatggtagctactgaaattacaatagtccaggcacaacttgcactagattcaaccttgcactagaacatggcagagggaatcattctgacacccagttaagctgaaattcttgaaaacaaagacaggtgaaactgttagtgaaaaataaaagaatttggctttgttttttattacctttatttcttctttcttttagaaccactgacgtgtgtctattttccacatcatcatctcttttctttctagttattttataattgtgtgcctttgttagaacttcagtactttatttttttttaaatctaagggaaatataaaattcgtgttcttaaatctaattgataaaaaacctgttacagaaactttacctcctaattaatagcctgcacaattatataatcatataatgctgggcactgtgatgtgctctttgcatatctttgttttctttctttttctatataaatttatttattttaattggaggctgattactttacaatattgtagtggttttgccatacattcatatatttgttttagagacagcttgccagtggataactttctatgaagaaatagaaatatctcctctgttcatgctaaaattaattgcaatactgtagtcatatgatatgaaatgtttctagaactactagcaggcaacacaactaccaggaacccaatgacacatttagctgaacccatctccaggcactttcagggcggatcaaacaatcggtggacccaccatacatttttctaaccacagaaagtggtttagaggccaggattcaaaaaccattggcagctgtgtaattacatagtgttagagaccagagaggtaagtggcgtgggatatagactgaaagggaaaggaaggaattggaatatgataccccccatttcaagccctcattacaccctcctggtccttcccaaacacactcctctaaaatttgcttagtaaggggaaaaaaagtgagcaaaattacagaagagagccttccaagttctttctagatatgtacagcatcgtttagcctttctgtattttccattttttttttattataaatatgtatcacatttgtgatcagaggaagaaaaaggacagaatattacaaaacagggcaataaaggattaagtggcctaagttcctttatgtctctgacctgatagggtcaaagcaattctcccctctccctcatgaaatttgagtttccaccctaaagtatgaaatatcattcctttacctttcactgcttcagtttatgataaactcagggtcagcagttacatgactgacctggaatgatttcgcattgctgcatgtggcgccaggcttggggcaatgaactggagcaaatgactgtgtaagcagcttctgggaaagaccaaaattgtagagctgctacagacaacttactctcttttgttatttctgattagatcttttcatttttttgttgttgttttttcttagaggaggcaagggtgtttcattgaagcttggaggaaatggctgaattttaatggaatctaattggctcccatggttatctcaaaggagctgtggtcataaaagttaattaaattagattcatttgcatattcaagaccattcccttcccttactttaaaaccagagaaagagaagatgtgtcccctgcttcctgaacaggacacacagcagtgtccagatcgctttctttgtatgctgggaattattctaagtggcagtttatttttttaatcctctacataggtgagtatcaacccaagagttaaactggtatgcattgcagttcttgttttcaaatacagagctagtcttttatagaaagagcttctctgtgctcaaagactgaggtaatttttccaaacaaaaggtgaattcagaatgttcagtagataagaaacgagcaacagatacagccccaggactggcctgtttgtgtgtgtcctggcatgtttatcagcaacagcagtgtctatagctttattatgggtcagagggatggaacaatgggactttacaagtagctgtctagtctaacctgctgcctgtggtaggcccaaaataaccagctgaaatggaactctgggcctgttttctgaagcctctggggaaggcttcctctatattccaacccatttttaacaatccttaatatcacaccagaaagcattcccttgtgtcaaacctataacccctctgctcctgatttagtgttgatcctgtgcgggcagtgcaggtgtgggcagtcaagttcagcccccaccccagcacctaccttctttgaacatttccttgggacatcaacgagtgcctaggtcaggctcaatggattaaaggcagcatgtgccctacttcccccagccactcttgcctgttaatacacaaaaaggtatatcattaacatcattcagtttatgataaactcagggtcagcagatattgagtgacctggaacgattttgcattgctgcatgtcttcctataagggaagacaaggttgattttatttttagtgcttttttttctttaatgaacacaaatatgccaggcactatgctgagttcttgagaaacaacggggacaggacagaccaaagccctgcc

SEQ ID NO: 37565 - DNA, 1246 bp, Bovine  19866880555228
  misc_feature (1)..(1): n is a, c, g, or t
ncttttattaagtttttatctttttaagcattactgatggtttttgagtactgtgctcttaactccattttccctcaaagctctggattttctgcacccatttgccctgctgcaatgactgctaggaatgccggggtcatgtcacaacagaaaatgcaatatttcctttcatgagctttctgctccaacctgacagacctgccttcccttgagttttcccaacctaggcatcctatttagaattccctcctctgtttttcatgaccaacaactcaaatttttaaaagatcgattcagtgctctcttgggaacccagcctagtgcttattctgtgacttcatttgctactctttctttttttttggtatttttgtcttatttcagcacttaactcttagtactcagtgtctgaatgtgaaagtgaagttgctcagttgtgtccaactctttgtgaccccatggactgtagcccaccaagctcctctgtccatgggattctccaggcaagaatactggagtgggttgccatttccttctccaggggatcttcccgacccagggattgaacccaggtctcccgcattgaaggcagacgctttatactctgagcctctgattaatgaagcctaccctattcttcagtctgattgaaagttttaaaaaacaggaactttagttcttaactactctcaaaattccacagcattttcagcaggccttccgtgtattaaaagtaaaaatcagtatcagtaaatattttattatatcttacatcttctgccattctccaacaacttattttccaaatgcatctatatggattcccttcaacaggttctaattctgttcctataaaatagtaaaagaaataaagtttacagtttaaaatgatatcttacttcaacaatttctaaaaacaaaagctatacttcacaaaattgctatttacagttaaatatatcccaactctcagaataaaatctattaaaatacctccattaacattggggtcatgatagagtttccagccttcaagtgttgcagctctccatgcctggccacagcgtttgcagagtcgctgtgcctttagaaacaagaaaaagatggttggccatataaccaacgcagtaccaaagaaatacgtgtgctttgtagaaaaatataagtgatttaacaaaggattatataacttacggcacagatgtcacaaaaggacggtgtagacaaattagtaaggcacttcaca

SEQ ID NO: 37566 - DNA, 923 bp, Bovine  19866880757861
  misc_feature (1)..(1): n is a, c, g, or t
nataattggtggattggtggatctaagattcaaaccaatttgagagtacataatagatgtcacacactatccaagatattggtaacagtgaaccaaagacaattcatctcccccttcccccatgaagctaacgttttgatgctctattacagaagtgaatctaaggcagaaacacctggcatatttagggagccaatggctcctgcatctccaaaggaatcttgggaacttgctgccatatttggtggaggtcagttggaccgttggaatgccaaaattggttccctgagattgcctttgggctttagagacatttgtaccacatgtttaaaaatgggtgaaaatttatttttattttaaaatttcttacaagtattaatctgtcatgagagaaaaacaagtcccaaagaggaaaacgcacatagtgctgtactccatgtccaaaaaagagtgaatacttgtctgctgccaatatgcttaattagggtagacagggaggtaccatttaaaattattgttttgaaaaaacccagtaaaaaaaaaaaaaaaaagaaaaaacccactgaaggaaatggtcagagatctattccaggttttttttttaatgcatattttttataaggtctgttttataagaagagaaactcagacaaaagtgggaatattataaaatatagttttatagtagatttagcaatgtatttctttaaaacgtgtcattcctgcaaaacagagaggttaagttttataatagtggccacaactatttttggttttttaggaattttgtttaaattgcctttccttttctagccaatttgctgaagtaaaagtatatcagaagattaatatacttttatttatagaataataatactttatgactgttgagctgatcacatatgctagttcattaaatcctc

SEQ ID NO: 37567 - DNA, 2702 bp, Bovine  19866880784631
  misc_feature (1)..(1): n is a, c, g, or t
naatgtgtgatgttttatgctacttagtttgtgatagtttgctacagcacttataggaaataaagatgggaagctggttgatatgaatattttcaaagggaaggcttttgaaaaaatatggaagaaccgtattctgtgggcagaagcctaaagccaggagacactacctctggccatcagatagaacctgtgtgcccagatgagctgtctctacttgcaagggctgcaaaggacctaagaatcctccagggaaatccaaattttcagctgaagccaggaaggagaagaggtagtaagcaaaaaggttaagagtgtagaggattattttaattttgggcaatagatctagactttcaaagtgtacaatgtaaacaattagaggccaggtcctgggagaagacttaactgaataggaataaaagtacctaacaggatctgtggcctccatgggtagcatgctgtgcacatatcatgagccattgctgagaatcacagggaagaaggaggcagaggccagagatggaactctgttcagcagttttaatgaaaagctttttggctcccgcttctacttagctggctagctttgatgcctctgctggtcttagtcaaattccaaaattagacatttgctttttaagggactaagaccaactttgtgtggatcatattatgtgtaatgtcaactcattaatacctgtcataaacaagtcagaataaactcattttttttttcacaagctataataaaatgttgtttctgattttgagagagtcttgcccatattaggcttgtaagtgctcattggatttaattgaattaaaataagtcataaagtgagagctgaatcagaaagtcatgaagaagttatgcggaagggaccttttatgcaaacgtcagatttatgacctccaacccttcagttttattagttggcctctaccgcgtgtgtgtcaaagccatcctcttgtacgctaggcctaccttctgaatcctggcctttagacattaccacgtccatcaggaggggaggcaggaaaggcgaccgcaggaaaggacagaggaaagtgagcatttctctaggggaactgcagcagagcaggctttggccatccactctctggtcctcaccaggatggggcatccctcccaagcaaatggtcactccatttatggtaaaagtctcttaccacacagctgcgaagataagaaagagaatccaagaggggcaacaataaaaggaaatagaaatccaaaaggccagctattggcaaggcagagttgttttgtttttccaccttcttttccattatggttttttgtaagatccctgtgctatacaatttttatatatatactgtatatacaaaacccttgttgtttatgtatatttagtaatttgtgtctgctaatcccaaactcctaatttatctacaagtttgctttccatctgtgagtctgtttctgtttaataaataagttcatttatatcatattttagatttcacatataagtgatttcatttaatatctgtcttcgtctgacttacttcagttagtatgataatctctaggtccatccatattgctggagaacattgagtttatccctacaaaccagcaaataccatccccttgcaaactgcgtgctcttaaactagaagttattgatatctctgtgttgtgtgtatgttcatctgtttgttccttcttgtgtaaaaaaataattacttctttaattaagcgttctttactcttattagagctgttagcatattcaagaacatttgctgtttttggtttcccagtggaccaaggcatgcattttcaggaaccagctggttttgttaatatgacagtgtgtatcaggtgcagaaggataatttactgcctttcaaatatctatttcttctcctccaaatggatgcacctgcattggaacccagagtgtctgcactcacatggtcactgaagactaatctcagctagctaacagtctccaaagccagacacagaatcagctatcttggaactgcttgtctgtgcatcatgaggaactgtgcagggagacatggatgagaatctgccacatctatagatgtgctacagaaatgtgctatagaaatagacgggcttgagaaataggattgggacacacagaatcactgcatggtctgtctgctgggtcaccacgatgctcagtcgcagagtagcagttatcctcagtacaggaagacacaagacttattctgaattatctacttctcctttcataactattaagctgagtgttgtcagggctggtccttatctttctggagaccagaatctacaacaaggccaatctgatgagcacagaatctgcatagttacacggaatcctgcacttagaagggccccttgcttggtttaatgctgtgttgctgctgccttgaaatttttaacaactttaaaataaggagctcagcatttttattttgcgctgggctttgcaaattatgtagcctatcatgatctcctatacagtttctttggttaaaaaacttctattcagtgtcacttctctaataatccaaaaccctctattgtgtacttttatttatgagtctcagcagagacattactttgccaacaaaggtctgtctagtcaaggctatggtttttcctgtggtcatgtatggatgtgagtgttggactgtga

SEQ ID NO: 37568 - DNA, 591 bp, Bovine  19866880889580
  misc_feature (1)..(1): n is a, c, g, or t
nagagaagagatgatggaattccactcacatgcaggcaagactcagtgtcagagccttcaagctccctgttccccccagaaatctatcggtgcccccagtttctgatatgaacagttgatgtttcccacattttacataaagtactagacaaacacgattttgagacaaaccctcagatgactgtctttgaagcccttcccatacaggcgtattgggacctgccactgtcacatactttaagttgaacccacaaccctcagccgttggccccagacttcttatgaagatcggtcattctctacttgccctgccctcaaaggaagagctgtagcgaggcaagccagggcccggctcccagattccagctaacaaatgcattccaagaggaaagaattcacacagagaaaaacattgttttccagtagaaaccattgagacctctctggctgtcttcataaaactcagaagaatctaagctaacaaagctttcatttggggaccccaggactaattaataaacagtgcacaagtggaaaaggaaacacagagagttgagaaatgaaaatatgccctaccgaaaagctgccatc

SEQ ID NO: 37569 - DNA, 1361 bp, Bovine  19866880901030
  misc_feature (1)..(1): n is a, c, g, or t
ncatacatgtagtaactgcattatgttgcttgagaacaagtacttcccagggagtagtaagcatatcattgctaggattcaagaattgggggaataacagataattgattttttttttcaaagttatgtctttagatttacagttgccttctctttgtggcaaaggatactggctttgcatttatgctcataacataacattttttaaaaataaatctttattcttaatttaagtaaattaatttttagaaattaaactaatgatgggacacattggtggcacatgggtatgtcaaatattatgaaaattgtatgagaatgattgtttgggaaacactgaagtgataggaatgggatggtttctctaagaaagaaatccagagaaataaaatctgtcagcgtgactccactgctgctcaaaggagatggaaccataactggtaagcatgagcacctgagggtatgtccctggtgaagatgggtgcacgagatatcatagactgaggacaccagtcgccttatcttgctctgagttcatgcttcctggtaacattttgattataacgttaggctttggcagcaagctatagtgctctcatcagcaaactatgaacatctggatttctcagtagtttattactcagcaccaattaatcaatcaacattctggttttcaaacataagctctcatggacttggagacttggagacgtgtcagaaaccctgtttctgagtctgccagactgtggaatggagataagttggtcaaggtgacgtcacctgtgtacttgtctaggtggccagcacccctctctttcctcaggtgccaactgacccactgcatgacttttacgccaaaccactgcctgacttgctcctcagcatttccagccagtctctggccttgctgttaacctagtctgccctcaggaagtgcaaccatggtgttatgtgatctggacttctatttagagcacatcttcactgacctccctttgaatgcttttgagcctttgatgccaatcatctactttcttggttctctgccaaatctttaaaaaactatttccttagagtcacagatgtagaaaacaaacttaaggtcattagggggggaagtgggaggggagggataaattggaagattgggattcacatatacacactgctgctgctgctactgctaagtcacttcagtcatgtccgactctgtgtgaccccatagacagcagcccaccaggctcccccatccctgggattctccaggcaagaacactggagtgggttgtcatttccttctccaatgtagaaagtgaaaagtgaaagtgaagtcactcagttgtgtccgaccctcagcgact

SEQ ID NO: 37570 - DNA, 1523 bp, Bovine  19866880930231
  misc_feature (1)..(1): n is a, c, g, or t
ntagttaaggtttgagagttaatcaggaagtcatcataaaggaggacacttcatggtttctctacaatctcaccaagtaagctctgatgcacagatgttctcggatagcattatcatcttcagcaggaagtgggctgtccattccttgttcctcccactggttatagatctctgctattgaatcctgaggaattttcacaaatacttcttttgcagcttcatgcttctttgaggctgtgaaaaagatatatagttttccaatatatatggatttctgtgtagtagtttctaaagcagtcaaattattagtctgtgactttcacaatgacctgtaaccatttcagggcccaaggtacttctgttaaaggtttgggtgatctttctacctaatggctgggcttttccttatttcagtgtgacagtcacataaaggattaattaaatgtaattacttttgttttcattatttatttcaatttttggctgcactgcagagcatgccaaatcttacttccccaaccagggactgaatccaaatccactgcaatgaaacacggagtcttaaacactggatcaccaggaaatcctaagttacttttacatactgtcttaaaaaaaaaattccatctttcaaaaccttgagattatatataaaattgagtgggacataataagtcactattaaatatgttttgtttcacagtatcagccataagagtgggtattttgtaccttaccctactggaagggttagaaaaacaacaaaatttaagaacagaaaaaaaaactttgaaaaaagaatataaaatagagcatacccaagaatttcctcattatcgcattgccttgtttcagtgcttctgctctctgtgctgggtcgaataccaaccagtcaattacatcaatttttaatcggtcttcctattcatttaattggaaaaaaagaaatgtcaattgtgcttttttcctaagatattctgcacattaatagaattggcttacatctgtactactaatgaatattttccttcaggttatacaaaattattaaagaaaatagcttttcttagtttattttcacatttaatagctctctattaaattatagaaaaaacttactggactgtcagtctggaattatatatctgatgtgccaccaatttaattatctgactcctttaagtgctattctacaactttttctttcctagataaaactttctattcttttctgaaaataaggaataagtaaactacataaaaattagttaactgatcaagtatctagaataatctgatgagtaaaaattcaatgctcaagtttttactattaaagaagcttcctttaacatataactactgctaagcaattccttacacagaccttaagtttgctgtcaattttcataacttggctaacaaagaaaaattcttaaaaagaaagaagccagagtattttaaagtagacatttagaaaaagctgaacacgagggattattcagttacataatacacttctttta

SEQ ID NO: 37571 - DNA, 1612 bp, Bovine  19866880934528
  misc_feature (1)..(1): n is a, c, g, or t
ngcccatactgtgtcctcccagctgtcacagtacaggagagcagcttcacccgttccgaagagaaacgtgcagacacagtcaacaaaaaaaggaaaagcagcggaacctcttgatgtgaactataaaatcactataataacataaaacatatggattataaactatcacaccaaataaccctgtgtctccaacttctccccaaaccacaactttttttggtggaggggcacagtgggcagcatgtgggatcttagttcccacatggaaacagtgggatggaaccagcagctcctatagtggaagcgcagagtcttaaccaccatcagggagatccctcaagccacatcttctaagaagtctggactcttatagcatcaattttccatgctgatataagatggtgtttcaactaattaaaataacatccctcaaaatagctataaaatgtaggggatcgaggggggttgtgagaagcacacatacgttagacaattcaaagtcatactgtgccttggtgacacatttctggataaagctatggtaacaaaagttataaatgtgtattgtaattatatttacaattctgagaaactgacgtctgactgcacagattaaaacatcatatggtatatgggatacatcaaattaagtagctcaagttaccattctatttcataataatcttatcattgctattcttagaaactagcttaagcttatatgattactatattagaatattttattcagctgattccattccataggaaaaaagattaagatacattgcatacctgcttgagattcccacttagagctgcataaattgctctctcatatctattaaaaagctcctgaaatacaatgaatataaataaaattaactactgtttatctcagtatgtcaatttttttcataatctggaattctgcagtatcttctaaactgaacttatttgttccggaacagtttctaaactttagtaaaagatctcctaggggactaagaaggaaggatcccttagtttgatgtagtcaataatgaaatcttccagaaaagtcaaacagctaaatttcaaatacagagtgaaagcagattcaactctaatggatgctttgattactttatagtcaaattttattccagatagaatccgcatagacgttttctcctataaaatttctaaatacctaacactacctgatactgttctaagaacatcaaacaaggcccttggagcctgacatgtaccagtttgcatcaaattcctaagcagaattaattattttcaccaaattatcccattttacttttggattctattaatgacatttcctgttttctcatcatccaaacaagagacttcagagactctcactacataattgaatcttcctctgccttctatttccagtttctggtcctgaccaaaattgttcctttcttttctactcgccaaagtaacctaggacaggcccttatttcttagtgtctgaataattctgacagggcttctaactagtttctcagtctttagttcattcaattttaagcctattttccactgccatgctaatcttcttaaagtactgctgtcacgtgccctcaag

SEQ ID NO: 37572 - DNA, 958 bp, Bovine  19866880976805
  misc_feature (1)..(1): n is a, c, g, or t
ntgtttttcagccaatttgggagtctcttaatcaccatattctgaagtaatcatttccccaaaacttaaggctgggtttatattgtaagcagtgttccataagtttgcttatatgcaatgcaacagaaaaatcctaggcttgtgtgtaatggcatctttgtttttaaacagcattgctaaagagttggtgccagaattattctatattgctctataatccaaaattatagagattgaatgtatgagaaagcatatcttgaatcagcatacgtatatagccttttgaaattgttttcccctaggggtaaagaagagcaactttaaaagatctcagaatacttaattatatcaataaaggaaaaacagagcacagctgacttgagttattgttcagtcatcatttaaaccacaaggcaatgtgaatgttgttaatttttaagtactaagtgagttagcttttattttttcaagcacaaagtgcttgtgcaagaaaatcagggactctctctcaatgtcaaccagctattttgatctaccctgcatgctgtcagactatagcaataatgaaagccagcaagctttaattgtttttatctgtgtgcactcttatagttaaaggactggggaattaccatgtaaaaaatacaatgatgctagtttaggtcaaagctttgtattgagtatgctctgaataattactctgattaagataagtcccaaatctgctattgggttccgagcaggaggttaaactgtacagtggtaactgggagctggttgccagggcatccttgtatggttgttggtactctttttgctagatggacagttctccctggccatcttgccctctgatgtaagatgcttacttagcaaacatgatttaccatatgtgttatttatttttcttttttgtattatgaacgtggacaaccctacctagaagggaaagtaatat

SEQ ID NO: 37573 - DNA, 863 bp, Bovine  19866881045143
  misc_feature (1)..(1): n is a, c, g, or t
natgatgctaaagctgaaacctccagtactttggccacctcatgggaagagttgactcattggaaaagtctctgatgctgggagggattgggggcaggaggagaaggggacgacagaggatgagatggctggatggcatcactgactcgatggatgtgagtctgagtgaactccggggagttggtgatggacagggaggcctggcgtgctgcgattcatggggtcacaaagagtcggacacgactgagcgactgaactgaacttgatacagatttcaggctgcagtttcctaagggcctagactttcttatgtcttctctagggcttagaagagtgcctgacataagtagtcagacagtgtatgttgaatgactgagtgtttgagagaggcttcaaggatattcccatagcccaaggtaacaaagcagattattgggatattgtcacatttggtatcaagttcaccataaaaggggccattaaatctgcacactccttccctacctcctcctcaactacttttcactgagtggtaagctgctttaatgcttgatcactcacactgactcttttttcacctgatttcctaattccgtaagctgagcagggaacctcgtattgacccaagcaactatgctaacaggccaacctgagttgctgttgtcaaggttcagggaggcagttttgactcagagtgtgggcacaccttcaccctggccaactgagctggagggtcttagagaagtaaatacaagagtaaacattgtgacttcaaggttatataaagaggtgctatcctgcccacgctggcagtggaccatgagtgtgagcacctgtagccccttaagagctacatcttatgt

SEQ ID NO: 37574 - DNA, 1676 bp, Bovine  19866881077678
  misc_feature (1)..(1): n is a, c, g, or t
naatgaggaaatgagcatggagattaaaacaatagcttattcagagtggtacaattagtagagctagaattcaagcctagatagttactactctgttttgaaaaaagaaacaggtttaccagtgtgattttgtttatgtaacttttacctacacataaacttaagaatcctctttttagtgaaattttattagttggaagtctcttggactatatactccctaatttccagattaatatgtaaatagagaaaaacaaggacattatgtcttaaaatcttaagtgtgaattaaaatactagtggcccgaattttattctttgtgatagaaaacatcttagatcctctcttgagagttcaaactttctcacccacccttctgtgtttaaagttacatatcttaagttgtttgcatttcatcatggaaacattgaccttaacggaatgtcacgtttattactctgtgacatatctcggacaagttgtttgcatttcatcatggaaacattgaccttaacggaatgtcacgtttattactctgtgacatatctcggacatatgagaaaaatggaataaattagtaacagtctgttttctttagttgcagaacttgaagtgaaaaccagagagaaattagaagctgcaaaaaaaaaaacaagctttgaaattgcagagcttaaagagagattaaaagcaagtcgtgaaaccataaattgtttaaaaaatgaaatcaggaaattggaagaagatgatcagacaaaagaaatataaacagttctgaagacaacttgatagtaagctaagctgaaaataaggtgggctttaaaggagagatggactacagatgccatgtgtttctaagaggaagtttgtatatagttgtcgaccatagatttttcagcaatggggtcaaagtatttgtactttaccagcaatctttaatgtgaaatatatgtgtataataagaatgaatggtgtataggtattttaccaacccattttggagtagttctgtgatgttaagcacaattttaaaacatttttattgcattgtatgtatagcttatccttttgacaggcattgaaatttcattataaagtataacttatacaaattttgtacttcccctagtagttagaattagtcgtaaaattaacatgtatattaaatttttacctcccccatcccagctcttttgtatctgatgtgcccagtgtccagtaagcactgaataaatgtagtctgcatatgctatttccgcctcttgggtttctttgtcttgaagcccgtggaactctctcattacgattaatgtatctccatagtattgtgaccatgtatctctgatttgcagtcattgtaacataccaaagctctcagatggccaagatcatatctgaagtattgttctgcctaactaccgcagtgtcattagttttcacatagaataatattcaatcccttgtgcatgttccaaagacacacaggatgcatctatgcagcaatttcgtacactacccctgctttctctaccttctctctcaggctgtcttgttcaaatccacatggtgagtcctctactttttttttttcccctgactgtgctgggtgttagttttagcataagggatctagtttcctgaccgcggatcaaacccaaggcccctaccctggaag

SEQ ID NO: 37575 - DNA, 815 bp, Bovine  19866881226573
  misc_feature (1)..(1): n is a, c, g, or t
nacaaaaattacataaatgttaacatttggcaatgtcatacttttaacactctttacacctcacccacccacagaacaatgtgatagtcacaagataattgcaagatttattctaaaacaataattcatgggaatgtaatccagtgataagatacacatttaacattgtagaatgcatctggcaatgagactctacatgtgacattgtttggcagtggtataccaaaaatccaaatttaatactatttgtgaatatgactgtccctagccataataagaccttattccctatgagggaaaaaaacaaaaaacaaaaaacatttgacaatgtgctttcttctagaacaaggaagaaaagggcatatttgtattctggatttccaatttgaccattcaaatctcagaaaaggggagcttaaatctgagttcctttgaaaacatcatcctatcaagaagaatttattatgcagcatgcagttatttctcccacactggccagtccagtgatttaaacactgaaaacaaaagaagcctttaccatgccagtcatgtcaatggcagagcacaagtgtattcatattattcatttaacaaatgttacaataatggcaacacaaaaatgtaataacctaactttatctttcttaaattattaaaatattatagaaatatataaaataaactgcctatgaggcatttttctaagaggaaaaatatcgtacaaatatttatggctccagataattttcagtatatttgccagttgaaacatatcatgattctacctaattatataaatttgagcctcactatta

SEQ ID NO: 37576 - DNA, 955 bp, Bovine  19866881289888
  misc_feature (1)..(1): n is a, c, g, or t
naaatgggagggatgacaatagcagtacgtaatccaggtttgtggtggtgcataaaaagcactgaaaaacaatagcagacccaccagtgtgtacttatttattaattagctggtgttagttagctgttatatagtaatttgccaggtcacctagagatttgctatctttgctctggctgctgcagcaaaaatttctcatctgcaagtataaaactatgaattctgggagcttggtgggctctgcctttcagcggccctctatagatgaattacctggcagccctcctatctctagggatatactcaccacatcctctttaagatgatgggaattgatttttatctttaatttttgcttacaaataattcatctgttatgagaaaaataacaagctccaaagggaaaatgcagacactcatctgttcctgtactgccttgagtcaaaggatagtaattattaacaccaataagcttaatgagaaacaagttgcaagttataatttctatttagactatccattgaggtctaactgtacccatggttcagttcagttcaattgctcagtcgtgtccgactctttttgaccccatgaatcacagcacgccaggcctccctgtccaccaccaactcccagagttcactcaggttctaaaattcagttaaacgccatctcgttacctatcatattagtcaggattctttctgatgcaagtaactgagagccaactaaaactaacttagaaaacaaaagtggggaggtgggagtggggatagaaatttattggctcttgcaacttagaagtccaggacattctggctttaggtgtagctggatcaggctcaagtctgatcaatacggttctctgccttcgggctctgtttctctctgttgtgctcactttcttctctccaagtgagaattaatgtcatcaaaacaaaggataacaagggaa

SEQ ID NO: 37577 - DNA, 732 bp, Bovine  19866881334798
  misc_feature (1)..(1): n is a, c, g, or t
natggcaatttgcttctgtttatggcaaataagaggtgtatatagtgaattcttactaatgggtctcttctcttggggttactcttcatgttctaggcgggggaaaaagtgtgtaaaattgaagaaatatgaagtccattagatgagaggtatattaatcaagaataaaagttctagcctacatcctcaattttgttttcttgattaaagttagattttttttttaatgctaattatagtgaaattcaatagcagggagaaggaaaaagtaaccaaactgaccacaatttatttttctttaagtcagtttgttaattgggttagactcctactgttaaaaaaaaagaagactagataagattatttttagcttgttgctctaaaattccttagtgcttctttctgcttcatgtcaaaagaagaataaatgtctacaagtgataaaaggtgaaagtttccttcacattggcagcctggttctaatgaccagacagtgtgatttaaagacagcagaccctgtgttctgtttgttctgttcgttactagttcccaacctctggcttatgttggtgggaagttttaccattcccagcgttaatgtttggtgggttgagtgctttatcactttacaacatacacctggagaagggtgtgggagaaaagggaaccctcttacactggtggtgggaatgcaaactagtacagccactatggagaacagtgtggagattc

SEQ ID NO: 37578 - DNA, 1477 bp, Bovine  19866881336085
  misc_feature (1)..(1): n is a, c, g, or t
natgttggggtaggagagaagaaattgttgcaaataaggtcatgtacttgggttgtattttttctctctctcaacaaaccttttattgctacccttaggaaccgaataagataacatgctcaacttattattagcaacaatttatctgtacacattgaattgaagatgaaacactccaagttgtttaagattttttttttttaattcattttctcaccccaacccctcacctcaagccaacatcatacctctgtgaggtagctagttgctggcatgggagtggtctatttccaactcagtcaaatagaagctgaactcacaaacatggcaccattttcacagagtctaacatgatttgaccccaaagatgatgagggctggtatcagtgccttacagatttattttggaaaatagtttccttgactactgattcaataagattttctattttaggatttatttttaattgaaggataattgcttaacaatattgtattggtttctgctgtataacaatgtaaatcagctataagtttacataaatcccctccctcttgagcttcccttccactgcaaaaggattttcagttaaagagcaatttagtaaatcagaaatatcatgtaaatataaaacggtaaacttaaacctgcttaaaaaaaaatgaatggatgtttaaacatctaggaagttaaggtacttttaagttttctcataagtatactatcttctaataggaaagtttacacaaactcacttatacatacgtgcatgactactaatttttctgaaaaataacaggaataaaataagcctaaatatagaaacctggagaaggaaatggcaacccactccagtattcttgcctggaggattctatggacagatgagcctgaagggctacaacccatggggtcacaaaaggttggacacgactgagtgaatgcacttaaaatatcttccttatgtaaaagttcaatccacggcaagtcaaatatcctctgcgtagtcagcgtgtgaaatctggtcaggatttgaatttcatgatgggactgacctggctttctaagcagtcttcttccctccaacccagtcttcatccagagcatgccaaccttgaactcagaggactcggcctttataacacacatatgtcaagcacatgtcacctatgactttattgtctatcctgaggtttgccgtcatgtccttatgttcatcatgatgagctacttgaggtcttatactcccttaaggcttctctgctttctcagaaagaaggacactcatatgtatagtgtagacattcaatgaaattggtaaattccctgtatataaatatactccacctacaattaaggtgttacactcctctcttgaccacctgtgttaaaatagtgttttgatattccaaatgatgcagggaagtaatgcaagcttacaaacaaatatcaaccacaaactacagccaggcttcc

SEQ ID NO: 37579 - DNA, 1216 bp, Bovine  19866881397760
  misc_feature (1)..(1): n is a, c, g, or t
ncagtcataaaagaaatcagtcctgaatattcattggaaggactgatgctgaagctgaaactcccaatactttggccacctgatgtgaagaactgactgatttgaaaagaccctgatgctgggaaaaattgaaggcaggaggagaaggggatgaaacaggatgagatagttagatggcatgactgatgcaatggacatgcatttgagtaaactctgggagttgtgatggacagggggacctggcatgctgcagtcaatgaggtcacaaagagttggacatgactgagcaactgaactgaactgagctgactctaaatctggccttgtgtggtgcatttctgtgtttagaattgtcaggacacatttatatattttctgtatgtttctgcctctattaatgcaattaatgacacattatctcaacagaatacatcttttattaaaagataattttatcctcaagtttcgttccatttaaaagtatcttttaagtgagaaatattttctcttggtttttcttaatttcactgagtttactgaaatttaggctttcaaaattttgctaaggctgggttagtgtccatttttataaacaccaaggctatctctttagatttcctatatttttgaaaaaatttcaagtgtttttttgtgtgtgtgatgagcacctcatcatcttttacttgggtgtgtctctttaacagtagacaaagatactacaactgcttcttgaactgttcttataaagtaccacttcatggcagaattttctttcactaaattggattttggggaaagcttaatgtttatggcttcccaggtggcttagaggttaaaagcctctgcctccaatgcaggagacccaggtttgatccctgggtcaggaagatcccctggagaaggaaatggcaacccactctagtattcttgtctggagaatctcatggacggaggagcctggtaggctacagtccacggctcccaaagagtcggacacgactgagcgacttcacttttactttaatgtttatggggaatttttgaaagaatgtgatttttactatttttcttagtttcatatttgattttaatgttcagaaggatatttcaaagaaagtctttaactgcagatcagccaaaacagaatctttccaaagtgaatacagagacattttcctgggtctcaatgcaccctcagagacatcctcaggggcta

SEQ ID NO: 37580 - DNA, 958 bp, Bovine  19866881423530
  misc_feature (1)..(1): n is a, c, g, or t
ntttcttcctttctttaggatgggaatgacaggataagaatggcagggctataaaacttgcacactgttgtataatgttgggtctgtaacatttagagaaaaatgggcataggtttccagtacacggaaccagtcataatcagtaatttaaatcaaactcaaagcatggattttctaaaatggattctccaatgaactaaatataaatattaagatgacttctccaatacaacatataacaaatgctaacaagactggttaaaatgcacatcttttaataaaagcctctgaggggggtgcttacttttcctggactgcatttcaaattgactcaggaactgtttattgcatggcgttacaacaggattctgaccatgaagctctctcttaggcaacagatccattaacttttttgaggatgcttcagatccaacaccaacaagggcaaacctagaaggtgtttaaagggatgtgggaagaaagtgaggagggattaactgttattgcagttattaaaaatgaaatgatgtgaatttaattttacctaccaaaaaaaccaaaatatttcttagaatacaatggtcacacttccacctctaactttttttataataacacatcatattattcaaagtgtacagaattcaatgctttgtttgtttagtatactcagagttttacaatcacagccacatcaattttaagaacattttcatcactcaaaaaaaaaaccccataactgtcagctgtcactccatttcctcccatcctccaaccctaaagaacaaatctgtacatctgcctattctggacatttcattaaatgtgaataacacggtgtgtggtccttcatggggactagcttctttcacttagcatgatgttttcaaggtttaatgcatgttaaaacatgtgtcagtgattagttctttctcatgactgaataatatttcatttt

SEQ ID NO: 37581 - DNA, 1021 bp, Bovine  19866881440118
  misc_feature (1)..(1): n is a, c, g, or t
ncttctgactgcttatcctcgtcatatacgggcatctcactatgaatatgctccatgacgcccagcagccaaagaatgaggagcatgggaggagagtgagtttgaaatgtgtggagtcagaagccaatctgcagtacatcttcccaaagtttatagctcatttatgaaagaaacttaacagaggctttctcgaacttgacaataatcctcaaaagtcacatgattttaccaaataacaaattctgaaactaaaagaagctttaacaaaatatcactaattaaaaaaaaaaaacacgttttttcatctaccatgttaggcatgaaagatcaaaatgtctttaattctcttaacagataatttattatcaaatatctaatgggcttccctggtggctcagaggttaaagcatctgcctgcaatgcaggagacctgagtttgatccctgggtcgggaagatcccctggagaaggaaatggcaatccactccagtactcttgcctggagagtcccatggacagaggggcctggtgggctatagtccatggggtagcaaagagccagaaagagtctgttaattctcttaacagataatttattatcaaatatctaatggagaggtagttaaaaaatgtaccatcaaaacatggaggaaaaggtattacagaaatatgtcagggagttaattaatataaacatctgggttttttcctgggttttgtgatgtttgaggtatttattagcttttagtatttgtaatttgttatttctcattttgaataaatcttcacatttgtgttagttttgtatttatgattttatattcttttactttagaagaccccctgccccgccacctcccaaagagtaagcctcaggttctacaaaatctgagactaccccttgtttcccctggccagccaagctaaagtcactgtgtggtctctctcatgttactgaatgttcattctctcctggcacttatcactctctgacattttcccttggaatattcatagaggg

SEQ ID NO: 37582 - DNA, 1775 bp, Bovine  19866881512533
  misc_feature (1)..(1): n is a, c, g, or t
ntttacctatctacttctgctctattgactatgctaaagtctttaactgtgtggatcacaaccaactgtggaaaattcttaaagaaataggagtaccagaccacctgacctgcctcctgagaaatctgtatgaaggtcaagaagcaacagttagaacagaacatggaacaacgaactggttcaaaattgggaaaggagtacatcaaggctgtaaattgtcaccctgcttctttaacttatatgcagagtacatcatgtgagatgctaggttggatgaagcacaaactggaatcaagattaccgggagaaatatcaataacctcagatatgcagatgacaccacccttatggcagaaagcgaagaggaactaaaaagcctcttgatgaaggtgaaagaggagagtgaagaagtcggcttaaagctcaacattcagaaaatgaagatcatggcatccagtcccaacacttcatggcaaatagatggggaaacaatggcaacagtgagagattttatttatttgtctccaaaatcactgcagatagtgactgcaactgtgaaatgaaaagactcttcctccttggaagaaaagttatgacaaacttagacaacatttagaaagcagagacattactttgccaacaaaggtccatctagtcaaagctacggtttttccagtagtcctgtagggatgtgtaaagcaagctgagcaactgaagaattgacgcttttgaactgtggtgttgaagaagtctcttgagagtcccttggacagcaagaagatcaaactagtccatcctaaaggaaatcagtcctgaatattcattggaaggactgatgctgaagctgaagcttcaatactttgaccacctgatgcggagagctgactatttggaaaagatcctgatgctggcaaagagtgaaggtaggaggagaaggggacgatagaggatacgatggttggatggtatcaccaattcgatggacatgagtttaagtaagctctgggagttggtgatggacagggaagcctggtgtgctgcagtccatggagtctcaaagagtcagatactactgagtgactgagctgaactgcaagtcttgcatatattaaatgacttgcaaagtcacacagtccactggggccagaggtagaatttgaactcagtatccattgactgaggagtcatggtacatcactgtatagctccactaaggcttagaggggagggtatgaattgatagtttacttggagagaagtttctcaagaaagaaggaatctaagttgcagtatacactgatactgatacagtcaaagccctatcatcaattttttggtttattccccttccagtttatctggccaaatcatgatctcgaaattaatgagaattgtcacccctacttagtttaataatatgcatgaattgaaaccacaagtctatttactcttattgtgcacatcagcagatgacctcaattcttatgtcatcgagatcatggatgccattcaaacggatcccataaacttctagccatacaaaatttctctttgttatcaccaaatcctcctttctttcatctccctaatgttcttctcatctgtagttgtggtttcaatttgtactatgtactactgcaaatttacaattaggggaaaatcacttcactttcctgagcctcagtttacttcagtgtgaatatgactggactactcacctcatgcaattaagtgaaatagcacatataaatatacttgaatggtgggaataaaga

SEQ ID NO: 37583 - DNA, 1149 bp, Bovine  19866881661265
  misc_feature (1)..(1): n is a, c, g, or t
ncttataccaccccctacccccaaggagcacatagtttattgggtaaacaaacacaagaatagctaagacactgtgttgtaatgatgccataatagaggcatataccaagttccatgagaccaattaaccctgctcagagtctagggactggttcacagagaaggtgacatttgcattcagccgcaaagaatgagtcagcttcgccaagaaataatgagcattacaacatcagagtcaaatttcaaggagggtatctggttaaaactcggactacaacaatgtcacatcagagaaaattctctcctttagcttggtccagataatgaaaggcaaaaagccatgatgacttttagagttaacctgctaaagtcactcggtgatggttttataaagcaaatgtgtggtggctaactatcccaaagccaccatagtatagcatttagatttctagacagtgggaatttctcctttgagggctcataaataatgaatatgtgttatagtaaagattattgaagatcgtaagccttcttttttcatatgtaggattggtagcttttaaaatattgatgcatttgtgcaagttacttgaattttacagtaaactcaggaaagaaaacgtcaacataggacatcaggccctgggaggagacaacctggctgatggtcccttccctccactgaccaaactttgtttctgggtccagcttgtgcctgactgccttgcctgtcacagcaaatcctcaccagagacacccatgttatagagacagcttgacatgccatttcctcagataacgccagactacttgggtttataggattcttgatcttatttctacttgctctggttacgtaatgaaaataggttcaaccttataacaaaccttggaggaagctaatgtccatttttatttggtttaagatgaaggaaggaaaggagggaggtctgtcctattaaacagtaacttttcccaagtcaatggttagttgaagcattcgatctctataaccactatgcctaactcattcttatgatttcaagtattttgttctttgtccttaagctaaaattatcacattttacaaaagcttttccttatacctcccatcattttagtttttaagtaccttgtgaaatagatatt

SEQ ID NO: 37584 - DNA, 1179 bp, Bovine  19866881693847
  misc_feature (1)..(1): n is a, c, g, or t
nacttggtatcctgtggtttgattgtgtgagccaattaatccacattttagacgttttgttttagagctggtttgagctggctttctagtatttgtgtcctagtgaatacagaaaccaacggaacaaactgcaagggattactgtgctttttaaatgttgattaaaaacagatgatgtgtggagggtacccaagtgacattgtgtcatttactgacctctctgtgccttgatttttttcatcgcaaaatggataccattacctatttcattggattgttgtgaggattaattgaattattaataattcagttagaacagtactgtacctgatataaatttattgtaagttggtgcaaggaagccgttctctttcttcatttaagaatcaatgggggacttcccttgtggcccagggccccatggttaagactccaatcttccaatgcaggggacacagacttaaacactggttgggggactaaggtcccgcaggcctcgaggtcaaaaaagtcagtggtaccaggcttgtgccaatcttgaatcagtgactgtcatgcaaattccttttgttgctttgtatgttgatgacattatgatacaagacactgagattatttaatcagtcttgcaaacgccaatacctacaggaacaagccagtagctcaaatgaaggaagcagggagtaatgggaactgtggcaaaatggaaagcatacactttgtctaaagtgagcagtgacccaagcatagctgatatgcttccttaaccatatgcaagtaccttcctttaccctatgcaaaggaaggcttatcactgctaaagttttaatttttcaggaaaaattttaaaactgtacttttatgtaaactttttttttttttttttgcaatattggccatttaaaaaatacaatgaaggccaaacaaaacatatctgtcagtcaccagcttgaggcttcattgtatgatatttattgagtggtagtggattttttttcttaaaatattttaatcaaaataatacctgagcataggtcttactactgctactgctaagtcgcttaagtcgtgtccaactctgcgaccccatagatggcagcccaccaggctcccccgtcccccggatcctccaggcaagaccactggagtgggttgccatttccttctccaatgcgtaaa

SEQ ID NO: 37585 - DNA, 1649 bp, Bovine  19866880033723
  misc_feature (1)..(1): n is a, c, g, or t
naacagagatcattctgtcgttttgagattgcatccaagtatgcattttggactcttttgttgaccacgatggctactccatttcttctaagggattcctgcccacagtagtaaatataatggtcatctgagttaaattcacccattccagtccattttagttcgctgatccctagaatgtcgacgttcactcttgccatctcctgtttgaccacttccaatttgtcttgattcatggacctaatattccaggttcctatgcaatatttctctttacagcatcagaccttgcttctatcaccagtcacatccacaactgggtattgtttttgctttggctccatcccttcattctttctggagttatttctccactgatctccagtagcatattgggcacctaccgacctggggagttcttctttcagtatcctatcattttgccttttcatacagttcatggggttctaaaggcaagaatactgaagtggtttgccattcccttctccagtggaccacattctatcagacctctccaccatgacccgcccgtcttgggtggccccacgggcatggcttagtttcactgagttacacaaggctgtgtgtttagattgactagttttctgtgattatggtttcagtgtgtctgccctctgatgccctctggcaacacctaccgtcttacttggctttctcttactttggacacagggaatctctttatggctgctccagcaaagtgcagccactgctccttactttgaacaaggggtatctcctcactgctgcccctcctgaccttgaacgtggagtagctcctcttggccctcctgcgcccgcacagccactgctccttggacgtggggttgctcctctcggccgccacccctgaccttgggcgtgggatacagatcattgggatatgccaatttgtaagataaaaattttgactgttaggtatgtcatagtattagcttctctgccttgtggttctttaccacgatctaacacatacttctgtgagtaaagcgaaccacatatttaggctatgaggtgtttccaatgatgtggatcttcaaaaaagcctccctgcttagatttaactggtgtaaggctttttgatacttgtatctaaaagcatcccaacagatacacctgaggatgtggctcagtcatgtgtcaggagactgtttctcagtcataggtggtggtggatcttatttccctactctgatcatactatgtttttgatgtgaagtccattaactgtaggcaaataatactatgaaaatttatttatttaatgtgagtttaggagttactatgtagtagacccttaaactaccacatagtgtttgaaggtggttatttcctcactaatctggtggttctcaaatagtaccccaaagacctgacttctggtttcaccccaaacatgcttagaaactgttactgctttcctcacagtaagaagaaaatctgaacaaactggaaatcgataactcttctgagatccatagagaattgaggtgacagggcaaattgccacctagaaaacttgagagacaagtgaatacagagaatcgcagctcaccaggagcacaagcctgctgaggccaattatggcaggaacattcacatagtaa

SEQ ID NO: 37586 - DNA, 1209 bp, Bovine  19866880357889
  misc_feature (1)..(1): n is a, c, g, or t
ncttcaggacatctttgattaataagaagcggaaagataagtctcatgataattaataaatcattagcagtgttacttttcatcagataagtccattaattgttcccatttccttaagaaaagcccagactcaggggcctcttgcagtgggttgattttatgagaaacccaaacttataaagaaaagcaggtcccacctgcagaggcaccggagacactgtctgcccaacccacacctctgagctttggaagagcagaaaccagaagacacacaacaacccctgccccataggaagggccccaaaggagctcgaagacccctaacccagagctggcacagcaccaactgatcaccagtgtttgctgcagccatactcaacaacaacagcaacaaagccacatcctaaatgagagggggaaagcaatgcctggcagggccacggggccaggaatgaaggcacaagagggaagtccatccattcatccttcatcaagcaaatgatgagtgaatgtcaaatgccatgcaaggggctgggatactgtgcagatcaagaaaagacacagttcctgctctcatggagtttatatctgccttctctaaaatcccttgtcagaggaggaaactgaaacagagaagggacttcccaaaaccatactgagggtcagtggcaaaactggctacagctcctcactgtccccttcccagcccatccttccctcaaagaagcagcaaagggatcctggctctctattcccctgacacccaaacacagatgctctgccaacttctcacgcactgatccccagactctgaggatggcagtgtgttctcattcactcggagaaatgttttgaataccaatcatgtacagaacactgaactggggtgcacagaaactgtccccagaagctggctggctagtaggatagaaaaggcttctttaaaaataatgataacaaagcaaaacaattaggcacaataggagcacttaataacgagctctgagaaattgaaggcaaaatgcttccttgcaagttggagaatcttagaaggctctctgaaggtggtgatagcttaggaaggaatcagaaagaaggtgtggagacagatcctagagggcttagaaggcactgattggaagctcaaatttgttccttggggcttcacttgtcccctctgaaggcatactaagaggggaccactggata

SEQ ID NO: 37587 - DNA, 635 bp, Bovine  19866880384732
  misc_feature (1)..(1): n is a, c, g, or t
nataactatgttcctcctgatgcatccatccctgtacgtggtactggcagcttcctgcgattgccaagcttctggatgctccacatctcctactaggcttctaagctttccatcttctgtgtaagcaattcccggtaccaaatccccttcataagaaatgcctagcaaggctgcttccctcacaggagtaaactgactcatctgtgtctccagcctctgaccctggcaggtgctcactaatctcttattggcagaatgcattttctgttagaatattctaaaaaaaggtggaatttgaccattttttccaggttttctccttggtgccccttcactttccataaccttggcaatccaagaagcatgaggagcaactaaagtgaggccagccccagaaaaatctatgaccaaatcttggaagttcttgaaaattctgtctagttcatttctatttcattttcttaagccccagcttttcactgcatccatctacataaccaatgtaatcagtgagccaaaattaaatatccctaacccctgaccttctaaccaatcacaaatcatgagtgaaaggagccagttcaagtggaaaaatcagttccaggaagcctgctctgtacatcagttctgtcggg

SEQ ID NO: 37588 - DNA, 1528 bp, Bovine  19866880510471
  misc_feature (1)..(1): n is a, c, g, or t
nagtagaagcaagatgggtatgagatctctggatgtaaaatgtgatgtaaggcactgggaggggatcagcacccgcccacggtaagcccccctaaaatagtcactgggcagtaacaataaaaggcatgaagtaccagtgaggttcagttctagaatgtccttagaagagcagcaagaagatggaaaaccacacaggagcttgtttttaaagacaaagaaaaatatgattaagcctgagaatgatataatgaaagaatgaaaatattttccttaccagggcatttgtatgtcaacagctgatagggggtgggaacggccaccacaaggctgccaggtgctgccagcagcaccacatgaggacccaccagcagagacggagtaggctatggctgcacagtggggaagggaggccttgcgagggcctcagttctccagcctgtgaaatgggactacccaatctgggctcagtctggccatgtgaagtgaaagttgctcagttatgtccgactttttacgaccccatagatatacagtccaaggaattctccaggccagaatactggagtgggtagtcattttcttctccaagggatcttcccaacccagggattgaacccaggtctcctgcattgcaggtggattctttaccagctaagccaccagggaagcccaagaatattggagtgggtagcctatcccttctccaggggatcttctcaactcaggaatcaaaccggggtctcctgcattgcaggcggattctttatcagctgagctacatgagaagccccatggcgcccttcttttattttttaaataaaaactgtatgtgtgtaagatgtacaacatgatgatttgttatacatagtaaaatgactactactacagtcaagctaattaacatatcacctcctcacacagttacctcttggtgtctgtgagagcacctgaaatctactctcttagccaatttccagtattcagtacagtttttttttttttttttttggctgcacagcacagcatgtggaatcttagttcccccaccaggaattaaacctgtgcccccttcagtggaagcgtggaaacttccactgaaccaccagggaagtcccaatacagcatcatcaactatagccatcatcctgtacgttagatctctagtcttattcctcctacagaactgcaggtttggaccctttgacctgcacctcccccatttcctttatgcccctgcatctggcaagcactgtttcactctgcttctatgaaatcgactttttaaaattctacctataagggagatcatgcactatttgtccttctgtgactggtttatttcacgtagcataatgtcttccaggtcaattaaagttgcaaatggcaggatctccttctttcctaaggctgaataatattccattgtatatatatcccaccatatctcaatccattcatccgtagctcctttctgtctgccctctttttggtaatccaggctgcagcagctctaggttggtctcaaggt

SEQ ID NO: 37589 - DNA, 1467 bp, Bovine  19866880617086
  misc_feature (1)..(1): n is a, c, g, or t
natgctaccagcatcagagagtaaatattgtaacactgtggtccagtgaagagattccagcaatctctgaaactcttggcaatggaatttgatctatacttttaaagacactgtatgtgtgtgtgcacgtgcgtgcgtgcacgtctatgtgcgtgaataaagctcttcaactttctctaaaagataacataggaagagggaggttgtgcaggccaggcctctccaaataaggcgaaacccaaactctcctttatttttagcagtgcttttcccaactgcaagaaggcataattccgtgaaccagccttgcaaaaatccaccaacttccagaaaagtttcaacaacccatgaaggttcccatgtgtgtgaaaacccgatgacccttttagggaagggcccccagacaaagcctgaaacctgagctggggcccagttgcctcttctccaggacaagtccccagccagactggacagctcggccccagagcaaggccaacctgcacagtctaccggtcctcagcctcctggagaaactcagctcaaaatgtccctgatactcagtgcagtggccatcagcacatcctcaaaaagtcacatcccctggaaaatctgactaaacagtaagaaaaatagcgacagtcagctaacttcatagagactcactgagagccgagcccaaagcagatgaactggaagaagagacgtttaaagtccctcaccatcatcgtcttcctctctctaagctgagtcaggttccttttaacctacgcagcagccaccgtagactggatggcaggaggcagatgcctgggccctccgctcctcaagtcaggagctctcagtgtccgtcaactcatctggaaaatggggataacatcaggatgagctaatcaaggcaaaagccagaaagcccgctgcctcaccatttctgtttccaataggatttttatggcctccaagatggtgtctccttgtaatctttctcggcaacaggctcatttttctcctcaaattcctctgcgtttggctcaggacaatctgtttttcctacatttgtcaagttgctcgaaattcctaatgctcattcatgttctttccaaggattagcagagcaccccttgctcatctttcatcacactccctccgcacgcagggtagaaattatatgtgagtagaggcctggctatcgatgcccataaaatggagattttggcgagacttgcttgcatgggtcagagcgggaatgaggccgaaaatcgggcttgaacatctttaatgatgtgcagaaagagaggggcctcggcccgcgcaggcagatgtgcacagctgttggtggagaagcccctaataccgcgaccagcatggagtaacggataccctcaaatgcttcctagtggagttaagaattttttgttgatcgtgcctttaactaaggtcatttaagtatacaacagatgttcctctagg

SEQ ID NO: 37590 - DNA, 941 bp, Bovine  19866880676884
  misc_feature (1)..(1): n is a, c, g, or t
ntggcattgaaaggctaacttattagacagagaaagagccagcagttattcttggaagagaaggggagactggaaaaaaggtaagggataggggtaaggagtggctgtccttgcagagtcaaggactcttcaacagtaattgttacggctgtatatgggctttgtgctgattatacaagcccgggtgagatatgagtcccttgggtcttcattttcaatgagccttagagatgcatgtgacttgctcgaggttgaacaggtagaatggcagggctgggactggatttgtgtctggctctgtgtgacctgcggagagggcaatggcaccccactccagtactcttgcctggagaatcccatggacagaggagcctggtaggctgcagtccatggggtcgctaagagtcggacacgactgagcgacttcactttcacttttcactttcatgcattggagaaggaaatggcaacccactccagtgttcttgcctggagaatcccagggatggggcagcctagtgggctgccgtctatggggttgcacagagtcggacacgactgaagagacttagcagcagcagttgtgtgacctgaggcccagggtcttagccactgcttggctcctgagtgaggcagagatctatggggttcttggcatgctggcactgataaataagcccacagaacaaaaccccagagagaacataagtcttcagagtcatcatcaatatggaagcagagcttcaatctccacgtgaaatgcaagcacagagcatatattctaagcagaaaaatctataaaaagttaaagattaatggactttagtgaggctccagccagatttaaaaagaacaaatcttgccagaccagtgtttttgccttcggggggcagaattatacaatgaaaagatgaaagggaagcaactggtcaaacacattg

SEQ ID NO: 37591 - DNA, 2539 bp, Bovine  19866880692355
  misc_feature (1)..(1): n is a, c, g, or t
ngggcattaaacgccattcaacccagactcaatggctgagatgatcaatgtctcaggacaacttgattgagaaataaaatattgcttttttggctttagagtcgtcctcagagaatgatgacctcttttcctccacatgccaggagaggagccagagctctgggggaagagttgagatctgcaactttgaaggagctcctggaagcaccagaaagagtgggactctggggtgagaggtgcttacagggaaaggggaagcacaggctggtgggtcctgcttccttgtgaccctccaagaggctggctctctgtggaggtgagagcatggataactgggcacaggagccttagtccagctctcctcagcttgggagtcaagagagaggtcctggtggccgcactggcagagagggagtgggtaccatgaggcttcaagctgcccactcctgtatgaactgcacgggcttgtgctggactgtgcaatctcagggcacttgtatgatgctaagatttgggtgtgggcacccttaaattggatttctccttatttgtgtttgttgggactacccacatgcaattagatttggaaaaccaaagacgttcacactgattgtgagtgtggacatgactgagattggatttctccccatttgtgtttgttgggactacccaggtaattgcatttggaaaaccaaagacattcacactgagcatgagcgtggacagtacaagagtcagtcactgggctgtgataccatgaggtgacacaggaggagagaaggacctgctgttggcctcatgttccccaccaccaccccacttctccctgctactaccaatttctgccttattcctgaaggccccttgggtgagggcctgtctcttctgcagactccagttctcaggcttggagatcacttcccactctgcactcagtcgtctgcttgccttaggtgcctccctatattcaaacagtttaagcagctggaagtctgccttctgacgcacagagggtttccttgattatgtcctgcaagttaaggtgaggctgagactgaaaatgcaaacttgacagagatttctctgagttactaggattggagaaagcctgacttcatctagtctactgatttttgggtgtggtttgcattgcaattttctaaaagataaatagataaatcagttgggatcatcgaaaatggagacatttcatgtaagaacatatgaatgctcaacagctcctgaaaagaataaaaactctagcaacatgagggcttcatcctctatggcaatgcttggctgctgctgaggagggctgccctgtgatgaagctatgctgtttatttggcaccattatcatccttccctatgtctccccctggccctcttccctttgcctgctaggcccatgtcagtctatgagtcagtctcttactctggatacttgagaggtcagtatcctttaatctctccttggcttataagctttgttcagagaccagcctgcttcttcccactaaactttcaatacttgcttatccagcatcattgagtccatcctggtgccactctcctgatgcctccaggttgtttcagtcattgttcccttgtaaagccaaaacccagcccctacaccaagagcacgccagtgaaacctctagcccggtcagtaccttaactttccggtcgtccaggccctttgtatgctcttcaaactccaccccaactgtgaaatccacattatagttacggaatgtgctcttggtttgcgtcttgaacttatcgccatcttgctcaatgatcttcgtttgagtcagatggagggcgatcttgcgggtggcaaaatcaatatctgttggcacaaggagttgtggaggttatgaggtgctcagccagactcattcatttctttaacaaggccaaggacttaagaccagaggtgcggatctcaggctggccacatttcttcgcttaagtgggaagcaagagctgtattgtatatggccagtccgggcatctcagccaactgtcaggaaacccagggtctctgcacacctacttgggagccctgatgggaacaggaggtagcaggcagggttcacccctgagctgcaactccccagggtgtgtgtgtgcacacgtatacacacacatacatacatatatacaacgtggacacacccctcccccacaggagctcccttctatctactgacatattggtttcctcccaagagtctgctgaacagaagtctttgtggtttaaaaaagactgtttaaaagcaaccagtctagatcctgggtaaagacagaacttctgttcatgctctccaaaaggaagcatacatacaaacgtccattctatagcagctttaggaggctgttgtgccttagtcatggcccccagtgcagcttaaacatgcatcagacacttaaccaacactttctcagagctttcttttgttgtctttaaggaaaagatgaataattttttatctttttattacaaaaaattccaaacaaaccgaagtagagggga

SEQ ID NO: 37592 - DNA, 1414 bp, Bovine  19866880743390
  misc_feature (1)..(1): n is a, c, g, or t
naaatgtgagctgagtgatcctgggctccatagatctgagtgcctccacccgtcagcctggggagagaccgcagagccatttcaggtggtgctggacatggctgccatgtccagaggggtccaggaatgggctaagccatccggtggcatgtggccctctacaccgggcctaaaaaatatcactgagtgttttccactttttctagagacgcagttacagagaggtttcttttctccaaagtggtggttctcaaggtttagttacaccagaaccacccggtggcttattgaaacccagattgtaggcctcacccccaaagtccctgatctgggaggccaggggtctggctggaacacgtttttctaacaagtcctcacacactgctgctgctgctgctctcagctctgggaaccactgctctaaggaatgcacaaggcaaacagtgatatatggctgtttgatcctggacttcaggtaacggggtgggcgagggctggggtaaagtggaaaaggtcccatcaaatgggagcaactgtggccatgtcccggggatccacatggcacagaactaaaagggcacccagcctttttagcagtcttgactctgttgaggtatgaacagccaggaatatggatttttctatgacataacaatctttggcaatcactggcaattggctttgaaatttgtcaaacatggtgcaagccaaacaaaacacatctgcaggccggatttcatcctctgttctagaagacagataaggttcctagggaaagaggcaggagcagagctctgtgggctctttggggaggatggcagcctgaccacgcctctcccaggctctctggcgcccatctggtcacctccaggccccctactggcgccccagcactaacctcttctccagccacaccctacactttggccacatgaagtctttgcagacggcacctctttccctgataaaacccctcccagccaggccttctctgacctctgggcctctgtgcatgtggttccctttgcctgaaatgcttttcacatccaccctaattcttacgtgtccttcaaggctccccacagctccagggaaccctccttgaccactgcctgctcctgccctaccagccctgtgttcccagcccactgtgcttccaccactgcaccgggtggtgaaggcctgaggatgtgtctggctcctccactggcctggctgcctttgtgcccccaggctgagcccaaggctggtgtgggacaggtttgaaatagcaagtaccaagtgctgttggagaagacacttgagactcccttggactgcaaggagatcaaactaaatcttttaggattgaccctaaaagaaatcaaccctgaatattcattggaaggactgatgctgaagcgaatctccaata

SEQ ID NO: 37593 - DNA, 4110 bp, Bovine  19866880762523
  misc_feature (1)..(1): n is a, c, g, or t
ntgttgtcctcatcctacagatgaggaaactgaggctcagagaggctaagttaaataagttgcacaacagataagcaagtggtggaaccccagtctgttggactctgaagctatacgtatggccatcttcaaaaccagtgatctacagaggggaacaccacgtggctgactctgtttcttccgcagtaaccctctgatcaggcttagctggagaccaggggatgctgaggacacaaagaatatgctgccagggtcagtcatcaggcccaaggccggggacaccagggtaccactcaggcaagcaacaaaaggaagcaatgaccccccccaccccacaaaggcagagtagaggtctgtgaggaagacgcatttggcactgaaagtagccttttgcacaccagagttccagctactattcaaagcagggtcaacttgaaccaggggcttcaaggtcagtaaaaataaaatgataataccagcttttactgatcacctactatgtgtgccaaacataataactaggcagctcagcaactctgagaagtagatgagtttggccccatttcacagatgaggaaacaggttctgaaagagtcaacaacatattcagagtcctacaatgagaaagtaaagatggcacccgaacctgtttccatctgttgtgaaattccagactaatctgggagtgaagcctcaagaggtgatgctttctaaaactgaagcagtaagacaataatggcgggactttcctgatggtccagtggctgacactctgtgcttccagtgcgagggcgctgattcactccctggttggggaactaagatcctacatgccatgtggcatggccaagaaaatattttaaaaataaaaactgcacatttatatttttaaaaaagacaataatggaagcacagacgagtccagcaaggccctaagaagactcaggtgagtctctgagaccatcaggaaggactttagacctgaactaaatgtatttatttatcccccttccatctttcctgaattcagctgactttaggtaagcagtttcctaggtaccaagaatataaggataaattaaatgagtttcctgttcacaatctggtggggaagaaagactgagagtaaggctgttaataacagctcatgttgattgggcacttttctgtggatggaccgtgctcagctctttaattcagcctcattatagctctctgaggtgggtactgtcattgtcccccattctacagatgaggaaagggaggcagattgcttaagacacccaagaagattccagcgctactatttggaaccagtataccaccccaggcagtgtcattctagaacttaacttctacactgcaccttctcctaacaatccgcatcagcctcttccccagccagggagaagctcttgctccttaatggtcttgtgatactcagtgtagacaaggtcgccattaactttcctgaccaaataacagaggtcagtgaggctctgagagtgttcatgactcacccagcagcgtacaagcaggagagcctacacttgaacccagccactcgtactgaaaatacctgcttctcccatcaggcacttttccccaaacacagctccagtcaatggataatacagtaggcggaagacggaagctccaaaccaggctctgagccatgacccagtcaggttctaaagtactagcttatgatccgagcaagcctctgttttgagaggcagctgtgggccacgcactgcgccagtgcttgaaagtgttagccgctcactcgtattcgactttttgtgaacccatggactgtagcccgccaggctcctctgtccagagaattttccaggggatctccccaacccagggatcaaattcagggctcctgcattgcaagtggattcttcacctgctgagccatcagggaaacccggtgccagcccttactgtgtggtaacgtccttacattcacagaagtctgaaaagtagctacattattccagctttttacaactgaaaatttgtactcggaactcaggtctgattctaatagcccaggtccttaatccctattcaacttttataaaaagtgagctatggaaagaaaatacttaaaagagtagaaatctgcttgtttcctcctttcagctggggctcatagaaggcagtcttggatggggtggtctgtgagcacccagatgcatcacctggcacaaggcccagcacacagtaggccctcagtacgtatttgtggaatgagctaccttaaatggacaaaggcagaatgagacttaaaaaccagagacccaccctgggtggtggggggactgtaggccacacggatgcaccctgagcccatatgcttaccccacaggcatcatcacagcgaactgctcagatctctgccccggatggaagacccagaccaaggcagtgccagctcccccgcctccgcaggtaggttctaaccctctgctctgtcgggggtgcggagcatgggagagggggtgagatgtcagggcttcaggtgagaacccatgtgagccacagcccctgggcacaggtaagagtatttgaagcctgcttggggtgacactttccgtgttgaaaagtcaggttaaacaatctgccaccatcccttgtaaatcgttgtttactaaagtgggatttcctgccccaaaggagtttacctaccttatgacttgcgcttgtgacctggattacagccaggacaaagctgggatcaacttctgggtgctgctgagctagtttgaaagcctttttgaatacaaaatgtgccattatatcgcttaacctaccactgtatagcattgttactcaagtgttttactcggaaaaggaaacctagttttaagggactcggaaaaggaaacctagttttaagggatttaacgtctgtttggatcttccttttaatctgtaaccctgggtttctgccctgtggtcagctcctggtgtttgatggaaccttgtcagctgtgatttcagagcacctcccatggcagccctggtgccaggggttaaatgcacagccccctcaggcacataaaccagagcacagtgatgggggacagggtgggccaggagcaagggatcactggtcccacccggccagcattccaacaggctcttccgtggggttgcctccagcagccctcccaactttagctggtgggacactatttccctatgaggagacctccagattgtcatggttaaacacgcttacaatgccgtcttagaattttacaggacttttcagagccttaactatgttcctgtatatgggactctaatgaggaagggatgtagattgaagccattcttagcactttttaatcatggggctctttttaatgcatattagtattcctcagaactggtgctccccagaacacagactgggaactgctctcctaaaaggacttgaaaggtggggtgagaagagataaactaggagtctggtattgacatgtacaccctgctatatataaaataggtaacaacaggggcctactgtatagcacagggaacaataacctataacgaaaaagaatctgaaaaaaatatatattaaaaataaattaattaagaggccttgaaaatgccctcaagtttcccactgcagtcctcggatgctgatcaaagcatcactcacagcagaatcacctgggtggcttattaaaaacactgaagcccaggccacatcccagacctcctgtggggaagaggcctggaactcagtggttaacaggcacactggggatctgctttacctccagtctggggaactgtgctgttgagtgggaacccaagaaagaaggagctacagagtttcctatatgatcagcttctccagtattgattacattcctctggcctccctgtccgcctctcctccggagccagcaggggctcctcctcacctgaccccagccctgagcacagcacacagtgctcattctcagccctctgtcttctttctgaatcacctctggctcagcagtcactcctgatagagttctcgagacgctgggtgaggacagaggggcctgcccagcacctgcctgatctggagaccat

SEQ ID NO: 37594 - DNA, 1325 bp, Bovine  19866880772562
  misc_feature (1)..(1): n is a, c, g, or t
nttaattgtctataaattggtaatattatctttcctccaaaaacagatgtaaaaacttcagatttcatggaataaaccattaactaatgttaatatcacatttcttttcaaactacagtgtttaaagaattaaaagtttagcatccaaccagtgactgtatatgtgatatgatcttcctttctttgataagcatcatcagttaatttcattaaaaagtattttcatttggggacctgaagtatttgataaatctttactgttacctttttgcagatctgaagtacacattcctgctgtttcagtacaatttggtgttatccttgaagcgtactgccggggaagcgtaggtcacatgaaggcgctttctaagcaggtatcagcttgctttaatcttcatgttcactttgccacatgatatatgataaattgtgtcatatgctatttctcccatcacattgtttcataagagatttccatatctaaattcaattaatacattttttaataaacaatgtaagcttagaaattaagttttggcaaatttagcagaatgttatagaatgctatttgaaaaattaggattcctcatagtattagtaccatgacttaacttttagtagcaaatacctatttagacatgcttaacaatgggtttgatggtaactgttgtgaaatctttagactctgttttttcataccactgagatactctttccaataagaatagtgtatatgattcatatgctctgtcatttgttttagattgacatattttgacaccttagttcgtaggtgttataacttctagaattcaatatactcaagctgctttttcaaactgtgtacacatgcctgaaactgtgatatttcaggcatgaaatatctctcatattctgtcattttcttcctaggtcttcattttctaatcattgcagataatgaggtattagtcatttttaatagattagatattaaatgcttactatatgccaggaaccaaaataagtgttttaagtatgctattttactctcctaataatgtgccacagtaggcactgatactgcctggatttgacaaggtgaaaaacaaggttttaagagattaaataagttgcctaaaagttcacagttattaagtaaaagaataagtttcagacttagttctgtccaactataaaactaaatctctttttttttattattatactgggagttttcacactttttagcaatagtcctcttttttaaattaaaatagagaacaatttcattttttcagtataaatgtatcttgaagctaaagtaaaacatagccaataaacag

SEQ ID NO: 37595 - DNA, 1862 bp, Bovine  19866880786401
  misc_feature (1)..(1): n is a, c, g, or t
nctgctgtccagtccttgtggctggatatcattgattttcagaagtacagagttgaaatctcattaagtttttccaggtgtgtcagtaacaagttatctaagtccttccaaagccattagaagaaatgcaagttctgcttaaggcagatgatgaaggagaatcgggggaccagctcaaagggactggccatggggacagtttcaggaggttgaaccctgggacggggagactaagaaaggctgggacccgattccagtgttgctgtttggactggaagacaggcccagaatcttctctcttgagccactttgaacttgcacacaggcaacagggccaggggtcttcttcatgcatcctgatttgtccagagagccctttgaaggctgtatgcggtgggcttcctctccacttaaaaagaccccttctcttgaggatttaaagcatatgcttggccgaggctgtcagaatgcatcatagagatggtcccaaaccaactgctgagcaccccccggtcctgatcaaagtggaggcggcagacgtcccctgcctgtgggtgctggagcggaaagggggaggagccagccggggctgcaggcttacagcccctagttgtggtggggagaggaatggccaggagctgctgaccaggtaggcacctggatgggccctctgctcaaggtgtctgagatgggtcagtgactcttgtccagaactggaccacagcagcttaggctgggccagggaattcatctggtctgtggctggcagggctgaatggtgtggaaccgtggacaagggggcaactgcagggctaggtgagaaattggaaagcatttatacctggtgtttagacccaggaggtgggcagaggaccaacagaggccctggaagtcctaaatctgaaggtagctctaattaccacagtgcccttgcgtgagaatcagccatacacctggcgctgcaccagctgtggcacctggcctcccaccaggccacacataccagtgtcccctagtgtgacacatcacaaggaggagcagagacgctgagtgccgtgcccaccttcatgcggccagcttgcagcagagttaggatttgaggccaaggctgttgcgcccaaagttggggcccctcacttgagtcttcacagatcagaccacatgtgggttcattagagagatgtggtggtgtcagagggcctgagagcttggggttcggggctcgcagtggaggctggctcagaggccgccatatgtgcagctcagcagctgcacggctgtgtggatcagaagggaaggggtggagcaagtgggtggcgggggtggggggctgtcctgccagtgaccacccaggctggatctgcctgcagatgcctggtagagcagcccatactccccatcttacagctcttccgtccaccttagattctagggtgcgaccccaccctctggaaacttctgagaataaaggactcacagaggtggagggagtggtggcttgcttgcagctgttacaacagagaggctagtctcaggagaaaactgcaaataaagatttcatcagggcccctaacagccttgcctcaggaagacttcagctgaagagggtgccgtgtcttggggagctaggttgcccagctctgtgctttctgcttttctggctccccactcccatcagtagtggccttgcactccagcagcgactgctggttccttgtctgtgtcctccacaggcccagacacaggccttgtgtcccttaaggtctgggtcccaaccccagaggcccctcctccaagtatctagatctttataaccccaaagtctcatctttgtttccccagccctgggggttattaccaat

SEQ ID NO: 37596 - DNA, 1094 bp, Bovine  19866880813933
  misc_feature (1)..(1): n is a, c, g, or t
ncatttaccctgatacatgatatacaaatgtcattatgcatctataaagtataaacgtgttttaccccataaatataaatctcacatcttgtatctgtgcatacctgtgtttctgcacacgcacatccgaacagctatctcacgtgtcacaaggacagaccctgcccatgatttctatttgtaatacgaagcacagacttaaactatcccccaaagccccacgacaacgttcgcgcctgtgtcggagcagaagcagagtggggtctacttggtgttttaaagcgtacgtccaacccgcaggattaagacgcggatactgagtaggtatcataggtccaggagcagcgcgaggaagagcgggagcttcaggcggagcccctgggcgcctcctcccagcgatcttctccggctccgtcccggcccagacaggccaggccaaggtttcttcgttcagtgacacgcgtttctgggctgattttcccaaagccaccgctcagccctctccactccacccctgtccggccccctcgccgtcccgcccctcccccgggcccgagctagtttagccccgagccagcagcgaagggcagagcccaggagccgttttctttcacctggacgctgcgaggaggcttggcgcgcctctccgcgctagggcccaagttccttgcgcgcgcgggctgagggcggacggacctcgccggggccctcggcatctcccggcccagtccgcagagcgagccccggcagattcaagggcttgtgaaagcgtgagcgcggctgtccgccgggctccctaagctcgctgggagggggcaaaccggtccgggctgtgcggggcgtttacaaaaaagtgacttggagatgaactctcccgtgcgcgactggccgccccgctataggggcgaaggcgcctgacgcaagcggaactccgcggagcccatacgaatcagaacagagcgaggctcctggcgctctggaaactccaggaggcagctccgccagagacgcgggtcgtgtctcgggaaaccggagggtggggggagggggaagagcgcataaaagaaaacccaccgaggcggggactggcctgg

SEQ ID NO: 37597 - DNA, 1541 bp, Bovine  19866880845339
  misc_feature (1)..(1): n is a, c, g, or t
nttctaatgacactggtatcagtggttagaaggatgaaggaagaagatggaagcaatgcaagccttaggtaaaagaattatacttgcctccttttgaggcaatgggctaaagtaccaccaagacttgggtccgtgtgtcagagtcaaggccagagaaaactttctacatacccattcagagtagggtgatggggctgccatccctgctgctttagaatttatctcattttacaattcttgctttaatggaaagataacaaattgcgccttgagtcagagagtctgagaaaggaagataaactttgctaagtattgtcatagcctgaatgagaagttgagtgctaagggggcccctgtaaggtggtcagggctccaagagtttgtccccagcttgacttctgtcaaactgtctttatgacaaggatgttttttcctacccattgtgagcgttttatcctcaagacactaaatgctttcatcagtgtctgcttgtgaagaggaagttgttggagttttgcccagtttggctacaagtagggtaggaagagatgtcggaaagtgagccaaagtgcacttgaccggaccgtgtttacctcacatgtgctgtgtcatgataaggatggggggattggtaaaaactgtcatgctccataggtgccttttctagtgaagggtaaactgtagaaaagggaaattgatcaataatgcagatgtaaaggcaggctatttgtatatcatcaggctgtcagcatgtagtttcacaattttgctcccaaccatattttgttggaaataggaaatagcttaaagaaccataaaattgaattgttggttagaaggaaatttaaaaactttaaaatgaaactctcttttatctgattattattcacactaacacattcattcattcccccaacacacacacacatatatttttctctttggtaaagcccttacatgacagataaagctccacctggtctttcaacactgaccatttcctctcctgatccggcatttattctctaccttgtacttgcctctatcccttgtgtccttcctccgcacagagctctttcttagtccttgacaggttctagtggcacttctcattcatccaacagtcacattcatccaacatacatatagctgcacttgtatgtattgaatcagtgaattctatatactttgcattttctgtagacaccagccttatatttgaaatttacaaggtatcttattccattttgtatttgttctagtgataatacagtttttagaaaaccaaagaaaacgttaacaaccaaaatgagaagataatactaatatataaagaattcacataaatctctaagaacaatgtttaaaactgtaataaatagaccaaatatctgattaactaattcacaaaagaaactctacttgaaatgtctaaaagagacctgagaaagtgttgatttttattagggatcatataaatgcaaatttaagcaaaatgctacgtatgaatttagctaaaattattttgtacaggaagcagc

SEQ ID NO: 37598 - DNA, 1902 bp, Bovine  19866880847679
  misc_feature (1)..(1): n is a, c, g, or t
nctggtatatgaggggaacgccccaactaatcatacaagtaccaaggccaccttggaacagacagtgtgaaatgcaaacagaggaagcgtctgctctggctgtatggaaagagaatcctctgagctgtgctcggccccagcagccaaggcagggaccatctcacgagcgacagaactgggctattaaaggactgctgctaagtcgcttcagtcgtgtccaattctgtgcgaccccagagatggcagcccacccgtccctgggattctccaggcaagaacactggagtgggttgccatttccttctccaatgcatgaaagtgaaaagtgaaagtgaagtcgctcagttgtgtccgactcttagcgatcccatggactgcagcctaccaggctcctccgtccatgggattttccaggcaggagtactggagtggggtgccattgccttctccaattaaaggactgaaagtgtcccaaagtgtgacacccacgtggcccaggacaaggcaatccacacacctctgggtgagtccaaggaggaccacaaatcacagcggtgatgggcaaagcagggccctggcagccagaagatgctgagctcagctgcagagtaaaacagcacatagcagagtgcacggcacacagcatggtcctttggcaacaggtcaccggtagcatgtaaggtacctcatcagaagccaaacttacgcaagaaaaactccacctttcttttttaattgctctatttttttttctgatgacaaacatgaaatctgtgtcgactgtggaccgtgtggaaaatataagtatttaaaatagaaaataacaacaataattctgctttctacaaaaatttgtcaatattttggtgtatttcttagtcttttctatttaaacatgcaaatagatgtgaaagtacatttacatatgtttatatacttgagattatccagtcttgtatcctgatttttttcccacttacctcctaagtgtttcgccatatcatgaaaaccttttgtgtgggttcttcatcctatattatatatagtaaatttacttatacattccctaacattttaacactgaggttgctttatgttctgccattataaaaattgctgtgataaacctctttctcataagtctttgtcctaatttctaattacctcctcaggcagattcctagaaggggaatttatcaagcaaagggcacacacatttttaaagccctggatatattttggtaaattgaaaagcccacttttcattcaatgtaaacttttttttttttcaaacttccttttttaacagttactttggaagagaacaagagtaggatttagggtttgaacggacagaaagggaacaagggacaaacccccaatgtcatagggccaagcagagcaggctagtagcccctggacaagcacatccaaaaagaaagtggggtgacttgaagtggtggagggggagctggtttcttagggagggttccttcttagagaagggcgttacaggacagacagcttttcaacagcagagccacaaaaggaggtgggagaagaggcaggccaggcaaagagacagggcttctggaagcatctgcagagcggtgagaagctgggagcttcagtgtggaatccctcctgcctcactggcagctactcccttctctcaccacaggttccagcatcctgaatggcatggggtggccagcacttcctgccctgcgtgccttactcagctgctcctctgcccccagtgtcccccaccccagataacctacaggtcctgcaagtggtgatgcagcgctgcctcctccagactgctcccctatccacacctggactcactgccatccatagatggtctccagatcaaggcaggtgctgggcaggccacct

SEQ ID NO: 37599 - DNA, 2073 bp, Bovine  19866880855831
  misc_feature (1)..(1): n is a, c, g, or t
nttgcagccctccaaaatgcaagctgatcaaattaatatgatgtaaaatgaatgcaatatccttataaatatttatatgtaaagtctgaacttggaggccagaataatgttacatcgactctgaaaaaccactgggtttgcatcttcccagctcattctagtcttctagcaccgtgtggcagcaatgtgttttctcagaaaagtcaactaattttagagaaaattcatcttttttcatttcttaacctggcccatgagagataacagttcacctaggtttcaacatctgctgagaggaagattaaaaacaaaatcctaatttctggtgtgttcttgttgttggaaaaaaatatcagctagcgagtattattagctatcttcgagttgacaagaatgcaggattaagtttctttaaggcaattacacttttgatgacccctctgcatataaaacatgttagctaatgggggtgcagaggggcagcttaagtgtttgatcaggaaatcctgcgtgagcatattggatggaaatttgattagtggccttagtgacgggcgatcagatcctccgggtctgcacaatcagatctggcagcacttgccttcttgcctctttgaaggaggcgaacatttgtacagaatcaagacagtgctgggtccttgggttttggttttttttttcttctgggtcctttcctttaagttattgcagactaaagcctgaaaagtaccttttattttctttgaacaatatgtttgcagttaccttcatgttgtagaataaaataaaaatcggcctttctctgaaaatttgaggtcagaggaagcagaaatgaaaaattgagagtcagaagggacctcaaagaacatccttgtaagcaaagctaacactcacacagtactcattacacctcactgccaccttgctgcaaagatatccacacattcatcctcacaacgcccctgttttaccgaggaggaaattcacacagtacagtgaagtgacccagggtcatctggtggggattcgaacccaggcagctgggctcctgacccgggctcttgaccactccacacattctgcacttctgcttccccagtgatataagtgggaaaactgagctcccagagaagatatgaatctcccagagtgaatcagctatgatttaaactacaatcttttttaatcgttcgatgttcttctctcatgccacctgaacttctaaatttcaccttcctctgttaacctggacaaaacagaatctgttctaggtgctttccatccatcacgccagacagtgtgcaaatgacccccagaaatggatactatttctgttttacagatcagagaagctgtgtcttagagaggttacgtgacttgtctgtggtcacacagcaagaaacagaaaagagatttcatctcacatccgtctcactcctttccactttccttctgagaaaaagtgaagctgggaggaaagaataatcccagcaatatttaggggtcaaacaggagctaaaacagttagtttgcattgtgcaaatttcatgcatttgtttagcatgaggaataggacttcacgttaggtgtattgtttttagttaaaccaataggtattctccatgtgcctaaaccccagtcagccaggtgaggcatggcattagcaagaagtaatggccagattcagcctttaaaagatgcatttaaaaaaatgcaggaaaaaaagtcacatgcgcataggcacgcaggacgtgacacataaacatcatacagtctatgtttcactctatttttcatatggactctaagcttcccagatcctcccctccggtgtgaaccatataactggatacttttacaaaggaaatgaaacaaaacaatcctgaaatctcttagtaacaaaaacgatccaggtaggttctggcatcagactgaccctgagtcacagaaaagtcaattaattgtgatggccataatggatcgattattctgggaaatctccgacatgacttcagcccagcaggctgacaaggagacacacatcaaatgagctagccctttccaagggagcaa

SEQ ID NO: 37600 - DNA, 2274 bp, Bovine  19866880874935
  misc_feature (1)..(1): n is a, c, g, or t
ntatgggtggcaagaaaacagtctgagtcaatcatcaaaccaagcctgacccttggttctgtgtgactcacctggtttcttggcttgtttcttatttcattgaaagccaggtcagactgtccaggtggaatgttcaaaaaaccaaagccttaatgtgaacattttctttaaggtcagggtaatttacaatctgtccagagaagcttttagagatttagcatgtgatgttgaacgtgaccgtaatccacaatgccctctcatggcccttccttcctatcagaaattgattctggcatggttcgttcagatggaaagtgactctgtcagcaattactgtttcttttttcacacactggggttcccccccaccgaagtattaaagcctctttaatgctcctttaggaaaggttaaatacaattatcaccaacatctggagtcttatatctgcctgctatttctactgtgctttactccttggacagttagccatccaatagagtagaagagatttccctccaatcctgagcttgactactctctgtgccaagtgaccccgaaggaaagcataaccaaacaaggcccttagctctggccatggtttacagcatatgttttcttttctccctccctctgtgggtcttccttgcacttcaggaacatatgacactgccacaaaactgtttgtgaccacttacatcttgactctagacaggtccagagaacacactgacccctttcaatagatgagctgaagctgacaaagagggcagtcaattcatctttgtatatggcctttagagctcctataactttcagagtatttggtaaaagtgaaagtcacttttagtcacacacttaagttgtgtctgactcttagcgaccccatgaactgtagcctgccagactcctatgtccttgtaattctccagccaagaatactagagtgggtagccactctcttctttaggggacccaagggtcaaacccgagtctcctgcactgcaggcagattttttaccatctgagccaccaggaaggcccattttgggtaatatgatggttaagtttatgtgtcaatgtgacaggatcaccaggtacccagctatttaaataaacattatctgggtagagaggggatgtctgtgaaggtgtttccatatgagattagtgtttcagttggactgagtaaagcttgtggccctccccagtatggtgggcatcattccatctgctgagggcctccctttcctccaaaaagtgaaggaagggagaatttgctccattcctgtttgagctgagatgttgatcttctgcccttggattgagatggaaaccattggtttccctggctctcagacctttggacccagattgaatcatgcttccaacttacctgggtttccagtttgcagatggcaagtctgggactttgaaacctccataattatattcctcataataactctctctctctctctctcacacacacacacatatagtttcccaggtagcgcagtggtaaggatttgaggtgcaagagatataggtttgattcctggatcaggaagatcccccagagtagaaaatggcaacccactctagtattcttgactggaaaattgcatggatagaggaggctggtgggctacagtcgtggggtctcaaagagtcagacacgactaagcatgcatgcacactcatacacacctacataaatatgctttgtttcataaagacccctgattaatacagatggtgtctcttaatagtgcccaaggtgctcactttctgttatcaaacttttcaatctgcttaaatttatgtcctctttggttaaatataaaaattctcccttaccatatataggtcattacagtttcagattcccagatgtgaggaagatgttaagttaaattttttttcaacctattatttattttaaagttcccatatatgaaagcatattgaatataccttttaaaaatgaagtagatcccctagaagttcgggctggttagcataaggagaggcccctggataacagctatggattatggcaaacctgcagggtgctggacccaacagccattctcaaccttcttgttatagccatccacttgaaacactgactagcttttccagatttacttgcagtgaggaatggccatgttacatagtattgtaccagtgatatgctagtagaagtctgtcagtgcgggttctgagaaagccttcactttcctaatagaggggacagatatagctgactcaat

SEQ ID NO: 37601 - DNA, 910 bp, Bovine  19866880892205
  misc_feature (1)..(1): n is a, c, g, or t
nctggaatctggagaggtgaaaggagccgggtcaaaactccccacttcagccctcttcctcccaccccagacagggtgccctgcccagaaatggccagagatgacaattgctagggctgcagtagcccttcagagaccagaggtgctgacctctgggtcagcagtggacccttgactgttcatcttttatatatagatatatatatttgcctgaattgggtcttagcagcagcactctgaatctttgatcttcattgaggcacacaggacctttagttgtggcatgggggatctagttccctgaccagggactgagcccgggccccctgcgttgcaagtgaagagtcctagaccctggaccaccaggaaagttccttgaccatccatcttgaccagcagtcctctacttgtctggggtctggaggctgaaggagtctagctatcaggaaatacttgctgagcccagctgagcacggagccctgggccatggaaaacagaacagaagctcagaacctggctcctggggccagagtgggtgccagaggtaccctctcaccggtgtggcccctccacaaccctggcctccctccaccctgctgctgccccaggccttctcctggggatggcctgggcagggtccatgggaacgtgaggctctcctggctcttgtttgcctcagctaatctcaagaatgcacttgttttcccttttggtttgggaagtcctcagctctccctttaatgtcgatagagctggggacagaggccgtgggagccagagggcaatgatccctggcttgttctcttgctggctatgtttctctctttccaattgtttgttacttcctgcctccatttcagcgtctcctcacagttcccagaaactgaaataaatgtcctgaattttgga

SEQ ID NO: 37602 - DNA, 1281 bp, Bovine  19866880907460
  misc_feature (1)..(1): n is a, c, g, or t
ntctttgcgaccctatggacagcagcccaccaggctcctctgtccacgggattctctaggcaagaatgctggagtgggttgccatttccttctcccatgtgagggtcctaatatggagttatgggagagggagcttcagagtgagcaaggttcgtcaggatgaggacctccaaagaaggcaggagaaacattcagaacactgcagagaccctgcagaaacactgcaagagaataattcagagtccctgggtagaaatgaatgaacaagtgaatatgtgaatgaatgtctgatgacctaacaaagagttagtttcacgacatttaaattgctgctggtgctcacaaatcaatgaagttagacacttgcgaaaatctttacttgattgcattttcacacagggacagtgctgtgggaaaaacccaggtgaagataagtttggtccctttctatgggtcttccctggtgtgtactggcagccccatctccctgacctccatcccaatggtggggaccagactttgggtggggcaccaagccattttttcaacctagagaagaaggagtgtttgattcaatttgcatagagatgaaaagtacaagggggcatggagacacctcagggtctccagcctgcctctgctgcctagggaaggcttcgaatatatttggagaagtccatgagggtgagagaggaggaggcaggagggggcaaggacagttcctctcttaatggattatccagaggaggaaatggcatggaaagatggagaagattgctctttcactctgcttctcataactgcctgagtgctgatgacttgtgaattaagagtcgaggtttgaagtccacggaaagctgcacttggaatgggtctcagatttcatgtgatgaatccgtgtgcatctctgctctttaatttacaaagctcgcctgcccttttagcctacaactttagctttttccacaagcacattacaaagcatttttaatgttgagtagcatactcatatttcaactttatggcttgcattgttcaaaatgcagttatgaaaagtatgctttaataaagtcacttccgtgggttttttttttttcttttgcagcagctacaagccatatatactattcagaaatagcttgcctttggaccttttcctctgagatagaaattcatttcacctggctataaatcaagctcagagatacctttaatccagaaaagcagatcaaatatatttgataaccctggtgttaaaataccgtatcaggaaaataattt

SEQ ID NO: 37603 - DNA, 993 bp, Bovine  19866880920488
  misc_feature (1)..(1): n is a, c, g, or t
ntctactatattgctgggggcagtgagagtctgtctgtgtccgtctgtctgtctcggctttttctgctcactcactcgcttgcacatggccccataatggccacacagaatctagcctcggctcttgagtctgcggttatacctttctctgtatcttagttcaaatctcaagagaggatctgaataatttagtctagtctatgatttgagtcctctggagtcaagtgatcttccttatccaatcagctataaactggccccagggggtgctggcatggggcaggtgtttaaggttaggtcacatggcacaaacagagcaagtggagaatgtgatgtgagaagtgacgggggcaggaggaatatgattaacatctctctatataatatatagatgtaaagatgtttcatgtggaattgtttataataacaaaaatcaggcttctcactcactggctcactcaacattattaattctctatgcatttgctgagcatgtgcagctttccagactctgaacggaaccctggacactaagacaaggaaatctagcctctgctcaggaaaaaagcacaatcactgtatacgtaggggaacagacacaggcttctcaaagggaggtgataggcaaaacctggaaggtatctctagaaaaaaaaaacataataaataaataaccaatgaatcaaataaactaagcctcaatgagaaacctgctaaacaaccaagatgatgtgacaagcaatagtcaggcccttcctggactggaggcagatgacgatagaatcagagccctctgggccactggccagagccctggaatctggcagaagaggcgattcctctccagaattggcaggcccagtctcccagtttgaacctgcattttggcccaagagtcagcagccccagccgacagatacagtgtccttgcctctacctgagcttaattcaaaccattctgtctgcccctaattcggagcttttatgggtttt

SEQ ID NO: 37604 - DNA, 1382 bp, Bovine  19866880946322
  misc_feature (1)..(1): n is a, c, g, or t
nctacgattctctgaagaactcaatttaaaaaaatagtaaaggtataattgacatattattatgttagttttaggtgtctaatacaatgatttgatatttatatatagtaaaacaatcaccacaataagtccagttaacatttgtcaccatacatagttataaaattgtttgtttttgtgtttttttcttgtaatgagaacatttaagatctactctcttagcacctgtcaaatacacaacactgtattaactgctttgctgtacaatacatctccatgatttactttataactggaagtttgtaccttttgaccccctctacctatttctccctcttctacactccacctctggcagctaccaatctgttgttctctgtatctatgagccagttttttttttttttttctcatgtatcaaccagaacaacatatcacaacatattgagggccaaagtagatacgagaaatgaactgtcttgttaagtcagaatttaaagagttctgcagaactgtaaacattgctactcttatcactgaatttctttcaaagctgtagttattttgtttaagttaacgtgaataggtttagtttgtttttgaaaatgaattaatacatgaatattttggaagttgtcttagttttaatttttaacatgataaatattaataaatataatctacataaataaggtggctcaaacggtaaagaatctgcctgcaatacaggagactcgggttcgatccctaaattgggaagaacctttggagaagggaatggcaacccactccagtattcttgcctggcgaattccatggacagaggagcctggcgggctacagtccacggggttgtaaaagagttggacacaactgagcctttcacctttcacccttcacataaacaagctttttagtgtcctcaaaaattaatactgtaaaggtgtctgtaaaccaaaaagtttgacaagtgctgctatgagttaaagttttttaaatagtcatattttttgtatgtatgagtgaataagtaggtgctttagactttaaactgtggctacagtttcacaaagtaaaaactgaattgttttgtatgcatgttcagttcaattcagttcagtcgctcagtcgtgtccgactctctgtgaccccatgaatcgcagcacgccaggcctccctgtccatcaccaactcccggagttcacccagactcacggtctgtttttactcaagatcgcaaacatgtttcatttgacatggcaatataacattttgtttgcttgtttttcatgtttctccttagcctctgcgacttgatatcaagagaaaacttactgctcgatccgatcgagttaagagtgtggatttgcatcctacagagc

SEQ ID NO: 37605 - DNA, 1310 bp, Bovine  19866880949963
  misc_feature (1)..(1): n is a, c, g, or t
ncaagaacactggagtgggttgccatttccttctccaatgcatgaaagtgaaaagtgaaagggaagtcgctcagtcgggtcgactcttagcgacccccatggactgcagccttccaggctcctccatccatgggattttccaagcaagagtactggagtggggtgccattgccttctcctgaaacactgtaaatcaactatacttcaattttaaaaaagaaagatacaacactgtaaattaactatacaccaataaaaaattaattaagaaagagttttagggatttccctggtggtgctgtggttaagaatccaacttgcagtgaaggggatgcaggttcaatccctgatcagggagctacaatcccacatggcagaccctgaaaatactgagcctgtgctccacaacttgagagtctatgtgttgcaatgaaagagctcacatgatgcagtagagatcctatgtcctccaactaagatctagtgcagcaaaataaaatttttaaagacaaaatttttgatttttaaattatttttaaaaattagaaaaatttctttaaaaaattagaaaaaagaaactgtgaggctacacttatattccagatttcctcttctgtttccctgttatattatttcttaatacctctgagagctaatcataaaaaaaaaagtaaaaataaataattttttaaaattcaaaacaaattaaacaaaaccagggggaaaaaaagtcaatgcttagatcccattctggttccaccagtcagaagtgagcccaagaaccagtattttaactccttcctgttggttctaatgtgcggcaaggctgagaatccctgctctaaaatgtgtcacagtgaaaggcatgagttcctcttgtttttggagtgtaggtggcccaacagaaaatatacagcctaaaaggaaatcaagtagctataaaatagcctgtggggaaaactagcaactatatttcctctctcagcatgaaattagccatttcccctctgattttgaagtagcttacagtgaggacttccttaattatttaattggaaatacaaaagagtgaaatggagtctaactcaatcgggcaataagcatttggtgagcacctgctgagagctgggcacagcgcctggcagccggcagccagatctaatgcagctcctgtctttagccagcaagcccttgggggggccgtcagaacagcaaagcagtgcggggagggcagtgacagacacctgtcccgaaggtcccagagtccagagatggtggaacactgcattttattcagtggtgtctgtgtt

SEQ ID NO: 37606 - DNA, 850 bp, Bovine  19866880985486
  misc_feature (1)..(1): n is a, c, g, or t
ntgcgagcctgactgtcggtgcccacttgaaatacaatgggaattaacactaggaaaagccctgtcctcacagaaccttattttcttgaaggaaagaaggaaattttaaaaattaccaatgagatgaattatgaagggggaagcagatggtcctgcagaagggcacagaagggtacaaacacaaagatgaagcaaagtagatgacctgaatcaagcagttacattatagtaaaagtaagcgaagtacacctgggctttagagcataccatagtgagaggaaggagagcgagcgatggtaaaatggagctgacagagggaacccctaagaagcatggcgggggtgggggaggcaccaatatatctgttaagcacaaaatcagaaagattttaaacatttggatagaatagatcccctaccccaccaaaagcagttagcaagcatcctttccacagcaaggcaaaaggaattcacaagatttgaaactgcagaggacagaaattctgaattagtgatatactgataggaaagtttattattcagtagttcaacacatagttactgagcacttattgtatgtcaggtaacgtcatagacactgggatacagcagaaaacaaaatgttaatgtgaataaaatatcactggtggggtcctagttgaatgtgcagtccttactgtttcattagaatgatataagctgttaagtttacttttgaacttggttcctcctaaggcctatttttgccatcttaaacccctcaaatgtgaattttatctggattttaaaaacttaaccttggatgttggggataattactgtataaatagacacaaaactgtatagtatag

SEQ ID NO: 37607 - DNA, 1401 bp, Bovine  19866881018027
  misc_feature (1)..(1): n is a, c, g, or t
ncaaaaccgatttgaggtcctgtctgtcctgacctaacatttgccccaggactccttccaccctcactgactctcccctcttctgtgcacgggtgcccggtgtcccctgatggaggtacagagtgactgtgattatccctggctccactttaggtaaagtcaggggtcacttgcatggacttgttcgactgctttgggaggacagagaaaatgtgttccttgtgtttgtgggaggagatcagagcctgccacgaggctggggaggccggcatgagacgggcccatataacaaagagaggaacgtgggacacgattcaaccatttgtggagatctaggtaaccagacaagcctgtgggggagggaggggactcccttctttcagatgagaagattaagtggctcattgatggcataaaggtcttcagcagaacctgcccccaatacctaggatcaaacccagctctgcccaccgctgcagccctccttctgttttgtcctttactccactgagccccccaagcaagcactgtgcactggcccctgccggcaacacatatgcgcacacagtcacccccaacacagcactccctttgacttcgatgactgtgccatctggaactatgcagacagaaaagaaaggacatttcctatctgtcctagatatctctgggtgggacaccctgcgaggaaatcctcagccacctcaccatcaattatcatgcgtggagtcaaggggaggcttgggaagagtactttccaaatttccatcagcaccttcctcccaaccaccgaaagtaaagtctcaggtagataaataggtcaaataaataataaataaagaagtaaattacaatctaagacaattccatgtccttattaagcaaccttagctctgaggcaaatctcctagccacttccctgtgttcttaacaaatttctgccctgatcctcttctgtataaatgttgaggcagtctctgttaataaggggctagaatggccatttcaacatatctcatttatttccttattctttaaaataatcagggttttgaattgggcttaaaccagcttgggtggggcagaggcagagaaacacttcatctcaggacagtttgagctgctagtggaagactggttgttatttgattgctccgaatgacccatatctaatttgagaaaagagtcaacaatttgacttttaaagttttttttatatttgtttatttatagaacaatttaatattttgctagttgaaaataaaaaggtccataatagatgaatgcaaaactcatttgatatgttaaatgccatgaactcagaggatgtccatgcttaaagagcccctaaatgttatggaccagccttcccatttgacacatggggctgcggagggaaag

SEQ ID NO: 37608 - DNA, 1446 bp, Bovine  19866881108969
  misc_feature (1)..(1): n is a, c, g, or t
nttagcaagtgctctttctagtaggaatctagacaaggcacaatcaagaaaaggctcatattttaaaacttgcaccaactgtaaaagatattgagagagttcttcatcactgaaagaaacaaaacacagagtaagtcactcaacaatcagagctggaaaaagacccctcttacttataaaacttcaaatactaactttgaaacagtggttcttttgggtcaagcctgttgcatgcttatattcactttcatgactataataacacaaaataagctgaggatttcggtggacagaagagtatatgaaaaggagcaaagaacagctatatggggcactttgagtaagttaacgaggttgatacaaatgatgactgtatttacaatcagcccagagttataataaaaatagttttctgatcatgctgaagaagtttacatactcactcaatcagtttttttaaatacaaattccatcagtacttcagcaacttaattttcctttcctatcaaagggttaagtaatttttgatcccagataatgaacgaacaattaaaattttcaaatactttgaagaataaagagtacatttataagttggaaggactcaaggaattaacaaaacactataattaaatgagctgaattaattaagattgtggctctctattttgtatctatctccaaaccattcacatgtaaacagtctcattagaggcaattcctgtagtcaggttaagatatgttatctcaagtcctctacttggtgactagtcttggacaataaacggttaagaatgtagtctaaatcagatgtggaacctaaatctagaacattattcatctgaaaaaaaaaaaaaaaacaaacctcacaagcagaaaatttaacagaggaagacacattagaattacctatatggaacatgagatcacagcaatctctgcctaggggtcaatatatttgaaaacaacaattggctcattccaaggaggtggcaggtagcctgcccctcaggtatccaatgcaaacttagggaggctgaggaacaatggggagcctcatttttaaaaactatctatacaacaattttaagcttactgtaaaatccatgcccattataaaaccgataaatagtgtgacagaagtatagaaggggcctcctctttcctaatacttaaaaagacgtctcataaacatacctgaaaaaatattttgtataatttgctttgaatatcacacaatttaaaacataaatgatttattttaaaaagaaaaaaaaatcactatatccttaattttctggagaagttttgctttttaaataatcatacagagacttccctggtggtccagtggttaagattctggactgccaatgcaggaggtgcaggtctgacccttggtctgagaactaagatcccacatgctgtgcgtcacagccaaaagaa

SEQ ID NO: 37609 - DNA, 757 bp, Bovine  19866881133856
  misc_feature (1)..(1): n is a, c, g, or t
ncacccacaagttattccttgcccccaaaaagcctcctgcaggagatacctcatctgttgcaggcagcccacagcatattctcgcacatactgatctggatagttgaaatctagaagctcaagggcctcccgggggggcagtttaggccaaatctgaagcagtgcttgaagctgtttaaaagttgaaaggaaaaaaaagattacttttctctcctataacttctgaaccacttatccgttttttctcggtacacaggaacagagatggtcaaaagaaaggagaagtatacgtgcaattactaaggcctcaaaaatctattattgctaatataggttaacaaaagatggtctctgctgaggtattctataggtaagcaggcaaaaaagcgattatatacttagctagaagtagaatgatacactgaatatatgaattctacaatcattaaccattaaatttttttttaaaaaaggaaataaaggcagggcaagaggagaggagaaggtgagaggaaggggaggagagagaaatgactaagaaatacttaaaggcctttgagggagactaaagagggagggatgtatgtatacctatagctgattcaccttgttgtacagaaatcaacacaacactgtaaagcaaatatcctccaattaaaaataaattttttaaaaaagaaatacttaaaaaaataaaataaaaaataaaaagaaatacttaaaattcaaattacaaatataagctaaaaagtacatt

SEQ ID NO: 37610 - DNA, 2492 bp, Bovine  19866881158918
  misc_feature (1)..(1): n is a, c, g, or t
natcgaacccaagtctcctgcgttgcaggcagacgctttaacctctgagccaccaggaaagccctagacgcgcctttaaagtgacacccagattaaaggcgctgccgcctgcatcacctggaggggagcctgatgggtcggcgaggatcctctgctacttccgggctcctggccaattggttcttcctttgggatgacagttgagccgcaacagatacacctctgagtgtagtgtacgtcaaattcgatacactaaactcttggtttagtgacggaagtataacaatgaccatcatgctaaactgatacatacataagttgaccatgcagcagttgatattaagacaatcaattctaacatctctttcccttccaacacacctgcaaggatctgacaatcattaacaacagacaaaggcttaaggatgccatccaaaaactcacctcactattggaccaaaagaagataagaggtcactaccagggcgacgtctcaggggatgaaggaactacatttcagggtcctggtgcagcgttccaatggtgagacttcaaatgtaatcggttttccggttaaggttttcctcatctgaggtcaacaagaggaaagccaaggacttcacccaggagtggcacgattgctccgcccccttcaggcctataaaagcatctacactgaactacccaccagggtcaggactctagggcttcccagactactccatttctgtaggcggagcctaggaaggggcggggcttagcgtgcggctgcttagcgtgcggctgcttagcgtgcggctgcttagcgtgcggctgcttagcgtgcggctgcttagcgtgcggctgcttagcgtgcggctgcttagcgtgcggctgcttagcgtgcggctgcttagcgtgcggctgcttagcgtgcggctgcttagcgtgcggctgcttagcgtgcggctgcttagcgactctggttccgcccgcttcactcacggcacccttggcccactcctctgcaaacccgtccacgtgaggagctgaagcttcaaactcgcaagactgaacgcagcagctcccctagaagccacgactgagtgactccccagaggcaaccccaaagttcgaagactcgtcctgcgttcctgcgccccaccgcccctcgtcggcctcacctgtcaagccgacctttcactgcctgcaggacccagccctctgtcgccttctgccaggtcccaggcccgcggcgacattcacatgatgggctgccgaccgcgcagccccaccgcctaccctgaggacacgtgggaacagcaggacggaggacccggccctgccaagcgccgccgaaccgaggagcccgccctccccaagtccgagtctgaggcggcgcccagcctgcataacctgacctggtccccgacagcgggcactctcattttcgtggctgtcctgccggcgggatgtgctctgcacgtgctcctggacgacgtcgaactgctgctggagcccgagccaacgtctgtgtggcaagtgtgtttcggaggtcgcatcctcatgctggtccccgaggccctcctgggctcgggtgtggaagggccgtgggggcagggcctagaaccgggcgctgtcctgagccctcccggagagtacgtggccctggagccgggactctcctgtgccgctgtcccagagatcgcctgccagggagaggccagcaaggaggacgcgaatgctgacgctgacttcctgctgggcgggatggatgctgcctcagtcccagtcgctgggctccgctcttctgctggaagtttgactcactttgacctgttcgacctagtctcagagctctcccctcgggcctccaatcctagtccagagagaggctctcctcagcacgacgacaacctggacttgcaccttctggagccctttcctgactcaccactccaacctctacctccttctccgagtccaggtccccaggaggcgcccctgtcgcccaactggtcctccttgcaaggcccggagatgcctgttccctgaatccactgcctcccacaattcctggactcctgagcgggcaccaggacagaatcttccgatgttggttgtgtatatattgaacacaccaaaagaagcacacgaataggtcctttttgaatgcaggctgcattgcagaattttgatcagtggctgcctgaacacctgaaaggaagctcacctgggcaaagaaaatccacttgaaatgcagcattctttcagccagccagactgctggtaggttttctctaaagaggttacccttaagcagatctgttgttgtttttgtttgtttgtttgtttgctgttgttttggactccgtgcaactctgtggactgtagccctccaagatcatctgcccatgtgatttcccaggcaagaatactggaataggttgtcgtttacttctccggggcatcttcctgacccagggatggaagctgcctctcctgcattgcag

SEQ ID NO: 37611 - DNA, 1677 bp, Bovine  19866881176754
  misc_feature (1)..(1): n is a, c, g, or t
ngcaggagggaggagggtttaggatggggaacacatgtatacctgtggcggattcatgttgatatatggcaaaaccaatccaatattgtaaagttaagaaacaaaataaaattaaaaaataaaaaaaaaaagaatatcaacaaaaaacttggaaaaaaaaaaaacaaaagaaacaaacaaaaaaaactacatgataataactacaggaaatgcttacattttcatgttaagaataaaaggatacaaattcttatagataaatatagtaaccacattttttaatatataaaattcatatacccatcttcaaaaaaaaaaaaaccctttccataaagtaagaagaaaacaaaaaagacttgaaaatgtgaaatggaagatgagatcaggttcaccatcctttatccacaatttcaaagtctaagaaactcttaaaaagcaaaggttcatttataactcatttgacaataaaacatgaccagaaatgacatgaagctaactgacagccttcatttgtctcatttagtgtgaatattcatatatttcacttctagaactgatgcgtttgattactgagttgtcccagaccctacatggggtgttgagtgatctactatctttgtaaaatacataaaagtttgaattcttaaatacatttgacatctgaagttttagttaacctgtaatattttaactctcttcattcttaactatattttctaaaaagcaaacatttataatagaacacttatatttatgatatttactaaatttgccaaagcaaaaatgaaaacaacataagggagacttactgtcttttcaaaaatcaattcttagggacaaaaattatatgatataatttcatttatattaatccattattttaaagtttaaaattatccccattatgttattattattccattataaaactttttcagaaattagtatataactaccacttttccagatttcctgatggtctgatacttagagggattcatggttttagttgatttcttagttttcactttatccaaaactgcataaacagcaaaacataatcgagtcattcgtggcaggtcacaagtgttgatatcaaattccagtggttcattccaaatatgatcattcttccctgatatctctgagcttacgacagttttacacaggagttcggtaccatgaaaaaggccggccctgacatgaacctgtaatgacggagacaaaaacaaacagagagtcatgaatactgcaccagtaaaacatatttgaagaatggagaaacgcatactggcagaagaagcagacaaactctaggaaagtctattagtccacagaaccacatgtaattcacaaaactgttagctaaaacctatttttcacgtactaagcagactagctaaaacatgtctcaatggtgtaaatggatctaaagaaaccaagaccataagtataaaacctactgctgctgctgctaagtcgcttcagtcatgtctgactctatgcgaccccatagatggcagcccaacaggccccgccgtccctgggattctccaggcaagaacactggagtgggttgccatttccttctccaatgcatgaaagtgaaaagggaaagtgaagttgctcagtcgtgtctgacccttagcgaccccaggactgcagcctaccaggctc

SEQ ID NO: 37612 - DNA, 1291 bp, Bovine  19866881270597
  misc_feature (1)..(1): n is a, c, g, or t
natttgagagtcgtttagaagtttagaaaatagatataattgctaacataggctgtaaattctacagggaagtcaaagcacagaggaaagcggtaagatgaaatgaagacaggctttggatctcagcttaaatgtcacttcttcagagaggtctcctgcacataaccctattctcttcctgcatagcacgtattataatagcatgattatttgtatttgttccatatttctcttctcaactatactgtaagctccacgtgggaaggaactgcacctggtttactcgccaccgtatacataacagcatcaagttgaatctgggatacataacagttgcataataagtttctgtaaatgaacaaatgttaaatgagtgtttgagctatttgaatcctggtgggtagatgaggcccatagaagactcttgagaccagcacagcaggacactgagctaaagactgaacttgtgtgcagagtccttcctttgctagcaaacagaagagctagaaaggccttcgggctcgtaagaaggaattcctttggagcacatgttatagagcttccttccctctatttgctacatacaaaatccaggggcgaatagagagaggttgtattgttagtaattagaaaataatcagtctttttgtgctttgcaaattgtgaaggatactggtgatcctgcatctagtgtccattttcctctcaatctttataggactccagttttacccaaatagccatgcttccaccttacaacccatgtgactcaaggagcatccatcccactgctaattccaattacgctaactccttctccctgctggaactcaggcttaaatcatctgtacatttgccaggcagttactgattggaggcagagtgtgtgcctaagtgacctaattggctcaaaaaatcagaagtaaagatttcagatggaaaaggaagcatgtggtcctgattgctcctggtagacatctggaccagcgctttcatttgaatttgaaacttactatgtttacagcagaacacagggaaaactcttcctagatactttgataaacttgatagcctttactttccaataacttgtccttgatagcttgttgaaccactgaatcaacctagtccaaagtctgtgttgcctctggatgaccgttatatgagataacaattttcttattgcttaagaagacattttcatttcagtgttctatttatagctcaaataatcctaattgaccaatgatatttggcctcctacctataattaagcagtgacactcagaaa

SEQ ID NO: 37613 - DNA, 1353 bp, Bovine  19866881600838
  misc_feature (1)..(1): n is a, c, g, or t
natttgttgtggggaccaaagagaaaaagtgcgaaaatatcagggtcaggcctggcgcttggtaaggatttagcacatgttatttccctttgttcctaacaaaaccccaaacctaacaaacaagtgtgattcttgaaagctactttgtgaattttatttgggttgctttaattctcctttttgtaatcctcaaaagcatgctgctgacactcatttcaaaggtcgaagaactttagctaagacatgaaagacactccgtgtttccttcctggaaaggacccagccaaatgctggggccctgatctgggcaggggcggctctcagaaagctctcaaacccagtggcattctcagctctgcggcccagggagtgaattctgccattgacatcgtgtttttgtttttttaaaataagaatcaaagaaatctctttaatgaatcaagaataggatcagaaagctggcaaaagagtttaaaccaaactgttaacagaggtttggtagatacttagatgcatgaatggatggatgaaagtaagtcaaggagggaaggaaatgaaacatgtttaagtgctgatatagaaagatgctgaagaaatattgagaaacaatgtgcaaagaagtagatcctttctttcttctctcctttctttttctccttccttctttccctacctccctcctctctctctctctctgtttttctttctgtcttttccggcttttggtagaaatattgaccaattctggggggcttcccgggtggctcagtggtaaagaatctgcctgctaatgcaggagatgtgggtttgatccttggatcggaaagatcccctggagaaggaaatgaaaacccattctagtattcttgcttggaaaatcccatggacagaggagcctggcagactatagtccatggggtcgccaagagtcacgacttagttcactaacaacatttgaccaattacctactcaatagatacagagctgctggcttctatatttgaggaagatttggggacagaccagccagaaacagtaccagtgattacctctggggagtggaaacgaagctgagtaaggaaggggcctttccttttcagtccactttctcctgtgctgcttgaattctttttttccttttacctaaaaacagacagcagcaacagaaggctggaagcagaaggcaggttctgtggaaggggtcatcctgagttcaaggctggagctggaggcgaggcctctgcctgggaggaggagcctgctcctgagtgaacaaagctgcagtttcccaggggtccacagtgggatgacaaatggcccttctgtcaccagcacacagagccaggctcctg

SEQ ID NO: 37614 - DNA, 2726 bp, Bovine  19866880036724
  misc_feature (1)..(1): n is a, c, g, or t
nggaaatagatggggaaacagtgtcagactttatttttctgggctccaaaatcactacagatggtgactacagccatgaaattaaaagacgcctactccttggaaggaaagttatgaccaacctagatagcatattcaaaagcagagacattactttgccaacaaaggttcgtctagtcaaggctatggtttttcctgtggtcatgtatggatgtgagagttggactgtgaagaaggctgagtgccaaagtattgatgcttttgaactgtggtgttggagaagactcttgagaatcccttggactgcaaggagatccaaccagtccattatgaaggagatcggccctgggatttctttggaaggaatgggtgctaaagctgaaactccagtactttggccacctcatgcgaagagttgactcattggaaaagactctgatgctgggagggattgggggcaggaggggaaggggatgacagaggatgagatggctggatggcatcactgactcgaaggacgtgagtctgagtgaactccgggagttggtgatggacagggaggcctggcatgctgcgattcatggggtgcaaagagtcggacatgactgagtgactgaactgaactaaactgattgcattttctactcattcattatattgatcaattccaaaattctgtttggttctctatcgctatttctatttctctattaaacatgtttcgttcatgtgtttttttcccccccagtggattgtttttctgttttgttttgttttttctctcttgtagtttgctcagcttccttaaaacaattaccaggcaaaattaaggtcttgatttctttggggtcagttgctgggaaattattgtgttcctttggtggtgtcatgtttcctttatttttcatattcctttaagtcatctattgcagcctttgcatttaaataaggagccacatcttctagtctttactgactaaatttaggagaaagtccttctgtcacccctgttacagattctaaggctttttcagatcttttctgaaggtctgaaatgctgggctggatgaagcacaagttggaatcaagattgcagggagaaatatcaataagttcatatatgcagaagataccacccttatggcagaaagcgaaaaggaactaaagagtttcttgatgaaagtgaaagaggagagtgaaaaagctggcttaaaactcaacattcaaaaaactaaaatcatggcatccagtcccattacatcgtggcaaatagatggggaaacaatgggaacagtgacagacttaattttcttggactccaaaatcactgaagatggtgactgcagccatgaaattaagacacttgctccttggaagtaaagctgtgacaaacctagacagcatattaaaaagcagagacattactttgccgacaaaggtccataccgtcaaagctatggtttttccagtagtcatgtatggatgtaagagttggaccataatgaaagctgagcaccaaagaattgaagcttttgaattggggtgttggaaaagacatgaaagtctctggaactgcaaagagaccaaaccagccaattctaaaggaaatcagtcctggatattcattggaaggactgatgtgaagatggaactctgatcttttggccacctgatgtgaagtactaactcactagaaaagatcctgaccgggaaagactgaaggcaggaggagaaggggatgacagaggatgagatggttgaatgacatcaccaacttgatgaacatgagttcgagtaggctccaggagttggtgatgaacagggaagcctggtgtgctgcagtcatggggtcacaaagagtcggacacgacttagcgactgaccaacaagaggaggaaggtgaaggaaagggggaagagaagatgggcggccctggaggcggaggtggagggggtggtgatggcatgtgtccatgtgtttggggactacttgcctcgatgagtaggacccccttcgctgtcctcagtttcggggctgggcgcctggggcctggagcccccccactgacctaggtcttggccaggctggccaggctgtgggcctggccggaggctcacgctgccttgcaaggcatgtaccaggtactcctccacggacagcttgtcccttgagccacgagacgggaagctgggcttcaggtgagggctgggcaggggcttctggctatctgcacaggccagtctgcccaggtgagggccaggcaggggctgctggtcgtctacacagtttgtcagtttgccaaggaagaaggactctagcgggtgaggcttccagggctggagagggtggaatgggaaggggtgaggcagcctgctgtaggggaagggctggggcagggggctggcgtcctgtgggtggtggactttccacacgtggttcagacactgcagggggctgatcagtttgtggagttctggtcgaggcagcgttggccgcaggccctccccaagcttcttaaaccagagctgaccaaggcccggctccttcagaggcttggtgaactgcggggcatttctaacatatgggggacccagtggaggctcatcttcctgcaggggaaacacagcattaggacacggagctgcggtcatggtgcagttcttctgcaagccctgagccgggcacggggactggggtcgggggaggcctcacctgcactgggaccg

SEQ ID NO: 37615 - DNA, 1600 bp, Bovine  19866880487877
  misc_feature (1)..(1): n is a, c, g, or t
nttaagatcaaatatgctttttattgtgtttgacttcgcttgggctagtgactccagagaagggtatgtcgttgaacagagcagggacattcagaagcaagttcacaaccctgcaagactcctaacttttctctcttctaacaaatgtcaaaatacagctatttaccaagtgaaaggtaaaactccctttacgccagaccaataaacagtttccccaaatgtcagcttactacttattgtttctttacttatctttcccacatcccaaaggaaaagttttacttcacaggagacctcaactgaatgctttcccttgagcatgacatactcattcctctgtgtcctctaagaaaagaagagcaaaccaattttgctattctccaaagtaatttattttatacactgtaaatcatccatttattttaatatagacttgtttttttctaaaatttaagacatcttaaactgcaaattctttttattttttcactgaaaaggccagttacttgttgagatattccagtgtcccctactttctgcagagggattagcagaaatgtacaaagttatgtgaagtgcattatcaaatcaaattgatctgaacctaagaatagagaaagaattttatgtaggatgcaatttggaggatacagtcaaatagcagtctcatcaggatggtcttcctgaagccattgtgctgatcagcggcaatggaaaagcctatctaagtggtattcaaaggattagcatattccaatattagcacattttgactcttcctcagtccattgccacagttcaagggcatgggcacttttccatttccatgtatttttcccctaaattctctctttagttaatgctgaagtttcgagctttcactgataattacagtcagaaatgtggttttgcacaaacttactaagaaaatgtcaagtgtattaagcaataaaagagaattacatttcattggtcaattatttgaatatacataatgtccattgcttttaaaacatcaagttctttttataatgggttttcttgaccaccatacacaatcaattgaaaatggagctcaaattacaaggttactattgtcatcaggttaatttcttatatactactgcaaatgtgcaggaatggagtttaattaattcatattccttaatttgaaggatgtaaatgtaattatgttgatacaatgagactattgttgttcagttgcccagtcgtgtccgactctttgcaaccccttggactgcagtatgtcaggccctctgtccctcaccatcttccggagtttgcccaagtttatattcattgaatcggtgacactgaaaggttgtttttgaatcacgcgaagacaccaggattcttggcccccggaggagaagaattcaatctggggccagagacgaggcttgatcgctcagagcttttgtgtaataaagttttattaaagtataaaggagatagagaaagcttctgacataggcatcagagggggcagaaagagtacccgcttgctagtgttaacaatgaagttatataatccaaagaatgtctggaggttgtaaagacctcatcagacctactccca

SEQ ID NO: 37616 - DNA, 1614 bp, Bovine  19866880789406
  misc_feature (1)..(1): n is a, c, g, or t
ncagcataaactggtaacctcctttgccactacatagcatgtatttacaaattttataaacacttgtcatattataacataattatttccaagcttcttccacaataacgtaaattgcttacaaatagtaatgtgtccaaactcacttttccatccctttcatctataatacaattggttttcaatatgcatttgttgactaaacaagagaatattttatgaatagaacaaaattccatttttcattaggccatacaaatattggtctcttgttatttcagagaggaccatcctcagctttatacaaaaaggaaataatatcgcttaatattatgattaaatgcctggttcatcacaatggtctgtagccaatgggacaagccatgaaatggaacattgttgctgagggtggtacagaaaccaagagaagctccacactgatagaccatatacaacatccaaacacacaccaaggtaatgcactgaccaacattcctcatatggaaagtgtgatgccaactgatgatatttaacaatacctgcatctttaagctctgttaaaatcttctcaccactgcactgaagtttaaagatatgggtcttgatttctaatttagacaagggcttggtcctatagaggatgaaatattggtcaaaagtcaagacaaattttgtcactaggaaaaacacagccctctgaaagctggagacaacatgaaaaggagatctgctacataaatcacaagtccaatatagttttaaatacagaagattgacttggggtatggataacttaaatttaagtcttaggtggctttcctgtttactatcaaaattcaggattctttccagagacaaaactggtctgaacctgctaatgggagcaaagtatctctatcagtgaaaaacgtttgccaagataaggaattaggcagaatctaacaaaaagcttgcaactatggttccctatgagcatatccagtccttcatggataggcagcccctttcatggcttcgtgaagtgaacttaaacaggtggcaattggacacttttagcctcaaaaaggttctgattcactgacccatattacaatctgcagtctgggatgacctcagatctgttatccaatcctatttgaagtttacttacttggaattactgttcctaaatacctaactgctcaaatttcagactgggtgtatttaactttgctttgtaaacatgaacatttacctcgtggatcatacgtgtgtttggactcaagctgagtaagcccctcgactagatgaaacccacatccttagagcaatcagcaaaatcccttttgcttctaactgttctatccttgaagaaatgagatgaaatgactccacatttttcttactaagaggcccttagtaggattgtgcaactgcaggatgaagggtcagacccagattaaacacgactttttagttcacaccctaaacgcttggatcactgtccaaacagtatgtgtggccctctgctatttgtatttctacactaagatgcatttcttctctcaaaattataaataatatttattccaggtgtcaaagcacgggaagcaacttcatgggttctgggttctg

SEQ ID NO: 37617 - DNA, 1775 bp, Bovine  19866880963570
  misc_feature (1)..(1): n is a, c, g, or t
ngccattgtcaccttataaatcaaatcctttatagcattattttatagccaaaattttcagtttggcttcttatttttacttcttatttgatgtgttcacttaatttttcctttctggccatttttgacatctacatattcactgatttaagggaaaaggatttgccacaggatcagcatcctaagtagtaggttcattaatttataggatacatgaagcatctatggagaataggattgagccacagtggaggaagggcttatgggctgaattttacccccctgccctcccgcccctgctatttcatatgttgaaatagaaggtatttggagataggatatttaaagaggtaattaatgttcaataaagtcattgcaatgggagaaaaggggaaattaagacatagggggaagaccatgcaaagacacagggagaagatagccatctataagccaaagagaacttctgtttaagccaccttatctgtggtgctttgttagggagatcctacaagtagaattactctttcttagaaaggtagtttgcagttcaaataaactgatgtaatcacacacaataagaacacagttggcaaacttaggtgtaaaatagaaaacaaaacaagagacctccaggaaaaggagtatttagtcaggcagatgtctttatacatgaaatcttgtaaatgggattcagtattatccttcaacctgacattgtttctgctcttccatttactaggcttaaaaaaaacaaaaatgttaagcctcatcaataacagtctcggggaaatagtactattcttgttgacaccaagaacacaggagagccaagcaataatgctgttaaggatcactcagtctcttggttcacacctcatctccagtcataaatctgcattcactaaacatggagcctttgctgcctgcacagcagactatcaatgaagcactatataatattaatcatgtactaattagaaattaagttaggctgataggacttaatttttatagttccttaggtacatgttacatatcctccaaatttatcaggatctcattttctctttagattcaaataacagcaaagggcaataacaaaataaaaatagccttctctcccgagactactgaagacagtgattaaaagttaccagacatcgataggctttgtaaccatgacatcatttatatgtatcatctaaattatgtggttattaatttttaaccaccaagcatatagtctccagtatcacatgaaatgtatacttttatttatttatttattttttgtgtggtaagaatacttaacaggaggtctgccttcttaacaaactagatgcagaacatagtattgtaaataataaacttggggttgtgcagtagatccctagaatttattcatcttgcatgactaaaactttatacttgttaaacagcagctcctcgtttcctttttcccagtccttggcaaccaccattttactctctatctctatgagtctaaatattttatatctcatatacagtatctgttcttctgtgattggcttatttcacttagcataatgtcctcaagattcatccacattgttgcatgtggcaggatcacattttctttatgttttcatgtattaatgagtatcagacttttatactgcttccatattgtggctattgtgacttactgatttctcaaaaattaagacttagcactttgtaatggtttcaatcagttttgagagagcaataattttgcttaaaatattaaa

SEQ ID NO: 37618 - DNA, 1911 bp, Bovine  19866881239668
  misc_feature (1)..(1): n is a, c, g, or t
naatgacacatgttcttaaaacaaatataattatgattagaaatattagtttctatttagatgataagaaaaatatcttaaaatatagttactaatatctttctaccaatattaaaaattttaattattaagaaaattttaagcataatgattattaaaacatctttctgaaaaatgttattaactggtaattaataggacacatcatagaatgtactatcttttatattttttacatataaggctcatttacaattttctgtcttaaatttgttaatacattgatatttaataatatcaaggataatttgatctgctgatataatcagtactgctgatataaaacaaccaggagttcatattttaggaaacagaaaatagtcaactaaatgaaatccccctaactaaatgcttaatgtatatttttttggtttccccagaaaatgttgatgtgcaaagttttaattatattatatattcaaaaatgttcatattttgaggacccacacagaaaaaaataatacagttgatttaattattaattataccctactactactaggatcaactccaagcagttaaaaaggcttaattaaataatttcattctattgcagtaaactcataaatatcttcattgtttccaaaggatacagtaaaaaatgattatagaaaatagatttttagcattttaagatgcagtaaataattggaaaagttataaagacagtattacaactgtttcactgtaacattccaaccatattaattttaacactttcaggaacacaaattaatattagattttgttttaaatggtaatcttataccctctgacatccatcctttgctatttcagagcagaaccagaatttttctggacatatcatttttgaggcttaattaaatatcatatatagttttatcccttccttagacttgatgtttttgtttaagtaattaagttagattttttttttttacttttttatgtattcttattgtcttttttgaaacgttattgtctcattttacactttatgagaatcacaggactattatagctaattctgcttaagagaatactatacaactcttcaattcacaatgtagagaatgaaatcatgaaagatgaacagaataaccaaaattatcttaaattgtttcataacattttaaaatataattataggcagttatcctagagttgttctcaagcagaatatttgtgttgtggctttttaaatagtaaacatactttagctctttactgaacatgtattggaaaatctgaataatttcagggagatcgataaaacacacacatacacacaaatcaaatttaccttgacacatctatgctgtgaggtgacagtcagatgaggtttctaaacttgagagactacttccaacgtcctggagtaattacaaactagtcttcctatgctacacctgaaattttagtcacatgtatttctcttacttttatgtcaaccatttgccttagacacctgtatttgccaccacactgacttgatgaagcagagaaaacacactttcaaaatgcaatccccaaaagtgattattggtaccaacttgttaaagctaccaatacaactatttaaaaaatctttctgtcatgttttatctttaagattgaaaaatataatctttatataggatctttagaagaatcagccaccttaaagtcaggggagtttgtagtacttaggcagggccaatcgcctcctttgtcagtggttaactattgaaatggttttctactggttggtgacaataagcacttgcctccagtccctgagcattacttgtgttatatgcttattgtaactccttcttagagattctgaggacctcatcatgatgcataatcttccggcataccagagga

SEQ ID NO: 37619 - DNA, 1317 bp, Bovine  19866881259048
  misc_feature (1)..(1): n is a, c, g, or t
nctccaggactgggttgataagtgctcatttcttccacagtaagcagatgagcagacatgtaggaggtctaaacagctgtcataaatgtggtccctcagggcctgattacagaagctggatggacttgcctactgcatgcaggtccaactcctgcttggcttccctcattgaaatcactatcttttatgctggcatccacatttgacatcatttatctacatgaacaggtgctcccataaaatgaactgcagaaaaagcaaatgctatggcagggctcagtgatttccgacttgatgtttctgtagagggtatgttaggagataggcaaggtttctctacagtctcaagaagctgaacagagaaaacacagagaacaatgttttccactgcagaatagctttttaaaaatctagaaggttttattttatatcacttatttaaaaacataccaattcccccaaattcctttaacatcctatatttcatggtgtctgaatttgtgtcagcatgatatttattatagcattaaaacaaaataacaattggtggactgtatttcaataagattatggtgtggcaaagaggatgaaggcgagagtggagcagggataaaatgagattttttcccaatgaaaagcaacatatttaattcagatcaaatgtttttggagctcacactattgccaaagtactggggtgactactgaagacaaaaatctttggaaaagtccaggaaattgggacataagtttaaaaaagaattgtagaatttccctaataatacagaatggcaataatttaaatatctgaccatcaggacttcagactagtccaactctcacttggttttcaatctaggaagacttctatattttaatttttacacaggtgaaatcactttaaactttttgttcaaaacttcatgaatttgaggactgaataacctgtgtagaggtgaagacttgtccaatccaaggcaaatcctgttcatctcatcaacttaaaagcccatatcacatcaaactcttacgaaaataagacaatgccatactttaggggtaagggcacttagaaaatcagtgtgataattttgtatcagcacatcctcactgtcagttatcacaaaattgaaatatcatctctcagcagggggaaaataaaaaagaattaacagattctttacaaacaaatcccacatttaaaatttatagtttttagattaaagaaaataaaaatcataaaatgaaacttttaaaaattgggaaaaaatatatatctctatattatccagataaatagtcatcatgtaagtaaat

SEQ ID NO: 37620 - DNA, 2431 bp, Bovine  19866880071524
  misc_feature (1)..(1): n is a, c, g, or t
nttttgaatatgctatctaggttggtcataactttccctccaaggagtaagcgtcttttaatttcatggctgcagtcaccatctgcagtgattttcgagcccagaaaaataaagtctgacactgtttccactgtttccccatctatttcccatgaagtgatgggactggatgccatgatcttcattttctgaatgttgagctttaagccaactttttcactctccactttcactttcatcaagaggcttttgagttcctcttcactttctgccaaaagggtggtgtcatctgcatatctgaggttattgagatttctcccggcaatcttgattccagctgtgtttcttccaggccagcgtttctcatgatgtactctgaaaagaagttaaataagcagggtgacaatatacagccttgacgaactccttttcctatttggaactagtctgttgtttcatgtccagttctaactgttgcttcctgacctgcatacagatttctcaagaggcaggtcaggtggtctggtgttcccatctctttcagaattttccacggtttattgtgatccacacggtcaaaggctttggcatagtcaataaagcagaaatagatgtttttctggaactctcttgctttgtccataatccagcggatgttggcaataaatgctttggaggaaaagcaggctatgaggaataaagagtgatggagtattctatatcagatggagtggccaagaaaggcctttctgaaaggaagatgactgaatagagacttgaaagaagtcaggcagcacacctcacggatatctgggggatgagcaataaagacagagggaatatttagtgcaaatgctaaaactcaagaggcgtggcttcaaggccagctggaacagaatgagggagggatggaaagagaggagatgaagttagaagaagataggggcaggaacagaccacatagggcttcataggccctggaagaaactttgggcactggagggttttgaggacagaagtgacatatatttttgatagatcagtctgactgtgtggagaatttgaaacagagagacctgtaagttaatgcaatgatctgggtagcagatgatggtagcttagaccagggcatgagagataagagtggtcagatattacatatatatattaaaagtacagctaccatgggagttccttgggggcctagtggttaggattcaggtctttcactgccatggccctgggttcaatccctggtctggtaaccgagattccacaagccgtatggcacggccaaaaaaaaaaaaaaagtacatacagccactaggatattggatgtggaacttgattagaagacaggcattaagtatgactgtaaggcttttggtgttattgctctatagcaagtatagttcatgtacttgtcctgccctccattgctattatactagagtcgttctgtgtattgactcatctaatagccatgatgccagagttaaatgccattcaagacactgtgcctttaagcacagactctccaagaagctgaccccacacagaaatgcagggatgactcagaacaccatgaccatcactttgaagttgtctgtaacagatctaattacaccttttttttgcttgcaacatttccttgaagaagttgactcaggaaacagggagaatctagaagccggttttaccatcgtgggctaaggggcaaatcaaccacagtaatttatgttgtttctcccaaagaacttggtgggctttcttgtgtgtatctggggtcttccctacattcccaaagtaactgaagagggagacagatattattggtgtcatttaacaagtacagtctcaaaaggatttatggaggttgttatgagtcatatattttaagccttgaagaactggcaagataagactgtagttaacttggatgattccaggaaagatgaaggcatacttttaattcccaggtgagttccttaccacctaacaccggcctagccagctgcttctttcctctcgtttcaatttttttgttttgctttgtttggccacacagtaaggtttgcaggaccttagttccccaaccagggatcatacctgtgcgtcccacctcaacagtggaagcacggagtcctaaccactggactgccagggatttccccttatttcgtatccccatggattttgtggcaataatagtttttttcaacttgtggcaataatagatttttttttaacttgagcataatagatgataattgccctgaagacagcactgacctttaaagttcagcaatctctagactttcaaactttttaaggactcgctataaatttagtctccagaaaaacacctaaatactactgaatcatttaagttttttgactttcaaatattaactgaccatctaataaaatg

SEQ ID NO: 37621 - DNA, 2111 bp, Bovine  19866880351071
  misc_feature (1)..(1): n is a, c, g, or t
ncatacccgctactcttaacatctcctgcattggcaggcaggttctttaccactagtgacacctgggaagccctaaaacagttcaaattttgctgtttgaggagatcgtgctttgcgaaagatccctagtattcttacttgctgcaagtaatagtaaattcttctgttgcccagtctttggcttggttttgtcttttggctcaatagccacaaagagacatagttttcagttaatgttatgacttgtaacaatttatttgtgtgtatgtctgctttcccactggaatgaaagccttgtgtgggcaggaatcacataacaccaagcatagtgctttcttataagcatccaattaatattttcttataatttatttacttatttatttttggttgcactgagccttttttgctacatgtgggctttctctagctgcagtgagcaggggtggggaggacgggctactcttcgttgtggtgcaccggcttctcattatgatggtttcttctgtgctctagagcatggcctcaacagctgtgatgcatgggctttggttgctctatggcatgtggaatcttcccagaccagggatcaaacccaggttccccgcattggcatgcagattcttatccaccataccaccagggaaatcctcaattagtattgagggcagttgggcaaaagttttttaagaaacaaaagtaattactgtgatctaattaatatgagaaacaatgtatgttgcaggaatataattataatataaataggactatgtttccacagtgctgtcatcctagaaccaaaggggacagtctgcggttgaagtgagttgatttatatacctagtgcttaacagccagagcagctcaatcaacttgcttttcctctctctttccctcaggccttccctccagctaatgatagttttgacttccacactgtaagaaaatctggtacctggaaaaggcagaggttacttcagttcaaccagcaagccaactgcagcactgagaatagatttgccctctctgccgcgctggcatgggtcctctgcacaagctctagccttggggatgtggagatggttcccatatcaggatgcggatgacacacaccaaaggagagactgcttgtcaagttaatttctctccctcacgtttggagaatggaagggagcttctccatctgagatcttagggccccagtatatgcctgtgttatatcccatactctttttaagggcttgtgagtatgtcacagtctcagccttatacttaagcacaagcatctttgtgttgaggggggaactcggaggtataagctatttaatatgctgggagcaatttgcagggatgcagcttagccacgaaatctgcttaaggatgctgaacatcaaagtctggatgattgtctgtttccaagctgctttccaggctggctaaatagtccattttacctctggcctgacctccaagagtagctggagtttggggtccaatctgcacagttacagccagctaaaccagggtttccgaatctcagcactactgacattttgggctagataattcctcgttataggagctgggatgtgcatggtaggatatttagcagcatccatggcctctatgcactagagactcccagcatcactcctctgccagccagctatggcaaataaaaatgcccctaggtattgccaatgtcccctgaggaggaaaatcaccccccaagtgagaacctctgacatagaccctgagcttcatgctcactgtcctccaggccagacacagataatcccaaactcctctcctctccaggatccccaaccaagtgatgtcttctttcaatgagcctaggttttgactatttcttccttatttgcctgacaagtgctggtctcttgaatgctcccactcctcgatcaatcatttcccttcgaccttgggatgacctcactgttttcctgtttcagcccatgaatttctggatcaacaaaaataatgtactccccccaaatttgcaacatttattcaataaattttcaatattatatattctgcattgatgacattaacatatgctaggattttaaggtttaacagttaaa

SEQ ID NO: 37622 - DNA, 2047 bp, Bovine  19866880357883
  misc_feature (1)..(1): n is a, c, g, or t
nagctttaagccaactttttccactctcttctttcactttcatcaagaggctatttaattcttcttcactttctgccataagggttgtgtcatctgcatatctgaggttattgatatttctcccagcaatcttgattccagcttgtgcttcatccagcccagcatttctcatgatgtactctgcatataagttaaataagcagggtgacaatatacagccttgatgtactccttttcctgtttggaaccagtctgttgttccatgtccagttctaactgttgcttcctgacctgcatacaggtttctcaagaggcaggtcaggtggtctggtattcccatctctttcagaattttccacagtttgttgtgatcctcacagtcaaaggctttggcatagtcaataaagcagaaatagatgtttttctggaactctcttgctttttcagtgatccagcggactcccaaaagaattttgaaaaattcttctatcttttcctcatttttatatcaacatccaaatctttttctcataaaatcaagcaattgtaaaggaagttatttccagcattatgttgtaaatattggcatttgaaagtaaaatagttacacaactttaagtttgtccagttgaatttaaataccatctctatttaatacaattgaaagagtatcattcatttgatgaataaatgaaacactgtttctttagctatcagaaatgtaacactgttcccttttcttcttgaactttaataattgcattcccttataacattttttcctgttacatacttttacacattttaatctgtttttcaaccgaccatacttctctgcaatagacattttaatgccttttactttcattgaaaactttaatttttgaatatgtatacacactcttgcctttctaccttgtccatacccacatagaatttttattgcattcttccagtgtcagtgttcctttacagagatcaaaatcaaatgtatttttaaacttcaatataatttcatccccttttcttacataaagatggattacttaattatattttttaaaaactgcagcgtgacaatctactaattagtattaatgaaaatacactgattaaaccaatatcaaatcatactcttgataagaagtttttcttcccctttcctcttgataatggggttggatcacagaactcgacttacattcttcaaggattttttggaaacctaggtgcttttagttctttgaactcagcaccagtgagagcagaggttgcaaattgcagccctgggcagatgtgttttgtttgacagatccaacatgaacagaataagacactttacataaatgtccagattttttacttttctaaaaaatcagatgatcaactagccaagtctttcattcactcagcaacaatgagctggcactgagtacctcctccttctttgagggggccaaggctctgcagtttgccacaggtccctcactccttaattctcctgccctagccccccacatttatttatttttccagtctggtccttgtaggcatttgacattatgacctctgagttaacctcacagtgatttgggcaagtagacccaatcaggagcttctttgaagcttcaaaatgggaagcaggaaagggaactagtaaagagtacagaagggaggagattaggctctgaatgaatactgcagttaaaaaagaacccacgttttaccagaacttccctagagaaaagaatagacaaattatctatttacactgtttaacctgtatccactagatggcttagggtattggttagccaaggtggagactaaatttgtactccagaaaaaatgagtctgttgtgttttaggcatgagatcatagactaaaaggagagatagggctctcttttatcttctatgaaaaggcaaattggatattgaagcaaaaaaaaaaaaaaaatacaatggttctctgattttccactaacaccaccacctaatactatgaaccttttatgtccaaaatgttataaaatgatgttaagag

SEQ ID NO: 37623 - DNA, 2187 bp, Bovine  19866880561561
  misc_feature (1)..(1): n is a, c, g, or t
nttgcgacgcgggtgcgcagagaagaatcaggtatccgagcaagacatactggaccatggacacctaacaacgtctcggaaaagcacttgccattctgctcaccagaaacctggcctacggaaagtccagccggattcgtgcgcgacggctgggaaacgcacgatgtccgggagtccgaagaaaacccaccttttagagcacgcggggagagcgcaggctgctctggcagcagcaggagagccggggtccgggctcgcgggcctgggagggagttagtgcccgctactccgctctcattaacccccacaatcagttcacctaatcccggggtcgaaacctgagcccggcggggaggcggggcagcgcctatggttcttgcccctggctcgctacgggggcggggctaggagggctaggaggtccggggaaaacgaatgtgcctttctctctcggtgaaggcgatgggggccgggttcacgtgcgagctgtaggctcttcgggcatggcagctctcggttgtcttggttagttcagacacaagggcgctggggatccccggggcgggacaagggtcatccttgggctttgcccggttttttctgccagcctaggggtcatgcggctcccagggtctaaagtcagccggtgggcgctccggagtcaagacggattctcgctccacgcccccaccatgtccccttccccggaagaaggacaggataggcttgagagaaaaagaccgctgggacgtgtagctgagtcccaagggatgtttcccgtgtcctaaacgccagaaggcccctaggggtgagggtgccacccgcccgtgtccgggccagcccctacgatcggggatttaggaggcttcggggtgctcggctgccctagggcgaacgactgtctgttcagttttctctgagccccggcatgagccgctccgtcggctgtctacttaagacaccacaaagccaaaaatcaatttcttaaacggctatgaaactcggaggaaaaggaaaacgagggtgaaaatgtcccgaggggccctgctgcggctcggtgcggagcgggacgggggtggggcggagatccagggatgagctgtccgcaccgccgccgagtctggactggctggaacagcgcgggatcaggcaggcacgcaagcaacctcccgactcgggccacagccgcacgcctctctttcagcctggcaggctccgtccgttcccgggagggtggagtgggtagagcggtagtaggaccaagggctgatcgcgtgggaaggcgacctctcgcagcagctggcggccgaggggtggggcggtcccctcggcgcacgcgggccggccgagactcttcgcagccagggcctgggatggcgggagctggagagctcagctgccgccgtctccccaccagatgtttcctttcctgtggatcccgctccctcgcagaaccaaactgcctggcgtgggtcctctgagccagatccccagcgcctccgtatgggtcgcgcggggaccaagaggatacagctcttttggctcccaagctgcggccgacctcgtgtgggaacccggtagagccctccggtcttccccgcagcggcagcgccgtgccagttcccgcgtccgcccccgccagggagagaggcgcagcggacctacctgaggggtcagggcgcgggcacagcgctccgagagttttcaaactgagttgctttcgggagagaccgcgctgtctctctttctctctttttttaaatctccttccgagctcagcccccaaaaccacaagcttcacttcctgagcgttaaggagtagctcgcttagccttgtcagacctgcccccctcccctcctccaagccccagtcgggcggcagggcgcgctcctcctttgcgcaagggtgtataggaggtggacaaggggcccggccttcctagcgccctcccccgcggctctctccgtgttttttttttttttttcctctgtgggaaggcaggagatggggagacccagagggcccaaacacccgggcactagaaatgactcgaaagaaaaagaactattcttggctcctgggagacttccgcagcgagaagaagtcacagattcaggacacagattgactggagcgccggggctggtagcgtccagctccgagggaggcttccccgcccatctggg

SEQ ID NO: 37624 - DNA, 969 bp, Bovine  19866880611866
  misc_feature (1)..(1): n is a, c, g, or t
naaaagtgctgaacattttaagaggaaatttgccaaatcaaccaagtttctgggtcagcttccagttcttgcaggtgtgccctgaaattgcaaaggcaaacttacttaaagccctgaaagagactttgattgagtggaagacagaagaaactttgaggtttttgtatggccagaattatgcatctgtatgtctgaaatcctcctcaacccctctggttaaagaagaagaacttgatgaagatgatatgaactctgatccagatagtcattcccctgccctgcaggagttgaacagcttggatgagtctttaccatttagagcctcagatacagccattaaaccactgccaagttatgagaacttgaaaaaagaaactgaaacattaaatttaaggatcagggagttttatagaggacgatatgttttgaatgaagaaaccaccaaatcacaagactcagaagaggtatgtcttaatgacaatttttttttttaatattgatttatttggctgcaccaggtcttagctgcggcatgtaggatcttcagtctttgttgtggtgtgcggggatctttttttattagttggcggcatgcaaactcatagttgcagcatatgggatctaggtccctcacaagggatcaaacccagcccctctgaattggaagtgtggagtcccagccactggaccacaagggaagtcctttaatgattttgatttttccatactgctaatacatgagcaatcaccatagtaaatcttggagcaggaagaaaagtactgaaagaatttaagaaagaagagtcccttaatcatttggtttaaaatgccatctccagtattgacattgaaagtgaaagtcgctcagtcgtgtctgactctttgtgaccccatgactatacagtccatggaatttttcaggccagaatactggagtgggtagcctttcccttttccaggggatcttcc

SEQ ID NO: 37625 - DNA, 894 bp, Bovine  19866880748970
  misc_feature (1)..(1): n is a, c, g, or t
nacttttcacttgcataggctttgaagtgaaagtgctcagttgtgtccgactctttgcgaccccgtggactgtagcccaccaggctcttccatccatgggattctccgggcaagaatactagagtgggttgccatttccttctccaggggatctttccaacccaggaatcgaacccaagtctcccacattgcaggcagacgctttaacctctgagccaccagggaagccctgcataggctttgaaaggggtgctaaagctctagagttcctgctgcagggagttaatcttccagaaaaggccagcaaaggctctgagaagcttcactcagcccagctttcctcagatctccctcaggcagctgtgactccttagttacctcttggcttctccccagtccagattagccctggttgcgttgtcatttcactgtcattctgagcacatctatggggcagagtcacctctggaggctcaggagtctggggccccagcccgttgatagctgagttttagaaataccttgagatttggagggcaccagggaacagggtcaagggtactaaggagctgctggagtaaggagctgtgttcaggggcaaagctgattcacagggaaagctaatccttcagtctacagtgtttactgatcctactattgtttggtctttgagggcaggcatgctaggcctgagagaggcactgatagtaataacaacagctactttttatccagaccatccatatgtcagaggccatacatataccctgtcatttaatcttccagtaactctgtgagagagctagtaatagttgcattttatggattagatagtttaaaaaaaggaaaaacaccctgaagctcagagaagttgcccataaccatgagagagaa

SEQ ID NO: 37626 - DNA, 1602 bp, Bovine  19866880874849
  misc_feature (1)..(1): n is a, c, g, or t
ncttatcaacccactccagtattcttgcctggagaatccggggacagaggagcctggtgggctggggtctatggggtcgcacagagtcagacatgactgaaggtgacttagcagcagcagcagcgcttttcatatcctttcccagagtttcaagactcttgcaaaggaaatctatctggatgccgatacagaaaagaggtagagttgcttgacttctgaaggtggactctctcccctaccatgtggccatattgaatacagttttaaaattcagttttaatttttcccccgaaagatggataatatgttaataggataatgggagaaagaaaataaagaggtaagaatgtgggagggagggagttaacaaatcactggctatgctttccatataaaaaaatggagataggtagtataatagaagatattagtatactgtttctctgaaatgtcttacaaattatgatatgaaattttattgttgtttgtatgccaactcgaataacattatagttaagtgaacactgtcttggctgtatgactctagcaggtcagggctcggatgggtatccatccagggacctggcttttcctgcccatctaaataataaaagttttcactgctacagcacttcaatttatgctgtcttacttttgtgataggctctgtgagcttggttgagtcaagggtcacccagaaaataaccagcttccactttctttaattatgcaaactagagctaggcgactgagatcttgcctttggtctgcaagacacagggagttttgcaagccctaggggagtgcagaatttcctgaagatgttgcaaggtggctgactttcttctgaagtcatgcaatattctcctttgctttagttatgagtgcagaggtgctgggaagcaaactgaaaactagcaccttgaccaggcttttctccataggtccaccagaggcgaggcaggctcactgagagcgaagagcttggtgcccctgctttcagctaaggtactgtgacccagttccacctcagaggcccccaggagcctgtttaaacctcattcagccctttctaggcacatttcagatgaaagtcacccctgctcctcactccaccttcagcccaacagaggtggccttctagacatccttcctcctttttttctgccaggcttataatgtgaaactcttgaagattttcaaacttctaagtggtatcactttccttgagtttaggtaaatctttatagagaatggatcctgttccctaatgagtaggaagattacctagtatttggacatgaccataagcagaagatgctaaataataccttatagagattccactaaaatattaagcctagtgaggattttaagtgtttgagtatacgaagggaagggaattattcaaatggaaagatttttttttttaaagtcaccattgcctgaatataacagcatatgggctagttgctgaagtacttaaatagaaagtgaaactgaatcatactgtttacttttcagagtaaaagctattgagaataaaaattttcccgaaagagcaacagggattttgtaaaatattcctttctgttctttaaa

SEQ ID NO: 37627 - DNA, 1495 bp, Bovine  19866880881770
  misc_feature (1)..(1): n is a, c, g, or t
ntcccgtcgcctgggatccagcagccgacccccgcgagcaggctgacgctggcctagagaagccaatgcctccactcgggaagcaagaacaaatccctcttctcgaaaagattctccgcaatcgatttggcacttctgtgcccaaagccgcgcgggttcattgctcagcgcggggtccctgtccccgcctccctccccgggccccagagcccccaacaggtccctacctggagacacagaaggcgacggaggcctccaaaagtcttcaaactccgagctccgatcgcacacgctgccctcacagctgccaggggacgcggaggctctgtcgggggcttcggtcagctgagactcgggggacatacggcccctgagctccgccttcgccccgcctgtgctcgagatgccgtctgcggagaagaggccggataggggctcaggttgggtctggttgggcccgatggttctgaagtgcgtccccccagatggtggcacctgggctctcttagctctccccagacctggcctgaaccctcctggatccaagggcgagagcagggaggccttggcaatctaggcgacgagcccgaaaggaacccaaacagtgggtaacaagaaaaggcagcaaagggggttcagaactcttcccccggttcctaggagatggcgtggcgggacgcagagtctacggccccgggagcagtccctcccggcccgcgccctccccgcacctgctccgcctggcgccagtacattctccaggcggagggaatagtcaggtcccggggagcgcggctggtggtaactgtgagcttttttgctcttaaccaggaacgaacgcggcattggtggtcgggcgcgctccccgctcctctccaagggtcgctggagccgccgtcagcccaccttcacccgagttcgtcagccccagccaggcggagacctgcgagaggagaacagggtggaaacgcgcgggtcagcacgctccggggccccgggactgggcagcggagcagagagagcgttcgggcagggaggagggaaggaaggcccccgggaggaggggcttggccccgctgcgccacgctcaccaggtggcactcggacaggtggcgcgagcccgccgctgctgccgccgtagctcaacccgtctccgggctccgactcaggcctcttccttctgccctgcccacgcccctcggcccctccccttccctagcaaaactcattgtggtatcaaactcttggagagctgaagtccccagcgggccagttaccccaactcgaccacacactgcctatacggatctgcgaaaggcgtagacgcgccaatcaatttagtggggctgggaggggaatgtgtagacggtagcgaactcgcttggggcaaagagccaagcctccaagagcaggctcacagactgcagtgaaaagaggtctggggagaaagggctcctgcggctagaggcggggtcgggggaactcagcagaagga

SEQ ID NO: 37628 - DNA, 2018 bp, Bovine  19866880947328
  misc_feature (1)..(1): n is a, c, g, or t
ncaggtctcccacattgtaggcagatgcttttaccgtctgagccaccagggagagaccggaggtgctgctaaacatgccacagcggtggagcagattcccacccacccgactacaaagcatgatccaaattatacaatttgtaaatagtaccgaggttgagaaactctgctctggggcatatacttagaagtgggatttataaagccctagaatgcttccctggtggctcaggtggtaaaggatctgcctgcaaagtttgagacccaggttcgatccctgggttgggaagatcccctggagaaggaaatgacaacccactctagtgttcttgcctggagaatcccatggacaagggagcctggtgggctgtggtccatggggtcacaaaagaagttagacacaactgaatgactaacactttgactttcaagatgtgtagtttttttgttattatattaatggatttctataaaacatgaagaagatattatttccaattcaagtaaaggttttatttggaatacctggaattaaaatgaaggtttctttggtgatgctggtaatccagcagttataagcaatttaattgtcttaaaccagatgaaatagcagcattatccagagttcacttaatttgtttacttgcccagagggggcacataattttttaactttgtgaactgtacttcctgcctgattacaatgttgattttagagtaagaatctgctgctaattaatctgtgctgaacaatggttgactgaatgagaaaaaaattacagtgtgaaaaatgtagaatttttttttctgacaaagatgtttgttaaatattgaaagcttaaagtttgaaaagtttctctctgtgatttaaattggtttttaaattgaagacagaggaatgaaccttaagaatttcgagactcacttttaagcctgtaagacccatagttctgcatctgaaaatgtgatgggatttatgcctgggaactgtgtgcttttgtgtacgtgccattttgcatatgattttgggtggtttatgtgtgttcccgaagcctgtttgtggaccactcctactccctttgaaacttccaagattttcagattcaggactttggtaaaattcttaaaatgctaataataagatacaggtatttgaaattatcactgagtagtgaagacacagctatatattgttcatgtctgatttgccaaatgcataagactcggtggtagaattaagtccttcaatgttaaatgaatgaatacagatcttattttaacatctataaccttcattttgttgttgttgttctttttactaggcatatgcagcagtgctgtggcaacaagctaatgaaagcagacaaaattcaactgaaaaagcgtgttttggaatctccctaccagaagaaaaacttaatgactttcgtgatgaacagattggacaattgcaggaactgatgcaagaggccactaaacccaacaggcaatttaatatcactgagtctaggaaaccaaagctttagtctatataataaagcttaaaaaagcatttcaagttcagagccctctaattggtttttaaaatttgtttcttaagcatttaggttttgagaatgcctggtgttaatgaaatattcttttatttggggatattttgaatgttgtaatatacaaatcaggatcatgagtggatgaaactacatttattgaagtagtaacagttgctggataggatttgtgttttggactacataagaaagaatggttgtaaactggacaagcttgtgaaattttccccaaaattttatatgtaaatttgttttaatgctgttcatgtttaagcattaatcttgtggctctagatgtatcagataagtatatcataatcatgatagatacagaattccatgttcattatttaattcctatttgcatggaatacctttttctaccctctcactttcagtatccctagattctgaagtgggtctcttataaacagcatttatagggat

SEQ ID NO: 37629 - DNA, 1613 bp, Bovine  19866880976053
  misc_feature (1)..(1): n is a, c, g, or t
nctggcttggcagaggggagctccggcaggcggcccggaagggaagattgcatggagtcggtctcagactactggcctgagtggagacgggctctggcttctcggacccagctccgctcatgactggtgggttttccgagggagcgtcggggtcggcaggttgtttgggaaacctgtgttactggtccgaaaaagtggcttttaagccaaaaccatcagtagaacctggaggctctggtgtctttgggccccgaaagaaagcccatttagtttggtgtacctctcctgcttttttctctaaattgtcgctggtaccagattttagtgaattttcgggtggtgtggtgctgtagtttgtgggggactgttgttttaatcgggagtgattgccgagtatgtgcttggccagttgtgtttcgtgacaagaaatttaggcttttgaaaaaagttcgtggaaagggaaaatataggttcatgaaatgggacagcattaagaacagactgacgtttgcaaaatagttgtcttaagcaaaagttgggacacaaggattgttggtccaagagggaataaaagtggagagtgtttaaaactttaatagtgctcgttttatatctggttactataataaattggcctacattttgtatgtttgctttttcattcctgttttggcgctgattcatttttattttgttgtataaaattgtcagtcttgatagatggaaaatagaagaaaagtgatttgatttctcagatttgacaaagtgatggttttctggattcacttttgaagtttaggttgttactctgtcacaaagttaagttgttactttgtcacaaagttttgtttgtcacaaagttaagttgttactttgttacaaagttaactcaaatgtcaaagacatcaagctaaaacatttatcaaagttttaataatttactcttttatcttaaaggggtttgttaaagttgtcaagaacaaggcctacttcaagagataccaagtgaaattcagaagaaggcgaggtatggtcaggttttcatattctcattaggaaaagattctgctttgtaacggagtggactttcttaatttatttttttctttcagagggcaaaactgactactatgctcggaaacgattggtaatccaagataaaaataagtacaacacacctaaatacagaatgattgttcgtgtaacgaacagagatatcatttgtcaggtaagttgtattttagacttaaataatagttggtaacctccacccccacttcttcaattactgtgctagagacatacttgggaagcagaacaaatgtatgcattaggtctgtctagtttggtgcctggcactccaaaaaacattcattgagtagttgttttagtaggtctgaaggtggagcctggagaattggtactgttaaaaaaaaaatactttgaagctcagctgttcagcaatcctaccccagtttaatccattcagtttaggggggcggattagagaaatttatggttctgtgctgtttttcgggggatgggaggataaatttaagacctagtagaaggttcttgaccattgtaattccagtaggatactagaatttgtt

SEQ ID NO: 37630 - DNA, 1374 bp, Bovine  19866881007070
  misc_feature (1)..(1): n is a, c, g, or t
ncttgttgtggaaaccacttcgggataaatacgcccaacaaggctgaaaataccttgacacccaatcccagaggtttgctcatttcccttcggatttaggtaatggttaaatttggaagaggtgggcgagcgccgagcccccgggcctaaagggtgcaggcggcgcgtcctgcgggcgcccgactgggctggcaggcacgccctccccacgccgcgctcctctgagctgggccgggtccgctctgccggcggctaatttccggtggtcggagctgcaaaattaaaggccgcgcgggagggagcgcgcgggggcagcgacggcggctgctcggctgaccccgccctgccgggacaagccaaggagagccgtaccccaggcgcgggctccgtcgccgcctaaggtcaacccaggcacctggactggaggggagcagtaaggcgccataaaagcaccaccctgctgattattgaaaagtcagtcttcgctgcgattgtgtgttccacgagggcaggcagtggatctacagcattatatcctggcgggaatgtctgtggactgactaagcgaaaaaatagtattaattaactaattaattgtagaagacgaaagaattaaaacctcacccataaataaacaaatacaaaaccctccagtgctagactgtatgtgatgatccaaagagtgtggcctgtggtgtgtacttaaagcctaaacctttcctaagggggattgatagccgttataattaccttgatttcctaaataaattgagttaattttggtcactactttctgcacaataaatctccagggaagagagtggtgttcctcagttactgcacaataacttactattttttagattaatccaaagttgtcacggaaaaaagtccttagagaatttttttaagtgatttctaatttgcattgtaaatctaaaggtttgtggaaagtatttggttactattgccatgtttcaagcatgctttaataatttagacgctttatataccagtggctgcacacctactatgtaacaggtgtgagaccatacacacatcttaattgtgtgactagctgtcctccttacactactgttcatttgcttaacacactttctttataaataagtgcagaagcgagcaatcgtaatcagaaggactacaaatattgaattagctgaaaggaaattacggtcattttgaagtttttatttgtgtactttgtccttgcctaagatataaaaatcttaaagcagtcaaaacacatcttttttcccttctattttattcaacagcaaaaaaaaaaaaaaaaaaaaaatttaatgataatgagaccaaagaaaacttactatcaaccaagttctagagaaa

SEQ ID NO: 37631 - DNA, 1307 bp, Bovine  19866881085689
  misc_feature (1)..(1): n is a, c, g, or t
nctttaagaatttgcctatatactccatgtcccccatctgttaatgagattcattcttctcttgattctttcttttcattattgtaattctgagtttctcaggagcgatttttttctcctcaatgctaatagccttttagtaagtagtcatgaaagtgtgaaagaaatttcagcaaaataagaaaaaatagaaaactgctccctcttgcagataatattctacatcatgaaattatccttacaactcttatttctaaaaggaggatcttgaaagacacacagttgccaaagcctgtccctatagcttgtgaatataacaacagcttaaaagtttgtaattttgaataattatctttattaataaactgctgccctaaaaataatttttaaattgttttatgaaggtataactagttacaagttttctttcttaagcatgagtatgagcattggtacttgtatcaaattctacacacaggaaaaagaaatctgtcagaatatcacacctgataaaaattagcaatgcaaaaactcattcgggcaagattcatcactggattttaaaaactattgactataagcttgttgaggaacagagctttcaacatggcctccaagaatcatcccacatactgcttattaattataaaggaaaaattgtgccctgaacatggtgagatctggcagtaaactttaaataagggggaattccctggaagtccagtgggtgggactctgtgctttcattgccaagagccagggtttgatctctgctgggggaactaagatcccattagctgcacagtaatggcaccccactccagtactcttgcctggaagatcccatggacggaggagcctggtgggcagcagtccacggggtcgctaagagtcggacacgactgagcgacttcactttcacttttcactttcatgcattggagaaggaaatggcaacccactccagtgttcttgcctggagaatcccagagacggggcagcctgatgggctgccgtctatggggtcgcacagagttggacatgactgaagcgacttagcagcagcagcagcacagtcaaaaagaaataataataatgaggagaaaacattggatatatagtaattacttagcaaactctgagtaacttaatgtgtgctaagcattttatatcctcattttaattaatcctcaaatccaccctcttctagtgcattgttattcctattttaaagatgaagaagtttgaagttcagagagtttaaataaccaagccaaggttacagtcagttagtaagcacactgaag

SEQ ID NO: 37632 - DNA, 1211 bp, Bovine  19866881811078
  misc_feature (1)..(1): n is a, c, g, or t
nttctcaacccagggattgaaccccggtcttgtgcactgcaggtggattctttaccagctgatccacaggggaagcccaagaatactagggtgggtagcctatcctttctccagaggatcttcccgacccagcaattgaaccagggtctcctgcactgcaggcaaattctttaccaactgagctaacagggaagccctaaagtttttgtggatatgcaataatttctggggaatactatcaacagaacataaaggatactgttttataaacttctgcaaatcataatgtgttatgattacttttgacccagatcttaaattgaaatttacagactaaaaggcatttcaggtgggaagaaaattctagatgttccagccaaaactgtattatgggttggaatagaatgtaataacacatttttaaaaataagacttttaaacataatactttgcccataatgcaaataatataaatcaaatgtatttatattatacagtagttcataattgacaaaacacttattttcaaagttttgaattttctttcaaagatagctttgacaataaggaaatacgatacaggtaacaaaaggaaaaatagataagttggacctcaaaaataaaaacttttgtgtatcagaggacattaacaacaaaacaaaaagatagcccacagaaagagaggaaataccttgaaaaatatttgcatatactgatatggattgaccttgagaatatataagaaacttccataactcagcaacaatccatttaaaaatcaggcaaagtactgaacctaccatttccctaaagaagacataatggcaaataagcacatgaaaagatggtcaacattattaatcactggtggtgggtttagttgctaggtcgtatcccagtcttgcaaccccacagactgtaacccaccaggctattctgtccatgggattttccaggtaagaatactggagtgggttgccatctccttctccagcgcctcttcccgacccagggatcgaacctgggtctcctgcattgcaggcagacgctttaccatctgagccaccagggaaccccatataacctggaggtgtctccagaatgacctttaaagcaagagccacactgacacagaggagacaaatctgacgaggccgctgggtgctttatccgaatgcttctgccggccggttacaggcaaaacccagact

SEQ ID NO: 37633 - DNA, 2477 bp, Bovine  19866880084693
  misc_feature (1)..(1): n is a, c, g, or t
ncaaaagactgttctatacatcagtgtctcttttgctgtctcgtatacagggttattgttaccatctttctaaatttcatatatatttgttagtatactgtattgatgtttttctttctggcttacttcactctgtataataggctccagtttcatccacctcattagaactgattcaaatgtattctttttaatggctgagtaatactccattgtgtatatgtactatagctttcttatccattcatctgctgatggacatctaggttgctttcatgtcctggctattataaacagtgatgcgatgaacactggggtacacgtgtctctttcaattctgttttcctcagtttgtatgcccagcagtgggattgctgggtcataaggcagttctatttccagttttttaaggaatctccacactgttctccatagtggctgtactagtttgcattcccaccaacagtgtaagagggttcccttttctccacaccctctccagcatttatggcttgtagacttttggatcgcagccattctgactggtgtgaaatggtacctcatagtggttttgatttgcatctctgataatgagtgatgttgagcatcttttcatgtgtttgttagccatctgtatgtcttcttgtaaaagaatgaaactagaacactttctaacaccatacacaaaaataaactcaaaatggattaaagatctaaacgtaagaccagaaactataaaactcctagagaagaacataggcaaaacactctctgacatacatcacagcaggatcctctatgacccacctccaagaatattggaaataaaagcaaaaataaacaaatgggacctaattaaacttaaaagcttctgcacaacaaaggaaactataagcaaggtgaaaagacagccttcagaatgggagaaaataatagcaaatgaagcaactgacaaacaactaatctcaaaaatatacaagcaactcctgcagctcaattccagaaaaataaatgacccaatcaaaaaatgcgccaaagaactaaatagacatttctccaaagaaatttttatttcttaatcaccatgcttttgtcaaaactgggctatcttctccctttcttgcatgattactccagaagctgtaactctgggacagcaaaaaacagggattcatggagtgaaaacaaatgatgacggcttccccttccttttagctaagaacacaattatcagattcttccaccaaacttgtgtttaaaaagctacttcacatacctggctctgactaaactcagaccacacccatcagtcccaggaattgtgattatgtcaggtaggtgcatggaggaaaaagaaatttaacaggctaagcaaagaacagttctcacagtgcatctgaccaaagccagggaacctgtatgtttattaccctttgtgaaggtgagcccaatcctaaattcctccctagctacgtcttgtatgctatgatggatcaggcaactactttgaggtatgaggggtccatctcttcagtgcttctcagtaaataatgctctgttatattttatgtgattccaactcaacttctacaagtataaaagcaatataaccaaaaacatgccttttggcaaagaataaaatataaggagatgcaattccgccagatggcaaaatcccagactaacaatttgtcgacttattgatggacataactaagcccctaacttactaaactataatggaaatatagaagaattctgccattttgtagatttagctgcatcattgaccaaattgcatccccacaacatgacatcagatagagaaattctgaaaaatcacctttacctcaccacattggtctcctgtgcatgctaatggcattcttactgatttctctgctttccatttttttcttctccaattccctgtacatttcaaccatgttatgtttctaaaatatacatgagaggattaccgttaccttttttaaaattttgcaatggctccctccaatggagacagtccaagctccgatgtaaataaagcttttcatggttaagacccaaacctgacccactagctttatgtctattatttcaagcatggccttggccctaggatgacaccatcccgttctttgtttggtccacaaacatggtaaacaacatttctggacaggtcactgagccacagagccatagttctaaccataaaatgtggaaggaagcctaacattgtaaaggggttgttttaaagccattataaggtttcatctctcagtcggtcctccaaaagccccagggaactagaccagagaaccaacctcatgtaggcctcaagctgctgatcatacagtcctacaaatgaccaattctctctccctcattcattcagttctcactgattttccttgaggacatagcctgatgtaagatcttgggaagatcttgggtcttagtctacctgaatctct

SEQ ID NO: 37634 - DNA, 827 bp, Bovine  19866880096784
  misc_feature (1)..(1): n is a, c, g, or t
ngatggcatcactgactcgatggacgtgagtctgagtgaactccggggagttggtgatggacagggaaggcctggcgtgctgcgattcatggggttgcaaagagtcggacatgactgagagactgaactgaactgaactgagcagttgtcttcttagagttatgggaattaaggagattcaggaacattaaaccagaggtgccagtgagctccagctgcttttaaattccagatttgtgaatctcagagtctcaggaagctaagaggacacctgaagattcatatatgttctatggacatgagctgtagcaaattagagcacttttttttagtacttagtgttttaattccttatttaatatttggctacagttgtcactgaaataaagttatatatttggggactctgttggatgctggaagatatgctagtttatttttgttcctgtttatttcataaaaccattcatttgtctgttcaggagtttcatgtggaattgcaggtgtgagttgaaagccagatgtaaactaaattataacatatgcagaagggaccccttacggatggtaaatgcatatttttcagctgacctactcctcaaataatagttggggggagtaaaatatttactgtagactatgcaatttccattttattattattttttaaagcttcaaatttgtaattcaacagaattgatgggattgagtagcagagaaagagaaaggggaagaaaaatttgacccagaaacaagttcattgagaagcatgtatgaagcttgtaggaactcaattagatctccttgctggggtaagggcagggaga

SEQ ID NO: 37635 - DNA, 1350 bp, Bovine  19866880376761
  misc_feature (1)..(1): n is a, c, g, or t
ntgtacagggtgtgctgcaagatgacattcaccaccttgtgaagtacttcaaccctagaagataccttgcattctataaactggtcacaggcaaacacgtggtgttcgcatttagagatacacacaaaaaagttacataaaaattcagacattctaaggataaatgaactcaaacaaaccccacacctcagcttttggagcatgaaaagataaagaaaataatttaaaaacacacaaaaaatgccattcaattggtacaaaagccaaaagtcactataataaagagctacatgtgaatctttacaagttaattacacaatggtgttttgtaagaggttgcatctgtacaaagtcttgccaatgctgtctctacagtttatacagtcttttacatctatgtaacatttattaaacaagtcaattaaatattaagacttattagtctctcaacgattctgcaggccaaaaaaaaagggtagggggagggagaaaaagattacagaatttccgcaaacacagcagtcttccattagtaaagtataacagttttcaaagagggtcaaacaatatttgtaaagaacacaggtaaaaatcattcagtcagggtttttattgttgttgctgtttattttcaaaatcacacacttgtatacatacataacaatcaatcaaaaatttattcaccaaacccctggtttttcagcaactgctcttctattcagcaccaaaaactccagtctgtgggcgacacgtggacacaggcttcacttctgtgtctgggtcgagcaatccatcaggtccttggctgagttcgagacttgccctcttttctttccctcttcatggctctccaggcccaaggctctcaacgcttcagatttatggctcacagccctaccaccatctaaactcaacagccatttggaaagaattcaaaataatttgagatgaatgaaatgacaggacctgtgttacagatgggcattctccattccaagtaaatggtttcataatgagttcctagactctgtctggtcttgtacgtcatgatcatactgggtaattatttctagtctgaaacattgtggctttgtcagatgcctcaaagaaaaagtgatcaatatactggaaatacttccggacaagttaggaaatcaaatggcagctgagaacctgtggaattcagactaattagaccagacaaagaaaccaccaaaacgatgagaactcaacagtggcagagtttttaaacctgcagaaaaccaccacagatggtacctgaggatctggaatttttgatgaaaagagctcgaagtgaggactactcatctgtatcaaggaaaaaaaagg

SEQ ID NO: 37636 - DNA, 1056 bp, Bovine  19866880388051
  misc_feature (1)..(1): n is a, c, g, or t
nctgttggaataccctgagtggtgaaggaggatcctttgtagatgcatggtaaataagaaggaaactgaggaggttaacaaaagataacatctttgttcttgatgtagaagtggaagtgaagctctgcacctctaacagctacatatcgtaaccccgttcttctgagtgatgaccatagtccatttacatacaacctatgatgctaagtagagttatttctcacttgagaacaagtaggagaaatgaaggcagcctgagcagttcaaacaaaaagtaggtccagcctactctattgttaacatcttttctatcaggactgctcttttgtaccattatgatattactaacttccttatcacatgatctaattttttatactttcctattaggaaagaagatagtaatccttttaaggaaaaatatacttgggcataaggagctgtaaaacaaattactgaacaatagaaggaaatctagataatcctgttaataagaaaagtcatttattattaatattaattagtaaggaaacttctaatgcttagagattaactcagtgagtattctaaagtctgtttcttttgtctgtatagtagtggagatgaaatggaatacagagaaaatgatgtagaaaaaaataataaagtcttcctaaagatgctgttctatactgtcagcttgaaaatgaaacagttttaggtagaatacagactgtcaacatgtaaaggcagaacttcccttatgttcgagtgttaagaccctgtacttccactgaaggggcatgggtttgatccctggctacagaactaaaatcccacatgccacagagtgggggagtgggggacaggcaaaggtggagaggggcactaacccagctctcatttgttttgatttttagtcgactctatgtcctccaaggcggccttgcccagcaagagtggagagtgcctgagttattgcatagactactgaagtatttggagcccaaactcacccaggtttacaaaaatgttagggaaagaatagggaggtgggtattattttccctgtggtat

SEQ ID NO: 37637 - DNA, 3004 bp, Bovine  19866880393826
  misc_feature (1)..(1): n is a, c, g, or t
ngaaacaatctgaattctaggggagggtctatctcaaaacacagagactcaacttatggcaacctgttcaaactctcagaggttaggaaaaatagatattcttaaagtattttaaaacaagtagatattttaaaataaatatttaaagacaacaaggggttttaacttaaaaaacctaggggcttccctggtggctcagacagtaaagagtctccagtggaagactcaggttctacccctgggtcaggaagatcccctgaagaagggaatggctacccactccagtattcttgcctggagaattccacagacaaaggagcctagtgggctcacaaagtgtggggtcacaaagagtcggacacaactgagcgactaccactttctttcacctcggagtcacttccttattcaatgggcatttttcattctgcatttcaagatgtgtatccttgttcggagagattcttccatccaggacaagtggaagatcccacaatttgtattaaacatgtgtgtgtgtttgctcagtcacttcagcattaagcatatataaccaaaatgtttaactggatcacccccagagaggtacttttgaaatccacagaaatattaatgaaaaactaggaaggctgtaatggactgccagtttgtaactagtctattttttaatagactgcttttaaaagacagtcttcataaaaatctcagccagtaatttgaaagaaatacaaatatttcttcatttgcggccaaggataagattagaactaagtatatagataactgctctgtctctgtaactagaaataacagtggagggaaggcagagatggcagaagataataaacagattgtactgacttaccatcctgaagcaaacacctgtatgaaagaaagatgaaaaaaagaaaaagaaagaaagatgagaagaaatgttagtttgtctacctttaaaaaatttatatatttcctgacttagctttctagtttattaaacagtaagtaaatgaaataaacaaaacctttaatatctgaatgccttcagaaagtgctttttaaaaaaattctttccttttaaaacaaaaagagaaaaggaagactattttggagaaaaagaacaatgttctgaaaccaaagcacaatgaaatgccaaactgcatatcattctattaaagtgctaaataaaaccaaataattactacaagaagagttgagtatgccggcataaagtttacccaccctcagcttttagaatgatctccttaaatgcaaggactaaattccagtttacatataataaaacatttctattttaattccacattctggaaaagacaaaactacagagacaagacactgatctgtgattgccaagggccaggagtgaggagaagaggggtgccagaaaggagcacgagggaactttcgggggtgattggactgttttatatctcagctgcgctgatggtgcttacatgacttattcatctatgaaaattcattcaactgtatactaaaaagggtaaatcttactgaatgtaaattatacctcaattattaaaaattaggaaaattattggcaaatcacaggggatagatcaaatccatttcagagaggtccattgcttttccaaacagcaattgagcctggttaaaatgatacagaagatgagctcagtggcttagataattgtatatagttttgtaagcggatttataacaaggagtattatttgtttcctgaggggagtgtactgtggtaccagatgaatatgaaagaaaagagtagtggtgcaataaagactgagtagtatcataaatgaaatgtttatggggctataaaaaagattttaaaagaaacctataaaatgtggaggaatgatgagtgaagaatactgatttgaaggagaatcagaaaggcaatctattatatagatggagggaaagacacaagttagtagatatattttaaaagaatgggtaaaaaactcaagagaaacttctggtcaaccagaccatgtaaaatagagaaacaaaacaggcagaactgtggagaagcatgcagtcattgcatcctaagagagaggggatcccagaagatgctgactgagcagagttgaaggtttgggtccaggcatattgtgcgtatcccttctgagtttctcaacagtgaacagtcccaaataacgttagcgctaagaaaagaaagcacatgcaactaaagtaaacagaatctggaaacacagcccagctctttcctactcaaagagtggtccaggaaccagaggccatagcatccatcacctgagaggacttttagaaaaatcactttctcaggcttctccccagaactaaagaaacagaaactctgcaggttgcatccaggaatccagtttcaacatgctctccaggtaattcctctgcccgatacagtttagaggttgctgctgctgctgctaagtcacttcagtcgtgtccaactctgtgcgaccccaaagacagcagcccaccaggctcccccgtctctgggattctccaggcaagaacactggagtgggttgccatttccttctccaatgcatgaaagtgtaaagaggttagctccgccttaaaggaaggtctgggaaaggcttgaaaaggatttatattgctggtaaggaattgtatcacaaaggggaaaacttcaaccttgcagagtactgcggatctgatgcgttccccactaatgttgttcaaattcgtgttataaatcatatacctgcatatcaacattgcttcagctacttcacaatgcaacactacatagaagaaactacagacaaagaaaaggcaagaaatccctgtgctgtactctaactggacatggtgttggagcagagcaggcataatctatcactcaggttgctcgctccacccttaacctcctactgccagaaacacaggagctgccagaaagggagtaacaacaagctgccatttccccaagccccaccccaccccaccc

SEQ ID NO: 37638 - DNA, 1136 bp, Bovine  19866880459619
  misc_feature (1)..(1): n is a, c, g, or t
ntgggttgcggggaggggagggaggctcaagagggaggtgatatgtgtataattatgacttatttgcattgttgtatggcagaaaccaacacaacattgctaagcaattttcctccattaaaaaaaaaaatcagtgaagacatcaggtctgtggaatggtgagaggagaggcaggcaggtggttaggtaaaatgctcacctcctccagggatccaggctctagagagggcaggcctagactgagtttacaaccatgggcaaagcagccaaactccaccacagggaggactccgccttgacaggtgactggggaatgtgcttcagtgtgcacgagtcagcagcattggcccaagggtcttattgaagtgagggcttgaagccagatgcggtaattcttgaggggatgaaggaaactagttccttacttcctcaccaatccctaaatatggatttgttgattgagaagcaggtgctggcagtgattgtgatattcagtgcttcaataccacttaaacactaacaacaatcattttatctctctaatcctaacctctccctgagctccacgctggtctatcgagctgcctattcaacaattccacttggatgtctaatagatgcctcagattttattttattaaattagattattttttttttcctgtgctgggtccttgttacagcgtgggggctcaagctgtcatggtgcataggcttagttgccccacagcatgtgggatcttaattccccaatcagggatcgaatacatgtcccctgcattggaaggaagactcttaaccactggaccataagggaaatctcaaatctcaaattttaatgtgtacaaagctgaattcgtgattagaacccacttcccactaaatttgtgcctcctgctgttttatcagctcagtaaacagcacagaaatgaccagtgcatagctttgtcggagcccttgactcttctttttcttgcgtgccatgtcgaattgatagagcaatcctgaattattgtgaaaatacactctgaatccaactatttcttagctccttcctccccataatgcagccacggcaagggcttcgggtgatttactggagccacacaggcttcctggctctttctcacatgctt

SEQ ID NO: 37639 - DNA, 2096 bp, Bovine  19866880535028
  misc_feature (1)..(1): n is a, c, g, or t
ntgagataattctttgcatcaggtggccaaattattggagcttcagcttcagcatcagtctttccaatgagtattcagcattgattttctttaagactgagaagtttgatctccttgcagttcaaggaaatttcaagagtcttctctgcactgtagttcaaaagcagcaattcttcggcactctgccttctttatggtccagctgtcgtatctgtacatgactactagaaagaccatagccttgactatatggacctttgttggcaaagtgatgtctttgctttttaacacactgtctagtgttgtcatagctttcctgcgaagaagcaattatcttataatttcatggctgcagtcaccatccacagtgattttagagccccaaaagaggaaatctgtcattgcttccacctttctcccttccatttgtcatgaagtgatgggaccagataccacgatcttggtttttttaatattgagtttcaagctggctttttcactctcctccttcaccctcatcaagaggctctgtagttgctctttgctttatgcaattagaatggtatcatccacatatctgaggttgttgatatttctcctggcaatcttgattccagcttgtgattcatccagcccggcatttcgcatgatgtgctctgagtatcagttaaataaacatggtgataataaactcccttctccatcctgaaccagttagttgttccatgtgtgtgtgttagtcactcagtcatgcccgactctttgcgaccccgtggactgcagcccaccagtctcctctgtccatggaattctccatccagggatactggagtgggttgccctttccttctccaagggatcttcctgacccagggatcaaacccaggtctcctgcactgtaggcagattctttaccgactgagctacaaggaaagttgtcccatacaagtttctaactgatgcttcttgactcgaatacaggtttctcaggagacataaggactaatttatctctggggatgactgtgggactgtgagattgtgtagaccaagaagagtatgaacataaatagaattgattaatattgactaatatattaaggaactccacatgccaggtactatcctaatttctttacacttatattattaaaacgtcccaaaattctatcagctaggtactattattattgcattttaaaaaccaagaaacggatgctcagaaaagtcaagtagcttgcttaatatgtcagagctgggatttgaacccaggtttgtctgactttgttcttataaccattacactatactgagagaacatggaattaatctcaatgtaggagacaagaatgttggtgtgtgtgtgtgtttgtgtgtgtgtgtgtactgggagagatttggtctagaccgagtttggcaagttattttagcgaaggacaagataataaatattttaggctttgtgggtcacatatggtctctattacataatctttttgtttttctgattaatactttaaaatggtaaaatctatcagtctgcacaataacatgacagactggatttggcttgtgggctgtaagttgctgattcttgttccaaaaactttttatattgatatattctaataatgagtataatttttgaaaggagatttgaaataagaaattcctatatttatctatggcatcttctaacttcaaattctgtgttagtagggcaatagggctgcattcttataaagtagaaatatttcactaaacttgataaactgtaaatagttcatatgattataggcgtatcttcatatatttaatgttgtttagtcgctaagtcatatccaactctcttgcaaccccatggactgtagcctgccaggctcctctgtccttgggattctccaggcaagaatactggagtaggttgccattctcttctccagggggtcttcctgacccagggattgaacacacgtctcctgcattggcaggcatattctttactgctgagccaacaagaagcacatattaatgtatgtgtgtatatatatatatatacacacacacacacatacacacacaggcatacatatgta

SEQ ID NO: 37640 - DNA, 1344 bp, Bovine  19866880614399
  misc_feature (1)..(1): n is a, c, g, or t
nggctgcattcgtgtgtgtaaaatgccttttctcttttttaaaaatagatctatccagagagaactaccgagaaacaattgctagggtcataaggaaacttcttagtaagtacatacatgtatttatttttttttactaagtatttagaaattttatagcatatgtgcttttacttaaccatttaaaaattataaatggtgagaatatcaggtggtggggtttttttttcccccgttcttttttagtatatcaggagtcctatggtaatttaaaatattttaacaaaaattcttttcctcctattatagaccacatacttaataattcagaagatgataccaagtccttatttcttatcataaaggtacaattgttatttacacagttgcatggttattaatatgaccagatttgatgtgacaactcattaaatataaaatctgaaattgtttggcacagattattggagaccttttgcagttccaaggatctcacaagcatgaatttgactctcgttggaaaagctttaacctagtaaagaaatcaatggaaaatcgggtcagtattttcacttaaaactcagaatttattttaaaggtatataatactgatataaccacctaatttagcatttgttcagcatacagaggaagtttccctgtacgtaaaaatagtagattttcaaatactatatcctggtataatcaaaaggatcctggaaataaatatactttactgaaacctcttctgtcaatttccgtgctagtctctgaactctcaatggcaatttggagtatgataacttggcaactgcattctcactatcatataagagcctaaagggatgaaaagtaggaattgtccataggcatgaatttaaagcattgtgttttatttaatcttaattggttctccaggagagatcaatataagatttcctggaagcacggaagaaagaataacttaaatcaaccatttgatgatcatagcacagttcttcattgggagactttttttggaaattgagactgtaaaggtttacgagtttgttgtttaggcatggggtacttcttattttaaacaaagagattgacatggggaaaggcaggggagatgtaccaacatggcatgccttagggaacactagttgtaggtaagagtggcaggaggtaaactaggtcagttctagttttgtcccaagaatgtgctccagttttacattcagcaggggggaagtcattaaaagttcttgagtagatctgatgtgaatattgaaaggatcaatattaaattcagtggattttaaaaagctctgccactgctgtaagaataagcagtaggca

SEQ ID NO: 37641 - DNA, 1716 bp, Bovine  19866880675486
  misc_feature (1)..(1): n is a, c, g, or t
ntacgtttgagtctcttcatctctggcctgggtttctgagctcctaacttgactctccacctcccagatttgttactatcccttcttccctgtgactgcaaaagtaattacttaaaaatctgatcataccatatctttgtctaaaacctaaaagttgatgttcagacttggcatcacacagttttgcagcgtgtagtgcctgcttctgtctttggttttaactctcataccaccacacatctttgctcttaccgctttctcaggttcatgtgcacatccacacaacacataacagaccttcacatgagtcacagattattaatgtttcatgaattaagcaagggttttctctttgtgaagtctgtatgtttcagttcttcatcagtctgtttgaatcacccatgtctctgaatctgctattccctgtacccttcccttattacaccgcagtttgctccagggcagcacccaggtcctgctgcatttgaataattacaactaacattcatattcgttcccacttagccctttattagactgcttattatcctttctttatagatagtaaccacatttttttaaacaaaatataaaatctaacagatagtgaagtactgaagagtaatgagacaaaacatacgaagtagaaattatccctgtattgttaagaatggtcagcatacccctaactggtagatggaactaacacttgactagagctttctctatgctattaagtgttgcaaaattcattttcttaaagcacattaaaaatgagtggacaacttttattttccaaattttctaaagttaatttaagtcatactgaagcctataaatatgtgtttgtttaattttaggaagatttgcaatcaactaaggaagagagatttccagcaatccacaaacccattgctgttggttctcagccaatgctcactgttggaacaacccacatatccaaattgacagatgaccagctcataaaagagttccttagtggttcctattgctttcacggggtgagaaataaaccttcagtttaagtatttatcttacagctttcactttgtatgttatttatcaagagacattagcagcactgaaaaagattttttgtctgtagagaaatgacaggattctggaagctttccagcagacatttctctacatctcactataaggcatagtcattataatttctctttactcacaggctaaaacttgacttttacttgataaaaaaatatatatatatttaaataagtaattcatgtgtgattctggctaattgctagaatgggcaccaatgattgtatagcctgtattttggttatgaccctacattagctcatttaaaacttgagctaatatctgcaaaggtggaattctgcctctgactcagcatcagtggaaaatatgcttataagtagagttttcattttactttattttaccaagaaagttattctctgtatgtccattttttaagtttattagtaatttttagttgtgattttcaaccatattattgctggtacaattttttttattacatatatgtccattactatcacgtggcaatattgagacaaaccccagtacccctttctctgtactgaaacttgatctgtttcctttcctgtagggtgttggttggtggaaatatgaattctgctatggcaaacacgtacatcaataccatgaggtatggca

SEQ ID NO: 37642 - DNA, 993 bp, Bovine  19866880682708
  misc_feature (1)..(1): n is a, c, g, or t
nattagccattctcacagaaaacactggtcctcccagaaggatttattatttaagttttgtgaaggcaattagaagtttatagtaagatttaaatttgataggaaccccagtggccttttctacatatcagctaaataacctgacccaggttgctccccctgcacccccacagtttaacaaactttgtcgaatctgacactagaagaacaaattctgtttgctccagtgaaagcttctttctgtttatcaacaataagttgatgggagataatgacttttctctcattatatctaagaggaagattaatgaggtatttaggtgataaaactcaccaacttcatttgaaaatgtaaactgatagcttgctatgtaacagtgctggctgttggggctagagtgacaaacagcacagaccctgtcttgactacggtagactgagtagtggcccacagaggggattctagtcctaatccagggagcctgtgaatacgttaccgtacacggcagaagagattttgcaaatgtgatgacgttaaggatcctgacataggagattattctggattatttgagtggtttctaaaagcaattgcaaggggtcctttataagaggaaggtagagggaggtatgagaggacaagaaggtaatgtgctgatggaagctgggatagaaaaggcaacctgatgcagagccctgaacctaggagggagcagctttcagacgtatggaaaagcaatgagaagccttctcccctagagcctccagccttccattgttgtcaaccactatgcttgtggttatttattatggccacaggaaacaagcgcatgcctttaagagagttgacaattgagttggttaaaaggcaattaaagtgaactatgaaataatgcttaatcataaccttatgaaagcaatatgagttagcctggaaagacagtggtgggagtttagtcagtcatgtctgactcttggaaccccatggactgt

SEQ ID NO: 37643 - DNA, 1229 bp, Bovine  19866880705810
  misc_feature (1)..(1): n is a, c, g, or t
nagtgaaaaagttggcttaaaactcaagattcagaaaactaggatcatggcatcaggtcccatcacttcatggcaaacagatggggaaacaatggaaacagtgagagactttattttttggggctccaaaatcactgcagatggtgactgcagccaagaaattaagacagttgctccttggaagaaaagctatgaccaactcaggcagcatattaaaaagcagagatattattttgccagcaaaggtccatctagtgaaagatatggttttttcagtagtcatgtatggatgtgagttggactataatgaaagctgagcgccaaagaattatgcttttgaactgtggtgttggagaagactcttgagagtctcttggactgcaaggagatcaaaccagtcaatcctaaaggaaatcatgtcctgaattggaaggactgatgttgacgctgaaactctaataatttggccacctgatgtgaagaactgactcattaaaaaagaccctgatgccgggaaacattgaaggcaggaggagaagaggacaacagaagatgagatggttggatggcatcactgactcgatggacatgagtttgagtaagcctcaggagttggtgatggacagggaagcctggcatgctgcagtccatggagtcacaaagagctggacacctgagcgactgagcagaactgaacagcactctgggaagactggaatagtaatcatatccacctgacctgcattgccttggatagttggtagggggcagcaacagaccagaaattatggttagtttaacaaatcagggcattggaagtgttctttttaatgttatcattttgttaattttttcagactaaaacagaatagctgcaaagcaactagacagtaaaagtaaacaagcaggatgaaactagtttatagactctaagttacctagcctttatgctataatctttcaacagcaatttctttttcaaaattctaggctttattaccattcttggcttgtttttttttttttttgcttacaatctttatttattctctttgtaagcactgaaaattttaatgcttctttattgagcaggagagggatggcatatttgaacttgcattctgcttaaactttgatctactcctattgtgaagattttgcccctatacatcacatttggtaaagttcactccgtatttcttgcctggaaaaatcccaaggacagagga

SEQ ID NO: 37644 - DNA, 753 bp, Bovine  19866880853344
  misc_feature (1)..(1): n is a, c, g, or t
nttgaactgctgttgagtgacatcttgtctatcaggtcgtaagaaccccaaaaccaagggaatgatatctctgcaacagaagttatacgctcccaaggcagcaaaaaatgtttgctgggccttatttctgacctaaagaaagagtaatgaacagacgcttattaaatggcagaaaaacgacaaaaaaaattccatatgaatgtttaaaacaaagcagtagtaatttacatgctgttgtaataacagaaaaaatataccaaagcacataacaaaaatgagtaaataatcatctttttatcagaaggaaagcaaagtaccaccaactacatccaaagtttaagttacactcattcaatcatttttggtaaaagagagactgaatggaactgatatgcatttgttcagtaacataatcagcagactattaaactttttattctgagttattcttaatgagaaaagtcagactgtcttttgtgtctacatgaggaaaatcaaagactttccaaaacacaaaacaacttaaactttttaatgcaaaccttaggtataggccacatattttgaacccaaacaaaagattcagtataaattcataacccatgaactaaatgaactaaattacattactaaatgtaatgaacaacagctcattatagtaaaaagcaatacactgtacatttttcaaacttttaaaaataatacttcaggcaaaatctctgggttagactggtttcctaatttacagactca

SEQ ID NO: 37645 - DNA, 1353 bp, Bovine  19866880857702
  misc_feature (1)..(1): n is a, c, g, or t
ntgctgtcttttgtactgacatttaaaattctcctttttccatcatgtggtctgctcctcttattgggtctttttatgttcacagcctgtgtaaaattttctaactaaaaaagctgctcaaaatgcagaaccttgcttcccatctcctctttttacttcctgctgctgttcttgaaaataattgctgtatatagccaatccacaaaactcgagaataggtagaacctttatagagtctacattataaatttaagatcgcaatctcttcattttcacaaatgccaaagatgggggtctcttctttcatttctttcctgtaaaaaaggcctaagtttagtttacttttttttatcatccaaacattaattttgcaaagctaaggagcttttccagttggaattttaaaagatattatacctgaacgctacagccccaaatcagaggtaatactttagggactttttctgggagtaaggatttttttcacattcctatttatcatttagtagatttcctgtctatatgcaaaaataaggtgtgagagtatgcattcatctgtattttctattaaggcaaaacaggcacatatcttcagtattataccatgttatacaggttataaatgaacccttagaattttgactttcagtcttgacataaccatattatttacttactttccttaatttatgctatttggttgtgagataaatgagttgattagaaatagatttctgaagtttgaatgtttttggagaggacagtcattttgagttggtgcattataaaactctggacatggccataaagttattgtcatgtatctccttaagtgaaagtgaaagttcagttattgttccaaacctttttcatacatatccagcttttacctttccatcatactttaggtaaccttgctttactttagttgggagattttgaagcatctttgaaaccatttggctgcctcagttttctactacattaaactcactttatctttcaaggtaaaccacagtgctataacatggccacagttttctaattgactcttgtccaggctgtttttagggcccttcaactgcagttggtgcttttgagagatcaatctaagaagaatctgtataataaatttatttaatctagattctgtttatatccaaccagtgcttcctatgaagcattttaacatacattttacatttctgagtttttaactttgattcacttttttcagatattatataaaggtgttgtatttgctagtacacttgagaatgtgtataatgttgcagattagaagtatcctaatgccaagatttaaaatgaggattttatatgattctttcataa

SEQ ID NO: 37646 - DNA, 1762 bp, Bovine  19866880876081
  misc_feature (1)..(1): n is a, c, g, or t
nctaaaacagattattgatctgctggacacacagtacatacaactatacaaaactattatgttcttatcaaataaaaaaatgttcaattctaatctaataataaaaaaaaatggagacatatatataatgacaattgaatcaactaaagtcaacagtacagccctagtgaggcaaactaaagtaactaggcctcctgtttagaaagataaaaccaaagaaactatacagtgaactatgaaatcatgaaagttatgcacagagtggatcccagatactagattaaccaaaacttcaatactcagagtacagtgtgtacctagaagcttaagttcagaacaaataaaaatgaactactataaacagcaaatgttgagacagtagagaaagaaaagcttagcaaataagttcttgataaatttttaagtcatagctagcaatccataatggtgaatttaggaaagccaatgaaatttgagattagcccacaaacctcttttgcatcattaaaaataacagcttctagctgcacaacttactttactattggttggaccacagattttactcaatatggcttttcttacataaagcctttttttatttattctattttaaaaccttacgagtcagatagacaaatcttgtctagtttggccagaagctaatcaataatctatcaataattcttcctttattctacttgcaggatcatggtagattagcaaaagaaacattaaaatttttaaatgtgtgacctacagaaataaatgctatataccaaatacattaaaagtgctataatatctataaaaataaagttttattttagattcttaacaagtcttataaatttcaaatgacaaataacctgaaacagtcaatacaatacttgacaaattttaaaatcttttttatctttttatctcagttttactgaggtataactgacaaataagattgcaagatatttaaagtataaaatgtggtgatttgatacacatatacatcatagaaacattcaccgcctcatataattatctttttgacagcatttaagttctactctcagcaaatttcaattctataattcaatgttgtcagttatagtcaccatgttaaacattaaatcctcaggccttagtcactgtataacttaaagtttgttttaattcttgaagtgttttgaagatctgagacatcagagaattcctgcatttactttaatatattaaatatttcccctaaaactgctacaccaaaaaatatcatccagctccaaagagaaaaggaaaaaaacctgacatcatcaccttgtctttgttatagtttgattagtgaaataatcaaaggtacatcatagaagcttttgtttttgtctgtttttctgtttttaagttcccaatttagctctaagacatgctattttatcacaaaagaaagtcatttggaaacacatctccatacggccaaaaagaatgaaagtaaagtagatatacatactccttttggaaagccatacacaagggagaactgaatccaaagacgaggcacatctgggcatctgggctgtagccagactggagcaacatttccaggcactcctcatgccctccaagcactgctgagtacacaggactcactttgtttggcccagtgtcacaaacccggttagtgagtggtattaacaagtccaagattctgccaatacacaaattcaggagtatgtttcggtatatacataatgcagacatttctacagga

SEQ ID NO: 37647 - DNA, 2057 bp, Bovine  19866880922517
  misc_feature (1)..(1): n is a, c, g, or t
ntaccaggctcctccgttcatgggattttccaggcaaaagtactggagtggggtgccattgccttctccgcccaaagaaagctagaagtctttaacctgcaaagcagaccccttaatattctgacccaggctagctcaccagttccattcaacaccacccctcccactcagttgcttagtgaagcaatatagtatagtgtctatagctaatgctaaacaattatccacttcttactttcagtaatggaacccttgagtttcagctgaacacaaggactccctaggtatgaccatgtgatttgactgtaaccagtgggatgaaagagaaagtgttgtgtgcttatttttgttttgtcgttaatatgaaacttctaggtcaaaagaaagaaagaaagaaaattactatgttaagagtattcaaaccacagccaagtaaaatccagaaactaaaatgacccattatctgccaaataagagaaacagaacatttaatacatttaaagcaagatcagtctgtcagcagaattcaaacttccttttcagacccaggaaattttctttaaaagagaaactttgaaatgcattgttggcaggaatcagaaagaagcaaagaaccttttttttttctttaattaatacatacctaatctagaaactatgtggctactatgccatttttaagtgccaagctcaaaaaaagaaactgaattttacatctcactgtactgctctcagaataattcatctaattccactataggcagaagtctaacaaatagtttgaatctttatcagttacaggttataatatgcactcatcagtgtcctttatcatataggaagctccctttttcagaactctacttggagcttcaagttaggatctaaggtgtggggccttgagttactggttaagtaagcttcctatatccacttgatcctctacttagtgaacctgggccagtatcgtcatcaaatttcctgacaggaaactgctttattctttcttgaaatgagagttaataaaagaccaagcacacctgtgtcctctccctgtgcgagcagactttaattagtcacaatcagctcaagagcagaaaccacagagtaatttaaacaggaagagctgactatagagcattactgagcaatgataggagagggactataaagatgggatgagagctctaaagggtgccaaagagctgagggaaagaaccaacagagaggaacctggaggaggtcagacttcagcatttgttgacgaaggtatggtcaaagtccacttgatgcagagaagttacctaagccagagatggtccaaagttgccaggaaagcagaaacaacctgctgggcacaggccagccagagctggttggcagactgggtatgcagaaggaaagaggtgcagagagtcaggaggcaggtgagtcagcgggccactgcaggtgaggcctgggatgctcagtgcccatgtcaggacagtcctggagaacagttctgtggggcacgggtgagatgacgctaaggggtgggtgcacagagggagccggactgccgctgtggacacttctgggaccaggacctcgaggggcctccctctacaggaacctggcacatctctgtatttggctggggacggagcagctcccacccactcaacaagacaaagcttaagcatcttgctcactagacagccagctcgatgagtcccagcatgcccacacagagcagcaacctgggctgcagtgaaggttgtgctgtctggagctcccagccacacttacttacaagatctgaagaaaacacacagaaaaagctacacactacaggacttaagcagtgaaaaagaaagcatgctcttcaggctaccaagagaaatccctctttctccttcaagtgtgtttctctctccagtgacctctatgacaaagcagtgtgccaaatgtcaaaggaaaaatatttacagggcccagacccattcaaacaggttagtcgatgaagggagctgacaggcaatgaattaataataagcacattcaccctctgactgaag

SEQ ID NO: 37648 - DNA, 1229 bp, Bovine  19866880927308
  misc_feature (1)..(1): n is a, c, g, or t
ntggttttccttcataggtggttgtgtgaagtgatgtaataatatatatgcagtgaccatacaggacctgatatgcaatacctacccaataaatgatagcatgcacaacttctgagaggggaggatggagtggcagcatgaaggaaagagggggaggtgtgaggagaaaggatttttaccaagggcacagctgcctttcttaaagaaaaggcataggttacaagcccagaactgaggagctcagtacctgattaatattcagaggggacttgagtgagtgagtgaatgcaggaagaggcaaaaaataactaaaagatgaagaaatgaaaaataaagagaggcaaaaaagaagagctactcctctgtatgtgttccacatacacatgtggaacaattaaagtacaaaccactgggacagtgtcaccaccatgagtaaatgttagcaaatgtagaccagatcaatcataatttgaaagactgacctgcataaatgtgcttctaacaatgcctaagaactatttaccaaactaaaacaacttgtccacgttcacatgaatgtgagttaaggcagctggctgtacattggcgtgtcagaactcatgggccctcaccatggaggcaagtgtgcttcagtcattggttccccattccaaaccccaaggaaaagacataaggtctttggtgcctacaccctgcttttatttaatctattttctcccagttaaaaattgtcatttgtgagcctatatgctttttattctaaccaaatgacataaacttgaagaaaacaaaaatagatcatccaatagtgaactgcaaaaagtatactcaaaacagagtggtttaagcagaaactaaggaaaagagaataacttgcatttcttagaaccccaagttgttaagaccatacattctcaatttctgcactgcccttaagcaatgaagtttatatggaagttgattatgttttgaggcactggaatttaaattgattcttattatctcagaatatagaaacacttatgacttaagcaacagctgcaacttgtacatgacttccaaatgagctaaatacagacagttggggaaaataaattatgaatatatgtaaatatagacaatttagcttatcagttttttgatatttgatttttctaaaattttttctttagttgtatctcacatttaatgaatcatttctaattttctgaggtgcttgtcattacatt

SEQ ID NO: 37649 - DNA, 622 bp, Bovine  19866880934454
  misc_feature (1)..(1): n is a, c, g, or t
nttttgaaatatttcttcctacctcccttcctccagaacttcatcataaaggttttaagtaagtgtgtatatatatatatgcgtgtgtgtgtgtgtatcgatagattctagaatatagtagggaatgcatatgtgtaggtatgcacacatgcacatatacatatatatatgtatgtatgtaggcaaactagtacagtaataagtaaaaaagaaatgaccaactcaagcattatgtttcttacacttgaaatgtgtgtgaaagctaaaacaattaaatatcggtttgcagataaagagaaaataaggcatttatatatcaagccacataagatgtgggctttcaaagatattgggaaaggaagaatgataactgcaaaaaggaattgaaaatttcaataaataggcagtgatggaaaggttacattgcatagagtttagggaagggaaaaatatttttctaaacctcgattttaactcccatcatgtagtatagtttttcttgggtctctctctctcataactgcaggtatataataaaccctagaatgaaaaatacttaggttgtacttttatgaaaaaagtaacaggtgtaaaaaaaaactagaaggataatagaacatat

SEQ ID NO: 37650 - DNA, 1583 bp, Bovine  19866880995628
  misc_feature (1)..(1): n is a, c, g, or t
ntgctcgattggctccgaataatataggatacatagactgggatccatatgtaccaaaggtaagtaagaacatttgaacaagtacaatagcactgacatcatcttcatatctttaaggagaagtgtgtgtggttgctgatttctagcaccacagaaaaatcaaatgctttgattgttagtaaaaacataagtaatttataaggatgggtcatttcttttcagaaagtaattagatcatatcaagctatcataagtgtttgattttttttttttttgtcttaccagtggagggcatgaactctttaagtttcagagtgagtaatttataaagtactaagaatattattcaaggtatcatacactggtcccttccagtgaattttttgtactatattgttagttcttctagagtactccccacttttaaaatcacattgtataccttcctagagtaagtaaagctggacaatgtctctaggggtgttgcatcttgggtattgtttaccatgcagggaatcaccttggagcttcaggaggagcgtggtcgggctgtggttggttctggtgcacacggggactagagcagggctggggagcagcggaaggcaaatgctccgagtgcctgtgcttgtgctgccttcctctgttgccagccagtagaaactaagatggagaagtaaatttctcccacctttagcccccgtatttgacatatttaattatgttttaaatataaatctaattgtattaagatattacatgactgattaaaatgcagattcttagaggaaaatcaagtcttaaagttgaaagaggtagagaaatcagctagaaaatatttttgtgcatccttggcttggaatgaaagcataggaagaaataattttgtgtgcatttagagaggcagaaagtagtcaaaatatttcacattgaattacacttacctactgtttgcctttttatgcttaactatgtgccactggcctgttttggggtacctgaatatgagtgcttcgtaactgcatgcctgtgacctcagagtgtcattttaaaaaggtatacagttatttatatgaattcctaaggaataaagcagattaccaaacaatatgtcataaaaaccaatcaaatgaaaatatataccgtaacaccaatatacaacacgtaggttatttaatgaacgaattactttctatttgtcaatagttatccttaattctttttttctttttaaaggtatttacaagaattctgagaagcttgaacctcccagtgggaagcagtcaagtgttagttccaagatttttaacaaatgcttatgatataggacatgctgtagtatggatcactgccatgatggtttgtagtacattgtttgttttatatagttcctataaatttggggttaaccatacagaaattctgcataattgcataagtctaaattagtggcttagttggtcatttgattcttggatattttctgatgcagtaaacttatgtttctcagactcagaatgtagtcataatgtaccatttataaatctccttaaataatggacctttaaagtaaggtcagaagt

SEQ ID NO: 37651 - DNA, 1561 bp, Bovine  19866881050465
  misc_feature (1)..(1): n is a, c, g, or t
natactctgcctcacatatttcttatagatttaaaagagttgaactctaaccaagataatggagacattattttagaaagtagaaatatgcccatataaaggcaactcgctattaagaaaacttccttctctgtgtgggcctgccaagtcattttatttgcctttcagttatttaaggcaatattcccaaacaaaggagatgcaaatcaaaaatatcacaggcccatttcgctaggactacatactaattatcaccttgtcatgagcacattgattgtattgtattagaatatggtttgggctaagtgaggaatgaaatgtgaaaataaggctgagtagatgtgttttctcccatttttactgaataccccctattagttccttgcttattactataattaaaagtagtctttggtagaccttttaaaattatttctgaagttgagaacaaattttttaaatgtgaaatggatttctttaaaacggttttaatatatgaaatatgtcatgagcattctacttagtagaaatacctcagctaccataccatgataaggaactctaccctcaagaattgagtcatagttctagaagagcaatcttcagtcattaggaagacaaaatcgctcctgtgatgtgcaaagtgagttcttttcttttcaacaaaggctcatccatagttgcttgtgaaggtaaacttggacttccacctctttctaaacagttaaccttggggttcactccatcactaaagatctgataagtacagagttgtacatttaggaatgactctccctaattttattttctttcacttttttggccattgcttcacaactttcaggaccttagttccccaagcagaccttgaatctgtgcccttagcagttctaaccactggaccactagggaattccctctccctaattttatatctcgctttaaaaaaactttttgtgatagtaaaacctatataacaaaatttaccattgcaaccattttctctttttttttggctgtgctgtgtattagttaaagcatgtaggatctagttccctgaccagagatcgaacctgggcccaccctgtttggggagcacagagtcttagcctctagaccactagggaagtcccaccattgcaaccatttttaagtgtatagtccagtgtcattaagtgtattcacatatctttcttttttaaaaaagaggtctttagcttaaatctgcacgtgtgtgtgtgtgtgtgtgtgtgtgtgtgtgtgctcagttgtgtatgactcttagcttgccacccgcacagacggtagcctaccaggctcctctgtccatggaattttccaggcaagaatactggagtgtattaccatttccttctccaggatatcttccaaacccaaggatcaaccccacgtctcttgtgtttcttctattggcaggaagattctttaccactacaccacctgggaagcctgtaagtctgcataattgttgccaaatctctgtaaataattagtgtagacacgacaaggaagtgacagactgccccggcgttttcaggaa

SEQ ID NO: 37652 - DNA, 1969 bp, Bovine  19866881069777
  misc_feature (1)..(1): n is a, c, g, or t
natcatctttactgaggtattatttttattaactggattataaattttaatcctttgaagcgttcaaatggggtcaatatttttcttttttggtagcaggcttattggaataaataatacattgttaaatcagaaatgtattatttttagctatatttaccaaaaatgcacaagcattagttactttcttttcataagacagtcatctaagaataaagtactatgattattaccatttctaattatagatattattcttttgtgtcagctgagtagctgtatagttctttcaaaaagaaatccgttttttcttgctaaaaatgaattattctatttcagaatgatcttacccaagaaacttagtgaagaggactgcatctatagtagagtgatgctcttcctgggagagtaggcgctaactgtggtcatctcattagggtgctgttctgttatgtgggaagtgggctagactgttgtatgtgttagacaatctttaattattgtctaagaaggtgtaaggatgaaatgggggtgtttcaacttatgctttccttctgtgtgaggatggtttgttcacaacctgacaaagagtatctaaataactatttagaaaaaattttttttatctttgtttatatattaccatggtagaaaaattcttaagatgatctgttttcaaactaattgtgttacttctctcccgtgaatcttaaactggaaatgggcagtaaggggaaatagattaagtatctctacacttaaaactaattttattatatactcagtgatgcctagcataacaactgtaaacttatttttttaatgtagaaatgttttcatgatgtagttgatttttgaactcagtacgattttggaactatagcttctagaaaagatgagcatcaagatacaaaacctatctttataaattgctatattcaagaactgttactacagattggaaggcactttgtccctttggatgaaaggtgttcaggttatagcatcctctcccatgctgttcctaaaatcagagattatgagaggcatggagaagatagttaatactcaattagaactctcctcagtctcgtctaataattctgaccttccagtatcaaccagtcatttctatttccaaggtttaagtatgagatatggattttattttgtttttaaattcaatttttaggactctctccttcccttccctctctcccttctatcctttatttttactattaaattttataacagaagaaaaaatatccactttcacttttttttttgggtaattgaatgctatttttggaagtcactatgacctatttcaactgtgcttttatatttttaatacaactctgttttcatttgttaatattaccatgaaataggttggtatataacctctttttaacaaagaattaggaaatctaatatcctctcccaagatcatttgaagaatggtggcaaattaggaattaaacatttatctaaattcagaacctggtatttatttcagtaagcctaacagcttttaagtaataacattaatcaagaagctatttcatactttttaaggtatgaatctctttttggccaagcatttcaaatgtgactcaataaaagatatttttaaaaattttctattgtacttgtaaaactaaaaattacaggtttcctttgtgacttttgagtttgagatgattttgacccatgtttggcaggtaaaaatcatagcataaagaaaattaagcatgtgcatatgagggtttcagtctctttatgctcatcaagaaattatggatttaacttgcatgaagtacatagtgggctagattctttatatctctgtatctatgtctatatgtaggtatatgtagatatggatgtagaggtaggaatatgtaacttgtctcttcataagttatatatgtctagccatatctatatctacctggagataaag

SEQ ID NO: 37653 - DNA, 1216 bp, Bovine  19866881094372
  misc_feature (1)..(1): n is a, c, g, or t
ntgtccgactctttacgaccccatgaatcgcagcacgccagaacctccctgtccatcaccaactcccagagttcactcagacccacatccatcgagtcagtgatgccatcaaaccatctcatcctctgtcgtccccttctcctcctgcccccagtccctcccagcagcagagtcttttccaatgagtcaactcttcgcatgaggtggccaaagtactggagtttcagctttagcatcattccctccaaagaaatcccagggctgatctccttcagaatggactggttggatctccttgcagcatggatgtatctaaagtgtactttgctaagtgaagtaagtcagaaataaaataccagtactgcatgatctcccttagtcatggagcctaaaaagcataacaaacaagacaaaggaaaaacagattcacagatacagagaacagaagggagcagggtagaagtagtggaaataggtgaaggagattaagagatacaaaactccagttatataataaacaagccacagtgatgcaatataccatctaaggaatatggtcaattacattacaacaactttgtatagggacagaggttactagacttattgtgatgatcatttcataaggtatgcaaatgtcaaatcatgtagtacaccagaagctaacataatattgtattatacatcaactatgcttcaatttaaaaaatcagaaatgaatgccacacaaaaaaaccataaaacaaaaagaaccatcaaaataaggccctggtatagacagagcttcttgactcaatgaataatttatacagtctgtaaagccaacatctgggaactgctaatttaattagtttgtattgaacatttaattgtagtaggccaagatttcatactagtttgacagctgttttcattactcataattaatctgtggcatttggttctctttgacaccttgcttggactttaaggtccacttagttttgtttggtctgaaaaatcagttccatcaggtgacatcatatcactgctatatcccctttattttccctaattctaacaatttatgtgataatagcagagagtcttgcctgcttgaggacactccatctgcctgctgtggcctcattggtcctgctcaagcccccaacaccatgtgggcccagtgtctcccggcaagctttccccaacagcctcaatcgtcataaaggcattc

SEQ ID NO: 37654 - DNA, 1545 bp, Bovine  19866881160988
  misc_feature (1)..(1): n is a, c, g, or t
ntgctgtccattttggagggcatgggcaccgcaggctgaccccgtggagatgagataagcacacaggaccactgggctgctccactgctgttcccaccaccatccccgtcagacacctgtccgaccacctgccgcctcactccctcagcaggactgctggccccaaggtggcacttgaacacaggcagaggggcagaggaggctgaggggactaatccaggtgttaatacccaatgcgttgggaattgctacacaaatggacaatgcaactttaagaaatgtgctccacaaattacatcaccttttcaaatgtccaatgcttagagcctctgattaagccagctataatttctgcaacacatcgctgggtgctctcatgtgaatctgcaaccaaacgttctaaatggggcttcagaactgggaggaaggcatcatcaaaatttctgaatataccctatgcaaataaagaaaaagttcttcagtactcaaatgactacatctccattataacatgctcatatttgtttactatattactactgtgcttaaaataatctatgttctcaccttagaacttaactgctttaacaatgtaagttaaaatgataaaaccacttgttatttgccacatcacattaaaatataatcaatgaaataaaacttaataatctttctgatcttacaaatatcacacacacctcaagaaaaatcaaacaaatatgaaatgcatacagtcttgtggggttttggtattttatctctactgctaattacaaatattagagataaacactaaaaagcctgggttttttgaatcctaaaccttaagccaagatgaatacgacaggcattacttctaaagtaattttaaataaaggtaacaggtgactaaactcaaactttgatcaaatactttacaactcacaaacctacaaactgagaatcactaagctttatgaaaagggtatataaataacagttaccttaaagaggcaaaaacgtcgaggattaaatttatcttttccttttctgtcttctaaagatagaaaggtaattaactgttcgacaaatttaggatcagaaaaatgatcaaatataatctgttctgcctataaaattggaaaaaaaaaaagaacattcagggattaaaatttattcaaaattatttccatatttataaactaccataagttaaaagtaaactttgttcagaattacagaagctacagcataaacgtaactgaggaagacataaatttaaaattcttcaaaatgataaagaagttctatgaagactgagaggttccaacttaaatctataaataattatttactgattatccaccatttatatgcaataaaaaactaaaagtcagtacctaagtgagtgctaattaggcagttgagagtgacttagagacataagccttgtgacagctggtcctaagagaagggaggagggttggggcagggggagaaagggagtatacatttgccagcacttactgtactacactgcaggacacaaattgggggagaaaaacg

SEQ ID NO: 37655 - DNA, 2023 bp, Bovine  19866881205671
  misc_feature (1)..(1): n is a, c, g, or t
nccttcaggctacatttcctgtaattgtctcaatggagtggcgttaatactgacactgccccttctgtcttctgcaactgcattctaaagtcacagctttgggaatcagattgaaaattgtggttactcagtgaactgtgggccactaaggccttaactaggtatgtgaaggggaaatggaaattgcccatgtaaatgaaaatgtcacagtacatatgctgtgtttttatttcagccttaaagaccaaagcttgagtcatgcaatataatctgaaaaaatgaagcaaagacttgtaatggtaattggctaacagctctaaaagatcaagtatgggctagctatgttgttacttgctctgtgaccttggtcagggtcctctgtgagccctgtttccagatttctacaatgaggagcagtgaggatcccatgacacacactcaccaagcccagggcttggcacattgggaggttcaatatttctacatttttatttccatctcttttccttatattgttttctgtgagacaaggttaaataatagaagtagcaaggtgacatcagaagtcatgctttcatgtgtatttaaaaacaaaaatcagtattgaagagattttccttgatgacactaagtaaataagctatctaattatggaaagtaaccagaataaaaataattttactttttgcatgatcacatgatttcaaaatgttctattctgacccttagcaccttgcctgtccttctgcatttcctccatgacattcctggcatccttcaccaataaatgcttattgaacatccagttgattagaagtagaggtaactttaggacctttgaaaggcctcggccctaggaaatggggaaactaagtcttggggctccctctgacttgttgtggttccttgggcagcttcaatgagataattattagaaaagtcaatgtcaaggtcctttctgcaccctctccttctagatggagatgttgtgagcctatgtccttaaagggcttccggggttcagcttggtgatagaaagagagtagtacttcatgagttcttgaaaggccggtgtgtgggttagaggtcccaagcccgtgcggttggataggtaaatgatggagggtaggtgcccgagaagagcagaaatggtggagactcatgagttggagggcagagtgcttgtaacctttgctctaaatttttctgaacttgtttaaatgctaacctataaaaatggcatctgttgctgggctggcttcaggttgctggttgacagattccagtaggaatggcaggttggaaactcaggtgaaccgagaaaggtgctgacctgcctcttctgggtattgttcttttggggagggatgggccccagtctttgttggtttttttttttttttttttcctgtttctaaaggtttcagcctcgttagagcctcttatcctgggaaatcagcagaatcttaactgctgaaatttctctgagtcagcatgaaatgctgatgagctcccagtcacacctttggtttgttttgcaattcaaaattgggtttccctgctgtggctgatgcagttggctttggttatagtgtaataaattcaaataaacatttatgagggtaagtaatcatattttatgcaaacaaattattcttccttaaaagtcacttataaaaaatgcatgttatttcttttctcagtcagcatatcaagctaataaaagttattgtctcatcaaaattcctttcacgactgtttattgtcccatttatgttaaatttaaaaaactggtctccattttgtttctcccctccttgcctattgaaattttatactctcaccacttgtataagaatcatgattagttcatatatcccattattatggcaaaaaactagagatagcgccttctgagagaggacaatgtccattaaaagtgtacatagtttccaaattcaaggaacataatttactagcttattaaaattgaaattcagtttgagcgcccaagaatctaatg

SEQ ID NO: 37656 - DNA, 1793 bp, Bovine  19866881259424
  misc_feature (1)..(1): n is a, c, g, or t
ntctgaaagtgtaacatagagaaaaaggaaggatttgaagtctagcagtaagaattctcaagtcaaaggtttttatgggtaaagcttaaaagatttctaaagatacttatactacatcctaaataattgctaacttttttaaataaaataatttctaactgtattttaataaaaataatattaaatgtcagtgaatttcttagatgatgaaagagagatcaactttaggtcgggaaacctatcagcatgatttcttccaaaactatgcaaaatatctaataagaaattgtcacaatgcccacgactgctgtatcaacagcaaccactagagcctgtattttaaataggaggcacagttctctattaaaaaaaaaaaaagaccactgacttcctctgcaggtcttaaaacattatactattgcatagtaagcatttatcctgaagttcttcccaagtctaaaatctgcaccaggtttttgagtgctactcaattaggatgtgttttcagataaaagacagaaaaacagatacatggaggaagcatttagccatagctaatattaaatgtacaggttcatgtttttacaccaacaaaaagcaacaataattgtcagttccaaagttgtttgcaaagggatatagtcgtaatttattttttcccatcaaaggaaaaatattaaaaacatctcactaaaggagattagaagaaaaatcagttttaatttatctgtcaagaatattctgtaggtatacaaagggcttcccttgtggctcagctggtaaagaatctacctgcaaggtgggagacctgggctatatccctgggttgagaagatcccctggaaaagggaaaggctacccatgccggtattctggcctagagaattccacggactgtatagtccatggggttggacatgactgagcaactttcactttcactttccatacagaattataatgtccttttagtggtagacctgacattatgagcagatagatatttactgttaatgatgcaaataactgatagacttactcagtgatgcttccatatttgttaacaatagattatttatccaagtactggtatccttttagtaaaattctcacaattctataagaaattcaattaaaagtagagaaaacacaccaagatattctagattaaatgaaagttcatggagaaaaaaactatatatatacacatacaaatatacatataggtacatagagataagaacatattcatccataatgcttattacatttttgtacttcaaggaggtaagggataaatgaaggagatattaaaaaaaaaaagaaagaaaagtgaaatcagaaattaaaatcagaaagtagtaagcaaatatgaaagtcatgttgctctgaagacaagtgtcagtaacagcactgcaataagacatttagtcttggcaaagagtaaaaaggtagagctgaatttaagatgcttgaattaagccaagattctggaagaaaactaaagatttgctgctgccaggttaaacaaatgcaaactatctctaagaaaagcttctgaattgtaggtttacaggtttcgttttatataaggtgctatataagactcagaaaattgtgtgtgtaaatgatatatatatttggtatataccattatatatatacatagagatctcttcaagaaaattagagatatcagggaacttttcattcaatgatgggcacaataaaggacagaaatggtatggacctaaaagaagcagaagatattaagaagaggtggcaagaataca

SEQ ID NO: 37657 - DNA, 2229 bp, Bovine  19866881308487
  misc_feature (1)..(1): n is a, c, g, or t
nattttattgtaataacaacaggattgcctgcttttattttttttattgtgaacaatctcacagttcagattaaaaaacaaatcaagtctttcttatataaaaattcctgtatgatccacatcatcctcacattgcaggagcagttgaaagaggggaaaaaaaaatcagtattttaatgagaaaattgtctaaattttctgacaagtttaacttggtctgaatatttgatttacccaaatttagtgacctcaagggccacatcaaattggaaaactaaattgtctcatcaaataattatagcaggcctaagaggttacttgcatctactgaaaaacattccattacagttatctgataataatagcactttatattgtcaagctcttaaaaatactgctttgttttatcattcaccagccatatctgcctttgtaaagtcacacttagcaagtccccagacctaacctagatattgaatccaaattaaggaacatgtatgagatgtgatttgaccattcttgaatcagatcataccaagtgttcccaacaactcatattgccataaattgccacattagagaaacatggacatttgcagtccacggcaatgattaccatacaaacctatatcccagctgacttcttttcttcatgaagtcaacataataacactgccaacaaaacgctaacaaagctctacaacttgcttagatgggaactttatcttctcttagaaagccagcactttcttaaaagaggtatattgtgaacttcacctttggtaaatgattgtcacctttttatactacactggtccttgaagattaaaatggtgtttacaactgaatggaaataacgccacagaaacatggaaaacagcatagtggtacaagccaaatataccatatataggattgaccaaacaatgctgagttaattttgctggttaaatgtttaacatacttgatcacatttacatatattattcaactatagcttagattacaatcttaccctgttacttttttaatagtgcatgagtgagtgctcagtagctcagtcatgtctgactccttgcaaccccatggactgtaacccatctggtttctctgctcatggaattttcctggcaagaatactagagcgggttgctgcttcctgctccaggaaatcttgacccagggatcaaaactgagtctcctgagactcctgccttagcaaggggttctttaccactaagccacctgtaatatttcccctaatatcccaaccaaaaggttttatcctgactacaaatagcccagattctcaagctgggctgagctaatccagaaaaaaaattttatttccagatctgattacttctgaaaatgttattctgtccatcttagtattaaaagcattattcaaccttattaattatctattatcaacttgactatgctccccagaatggtacagagcagacttccagtaaagcaagcttctcacaaacctgagactccactcttattttctcatttcaaaaataataataagccacaaatctaaatttggattagctccaaattattgttcactttttgatcaaaatgtattagattctaacaaacttaggttaaataatctgaaacaaataatgaactgtccatgtattttcttcctaactctgctcacaaataaaagggaacaaaacaaaaaggaagtaccaacttcttcctcaacctgactcagaccactactatctgcctagaaaatggatgagtctgtggccatggtagacccaatggagatcaaagcatgcgactcctgagtgtcccagtcagattacccattttagttcaaactcatatgcactatatagtttcaaaataagcctctcattcatatgttcaaactaggactcatgcttataatgagctccaccaactgacaatctgataacagcaagacagttataaatatgctaagagaataattgttcttgttttaaatagaacaaaaggagggaaactgaagtggaaatttcccacccactttgatttctactttacatgtaaatgaatcattacattaaatgcaacaatattacatttctatactaccagattcaaaggtgatagaacctggaatgatctaaatttagaaaatctgtcattgtctaagcaccaaaactataaaactggcactctgtaatgggggaatgtatcccttaaaaatgggcttcc

SEQ ID NO: 37658 - DNA, 1015 bp, Bovine  19866881392983
  misc_feature (1)..(1): n is a, c, g, or t
nttgagtaattcattcttacaccactctcctcccctttcttgtttatttatcacagagcctataaagctcagtgacatttgactttgctctgttgttgactgggtcatggaatgcagaaagcatgtatgtatcattaagtgcatctctgagtgatgggctcagcatcatgtcacatcacggggtcagcctctctcatcatgtcacatcacatcatgcttgatgtagacacatggctcaattctaagtatccacatgtaattgggaagtgagccttcacagcagtctgagcagtggtttcagataacaggaaatagagcagattgacctcaccatttttaccactgcaattataatgaaccctgttagaagttgtgcatatatatacgtattcacatctcattgataaaacaaaattctctgtataagacaggcattttctttctgaattcttctcataatgatgaggcagtgaccctcctgggtttattattgcgatgataagatctaattcctggaaccaggtattaatctaaaggaatctattgacagaatgagctacatgatagttattagggatttgcaatgtgacaatcaaactaaggctattgaaaaaaagttagactaggccattgagagattatttctgcaaaacgtctccactataaaatcaatccaacctgatacattaggcttctgttgcttgataaatcaggagtatgaatatattaaccagtaacactgaatacttccaattttaaatttttccttgattaagaactctaaggcactgaatattagtcctcgaaactcctttgcctttaatcctccatccttaagtcttttccacattagaagctaataaaaactaatctgaataaaacaagattcttgaaaattaatgaatgaagtaattaatgaataataagttgatgaatctatatttttcatattttggtggattccaaaaatacacgtgtctacaatagagagagacaggcatgtttctgaagattt

SEQ ID NO: 37659 - DNA, 753 bp, Bovine  19866881455750
  misc_feature (1)..(1): n is a, c, g, or t
nacaggtttctagtaatgctgtcttaccataaaaatagtaatcacattattcctgaattcttagattatgtatgtgtggcattttttataaagaactgctagtaaataaatctgtaggtaccttgtactttctcattaccttagctcttgcccgtttcttcctcctaaaatgcgctaactgcctcttatccatcctttaaggcaatgacttctttcaagatgaaacagaggcagcatggtaaaatggaaaggacaccagcctaggagccaggaggctgaggtataggctatagttagctgtggaacctgaacaaatttgaaactcaattccttcactcaatcaattttttgagctaattacagaatattttcataatctctaaaatggaagtattaaactcattgagtgctttcttaagaagttttgttcagatttaagatctgtgaaagacagctatctatttcgttttgttttaaaccttaagacacaaatatacacatacacaattatacacatatttatggcattcgagtatgaaatgtaaaattggaaaactgagaagtatcttaaaactttccagtgtattatgtaagatgcaactattcaaggcttttatagctagaaattctcaagtaggtgtataagaattgttcaggaaactgatactcagaaacctttttctaagaaaaggaagaattgaagatttttctatggctctgtgttttatacttcagttcttttttttttcaatt

SEQ ID NO: 37660 - DNA, 1590 bp, Bovine  19866881462474
  misc_feature (1)..(1): n is a, c, g, or t
naccaggctcctctgtccttcaccctcctgggtttgctcaaattcatgtccactgaatgggatggttttatttgaaatgcactgtaaagactttgaagatatgtcactgaagagatggacatgagacctacactgattctaggatctgcatggaatgaactgaaagggagatgagaggaagaatacgtttgaggactctgcaacaaaccatgatcttcattacataaaattacctggattagcacctccagaatatatttaactttaaaatggtttaaccatattctaaccaagttttagatcatttttggtactaatagaattagcacataatgttgaaccaggttgcagaagattgttttaactctgtggcagattcaaagtattgaaaccaataaatatgttgaaaacgcaaattctcaaaagtaaaaggatttgtaattctagaaggcagcagattatcaatagctgcatccacattctttggagtggtgggttgctttaagacatatcagtctcaccaggaagtaaaattgtctaaagtatatactactttaactttccaggcaattggggttgttgcttgaacagagacctttaaaaaaagctatatccgttaacagcagacaagattttttgtttgtttaaaaggtttaggtttttaaagtttcttgtcctagaatatatcagaatccatttagaatatggactcaggcccaaagcctttctgacttaatagagacgcagatgctgttgccaccctaagaacggctcaaaatcactgtggcagttacctaaaggtttaataaaaatttactaaccaagtactctgaaatactgggctagcagatctttcatttcagaagcaatcattttagggtaccaaactacgaacatctgggccgagcctccggcttttgtttacaaacacagaggaaggagcgcccgcggtccattaagccgcagggccgcggagccgggcgtcgctcccgggaagcgagcccggttcccccagcagggagcgggggcgaaaggagccctccggccgccgcgggcccagcggcctctgtcttccaggtatccccggctgccctcgctcccagtcctcgccgtctcatttgccacctcccaacgcgtgaccccggcgcgtcgcgtcccgggccggtgtcagacgcggggtgcgccaagcggtcccatgtgccccctccctctcacagccgccgcagtcaccgcgccccgatccccgctccggctcctcggcagagggctcgccgccgccatgtctaccggcaggccactcaaatccgtggactacgaagtgttcgggagagtgcagggtaggggaccaccctacagcgggagatcaaagaggtgttggggaggaagactagaaagctgcgacaaccacagcccatctttaggaacccctgccccgttgtgactgtgacttccgcccgcccatgacacagcacagcgggcgggaaggagaccaagggagcatgcgcaagagagccggggtggacggggaaggagagctgagacgccttagggagaaaggccgggagaaggaggaacagccgggcgctggta

SEQ ID NO: 37661 - DNA, 906 bp, Bovine  19866881473547
  misc_feature (1)..(1): n is a, c, g, or t
ngtaatgaggacggtgaatttggtaggaatttgaattacatttttgatattcatcttagcattgtattaaaatagtagctcacctgaaatattttttttttttttttaaggaactatgaaaatttggttaacactttgctagatggtgtggagcagagaaatttgtaagtgcaaaaaaagtatttttttaattcccaatgcttttatcttcaatgttataggggatttctaccctgaagaccatgaatgactattaagtgtgttttctgatttttttcccactctcccccttttcaggccctggaaatttgagcatataggcattgggcttttgtctctactcttgagagatgacagagtgttgcctcttcgtgccatacgttttttttgttgagaatctcaaccatgatgcaattgtagttcgaaaggtacatattttattttagctatgatcttgcgtttgagaatttttacatgttgaagtatattgatttgaaatctacctctcttggatcagagatggtaataattcatccaacaaatacatgaagaggtgttctcagacgctgtgaatttcaacactggggatatagcaggaaacacgtttataggttattggacagcctgactttgaaaaattaaccacaggtatattataacatgttacaggaaggaaaaggtgtctgagggataaagatttttggttttacttgaaaactatctgaggcgggtgacctggcctggcacattgggaaaagatccctaggaagaaatgtctaggctgagataggaagaataagcaggaacaaagaaaggatacaggttgtttaggcagagccttgcatgggttgagggttcaacagtaagaactgcaaacgactcagcccaaatcagagttagcactca

SEQ ID NO: 37662 - DNA, 601 bp, Bovine  19866881540090
  misc_feature (1)..(1): n is a, c, g, or t
natttacttaaaatttttattcttagaatcacacatcattggcaatccacgctgaaatggtacatagtttctgtttactaatgttcagctgttggcagacacagtcaattttttagctaagcaaatgtcagttgttgccattgcacttctaaaattacaatacagctacaaaataattggcagggaagggtactttggggtaaacatggagaaaagtaaaagattaaggaaaatgtccacctttctagtcagtgacaagatcagtgataggaataggacccagtttgagatcttacttcttagaatgcaaagtactagtggtcaagatagcaaataattaggatgaaatatggtaagtacttgcataggctactgaacgggctaggggaagatttgggaactagagtaggtagtttttaaatctattttattcccgataaaatagatccaagagcaaaggttttttgtgtttttcaaaagtcagggtgtgttcagagagcagaataatcccagtgtctttaaaataggctacctataacctgcaggattaaagaatcagcctgcaaggcagtagaggcaggttccatccctgagtcgggaa

SEQ ID NO: 37663 - DNA, 1014 bp, Bovine  19866881578622
  misc_feature (1)..(1): n is a, c, g, or t
naatctttcctggtgtatttgctaacaatagttggtggaggcatagagagaaggaggagaaatacctgaattaaatggctgccctggcaaattagtgtgagagcaagttctcatttgaccatctggacgataagttatttgctggtggtcattcagagaaagtaaaaattgtccatttgatgtgtgaaacgtattttctttagttttttgcttgccctgtgataaaccagtgaatttccctaagctgttcagctgtactgtggggattaaatattgattctaaccttgtaaatgggggtagaatgtgaagctggctgatgggccccctagggaaggacactatgttttaggtctttcttttatagaaacttagagataagttgctccatttcaagcatgaaagtagacagacaaggaagacagcccttttcttcatcaaattaatatgaacaggctgcctatggtatgatgagtacaaagagaaaaaaagtggcatatacctgcctttttggtggagagtgtccaaagtgctgtttgcataagtgacagtgagtgtattgctttttagaatgtgcagtgcgcagagattatgagagcgaatccttcctgtcagctggacccttttgtatcttgggttcgttgttaagtcagttcacttgtggtctgtttcctctgtaatttgacttaaagttgagggcaaagataaaatcagcttagagaggaagttgacaatctggtaaatagctgtggcttttctcttttaggcaataggtgagataaccaaggatcaaagcagtgcataatatttccttaggaaataagttttctgctgctgtcagatggtcttgaatattcaaaattgcccaccagataagctgacctacaaatacacagggagactcggggaggactgacctccctacctgcccgagattcttggcagcagtacacagacttttctcacctaggtggcagcaagcttcagtggctggatggagactagtgtatgctgtt

SEQ ID NO: 37664 - DNA, 987 bp, Bovine  19866881740082
  misc_feature (1)..(1): n is a, c, g, or t
naaagtggttctagtgttaatcaatatgtggcatcatctcaaatattctggaaaatcccatctttctttcttccttggctttcagatttcggagcaactggacagagatttgaccttttattcttttgcctcaggagttgtgattttgtgttcaactatcttccaggcaaggactatttttgcttagggcttgaagatatttttagatgcatccaaaagaaaatctggaatatttcatgagtgttagacaggtggatcattctttttatttcttgactacataaaaatgtgataaaactaaatatgatgtagttctattctaaatttgaactattgataagatgctaactaggacattgaaaatgaatctcacaattctactcacagactcccttaaagggtctatatctggattattatttaagatatatgttaagttaaaattctccctctggccatttctgacagctttcctgatatatcaggctatacatttctgtagctaacactcatagtctcatggaaaggaacttggataaatgaatgggaaatacaattaatgtgtgaatgaaatattggtgtaaataagcacaggatatgtctattgttcacaattgtctgagatttaaagcagaagctttggagtgatatattccaaagtgtatcactaaaaatgctaaattcagagttaaccatgtaggctttgggcttccctcatggcctagaaagtaaagaattcccctgtaatgccggagacctaatttcaatccttgggttggaaagatcctctggagaagagaatagctacccactccatacttttgcctggagaattccatggacagaggtgcctggtgcactacagtccatgggtcacaaagggtcagacacgggttactgtttgagaaaactgaaactgccaatctaattatgtgcttatcagtacaagttgttaaattattacctgccgcaagtttaaaacataga

SEQ ID NO: 37665 - DNA, 1965 bp, Bovine  19866880394924
  misc_feature (1)..(1): n is a, c, g, or t
ncttctgccttcaatctttcccagcatcagggtcttttccaacgagtcagttcttcacaccaggtggccaaagtattggagtttcagcttcaacatcagtcctttcaatgaatattcaggactgatttcctttaggatggactggttgaatctccttgcagtccaagggactctcaagagtcttctccaacaccacagttcaaaagcatcaattcttcagcgctcagctttctttatagtccagttctcacatccatacatgattcctggaagtcacttcagtcttgtccaactctttgcaacactatggtctgtagcccaccaggctcctctgcccatgggattctccaggcaagaatactgcagtgggttgccatgccttcctccaggggatcttccccacccagggactgaacccatgtctcttatgtctcctgcattggcaggtgggttctttacctgggaagctcaaaataaaaaggaacaggtgaaataaattttaatatcttatttagcccaatatggacatatcaggttccctggtggctcaactggtaaagaatctgcctacaattcggaagagctgggttcgattcctgggttacgaagatcccctggagaagggaatagctacccactccagtattcttgcctggagaattccatggataagggagcctggcaggccacagtccatggggtcacatggaatggacatgactaagcaactaacactgtagataaatagcagaaatgtatgtatgcaagagttctctcctccattatagaaaaaattactaaaaaggtcaaatatggatgaaccacaaaagtaaaaaacagtagatataaacattaatatataacattaaaaagtctttaatcatatttggagctttgcatgtgtacctacatgctaatatgattccagcagaaaaacaaaaaaattaatttttatgagccagtcctacttctgaaatcataagagtaagtaattggtttttgataatgttttaaaggtaaaataaagtattcagaacgcgtatatgatgcctgcatggatgcctttgactgcctgcccctggctgccctgatgaacccagcagttcctgtgtgtcacggcggtttgtctccagagataaacactttagatgatatcagataagtaaggttctgttattttccaggtctatccattttttactccttcggtaataaatgcataacatcaatttccctgcctttaacaataactttttgaattaaaatgatctaaagtagtcatggggagaaggcaatggcaccccactccagtactcttgcctggaaaatcccatggacagaggagcctattaggctgcagtccatggggtcactaggagtcagacacgactgagcgatttcactttcacttttcactttcatgcattggagaaggaaatggcaacccactccagtgttcttgcctggagaatcccagggatgggggagcctgctgggctgccatctctggggtcgcacagggtcgaacacgcctgaagcgacttagcagcagcagcagcaatggagccccagatgaaaacctgaacactgaaacttggatgagattccttggttggccatactatgtgcttatgtcacatatcaattcaaggagggtaacatatccagagaacaaaagaggcttcccatttggaacctaccccagactctgccttatgggtctccacacttgactagatcctttccctctcataagccataattgtgactataataattttcagtgagttctgtggaactttcaggtgaattatcaaaacagaggatgtcttagaaagtctcttcaaatctgcaattggtctcagatgtaagagcagtattagggaaccctcaaacctcatagtttgctaacactgagtaaaaatgatctctatcatttaagttcatgtaaataacaatccttaa

SEQ ID NO: 37666 - DNA, 1109 bp, Bovine  19866880791031
  misc_feature (1)..(1): n is a, c, g, or t
ntccaaatgaccaaaccaccaaaactgccctcaatctaattgtgtcaccttagtaatgccttcttctcctagtccattccctgatgtggctggagaaggaagcattctaatcaaccaagcagaaccatttacagagaatcaaaattgatataataaactcaatataaacatataatgtgtctccatttatggcttctggagacacctgataattttgcactgcccaaatcattcaacaagaatttgttcaatgcataaagagcaaggcattgagcttggcactatcggttcagtgaccatatttttcaaactaaaaccttgagtatatattttaacaagtcattttatgtaacttccaagtaaatgcaacaacttgggagacatagtttagacaccgacatactagaatctccaaaacatcctaatactacatgtagacaactgaacatttaaatcagaagcagttgctcctcccaaaaagaaaaatgggagctatacagtcaccaaagtttttaacccttagaatcctggaactgacaggaattgtttttaatttaactgcatatgaataaaacattctttctgaatatcaaccatcatacttctggtttcacaactgtagcaagtatctgaaattgacaaacgctgaaaggtagtatgtcataatctccaggcagctgttaacataaatctcgatttctactcatttttctcttttgcagagacatgcagaatttccagctgcaagggataaatgttcatagaaagtcagatagaccatcttttaaaatagagttgactatattttgctgtcaggcaaaagaacagactagggaaataaaaagaaaaacacaaggttccaatcttccctataatggtctcaaaaggaatccatccaattccataaacaacattttaacaactgataactgcttcctcagagtttatatatatatttttaaatacctgaatatgcatttgtgaaatggatttgaaattcggcaatatgtctgcctcctgagaaatctgtatgcaggccaggaagcaacagttagaactggacaggaacaacagacggttccaaatagggaaaggagtacgtcaaggct

SEQ ID NO: 37667 - DNA, 729 bp, Bovine  19866880838231
  misc_feature (1)..(1): n is a, c, g, or t
ntggggtttattttactgcttattgttaggatttgtatgtaaggtaactaatcagcttggttttaattagaaacctaacccctaatgagtgaatacccaaaatgtcatacagcaagtacttactctcaaaatgaaagctatctgttctcaaaattatattgttaaatataaacaccataagttgttccctatcctgatttctaaatcacatttcaatgggaggcagtaacaaaaatttcccccaaaatcaagtaaaataaaagcttctcaagaaatgaaacacaggtagaatatcagttggtaataacttaaacacttggctagatttaaaaaaaaactaagaaggagagaaagacaaagaggaaatcaggagaaaggaaaaacagagtgggaattaaagaagtgagagagaggtgtaaggtgaaatgaaggcagataataaatgagcatcaggaagaagaaggaaggaaaatggaagaggtgaggagtagacgaatggggaggaaagacctcagaacaggagagaggttggggagttcactctgtacagtgactgggaagcaaagatggtttttgtgaaatgctggtttcttccaagttccaactttccaaagattagtattttgctctctgtcttctatttttcttagttagaccgattcaaagaaccacctgcttatggacctatgtgtgatatcctgtggtcagacccgctggaagattttggaa

SEQ ID NO: 37668 - DNA, 2281 bp, Bovine  19866880905728
  misc_feature (1)..(1): n is a, c, g, or t
ntttctgcaattttcttgcctctcttcacttttagctgatggtccaacttcttccttcactgagaacaaataagctcccagaagagccctctcacacattcctaccacaaatcctgtcaaaccaccttgtaccacatcctctgccttattattccactactaggaagggcttatttccccttctacctgcagctgacccttctgcttggtactgggtcttactgttatcttcacttgtcccctccaggatttgtgttcttcaatttcctctcctcacttttgcatcattaatattttcttcttcattagattatccacatcttcatacaaacctgacttcatctaccaccaccactatcactcccagctactacccagtccctcacaacaaacacagctaatgtggcgtgtacactttcattctccacttcctcttctctgtttttcccttgatcccactgtattagctctaatacccacctatggttccaccacagctgttcttatcaagatcatcaacaacccatgttgccaaatcccatgagcatttcccagcgctcacctcatttgacctaccagcagcatttgacatagttgatcctccctccttggaatactttcttcccttagtttctagaacactcctttttatgattttcgtctttcaaggattatttcttttcagtctcctttgttgattcttcctcatctttctgagctctaaactccttgctcattcctctgtttttttttctttctgtttgcattctgcatgaattcacttagtgagttaaagtttgaatatcactgctgctactgctgctaagtcgcttcagtcgtatccgactctgtgtgaccccataggtggcagcccaccaggctccgccgtccctgggattctccaggcaagaacactggagtgggttgccatttccttctccaacacatgaaagtgaaaagtgaaagtgaagtcgctcagtcgtgtctgactcttagtgaccccatggactgcagcctaccagggtcctccatccatgggattttccaggcaagagtactgaagtggggtgccattgccttctctgttgaatatcactagtatagtgatatttgctggtggcaaagcagaatgttacaggcaaatgctcaggaactggattacctggctttgaaacttatctttcaccacttgctgctgctgctaagttgcttcagtcgtgtccgactctgcgcaccccgtgaacagcagcccaccaggttcctctgtccctgggattctccaggcaagaatgctggagtgggctgccatttcctcctccagtttcactaccagaatatttatattgcataaatggtttatattccattattattgaacagtgatgcagccttctgaacaagtaaatgagaacagggtgagtgatggaaagtatattcttcactgtttctcctctttccacttcagtttctgcaaaacttcaaacgatctcaaaaatgactgcatgttggaattggttttaaaaataaatgatgccaggctcagcctctagagcttctgatttaacttgtctcgggtagggtcaggacagtggcaggtttttaacagaagcccaggaatattaatgtgcactccagacctatctatatcctaagtaaagacaaacaaaacgccaggcagtttaattcccccacctaaacatatgctccacgatgtcaatcagcagcagcagatacaatgtctctctgcaagtgtagacctctatttcatctctctctgtaataagaatgtgtccaggagcaactctgtcccatatttcacatggctactgtctgcacaaggcctgtctgagacacttacgtcagcacatgctaagagaacagcttaaggagatcacacgtcacacgtaacttaaaacacactctcgcctggcctccacagatgggtactccatttattccctcctggacactggtatatgtcacaaactattattctaatctaaccatatcaatcaagcaatcgattggccattaagtctttaagcacctactatgcatggtattgggcttcacaggtgacgctagtggtaaagaacctacctgccaatgcaggagacacgggttcgatccctgggttgggaagatcccctggaggaggaaatggcaacccactccagtattcttacctggaaaaccccatggacagaggagcctggcaggctacagtccacagggtcccaaagaatcagacacaactgaagcaacctagcacgcgcaggca

SEQ ID NO: 37669 - DNA, 2077 bp, Bovine  19866880945873
  misc_feature (1)..(1): n is a, c, g, or t
nttttattacatttgtttagaaggaatgaatgagtcctgcaagttcagtgaggaatgtaaagcattagagcaaaggtggcctcattcatcaggccgcagggagcaactatgctctattttcagctttaacatgacttttcaagatttggctgctcctgcacagttattactgactttgatctggtgtctctgggaaaggctgatggtgcttttcatcctgctcacggctccctgctttaggtatcaaatcactaaattactctttagtgactctaccaggagtgagatagaaatagcaagaagcagaaatcaaaagagccactgtagctactccatgaaaaagagttggaaaaaatctggcaaaaattagaatatgatattatacaatgtggagatggtcttttccccaagacagtcctatttacccttgttaatactgtaattgtgaattgtttttatactcctcacatataatcatactgtagattaaagtaatcatttgaggagaaatatactttgcgttatctaagaatagataaccgaatttaagtaaagagtagttaatcctttttaagaaaatatttgttttcttaagtccatgcataataacaacatgatgcatgatccatgtaaaaaataattaacatatgggaaatgaaactaaataatcttttcattctcaatgatttatttgaataatatagattttcataaccaagctttatggttcatgttcatttcctagaaatctaggtgaaatacacctggtagattcgtcttttactgcagggagtgaatgaaaaataggattataatagctgttctattttataatatgttgaatctattgtgaaataaatgttttaaagtgctgcagcacatagagggcataaaatgtgaagcagtccacttacaggctttctctacagaaataatttaatagatttcaatttgactaaaatagtgaggaactaacaaatccatttaaaatataattaaagaaaagaaaatagtttctaataatatatttaaatgaccagacataagtattaagacactattcagtgacatataatcaaggcaaaacagagcagaggaccatgatctcacctgagaaccgagaacactctggccatcttgccaatggctcggatcttatttcttatcacctccttcctggctgcagccgttgctcctgcattttaaaaacatagttgagaagtcaggtgactttttattgaactctaactagttgactagtttacatatataacaaactgctgtaaggcaaatcaggttttgttttttgttccccttgggcttccctgatgggctcagtcagtaaagaatccacctgcaatgcaggagacccaggttgacccctgggttgggaaaatgccctggagaaggaaacagcaacccactccagtattcttgcctgggtaatcccatggacaaaggagcctggcaggctacagtccatggggttgcaagagtcagatatgacttagtgactaaaccaaggatttatctgtgaatcaagttcaaaagcttatgcttccaggcataaatgcttgcctgtgatactttacaggttctcaaaatgccgaagagcaacttttgagatttccaatgaggcaggttcctgtcctcttctatttatacaaagggaatgtgtactggcacgaagaggaagtgagtcaccaggatcttctactcatttccggtctccatgcttggagactactttaggaaacttcttttgcaaaagttgtcctttgaagtgatcaaactaaccctctcttaaccccttatgttccctgggggtatttatagtatttataatatttatagtatcaatggccgtaaaacatttgttttagcacttgatactctttcatctactggttactgcacaaattctagaagaaaaagcagaaaactactgaactggatttagtgagagagggtggcacatagtttgtattttagcacttatgtagaaaagttacacataagtctaagttttaccactgactgcattttccaaatttaaaagtcaatctacatagggttg

SEQ ID NO: 37670 - DNA, 3889 bp, Bovine  19866881174547
  misc_feature (1)..(1): n is a, c, g, or t
natctgatttctaactcgtgttctcctttttttttttccttctcctgtcctgtacttgcctgatggattttgttttaaaatgattccttttttattattagtagcccaggtaaaaggcatgacttaggtcaaaggaaatttaccagttcatgagggttgttatagttggtgagcaagggctgtccttataactcactcttactctatggctcataagttcaggtaaaagtaagtatgcaagtcatttattaagagggacttcaagtcttcaatttgtaggtagttttgtcataataataatctttagtgtgtgttttttaatttaatgctcaaatcactcaatacttaagatagcgtatctcacaggcaatgcttagtgacttccacataatgactgaagttcaccaacttgaaatattttagtatgcctggatacaaatagtaggtatatgtaattatcttgaagctaagagctaatgactttgtacttatggaaatacacacacgtgtttctgtatatataactcttttatgcctatacccttattcttcctcttaccctgtacatgcctctttcacggcacctataacaccttctttagctttgtcacaagtctcctacataaaatgcagatgatattatcttacacaaggcaggtgactgtactagatgtatttgtgaagttgtctgagccaatcttatgattatgtctgtgtgtcactgaatgactgtatgtgtgttatgggttttccttcttaacactgcattggcaaactgtgaatcaagtattattcaaacacaaagttttgagtaaagtcagtggaaggtagatgatagaagggaggaagagggcatagatctctcttgttttcttttattgcgccttgtaccataccttgcacatggttaatggtcaatagttggttgaagtaaaagtttaagggaaggcagagagaaaagaatgacaagattgaaaaaaagaagaaggaaagaaagaaggaagataggtgaagaaagaaaaaataaagaaaaaatttaaaacacaaaacatgtaacttgtgaggatattaaaaatataaccaaccacacatgaatggaagtctcaaggatgcttgaaagaattttgggaaaaagtaatatgccacttcagaggctgaattctgtttcaaaactgttaagagtctaaaacagataagagtagaaatcatactgtctctaccacacagtgactatgtgatcatgagcaaatgtttctcattatttatttgagttgcaccatgctgcgtgcttagttgctcagtcctgtccaattccctgcgacctcatggactgtcgcccaccaggctcctctgttcatggggattctccaggcaagaatactggagtgggttgccatgtccttctccagggaatcatcccaaaccagggatcaaacccaagtctcctgcattgcaggcagatttttttaccacctgagccaccaggaaagcccataattatgagctgttctgtcatatttagagtatgaaaatcaaataaaatattaataacatatatgttaatattcataatatatacaatcagataaaatctttggcacctgaaaaatgtaaagtatcacgactcagttttaaattcctggaggagagaatagctatctatttttaataattttgccattttacaattcttacctcatgtgtcacatcattatattaggatccagagaatttgagccaaaaattgatccttggaattagctcaagtccagtcaaacactgtgaatcatttctaccattataatttcatcaagagaatttgaattgctactgtaaaatattttttgctaagtcaataagaaggagtcattggcagttttgatttccctatcagtttgaactgataacattcctttaagttctaatctatactattacaatgctaaaatatgacttaatcaaccctgactaaatgagagagatttagctaaagctttaaaatattgaaggagatggcatggacataggaaacactgtgtccgttgtggttatttttcagtcgctcagctgtgtctgactctttgcaaccccatggactgcagcacaccagccttccctgtccttcactatctcccggattttgctcaaacacatgtccattgaatagatgatgccatccaaccatctcatcctctgtcacccccttctccttgctcttattgttgatatccactccaaatatataacaagggtttaagtgtaccttggagaaggaaatggcaacccactccagtactcttgcctggaaaatcccatggacggaaggctatagcccatggggtcgcaaagagtccggacatgactgagcaacttcactttcactttggtgggatgcactttgaaaactagtacctatatcttatctgtatctgtttctgtatctgcatgcgattatagaacactcttccaccttgtacttggtgtcaagccataagctgtagcttgcaatggttctcggttgcttggcaactagttaatattatctccttggaactgagttaatattaagctcatatacttgatatctactattttttttttggtcatctactttattcatggaagtaagtcactgagtctcttgaaggtctagaatctctagataatgaaaaggaagtgataatccattgactcatgtctttaacttgttacatacatatggttcctgtttgtccttctgttaaatgccttactgacaattagacttttagagaagttggttttagttcaggttaagaatcttcacaccatctgtgagaaaatgaaacgtaacccctcaagatgtgaggcttaatgggtcttgtccaagtgacagcagaccactgacagtgtatctggatggaggactcagcttcgctggaggtcttgtctgcatccccagaaaaaggttcacagagcactgattctacgggtggaacttcgtgaaaaatgaagactgttatccagtcactaagccacgtccaactctttgtgacctcccgtgaactgcaacatgccaggctcccctgtccttcacgacttcctcccagagtttgctcaagttcatgtccattgagtccactggtgatgctatctaaccatcttatcctctgcacccctctcctccttttgccttcaatatttcccagctttccaaggtcttttccaatgagtcagctgttctcatcaggtggccaaaagtgaggattacctcacccactgccgtataatactttgctgtgtgtgtgttagttgctcagtcgtgtctgactctttgtggccccatggactgcagtgtgtcaggctcctctgtccatgggattctccaggcaagaatactggagggggttgccagttccttctccagggggatcttcctgacccagggattgaacccaggtctcccatattgcaggcaggttttttaccacctgagccaccagcgaaacctatacttattttgttgaaaactgctgaaatgaacaatcctgtagtggtgttggttaagaaatccaggtcatttgttagagcaaagatatatagattatatgtagcttaatttaattaaaatatatagtgagagtagttcctaagttttaagtcttgattttctatttcaccacatggacagaggagccaggcgggctacagcccatggggtcgcaaagagtgagacacacgaacaccttcactttcacttcccattaattaaatgtttaaatgtaagcaaggtgactgctggactaaaactaatctatttagaaagtggcctccggcaatgacactttcatagcagagtcaaacaaaagcaaaagcctgagtgcttttgtggggggtggggtgggggtgg

SEQ ID NO: 37671 - DNA, 875 bp, Bovine  19866881174752
  misc_feature (1)..(1): n is a, c, g, or t
nttattctgaagcacagtagttaatgcatcttatccgagtaagattgtgctgaaaaggggaagaagagggaaaagaaaggtgttctcagtgtctaatagtacatgattaatgtcctaagaaccagcaaggagacttgtcccagctgccaacatgtacctatcattaacgtgactgggtatctgcttggagcatggtatttgtctgctcagatctatgtcttaaaagtgtagtattttgcaaatgagaatattatcaagtcattagtgctgaattttgtacttagtactcagcatggctatacactacaatcagagttagctagtttgaaagctaaattgcaaagaagaaatatagcactgagtaccacatcactgaagataaattaacatttttataagtaatttccttcagcaaactgatacagaatgtattgaataattattacctttttaaaaactgttatgtagataaataaatgaacagcttgaaatggtgaattcttcctttcatctttcacttctagtcagaaagctgttagtaaaaatgaaagtgctatacaaaattcattggaaaagcaatgcagaagacattaacttataacaaaagcctaggactacgtagtagtgtcatttttgccagaaggcttaaaaataccgaaagagaattaaagactacagaattaattgtgttgtcctatttatgttagtatatcttttcaagtagtaggagttgaaacaaaggttaattcaaagccagcagaaaacagaaatttctcaaagccccttattttatttgttcagtatttataagacaaatacaagcaaaactccaaagctctgccttggctaagaatccatttcgcttgcatcaggac

SEQ ID NO: 37672 - DNA, 844 bp, Bovine  19866881233578
  misc_feature (1)..(1): n is a, c, g, or t
ntgttctgcagagctgaaggggacatgaggaactttaggggtcactattacaataagctctacttttactgtttttatctcttggagtttcaggtagtgtttctttctttctcactctctttctcccactctctccctccctgtatatgtgtgtgtgtgtgtgtgtgtgtgtgtgtgtgtgttgaagcaggagatggggtagattctgctgcttgaaacttgtttatgagtacactattgatatagacagaagtcttataaaaagtcagagattatggaaatgaagattggctgaactgaagggaagtgaaggaagtgctataacatttgtaataagttgagaatgagagaataagagaaagagatctttaggcaggaaggtgaaaatgaaccagactaagtggattgcaaaaaaatttggattgatcagaaggtatatgtgaaacagcagaagttaaattcaagtagaaaggcatcatgagattatgaagggacttggatttttagcgtgttgtttgaagaaggagaacaattccagtaatataagaagataactctggcagatgtatggaaaattcaatggtgtagaaaaactgaaagaaggttgattccaattagaggttcactgcaataatacagtcacaagacaatgaggtctgctatggttatagtgacagtgtgaaaagataaaagaggccaaatagaacattcttgtacttctattagaaccattataaatgacataataagtaaagtcattcatctgtgacctgatttgataaatattcaagccggcaacatttcaacaatattccattgtgttagaccccaagaatgcaacaaa

SEQ ID NO: 37673 - DNA, 1171 bp, Bovine  19866881236694
  misc_feature (1)..(1): n is a, c, g, or t
ngaattgtgtttcctgggtctttggatctacagtgtctgttgaataaggagaacagatgctcatctaaaccaagcatgaacttggtccttcaaactctttttcctgcttctagaaagcttaccaaaaccacacagagttctaaattttaggaggtaataaagtgaacagggaaggaagacatctggaaggtaaggggtcacagctccatcaggacgctggtggcacttagggtggtttactctctgttgttttgataacttccttgttgaaagatttcaaaatggaatttttagaacttccttgttgaaagatttcaaaatggtattctgaaggattagatccagaacttgtaggctcataagcagtttgatttcatggcctttactcaattggattttgctttttaatgcattttggcaaggtatgctccacaatgcatgaggcaggaaggacatttagataagtgccaactgaggctttggtttccattaagaggagattcagaactcttccaaacaaaaaagggctcctggacacggcgcaagaaggacgttgtgagaagagatccagtgttagcaataaggatacaaacatgaaagtaattctttgctggaaagacattttaaaatcccgagatctgcaggccagggcctgccactggaattggcaaaagaagaagaaacaactgactttccctttggcttttgccacaagtacaatcgctttgtgattcttgcctgaagtctctaaatgggatgcttggtgtggattccaaagctcttgccttctgatgctaatgtgcaagacccaactcacttttttccctctctttccagtggaaagagttttagaaaataggcttctttgaacaatatgttgaaaatcgaggttattttccaacataggtggtgacttgatcgtttttgcttaagaaagccacagggatatataaagaccaagcttgaggtacaaaaagccattacagagcagtatttttcctttctcttttctttgttctttttggaattctcctaatgattcttttgagagaatttttacattttttatgatattgagctttttaatattagatggcttccctggtggctcagacagtaaagaatttgcctacaatgcaggagacccaggttctatccctgggttggggaa

SEQ ID NO: 37674 - DNA, 1555 bp, Bovine  19866881246976
  misc_feature (1)..(1): n is a, c, g, or t
natttctacaggtgatagctgttggaagatctccttgaccgccataactggagaatcctgcattgttgatccatttagggtcaatgctggtttaacctagttcaatgagattggaggtgtcgctcctcccataatagctgtgtgtgtgcttatgtaggttattctattggagaaaaacaccttcaaaataacaaattaaaaaatctctgtaaaaattgatctttttgaggactacaacctaaaatgtgtggaatacctttctaattttgattctaacaatactatatcaaatatctataggtgataaaattgagacataatgactactcgttccaaaccactccaaaccacatattctgaatttcttccatatgttttttagctcaactaaaatctcagcatgtaataggccctacaatggtgtgatatttggcatagggctagtctgtcttacatatcattttgaaagcgtcagaggatccttgaaaatatgtatattttttaaataaaaagactctcctgtgtagcggatttttaaaaaggccagcacagtctagaatatttattctaatttctcttgtcataaaacataactggattctttggataggaagtcttaaaaatgtacagactactcctaaatgtcaaataactgtcattatttggttatcttaaatacatagttaaaagctactttcatttccaagtgttaatttgattccacggacttttgttctctgagacactgtgttccatctgttcaatgattccctggtatagctgcagaaactggctataagcataattataacttgggtaaaaattagactttagattaggaagcttggttattttttgagatactctcacatattcagcttatgccttacagaggacatttcagtttatctatatttgcccaagtggaaactagtagcatgtgaaatgccattttggattgacttcattatcataacagacatgcatcgattttatgaactgacaatgaaaataaaagcaaaataagatgaaataacaagtgtcaagctaataatggagatgtattgcctatagaagaaacactcataatgcctggatgtttaacctatcaaggattattctgaatatagatgaggatataacagttgaacaatgtacttattaaggacctaattgggcatacatactaaatgctggaagaatgcatttagaccagtgccaggtaccatgctacctgctgaagcacttagcacagatctttgatacatgattctcaaaaatgtcttttctttatattaagaagcaaatgcttgtgcagaggtgaacagtccagttcttctaacagtagcatttctcactgtaaattaaaaggccgatcatgtgatcttcattaatatcaaattgcctagttggtggcctcagttgtgttttgggctaaacactggctaaaggccggaccgcagacaatgttagttcactagggaagaacagaagccaggatgctaatggccttgagtcaaaaaaaaaaaaaaaaagaccattccacaaagatggg

SEQ ID NO: 37675 - DNA, 1397 bp, Bovine  19866881423951
  misc_feature (1)..(1): n is a, c, g, or t
natattatgagtcctaacagaatcttatatgtggaattaatctctaggccataccattgaggttctgatagaaaagagtcaccttcttttctaagatgtattattataaaatgaagggtccttttcttgacagttcaaattagtgttcttatttgtctagctgatatctccaaacatggtagacatgaagatttttttacagttttctcttaatttgtatagttaatgctctgagttgcaagaaaacattccagctttacctttctgaaccaccctctttagcagtctgtatagagatcagcactccatgctggtagcaacttccatttaaaatgctttcagagtctaaggcaatttagacagcacagctgtctactcaggagtctcattaaacatactttaaaaattcctagaagaaggcatgatttattatacgcaaatggctaccctgggtttttggtatattatacattaacagaattttaaattaaaaaaaaatttaatatacaccttgtttggattatttaaaacttaacttctaaatgtctgtgaaaatgagtgttggcataatcaaatgtgaatcccagctgattaacaaacacatgaacaatgggggaaatggtgcccaaagctctttattctaaggagcatttcccttaagggagaaataccaggagaacacagtccttactgtgcaacaggaaagagtaagcagaggctctcaagtaattgtgacacaaaatagaatgcatctgcaacatttaagtgcatctaatgcccagtgatttcatcacctaccctacatttaaaactgggagacaatccagaaacggaaggaaatcagatatttgtaaaaatatgtttgcaccacactatccaacacttgtactggcaacattactataggtatttcaacatatgttgattttaaagaataagttctggagttaaggcttctaatttatcatattttaattaaggagatgtaacctaccaagttaacaaaagagttaattttcaaaatagtaacccttaaggtgcttgttgtgaaagctacaaataatggtattatcttgccatttatcaccttaaataatttaatgaaaaatatctaacttgatatatttttaagagaataaaagtaatccctactttctatatttttttatgtgaactagagagaggagacctaaagtaaaaatcaaaaattcctccaatctgtttctttgagttatctgaatggccatcttccttcattacaagaaacactacttactctcctctttgataaaaagatgttctgcagtagcataatgtattttattcatagtttttcaaaaaataattagaaacaaatagctcttgctttgatttctcatttaagcgtcacagtccta

SEQ ID NO: 37676 - DNA, 903 bp, Bovine  19866881730819
  misc_feature (1)..(1): n is a, c, g, or t
nttttatttgactgtttttgttgtttttaaaaactcctctgtctctagacctcctaatttctctaggcacttctttaacactagaattctatgacattttaaaatttttgcttagcatcagtaaaaagttgacctattgatgttccttgaaggattttcttggatatagacaagtaaacagggccaaatgtggatatagacaagtaaacggggccaaatgtgtggatcagagcatgaattcaaagcttttcaaagtagttttatgagaaagtatgtattttattttatcttacacttgttaatgtgtctcccactcaggatggaatctgtagcagagttctttacaaactctcacttgtgtagcaagtatactgggacttcatcctcatatgttcagtatgatctactttttacatttttccaagatagcaatttagttgccaatgtgaatttagaaacaatagaattcgttgaaaaatatttaaattaaaatatgggtatactttcttgcagaatcattaatttaggcatgcgttcttcattacacatatcatatacgcatagttgttttgagcaactatccctttttgacagagagcggcatttctcctaggagatgcaaagcataggcttgatcttcattttggttatctttccaacttgtcctccatactatgagcttattttctcaagaggccatttgtcctcaatatgctggctggccattatcttctctccttagcagtgtgctcgttctagggactcttagacttgccctgtgactgattcattgtccagtttgtagatcccaagagctttctcagctaactacaaagagcctcttgttcctaccccagctgtttattgctgtttctctttagcactactttgctgtaatctaca

SEQ ID NO: 37677 - DNA, 593 bp, Bovine  19866881782328
  misc_feature (1)..(1): n is a, c, g, or t
ngcttttaatacatgaaaataaaaacttttacatatgtataaaatctttagttcctaatgtacagatatggcggtaaacgagcaagatgatgagggtctttgaagactcagtggtatctaagacttttgatttgaagttataaactccaagtgtgggttccaagtggacagccttcatcctcaggccttacctgtgactggagcatcaatatccagcaagtttttttcctgtcgaagaattgaagccccctctgttattattctcaatgcgacagtctcttcgagcctgccctccttcatgagatgtgcctttaagatatccacacgaggtttcccatcattatcaaacacttcttttgccgtaagccggtgacttggaggaaatgggacagctgaaagagaagaaataaaaggatcatattaattgaaactcaacaacagaagatgtaataatagctaccaaatatctatccctatcactcaccacctattggagcatttttaaagttcatatcaaaatatgatccagggctatcaagaactaaagactgccttcctcaattaatgtgactgctgaaaggaaatgtgtagtt

SEQ ID NO: 37678 - DNA, 4199 bp, Bovine  19866880168870
  misc_feature (1)..(1): n is a, c, g, or t
nattgttggagaaggcaatggcaccccactccggtactcttgcctggaaaatcccatggatggaggagcctggtaggctgcagttcatggggtcgctaagagtcggacatgactgagcaacttcactttcacttttcactttcctccattggagaaggaaatggcaacccactccagtattcttgcctggagaatcccagggacgggggagcctggtgggctgccgtctatggggtcacacagagttggacacgactgaagcgacttagcagcagcagcagtaatttgttttccagctatgatctgtaatgagtatgagtgagtgaaagttgctcagtcatgtctgactctttgtgacccggtggactatacagtccatggaattctctaggccagaatactggagtgggtagcctttcccttctccaggggatcttcccaacctacatatttcaaatgctttaaaaataatagtcatgctattaatagctatgctttaaatgctatgcagtcaagtatatttatatatatttatttttagttgttccattttgagtgatatgatttaatatttataagaaccagactgtacctggtgactaagtttaagtattctgttattgctccattttgggtgatatgtaatggataaactataaagtaatgagggccatatactgggattttacattgttttgttgtggcttaatctttaaaccatgtctgactcttttgtaaccccattgatggtagccagccaggctcctttgttcaggagatttcctaggcaagaatacagcactgggttgccatttccttctccgggtcttcaccacccagggattgaaccctcctgcattggcaagggggttctttaccactgagccaccagagaagaccttacattgtttacatgtcacacatatctttatgaaaaagagggcttctttaaaatataaatgccacctatgtttcctttatgaaaataaagtttacaatttggagggaagttcagtgtgagacttttacattcatcttgatggtcctgcggtgaaagcgtgtgaattcttccgcaggcgtaacttggcctcccaactaccagtgcctccctcgtgctttcacgtgtaagagctcactaagacgtgaaaagtgggtgcagcctctcatgcccgcacgcggctccggggtgaattcaggtgcagcaagcggcccaggacataccgatgcgccagagcctcccggggaggtggctcccgtagtaagacaggtcactcacgctgcgggaccgctcccgggcggcgagggagcgggcaggtttgggcctaggtactgtcgatgaggagctgtctactgtcacaaaggagaacaagcctcattcttgtgcttggtcatttgagggcaaacttatgagtctctatgaatctgccgtgtaggggatcattgtcacacccactcatctccacctggcaacctgctataaattcctgtgcagtgctgccccagtgttaacttcactcctgattgctaagtatatgcttttagagccagagcaaacacccagctaaagctaactgaggggtctggggaaagcaaatcaattatatgaaagggttggagctaaacgcatatttggaagagcaggcaatttgagacagtctttccctttgaaacaatgaatgttgacaggtactaacctcggaaacctggggcctgcaagggctttgttccaagttctgtgtggggcatgttatgctgctgtagcttcctttttgcttccaggacagggttttcaaactgtgttcttctatttatgtggctgaaaaataaaatttcaaattagagtattaatggggcaaagtcatttaagagaacaaatggatagctctacagaatgcagctgagtacgagataccttaaatgattatagttgaagccccaccaggcacagagtcaggcctctgctggggcggcttgtgtacaatgcatgtttctgtgacgagagttctcaatagctctttcatatggtcttgtatttcaattatgcatgattcagctaaaagagctagaatatgcacttactttctggtctaccgtgttgatttgagtttggtgcacttaaatgtgtggccaacaaatgaaatttataccaaatggtgctgaagaaaaaagggtaatctaagctttgtaaaattcaacaagataagtataagggcaattcactgattatcgtactcttatagcaactaaagtctacacattttagaaattggcagacctgtaataaagggctcgaatatggggagaaagatccctaatgatatatacatgtggaatttatgttaacaacattaagttgtagaatacctttagaatgactgatgctgagagatcaatcaaaaggagagtatttagtcttcctagtgagataataaacttccagatatcaaatacagagtatctttaagcaagtatggatcagctaaactcagggcttagacttcttatagtatccttagagtatgatccatatttgtataaaatttaaagttctttatccatagaaagggtgggaaccacaaaccctgcctagtaatactcatgtaactattttttctgcatatgcctcaccagaggtttggcatgtacactgattttggttctttgtacaaaaaaactagggttatggtattagagtatgaagaggagagggcttagaaaaggaatgaacaattagtacttaagagacttccctggtggctcagatggtaaagagcctgcctgcaatgtgagagacccgggttcgatccctgagtcaggaagatcccctggagaaggaaatggcaacccactaaagtactcttgcctggaaaatcccatggacagaggagcctggcaggctacagtccatggggtcgtaaagagttagacatgactgaatgactttcactttcattttctgtgccacgtaccatatataaattttctcagttaagtctcatgacaatagtctagaatcctaattatccctattttaaaggtgatgagactgacacacaagagactgaatgacttgctctaaatcacattcctagaagtgaacaggctggaacatgtctctaaaaatgcatcctttatctacataccttctctttctcaatgtatcatttcacactgaaaagtccacacatgatgtgcacacacagtcctctcatcttaggtctataaatattcatgagaaacaaaaggaggtaagagaaaccaaatcttaaccaccaattttctgttaatatggataagataattcctgttgtgaagaagaactaaagagcctcttgatgaaagtgaaagaggagagtgaaaaagttggcttaaagctcaacattcagaaaacgaagatcatggcatctggtcccattacttcatggcaaatagatggggaaacagtagaaacagtgacagactttatttttttgggctcctaaatctctgcagatggtgacaacagccatgaaattaaaagacgcttactccttggaaggaaagttatgagcaacctagacagcacattaaaaagtagagacattacttttgccaacaaaggtccatctagttaaggctatggtttttccagtagtcatgtatggagttggactataaagaaagctgagcactgaagaattgatgcttttgaactgtggtgttggagaagatgtttgagagtcccttggattgcaaggagatccaaccagtccatcctaaaggagatcagtcctgagtatttattggaaggactgatgttgaagctgaaatttcaatactttggcaacctgctatgaagaactgactcattggaaaagaccctgatactgggtaagattgaaggtgggaggagaaggggatgacagaggatgagatggttggatggcatcaccgactcaacggacatgagtctgagtgaactctgggagttggtgatggacagggaggcctggagtactgcagtccacgggatcacaaagagttggacacgattgagtgactgaactgaactgaattcctgttgaggcagaaaagcgattgccagaaacctgccaagatgactgcagtatctaagtacttgctcacaagagctggggcaggggagctgctgccacacaggctctggtgtcagtgagtcctggattcaaaatccagctctg

SEQ ID NO: 37679 - DNA, 828 bp, Bovine  19866880467705
  misc_feature (1)..(1): n is a, c, g, or t
ntatagagagaatatgtataagagactgtgcttagtgctttaagtatcatccttcggatgctcctaacaaccctatctgtatgctcagtcgtgtcctgagactccatggactgtagcctgccaggctcctctccatggaatttttctaggcgagaatgctagagtgggttgccatttcttccttgtaggggatactatttaattgcttagagtgcaatgtcacaactaaaattatttttgatgagggtgggaggtggtagtcctggaatcccttggactttaaaagattcatgttgatgtagggcaaaaccaatacaatattgtaaagtaattagcctccaattaaaattaaaaaaaaaaagattcctttctggacagtctttcttgggactcccattgttctaaatgttggtaagaaaatatgaagggaaagatttggcatgtgtgtattcatcttttttgaggaataccccatgactctgaaataattttcacattgctcttcagtaggagtctaagttcaatattttcaaatcctttcatactgcattcccttgttgtgcgatacagtgaatgtcagctttggttggacagaaagatatcaacacacgtatcttagctaacattagagtcataatttaatctttgatatttatgcaataacgaggacattcaaaaacattagaaactttaaacatttttctggcattcacgtgacaagaaaatgtggatgcacttggaagcctattccgctttatttgaattgtaatgccatctgccaaaacttactctgtcaaaaagtactgctctgacaacataggaaagtaa

SEQ ID NO: 37680 - DNA, 2079 bp, Bovine  19866880608312
  misc_feature (1)..(1): n is a, c, g, or t
ncagggaaggcctggcgtgctgcgattcatggggtagcaaagagttggacacgactgagcgactgaactgaactgaactaatacattatcactcttttgctctatgttgacatttgcattctggtacaaaagcagtggtgggtatcactgcttctgtcttgtcacaaatcaaggcagtggcacaagtctgtactaatgcattatattctaatttttatgactaaaacagaagaaattgattctcttatagttctgtttgctagatgttagtcattatattatttaccaccaggcaccttccctggtgattcagacgataaagcgtctgcctgcaatgcaggagacccaggttcgatccctgggttgggaagattacatggagaaggaaatggcaacccactccagtactctcgcctggaaaattccatggactgaggagcatggtaggctacagtccatgatgtcgcaaagagtcagacacgattgagctacttcactcactcactcaccaggcactggggggaaaatgctgccttttaagaatgtccttgacttaacattaaaaattttatttaatcacaattcttgagcatgtcttttaatattttgtgtgaaaaaatgagaaatacacatatctcccttctgtctcataccaaagtattatggttatcttaaaaaaaaaaatgcccatgcaattgtgtgagtgcaagctgaactaactacttttttatggagtattatttttacctgaaagaatgactgacaatctactgttactcagacttgggatctggcagacattttcctgaacataaacaaaataagcctgttaattcaaagaaaacaactgacaatgattgttttcagtgataaaatttgaacttttgagctaaaattagtatttggggaaacttcaatcaaccactgtcaatttgacagcttgtcaatacaaaaagtattttctaattagattgatggtgaaattaatgaggtgtcttttcacaatgaaaagtgtcaacatttgaaatatctgtataactcaatgaaacaatgagcaatgtatgcataaaatagtcaaagtacaagttataccaatagaattaaatttaagtattaaaaactcattgatacggtttccaattctacattgcaacaaaactttaaagaactaccacttaacagattttggtaaagcatcattaaagaatattcacaattatctaaaaagatactaaaatacttcttccttttccaactacatatctgtgtcaggacagattttcttcatattcttcaattaacacactgtatcacaacagattgaatgcagaaacagatatgagaatccagctgtctcctattcagccagaaatataagagctttgcaaaaatgttaaagaatataatttttacatgattttgttttggaaaatatagttatctttcattaaaatatttttgttataaaggaacagattatactttttaaaataagaaatatttgtaaaataatttagttttagtttcaaataaaataaatattgataagatataactcacatctagaaaagtttatttggggtcctcaataatttttaatagtgtaaatgggttcggagaccaaagtacttggaactaagtgataatgaaaaaacagtgataatagaaaatctattcaagttctgcctagtttgacccactgcccatgcttttcccacatgactacaatgcattcccttacagatatactacagagattgacatttccgagaaacagaggcattattttctcaattgttgacttgctaagttgtgtatgattctttgtgaccccatgaactgtagcataccaggcttccctgtctgtccttcactatctcccagagtttgctcaagggaaaaaaaaaaaaaaaaggtaccacggtgattcagtgttatttgaaatacatttcaggtttttaggaaccatacactgtgtgcatgactcatctataacataatttaaacaacattattactattatttcagtcacagagacatgaaacaattttccctattaacatgcaatgtgctacctg

SEQ ID NO: 37681 - DNA, 2249 bp, Bovine  19866880634400
  misc_feature (1)..(1): n is a, c, g, or t
naaaagccctcaaagcaacaaaacccccagcacatcccaaaataaagtattttaaaaagtgttcttaaacttaattcattttcaagagaatagagaaaatgaaataacaggcaatattattctgaggataaattctaggaaaaaataatgttctgcgtatgttaatggcccacaagaaatgcacagcttatttctccatcctggggaaaacatatttttcacaaagtgaggtgataagcatttgactttttcacaagtgatacatcaaacaaataactttcctggattttgtcaagtcaattaggatgatacttgaacttttcaaatgaccatactatcctctgaaactttaaaagctactaaaggatgagctagaggcaagtatgtgcattttattctgagttttaatcccattactatcggcccacaggaataattttataaattctttaatacttccataatgcttactataactttgctttacgataaaagcttattatgatttcatatgaatcatagtattatttcagaatattaactggacaaattatccaatattaaaaaaatctaaaatgactatagttaacctggggaaacatacaagaaatctgtcaagtaaagaaatctgttttcagtgcacccagtgttaatccaatgagattcagtaaatctaggtttcaaaatgcatacacatatggtggtagtgaagtaacccaatttgtagtgacatgagcaggtgtctgtaggtaggtcattgaaagtcatcataaactgggacggatttactagcatatgaatcttaatacgtagttacttgtgttaatattacacaatagaagtaggcaagtatagaatttctgtatagatgggagacttgtgccacattcctgagctacagtgcatgaggttcaccttgcacaatatggtttatcaaactgttaacagatgcatttcattatgaaaaatccttaggctgctctctgggagaagttgctgtttcaaacatttagagatgtcccatatggcatggataaggagataatcataataagatgtaaactatcacacacaaaaatttcctctaagttattttgcctgaacctagaaaataatgaagtttcttccagactaccaaggccagagaaatagtttcttttctgaaagatcaatcaagtaactctttacaaaaagagccctaaatgcaaggcataacatgaaataaaaatgtatttcatcccttggttataatttctctgcttagctttcacagttaaaatgtcagccagctccattatcatccagtcaaatcttcaaaccacaccatttcctccttcataatctctctcacttcagattcttatcttgagtggcctactgccattatttctttcctccaactttgtctatgtgactcagacacaaaattatatcctaaatacagttttagataggtgaacttcaaattatttaagtgactcacgctatatacaggatcaacttatacatatttatcccgaccgctttgatgacctactgcaacttggctttgatatctcttaacttcctccctactactcaaagcgtctgtctaggaaaatggactcgattaatacctctaagctgtcatcctatctgaacttcccctttcccattttcccttatctttctgaagagctctagcatcaaatcttatagaaattgttcctgacctgctgtctgatcagcccctgccctgtgcttcccttccactctgagcttaacatgcatcaaactaactgtaatcactgattttactaatcagtaactataatcactttcctccagaaacaactcgttttgtcttcaattctgttccattcagtgttgcactgaaattgcctccactaaggcccaaatgtgaatacaaactgtgaattcagcagatgttttatattcagtcttgggtcaattcaaaattgccccaaagagggaagaaagggtgggtgggtggtgtgtgtgtgtgtgtgggtgtgggtgtgggtgtgtgtgtggtgtgcataggctgaagcgcctataatttaaatgtttacattacatcaaagtataaaaagtattacaaataattaaaacagatagtactataaaaatgaggaattagaaaaagttctctacctgccttttgtgctttaaaataaaatggtgctgaaactggtgggtggtgaggaaaccaggttaggaaataaactgtgtgaagggctagatgggaa

SEQ ID NO: 37682 - DNA, 1303 bp, Bovine  19866880776852
  misc_feature (1)..(1): n is a, c, g, or t
ntcgcacagcgtcggacactactgaagtaatttagcagcagcagcaggcagctctagattatctctagtttaggcaaagagatgttaatagtctgtttggacacaaagagaaatctgttctactaaagttgacttatggtcctgcactacagaaacaagggtagagtgggaattctttctttctcagtcagcactgattctagcaagcaatggagacaggataaagaaggatactgtgcccctggctgctttttagcaactaactgagccaatccctaatggtcctataattttacggaagacattttcttagaagaaattactatagtgcccagaaaccatcccacttctgattattaaggattcaacatatcccagcaatcatgtgtaggcaccagagatcctgagaacattcttgaaattattttaaaactcaagattgatgtagcaaggcttatgtagaaactgcagagtctaaaagagacttatctaacatcctcccattaaaaagcttccctcattacatgatgcttcctgtttttccccaggctaagttttgaatcaaggcttatggttttgaacaaatataggaggaaggaaagttgacctatccatgaagatcttctatagatgtgttgaattatgagatcactcacagcccattggtgttttcttttccccaccatcttttaataattatgcatttagttagtaaaatagcaagaaactgtccaggagaccaacattctaacattgtctggctcctggcatttctccatttgagcagattgacgttattgcttttactggttgctacctctttattggcttttctaaaaggggcacaagattaactttgtccaaatcacttggggagcattttaaagatgcagcatcctgtgcccctagacctgctgattccaagtttctggaagtagtgttgggaatttgtgtttatgcaattttaaaacttgtaaaagcaatacacatacatgatacaaaaaaatgaaatatttataatgcattaaaacctcttgtgtcctgcccctgttatctcaattcaacagctctagaaatgacctctatgtactttcttttagaaaaagatgaagctttaactcctgtatccctcacctgctctcctctagtttcccaactgagttttacaactactttcagtaatatttgtacaagttttgcattatcatggctctgtaaacttgttcgctgaccccagtggtggtatatcattaatacatttttttccctgtaaacggcttttgtggagttttactttgtcttt

SEQ ID NO: 37683 - DNA, 1364 bp, Bovine  19866880780414
  misc_feature (1)..(1): n is a, c, g, or t
ntaataaaaagcccccactgtaatattttatagagtaatttatatgcatattaattaagaactataagcacacataactgtttgttttcaggcagttttctttatgaactccaaattgcatccctttgtattatacaaagtatcttctcccataaatcaagtcccttctcccatttttgaagctagactgctaaatgtcagaattcttattctgaagccttcaagccaactttacacaggaagaaaataatagataggatcccctacttaataatttttaaatcctcatttttcacacctagttttataagttctttcccatacttcaaataattttgaaaaatcttattcttcaaatatttatgaggcaaaaggctaatgatttttcacccgccacacactctaatatggacccaccgttactcctttgagtcctaccattgctactattatagttactactgatgatgatgacagagcaacaacatcaagagcagtcatagtaaaacttaacatttattgagcaccaagcaggtaaggcactctatgtttctattccttataacatcatgcaggataaagaaactgaggtttatctaagaaaacccaaagtttcaaatcagttttatctgattccaaagcctacagtaattctatcaaatatatttgcttaaatattgatacatgattttagtttagtgctagcatagcaaggttggtatttgtaaactacaactcatatataagaaaagatttttattttaattttatgtaacctcatttgcattgtctccttcattattgttaatggagggtgaagaaatttaaactttccaattaaaggtggtctctttttgtttgtttgtttttcttgtcccttttaattcaaaacatttatttgggagacggcaggatggcaatagcctgttaatattaattaggttcagatttcctatcaattttttttcccagtaggtccctcctctcctcttggatccaaagtagtagatgaacatgtatctctatggcaacaagggctggtctgtggtaggcctgctgttctctgctgcaggatgccttgggaaaagtgaaaatgttagtcactcagtcatgtctgattctttgcaaccctgtggactgtagctcaccaggctcctctgtccacgggattttccaggcaagaaaactggagtctgcagccattttcttctccaggggttcttcccaacctatagatcaaatcagggtctcctgcattgcagacatatttttttactgtctgagtcaccagggaagctcaggatggcttatacctgctcaggttacggtccttgcctttgtctagagctccaagaactctaccc

SEQ ID NO: 37684 - DNA, 1643 bp, Bovine  19866880790794
  misc_feature (1)..(1): n is a, c, g, or t
nctttccttgctgtttctgacaccagccttgaaatttctgtaatatataatctgtttgcaatcctctctgaagattaaaattctgttattgaattttagttattttcagtttttcttatatcactgcattcatttctcagtctactttcttctagctgtggactctctcattttcatcctaccatgttttcccctccatggaaatcatgtttaaatgcattttaaggccaaagcatttacaaatctgtttctttaggctgaagtacattatatactataagtatactacaagtgtagcagcacttgtgctgcttcctctatgttttgaggactatgttcttctcttatgttgcaggcacttgttgtaataaaactggaaaaaatattctctacttgtgttaaaatttaattttttaatagtctatttggtttgtgttactttatacatgtttgaaaccacaaacataccccactcatcttccttattgattctttctagaataaccaaatatcaggaaacacctcttatgtttctaatcataaatatttcacaatatcaattttagtttcaaccatttatttctcctcagtgacacttccttttcaggtactcttgactaagcgtcttcactgaaaattccttcttcttacattgttgcttgctgctgctgctgctgctaagtcgctgctgctgctaagactctgtgcgaccccatagacggcagccaaccaggctcccctatccctggggttctccaggcaagaacactggagtgggttgcttgctaggagtccttaattttgttatcataaaccttagaggaaaatcttttttgactaatttttagaagttcacatcttctctcttttgctaaaattatatacttccacttaaagaagagattaaaacaatacctctgccctctatactttgagtttcctacaaaggaattttgtttttcttaagactggagagagattctagataatatactcaagtatattatgtagtgaagcatctgactcttgactgcactggaccctgattaatgacaatctttaacatttttgttgattaaaggtgtattttttttttttaacatttcagtaacagtttcatgttcctgggatacctaagattaaagaaatcccctctccttgaaggcacaggagagataattttgcttatatctttttctttaacttcctgcttttcattgccccttctcttgtcattttcaatgaaatttaaactcccattaaaaatttgaaaagtactaagggaaaagatgaactataagtgtctatcttctaaggacaaaaggcaatgaatgttaaggaaataagatgtgtttagtatcctattttatgacaaccaaaaattatatgagagcaaaatgaaaatgaaataaggtattttttatgaaaattggttaaaattttacatgtgaattccaacctgttattaaaattttctgagccagacagagaactgaatgcagacaaggaacagcactcaatgacagtgacattccctgacagagcaattctttgcatatcagcagggctaattatattcaatctgacagcagtagtttaacccattcactagagaaatgtgcttcttctaagatcaacgatct

SEQ ID NO: 37685 - DNA, 1152 bp, Bovine  19866880791776
  misc_feature (1)..(1): n is a, c, g, or t
ntgtgcaaatgccaaaattttaagaaaaaaagcccagacttttggttgaatttagaatctgatgtacattataaatgatatttttaacagaaattcatctttggctatacttcaaaataactcaacacacccagactatattttaacagaaagagaatttaaaacaaaggacacagagggtctacagtgggcacactgaagtagaagaatgacgaatatccaatgatttaggtcaatgtaggtaatgtgaggattaggaggaaaattttgatcttggttttttttccccctatggaagaaagggacaaagcagaaagtttatatcttttgtgtgtctgcctctgtttacttttgttttgtgttgcttgaattatctgaaagcaacttaaaatgttcagcaagattctggaaactctgcattatcagtctttataacagtagacacactaatatgggatcaaaactacttcaaagctcatggaggagctatttccaggatatgcaatgattgatttgaaataacatggtgtgagagattctactaaaaatcttaaaagatgactgagtgtttttcaagcttcatgtaatttgatgaaggtgccttgtcaaggattgctaaaagcttgctcatgagaactccttaaatcaccagtgagaatgcagctgctgctttattgtttttgagtagcttcttggcagaatgaggtgacactatctgtttggatacaaaaaaaaaaaaaaaaacctaagtgactattgtgtgtactgtgcttgttagccagacatgtcatgtcacctcagacagaatagtatttacagctgagtaggatttaattttatttcaatatacctagattgcttttatcttttcattgtgtttgaaatgattaatagccagcagcaatccttagtaaaggaataacaaagactgctgctgaatattgttattgactaaatgataaagatatattctcattataactgctcataaagtaaatttcttaacaaaaccaacttcttctctgcctgtatactcccctgtagatccttcattaaaggctctctcctctaactgttgactcaagagatatttccaggttaaatctcctgatcttaaaagtctgttttgcctggttttagttctttcatttg

SEQ ID NO: 37686 - DNA, 1447 bp, Bovine  19866880872985
  misc_feature (1)..(1): n is a, c, g, or t
nacaaacctcctacctggaccctttcagaacaagaggaatggatccacaggtgtctggatgatgttaggctctgtctcttcagccctctttaagcatgagaaagtgagtttagtgagtagacacactgacgacaaactctgtctaaacccaggagctctgtcgtgttttcttggattcttgggccggctctgtgtttgtggcaagtgctcagaggtttgctctcacagtcacacctgcttgcatttgccgtaattaacccgacaattgcacttggggttgctgttcagtggctgactatcgctgtataagaacgtgccttaaccgccatgctttttctttttttaacttttactgaccagtagaaaagccactctttacccgggatgcctcccaattgaagggaacgtttctcagcaccacactcaaaaagagcaacatggggtttggatttaccattattggcggagatgagcctgacgagtttctgcaggtgaaaagtgtgattcccgacgggcctgcagcacaagacgggaaaatggaaacaggtaagtcccttaacactttagaaaatggttttgcaatgtcttttctaagacaaatgtgagaagcttctttttgtgtttttaatttgaaggtcaaaggtcacttcactgaagggaaaccacaaatcatgtctcccctgaatttaataacatcaaattgaagtagtttggaactctaaatatcatttttgtctcatttttctgactgtccctctatttgctggattcaatgaaccctggagattgacacttttctaatttatttctggagtcccttcttagaaatttgattaatatttcatatttttctatcttataaaaagctattgatgttttaaaaatctgtgttaatcttatagtattctcaggctaaattgtccaggttagttatttaaatatgcttgcttatctcataggaaaaaaattattaatggtattcatctttatatattcccataaagtattttaatacataagattttttctctagtccttataaattaattttcatatgcatgtacttgggacgtctatccaattatgattaaaattcatttaacatggaaatgcagagtctaattgttaagggcagggaaatatgaaagatgcacaaaggtagaaaaaatcgtaatgaactaagtttgattttgcagtctggatttttaaattctcctacttggtccatgacctagaattagtcccataattcatgaatactactttccttacctggaaaatagagaagaaatcaaatttgatcttgtgtatttagaatattgattcaagaatttgagagtattgtttttgaaatgtcttcagtacagtccagtccctcagtcgtgtccgactctttgtgaccccatgaaccatagcacgccaggcctccctgtccatcaccaactcc

SEQ ID NO: 37687 - DNA, 1046 bp, Bovine  19866880919232
  misc_feature (1)..(1): n is a, c, g, or t
nttggaagagcacaggctgaaggctctgatactatttcctgagttttgcaaaagaattattttcatcttaaatctgtccttttcataaacagttgttttgttactcttttaactacagagttggcagagggagtacaaaagtgatacaaattatagcatgttcttgggattcctacattttctcaaaaagtgattaatagcaatttcattaacccacatttagctatcttccatctaaatactttcaatccagccagggggtaaaaatgcttgtattctagcatttctgaatggaatttctgggaattaataatttttaatgataattttgtttttaaaaaaatgatctctgggaagtcttgcaaaaatctaaaaaacaaaggagagatgtttttagaacagtgtctttaaaagaggttctggaatgacctgcactggaatcatctggtggatttaatgcatcttctggatcctcatagaactaccaaatcagaatctttgaggtgaagctgtgaaatctccatctttggctagcactccaggtgattcttatacagtctgtgtttgaaaactacattatgaatgaactacattatggttatgaatagctcataagcatacagtggagctaaactatttgctgtgaatagctgtctcaagttatcttatctgtcaatggacaaaatatcaaggaagtgacatctgtgaggactaaaaagaatgatcaaagtcacagatgtagaaaagtgaggtttgtatagaaaaaagttagaatgtaatatgaaagggaaaagtggaaaataggttagaaatataaattaaacccatataacaagatcttcgaacacagatgtaaggaagtcaaaattacaattatgatgtcaattcacacgtattgtctgtttcttcaatgagatttaaatatattttatcatattacagtgttagctaaataatctgatgaatcaatctgcacttaaagcacagttcagaaaagtttcccaggtagcatatttaatagcaaacttctagagattaaatgccta

SEQ ID NO: 37688 - DNA, 1799 bp, Bovine  19866880977341
  misc_feature (1)..(1): n is a, c, g, or t
ngcttttgcaaaagctttactcgtgagattttcatatggggttatactttcagatctgtcagagcacataatgtagaaattatagatatagaatatttatttaagaggacatggcctaaggatgtgacactaattttgattaattttctgccttcataaatagtttgccaaaataagaggaccagtgaaatggcctcattacacagcgctgtgtgttagccattgtctattattatactttctggtaactgatttgtaaagcgtgcttttaatgttttgtttaaaaattcattttaggaagattaggaatggagaacattttttggaacagctactggcatgtttagtagaaaaaaataacctatccaattttcccttgcatactataaaagaatgatttattgctagcagcattttgttgccttggtggagataacctctttttacacttcaacatatatgggagatgcttctattctatcctcccattaaaaaacaaaacaaaacaactcagtttggagaaagaatgttatcaagattagcctcattcattccaaatatttactaactgctatgtgctaggcactatgcaaggcattaggaaggtgtttttttgtttttttttttccctataatttttactaatataagcaattttactgtattttaactttaggtttgtgaaaacaactacgatattccctagaggaagttttatatcttctttatctctctatattaagagcctggctcacagaaggtgtggcccatagtaagtaaggacccaagtgctcagtaaacgagcagatggagaataaataacacaaccttccccacgtcttccagaatagcccagaagatagtctagcttcatgttcctgcaatgttaaccttcccaaagtatatttctaaagcgtgtcctttttcctactaaggtaattcaatggctctccactcctccttaaataaaatctaaacctcttagcttggccatttatatttctaaaatctggctccaaactacccttccaaatttatttccctcttgaatataatgtatgcccttttagttctgaaataataaagggtgtaaaaatacctggggagctggttaaaagttcgcattcctggtcctacatcccctgagtttctgggacaatagttctagggtaggttcattgcctttcattttgtggacattctccaggtgactttgatgcacgtgtttagcataccatacgtgagcaacactgttatgttttgttaaaactagttttccctggaaggcacaccttttcttgctgactctttggatgtgtcgctgttgctctcacaccaactgttttcattcattcactcattcaaacaaagcctacttgtaattgtgctgcaaataactgccccattcagttaaagaaaagttctcattttctttttgtaaacatttgctcaggcagcaaatatttcatacacggtgatactcacttattagttagttatggtttgtatataaccaagaagaaaaaactcaagaaattccttttgtcaaatccttcaggtatctaggaaattcatccgcttcccccgtgcagacatttggatgggtttgaaatcttttttaattttcactagttgcactattttagtgcaaaattgctttacacagtttctaagtttaatattttaaaattttactttatgaacagatgtttatagtaagaggtcatacaaggaattcaacagtgtacacaggtgtgagttagcaagaatctctgaactctactgcaatagcccattat

SEQ ID NO: 37689 - DNA, 1263 bp, Bovine  19866880988823
  misc_feature (1)..(1): n is a, c, g, or t
ntattgagctgcaaaaatggaattgggtccctcaaatttaaactttgcatcatgtatagttaagtgactgcatagcagcatcctgcacatgaccgtgattattaaatgaatgacagtttaaaatcttcctggtgtgctgaaggctttgcagaaaacaaaggggtctcagaaggtctgttaggattgctgcaaaagcacactgtatgatcacccacattgggtcttgatatgaagtcacagctgggaatattacaattattttcatacttatgagaatataattgtattttatgatctcttatgtgataatatagacccaaaaagtcagtgaaggaactaaagaaagaaatgctgtaaattatcacagagttgtagtctgtcctcctagagtagggctttaggttgatttcaatgtttccaacattttgcagagtcaaaagagatgattttcattgcctcatttgctaaaagcacatttaaaaactaactttaaaagtgagccttaaagttcatttttctttttggcaattgtaaattttttaagaaaggtgttatcatcatgaatgatgctaaagaaatacttgaaagacctaaaactgtaaaactcttgtaagaaaacatagacaaagctccttgacattggtcttggcaatgattttggggggggtatgacaccaaatgtacaagcaacaaaagcaagaataaacaaatgaaactacatcaaacttcttcatagcaaaataaatgaccaacaaagtgaaaaacaaccccctgaatgggagaaaatatttgcaaatcatatttttgataaagggttaatatccaaactgtatatggaagtcatattaatacaacagcagcaataacaataacaacagcaaaaaaaaaaaaaaaaactgattaaaaagtgagcaaaggaactgaataggtattttttttccaaagaagatatataactgggtaacaggtacttgagaggcgttcacatcactagtgatcaagaaaatgcaaattagaattacggtaagctatcatctcatagctgttagaatggctgttatcaaaaatcaagaaataacaagtgtttgtaagaatgtggagttaacagtttctacactgttggtggaaatgtcaattggtttacccactaaggaaaataatagagtggatcctcaaaaattaaaaatagaactaatatttttacttaaaaaaccaaaggaactttttggccagctatgtatatgtacacacacacacaaaaat

SEQ ID NO: 37690 - DNA, 1841 bp, Bovine  19866880993284
  misc_feature (1)..(1): n is a, c, g, or t
nttatagtactcagttattcaattaaacagtaatcttggcattactgtgaaggtattttgtagatgggattagcatctataatcagctgactttaaggagataatccttaataattagggtggacctcatgcaatcagctgaagggctttaagagcaaaactgaggtttccctgaagaagatattctgcctcaagactgaagcattagctcctgtcccagagtttccagcctggccaacagccctattaatttccaatctgtgaggcctcacgattttcataagccaatttctactgattctgtttctctggagaacattgattgatacagagaccaaagctcaaactttcctgaaaaagagtggctctgatctcctatttctgacactatacagtgttatctatcaaactaaatttcatttattaaacttattgaaggaaaataaagatttgttaaatattaaacatttattgtggggtttcctaggtggtgatgttctgggtggggaatatcccctggaggagggcatgtggcaactcactccagtattcttgcctggagaatcccatggacagaggagcctggtgggctacagaacatggggttgcaaagagttggacgtgactgagtacacacacaaatgtttattgcattgtggggttgaggaatttatttaaaattgggtcaagcacctggttacctttaggtgaaaggtaaaaaataaataaaagaaaaaaatcacttttgagttttagtattgagaaaggatataattttcatcaatttcccctattcatattctactaatatgaattaaatagataggcactggctttcaaaatatcactttgaaatctttggagttactttgctggaacaaatttattgtttttaggccaattacagatactacaaactatagcaataaccattttggaatagtcgtgcatactataaaagactccaatccatgatttaattgtttatctgagtaaaactcaagatttcatagctattctcttccatgcaatctgaaatttaaaatatcctttcagagaaacacaaaattgaaagtcatttactatagtcatgaaatgctaatgagaacatttaaaacagtggtctggctactcagccaccatgcacttcataatttataggtatattttatttattcaggttattaaaggatgtgtttgacatattatcagactgaccttgcttcttggcaaatgctatctgaaagtctctagagttaattccattgccagccattcttttcaaggacagcttcttattattctcttggaaacaattaacagactgtcgtacagaataacatgtactaggtcctgaaattctttattgaaaaaggcccagaaaacaaagtggtttcaaactttgactcttgagactcttaatttaggataactttttctctgcacttaaattttagaaccttcaactattatgaaaacacattagctaggaaaattattttaaaaagaaagccagaacatggcttaagttaaagctgggattcagcctaacctgctttattatttccactaatatttactttgctagacaatgtgattttatgctcagtttgacattaaattaatttaaattaattaatttaaattaatttaataaattaatttaattgacattaaattaatgaacattaaattatcattaaagatatgtttttatttaataaataagatatgtttttatttatctggaacttattaaggttgaaaatcaagcagaaacattatggattctcctttcatgttgatttttttttttaatcaataagattgaaatcaacagt

SEQ ID NO: 37691 - DNA, 1847 bp, Bovine  19866881040027
  misc_feature (1)..(1): n is a, c, g, or t
ncaactgtacttctcttctcttttctttctgtctaatatgggcatgtggaatgtgtggggcattggaaaagaccctgatgctgggaaagactgagggtgggaggtaaagggaatgacagaggataagatggttggatggcatcaccgactcaatggacatgagttgagtaaactctgggagttggtgatggacagggaggcctggcctgctgcagtccatggggttgcaaagagttggacacgactgaatgatgaactgaaccaaatatatggggcatgtaaagtgatgagatcctttctggcagcctgggaaaatgctaactgaagaacaacagatgtagtctgtccactaaagtaggctagaatcattcgcctaatataacatggataaactcacattttgtagtccaagatgagtcttggcttctgaaaatacattatcaatttaaaccagttcttctactacaaaagtaccacgttagcagtcacaacaaaagaacctcttgattaaggtgaaagaccacggtgaaaaagctggcttaaaactaaacattcaaaaaactaagatcatggactccggtcccattacttcatggcaaatacacggggaaacaagggaaacagtgaaagactttattttcttgggcttcaaaatccctgcagatggtaattgcagtcatgaaattaaaagatgcatgctccttggaagaaaagctatgacaaacctagcagcgtattcaaaagcagagacatcactttcccaacaaaggccagtatagtcaaaactatggtttttccagtaacaatgtacagatgtgagagttggaacataaagaagggtgagtgctgaagaattgatgcttttgaactgtggtgctggagaagactcttgagagtcccttggacagcaaggatatcaaaccactcaatcctaaaggaaataaaccctgactattcattggaaggactgatgctgaagcttcaatactttggtcacctgataggaagagccaactcattggaaaagacactgatgctgggaaagattgagggcaggaggagaagggggcaacagtgaataagacggttggatggcatcaccaactcaacggatatgagtttgagcaaactctgggagatagtgaagggcagggaagcctggtatgctgtagtctacagggtcgcaaagagtcagacacaactgagcaactgaacaacaacaagttgtctcaaagtttacttacctaagaaaacaataacaaaaatggttgtctattcattcagggactggctctatcttttttttccatggaaaaatctgcagaagtttctgagaattaatataaattttcttccattaactaaaatgaattgtcacatttgttttggaagggctttcttggcctcatatttcactaatactttatcatccttcacaatttatcatagcatctttcagataaggcaattttattggtatttacccactatccttattatgaaaaattctgctggttgcctacccaatattttgtctattcttttttatttagaaccagtttagtttcaggcctatcacatggatttcagacccagaacatggatccatggatctagtcccctacctcctgagctgcccttgcaacttccagcatctctgtcctggccattgagacctaacacagaaggagggggtttctttattcattaaactaaaacttatatctgatatcaagaccctttgcatccatttcattttggctagactgggtattcctgtttgggacttacatggactcttcgctctctgggagacttgatattctgatcacaaaccacaaagagag

SEQ ID NO: 37692 - DNA, 2466 bp, Bovine  19866881051036
  misc_feature (1)..(1): n is a, c, g, or t
naagtccttaaaaaaaaaaagatacctagcctccaaaatagaagctttcaggtttctaatgacctcattatgtaaagataaatagggtttgaaagagcttgaaccaccttctgtcccctgcagaggacaaataaatcatgttgatgtctcctagacccacttaggaactcggtggatctggtttgctttctgaagactcactggtgctgtgggctcacgctcacccctggtcctgctttagtggggagtggaaaggctgaaagatttttcataatggaattaagcagtgcagaaccatgttttacggtacgagatacccctccctggctggtaacgtgctcctgctgaacctggtacttcatcacagccgacatttcatcttcctctatcttcatctgcctcccacatgaaggagaaccagaatatcatcttccttctgtgtggatgaaggtcaaactgtggctacagccgctgctcctgctgatgggctgctctgactaatgatgactaatgttttacagagaagcttgaagaacctgcagcgtctaccttttcaatgagatcagtgttcactcctaagtccttattttctgcctttacacctgttcccttggggtctccttcactctcatggctttagtttccgtctgcgtgagaataattggtagtgttgtctttctcactctgacctctactgtctccacttctcagtcccatgggtcccttgtttctctctcaactgttactcactcgttcattcacttactcgtcattaaaccaacagctgttggatgcgagctgcaggaacagcacagtgtctgtctggacagccgagctgctaaaacaaggtaatagttgatgctgctgaattggtcacacctgtttcctctgtccttgccccctttctcctcttactgtcacactcccctgaggtgagcttatttatccccagggcttcccctgttgtttaagatttctaaatctacttctaaattagcccatccttccccggaggccaagcccaagtgtcccatctgcatctgcactggccattctataggactccaataatgctagtctctctcctgtaaagcctgctttacctccaacagtccctgaatctataaaaggcacgaacaatcacccaagctggcaatcttggacttgtcccatattaaccttttcctcctcctccatagtctatcattgccgaaggtgccacataacttcctgcctacactactgtaaattatctctaaaacagtcattcctttcctttactcttgtcctctctaaccattctctctattgaacaaggacataagaaagaccataaaaagtttatgattcaaactcagagaaaggactcccaggttttcctcaggtcagtacagaggctatgatgaaatcagagccctgggtctgtcagataccacagtctactctgtgctgactggaatatcagaatataagtctcttaagggcatgggtcatattattactctggattgaagaaataatcagacagaaaaaaagcctaccccatgaaacatgatcatgaacaacacaaatgttgaaagctttgcagatcatcaataacccagtcactgcctggagagttaaggatgtgaagcagatacccctcccccttctctcacccttcacagcatttctgggtgtgcagctgccacacctgggatttgtgagtcctcaacctatattttttaatgacatcattctctctataggaagattagaaaaacatgtatactttctcactctgatccctagaccatttattatgtcacctttaggtaaaatgttttcccctttcaagaatcttttgtacttaaaaaaatgctctcccatacttgacctagtaagtctggagaaccatgcagagaggtgtgttttctttctttatttctttttaaagagagtcagttttgagatttctggaaataggaactcttttcttaaagtacttataaacagggaagttataaattgtggtatcacattccgatttagaagaaaagataactttcaaaaggtctgagactttgaagaaatagtaacaaagaatttaaggaatatattatcaaacagtttaaggaatattaatcaagtgaaagaggaaagtgaaaaagttggcttaaaggtcaacattcagaaaactaagatcatggcatctggtcccatcacttcatggcaaatagatggggaaacagtggaaataatggctgactttatttttctgggctccaaaatcactgcagatggtgactgcagccatgaaattaaaagacgcttactccttggaaggaaagttacgacctagatagcatattcaaaagcagagacattactttgccaacaaaggtccgtctagtcaaggctatggtttttccagtagtcatgtatggatgtgagagtggactatagagaaagttgagcgccaaagaa

SEQ ID NO: 37693 - DNA, 2194 bp, Bovine  19866881063610
  misc_feature (1)..(1): n is a, c, g, or t
nagataatgaaggacagggaagtctggcatgctgcagtccaaaggggacagaaagagtcagacataacttagcaactaaccaacaaaaggaaaaaaaaatgttggtatcagaaacaatatggcataacctttgctaaccatccataaccttaaatggcctggcttttctgggaactgacaattcaagcagaaaaatcacatttaggacattgaatcaggaggtataaaatatctcttacaaatggactgatgtggtaacaaagatcgtacatgtttgttgaacagagtggaagcggatgttaatgcagcctagcaaagacttgaaaggcttctccttagttaactgtaaagccaattaggaggtctttctaagggcacatgagcccaagtaagacttttcttttatttcctcatccaaacacttctttccctctaataattagtaatgtaatatgaatgatgaactcaagcaaagtgtgccttatagtagaataagggttgcattatcttttccttcagggtggcatttaaaataacagcacttcgataagttcattgtttctccaatttagatccattttaacttggctactgcttcactagttgacactgatttcttatccacattccaactatgggcataaaatacaatattatctagagtgttcttgccttggaaactgtcatcaagtcatttaaataaaagagatactgccaaatattaatgaagattagaaaaatgctatgatgtagagatccctagggtataaaattatggttttatgcacaaatttcagtaccaaatgactgtatttcttttactgaaatactcagtgatactctaaatattgcaaattctgagaaagtagactgaaagtgagctgtccatttgctatataatcacatgttcacaatggccttttctattggtcattgagaccagttcaatcttgaatcaacaactcagttcaggttcctgaaaatcatagtatggttttaagaaaaatgtttacattaagacaacaatttaatagtcaattccaagtaaactgtaactgagaaatttttgaataatttcacaaaagagttttaaatcctatttaaaatagtcaagtgaatagagaaacatatatgtccaattcaggttcaaatgttttgactatcattagtattctttccagagcataaagtatataaaggaaaaataaattttgcttcatcttcataatttatctattcaagaggtaatgccaacagagctgtctgagtattattcccacataaaaggagtatttatacttaaaagtcagtcataggttcaccctttgtcaattttataattttagaccagtttgcattcaaaggacaacatttgtaaaataaagggtaatgctatttatgcttgcagaaggattttatacattttcacctatgttactatcatgtaagctgttaattatgaagacagttattaaaaattgagatgtcttctgattctttgggtaatgaatttaagtatagacatatgctttttagcactaaagtgataatattatttattcatttctagacacaatactccttttttgtcaagtagtggtaagataactcataaggtttagatgtacagattttctattgtgaaaaaaagacataaaattacttttttgatatacagaaataggcattcttctgttggtgcaaaaatagaaaagtcaaaaggaaatcagtggaagacaaagtgttcatgttttgaattatcacgtggccagtaggtcatggtttgcttacttttctgcatttaaggctgtatccatatatgttaagcaagacttttttcagacataaaagaaatgatatgcttatttgccattgtgttgatttaaatacccctgacactacaatgattttttgagaatgacttaaaaaattattgcacttatgattaaaaactacagagagaaacttatgggactaggagctttggagacatgaattagcatggagacaggagtcaacctatactaggttaactcatgctaagatgctgtttactttgaaaggcttctcctccatttaccttagaaaaattaatcaaacttaatgtttctatctaggagatggcaatggcaacccactccagtattcttgcctggaaaatcccatggacggaggagcctggtgggctgcagtc

SEQ ID NO: 37694 - DNA, 752 bp, Bovine  19866881079054
  misc_feature (1)..(1): n is a, c, g, or t
nacctaaatgccgccaccggtttaattccgagagaattcttttccacactaaaggaaaaaacagcaatgttgtttcagtatgctagtctccaacatgacatgatgctgagggatttttaggataattctgactctatccaatttttcacttcatgtgctaacttcagaacttagtctaagatatggctccaaagtatgtggtgatacagactggtagcatgagacaatttgtagttcattcacaagaaacctaacatatttaatccagacagagattaataaactgtacaagctaactatttcacaaattacggaatgatgacaataatttacttgttattataacattaccttggcaagagccaaacagaattatccagtgaaagatggtggcagttttctctgggtctggcctagcaatgacctacacagaacagaaataggcgatccctcctccatcaggagagacagcacatctcacaacaccctaggacctctcagtgaaaaaatgacactccccacatctacctgctcacactcctctcagagcattgcctgaaactcccttgagcaacaaggcccaattgcagactgtcctcccttccttcaccatggccattctccagttctcatggtcctacagaaaagatggaatagaaggagagagcatggtccctccctgggagcacgcaatggtgtttccagttatgaccattctcgtcatctctccttgggataataagggctcaggg

SEQ ID NO: 37695 - DNA, 848 bp, Bovine  19866881102886
  misc_feature (1)..(1): n is a, c, g, or t
nttctaaggatattgttttcactaattctaagtcactagtgacctgcaagctatggacaaggtcaatgtcaatatcaaggccacatattcagtaataagtatatgcaattgaataaaaaattagaaaagaaaagtaatattatcacaaaatcccattataaaaactgaggtaatttctctttgaaatgattgtatggtccaaaagttataatgccattatagaaacacatttaaacaaacataaagctaaatgaattcataatatgctgcttctgctatggcagaatgatacaaaaggagaataagaggggggaaaaagtcctaatgctcaagacttgaacaaataagaatgtctagattttcatactactttttattggtgattcaggcctttcctaagcctggcatgcggcagtcatggggctgcaaagacaaacatggcttagcaactgaacaataataacacctcatatttttgagtgcttgttattctgtattatcaggaattattctttttatttcaaaaacttttgtattggaaaagccaacttacaaaatcaattattctctaagaccatcttttattttttaaagtatgtatctgtattcattatttctaaatgcttaaaaagcaagatttaaaataaaaaccacagagattgtttcattccaatctagtgtcacaatttagcacatagaaagtatttactgatacatttttaaaaaacaggtgtttttgttttttcacaaggtggatatgtattatccttaatcattcctagtatccttagagaaatagattttgtgaaaaccatgagtattacacaaatactagagtcaatgtgttt

SEQ ID NO: 37696 - DNA, 1319 bp, Bovine  19866881129707
  misc_feature (1)..(1): n is a, c, g, or t
ntaggatactgactcacaaaatgattatttctctgcactaaaataatgtacttttcacatttcaaatagcaagtaaaccctactaaaatttaaaattctgaagttatttttttatagagaggcatagttattgcttcctttatataatcatttctatgcactatatttctagtcttgcaaatatttattctttagaaacttaaaagtcactactctgagaaaagagttttaaggtagcaattacctcaatcattactctcaattactttggaaatttaatagtgtattcttgcttttattattacctcagtatctttctctatatttattaatttgtttaactactagatctatcaaatgcttttaatttagcagactcaatcatactatttagcagaattcttaagttgagaacattttgatctatagataatcctttaacatatttataatatcgatttccagtattttagttgttttattgatatctttaaagaaccaaaaaataaaaaagttaaatcaagcaatagagtgttagctaactgtaggataggagatgtagaatttcaccacttaaagagggttatcttcataacttaggcagtaaaatatatatatatttatatatttaatatttattttaatatatatgatttatatatactccatgattcaatagtaagacacttaactttgtttaaactaagactaaacttttaaatctacatttgatgaatactagagtggttttgcccacagtactaggaaaccctataatcctggaacccccaataaaatattcatcttttgaatcatggcaaaataatgaggaaaggctatgacagcttgctggatatatatttacttttaattctgatttgtagaacagttaatgcctgtacacagcaaggtcatatttgttaattagactgcatacatatgtagagataacccatagaaggttttcaggtaatgctttcccgtgcagctcaataagtcttcggcgagggcagttaacagttcacctggttactgcatcacttgagggccttccaggtggttcagccataaacaatctgcctgcaaatgcaggagatgcaggagatgtgaattcaatccctaggctgaaaatccctggaagaaaaaaatggcagcccattccagtattcctgcctgaagaatcccatgaacagaggagcctggcaggctacagagttgcaaagagttggacgtgacataatatgcacgcagatgcaccacttgaggaaagtttcataactcaggccataaaattgtccctttttgcttgattagcatta

SEQ ID NO: 37697 - DNA, 2028 bp, Bovine  19866881297063
  misc_feature (1)..(1): n is a, c, g, or t
ntttggaacacagggtgttacaaatattcataagtatgcagttatacattgtattaagttggataaagaagaataaaaagggaatatgagagagattgacttcagcaactgaaaattagattggtgagtcaaggataatctctcttaggaagtgatagttaagatctgagatgtggaagagtccagaaaagagcattgcagagaaggggaaagtttgtgaaagagcttgagaaaagaaagaacttgaattggagaagcagaaagctcttgaagatggatgatccaaaatgaaccctataatgtagtaagatgatatgtgcaattttattagtcatgtcattttttgttcctcagcatttcctctatgcatttcacagtgtttggtgtatattaggtcactagtaaacatttaatgataaagcacataagcaagtttaatggtaacaataactaaaagacagaagggtaattgtagtatctactgcttacgattgtgagtcataaataagatcactaatagaaggggctgatctcagagcctggcacatagaaaatgcttgataattctaccttaaaaaaaatgaagttcctatttttctcttgatttgttctaaaaaactattacatgaaatgttggatgacaaactttacaacttttagtgaaataacccctatgtaatatcacaacattcttactaatcacttgaattgagtgtgtatcaattgtatcaatgtgttttcctctctggttcctacatggttgacagaggtaaatgtctttcctttctcatccatacttctggttgttgctaaacagtgaatcatcaataattgttagggggaaagtgatggcctcaaagcttgtatctccctttgagtatcaaaaatgtgcattattttcagtagcaaaagccaagttacaaatctagttttaaatacagttttgtctcaactcaattttcttgtctctgctctggaaaaccaaacctagcaattcttatatgtggacatagagtccataccttctgattaggagctctgtacttcaaaccaggcaatttgctatttccttgtttctaaataaaactatgaagattcctgttgctgcgagaaagtctattttggaattattattcttcctacttaaatttcctgtcaaattggaaacaaagtactcagaaagatacattcatttttcttagttattagtataatgacccaaatatgatcatattatcaattgcttagattcctcaaaagtaaaacattgaatcccatagataaaatcaaaatatgctccatggttgttgtgaaattatattcttataggtcattgtatattttaaaatataaaatttttgtacattttatattttaacatccttaaatacagctcttaagtttaatgccattagctagatcataccattcatgggaaggtaagttcagttttctctgttgcttcagtttaaacttgaaaaccaataaacatcttgtaaatgactgttcttgattgcaaacactgagcaaggaaatatgggtgggtcagtgtgaactctttattcttactaagaaaatgacataaagtccaattgcatagaactcaatagaatcattttcatgtattatctatggataaatgttatattatcacttatatgtgtaaatatgaatacaaaattcagtgttaaagataagataaaaagtgaagatatactagacaaagcaattctttcatttttgtccagggacgtgatggtaaatcattctatctctgggaatgagtgctgctgctgctactgctgctaagtcacttcagtcgtgtcctactctgtgtgaccccagagacggcagcccaccaggctcccctgtccctgggattctccaggcaagaacactggagtgggttgccatttccttctccaatgcatgaaagtgaaaagtgaaaggggaagtcgctcagtagtgtcccactcttcgcgaccccatggactgcagcctaccaggctcctccgtccatggcaagag

SEQ ID NO: 37698 - DNA, 1086 bp, Bovine  19866881316771
  misc_feature (1)..(1): n is a, c, g, or t
ngactataaagcacatgaaactctgctcaatactctataataatctaagttgaaagataatttgaaaaagtacagatacacatatgctgctgctgccgcttcgttgcttcactcatgtccgattctgtgtgactatggactgcagtctgttgggctcctctgtctatgggattctataggcaagagtattggagtgggtttccacaccctcttccagggatcttcctgacccagggatcggacccagctctcctgcattgcaggcagattctttaccactgagccagcaggtaaacccagacacaagtatatgtataactgaattactctgttgtacacctgaaactaacacaatatcattaatcaactatacttcaatataaaataagcataaacaataaaggaactagcatgacaagcattagtggggtgtgaaatgctactctgggaaatagcagagagattgatgttactagagcaggctcctggtgtgagcaaagaggactgacagaagataaaactacattagattaagggtagatggtaggtattttgtatgtgactaagaacttagactttatcttacaggcaactggaaatcgtcaaaggtgtacctatacaaaaaagatcacttcaaaaatatttgggaacggtttgttatctgagagagaaaacagtcttctcaaactttttaaacttaagtcattttacaagaccacccatttgcagaaatgccacacttaagaacttaagtcccatctttctcttgatcattcacaaatttccaattttcgaagcctaaaatatgaacatgtaaatgtttttaaaaggttgttaaccaccatcccacattgtcttcctttagagactgaaaaccgtctcaagtaataagaacattttaatatctcaataattttaatctgcacacagaaggaagcagggttcacaggaaaaaccacagttatctggattagggtatgtcttttggtgaaagactgccaacagggagctgtatggttttgacaaaatcagtcttgctctatgggcctcagtggtcttatacatgacatgagaaaaaccaaaatg

SEQ ID NO: 37699 - DNA, 939 bp, Bovine  19866881352156
  misc_feature (1)..(1): n is a, c, g, or t
ncacacacgtttgtcaactgaacttggaataccttatgatcaccttttgatcgattacctctggcctgtataattccaactttccaccttccttttgctctcttttctgatctttcttatagttcaaaaagtcatcattaaggtaaggtttgaactcatgaccttgcttagtattagttaagtcatatttcaactttgttaaatcaggttacatggccaaggtctgaacagtacttctgggtaaaattttggtataagtgataattagaactgagccatcagacttaagaaaagaagaaaatacatgtcccaaagctatctttatattgtactattcattcccagagaataggaaaggatcagtgaaataggactttcaatcaatatacccttttccagaaaaggtaaactttttcatttcaacctttgtaggttgttatcatccagtgtggtttcaggtttcattttaaatggagagctcttaaaagagactgggtatattattaaactttatttgctttttatttctcaagggaacagttgtttgttctgatgactctcccatttttaaaatttacatatttttttattggaagcattcctcaaaattttcagttcatgggagtagttctttacttcttgttccttacttcctgccaagaacctttggtgtgtactgtttggtaattgccgctgttgagccctctgaaggacggttattcaagtgttagatttagtgatcctagttactgttgttctggtagcaataaaaaggcaaatgatgagcagactttcaacaaacagtcctttattagggccaaaactaccctggactaactccaccctaaatcatcatggcagactactatagaaactcaaaaaggtttgaataacaacaggaactctaaagtaacaaaacagctagcatgtccccgtgtc

SEQ ID NO: 37700 - DNA, 1164 bp, Bovine  19866881366226
  misc_feature (1)..(1): n is a, c, g, or t
nataatttaatcaactcaaataaatgttctataattttgcatttgttaataagatgactaagttggatacagcatgcaaaaagcacatgcttcattatgatgaaagtgcttttcagacaggatgctgaggcctctaggagtttaaaaagaaacattcttagggagattgtatctgggtgattaaaacaggtctttattaacttgaggatgacaagaacatttttcattttctccatttacttttttttggcactttttgtactttttttggcgcagacagcaaatagagtctcagagttggaaggagaagaatttccacaaggcagcaaagtgattagcgatgcagctggggttagaactaaggtcaccctaacttttcatgactgtgttttctaccaaaggtggtcatttagtcatttactaattcattcaacacctgctctggcacaagttcaggtaatggtgaggtgactaatggtctggagattcatgctcttatccttgaatcataataaatataatagtaatatgattttcacataatgatagagtacaacaagaaaaaaattattccagtggtgggcagtagtactgaaaaggtgacatcaaggttatttctagaagtgtttctttatgcactgggcacctaatttttttttttttttaattaatttagttcccattgttgacttggaggagttccagtgttaaatattgattttgtgcagaaaaagcacctatttttgtggccttcttgttctttacacctgaatgtgtgtgacttcagaagctttatgaaaggtttcctagcatttctaatattgtactggaataagaaggtttcttataatgtttagaatggaaaggaaagatacaaaggaagcaaagggaagctgttttataatctataaaatttaacaaacatttattgagcatattaaagtggtgttggcttccagagtttacagtttcttttggtaggcactgaaaatggaactagttactctgaaagcatcctgggaggatgatagaaacaatatatggagtgggattaagagaacagactctggagcctacttggatctggatttttatcctgactttgtctcttaagtagttgagggatcttgggcatgttcctactataggaaacagcctcagttt

SEQ ID NO: 37701 - DNA, 1024 bp, Bovine  19866881405459
  misc_feature (1)..(1): n is a, c, g, or t
nacattttgtttgcattcacaagggatttctgcaaattcactatccaattaatgtcaatctgtgacaatgacaaaataagcagattcttaaatgagtcccatttcttttcagttttagatttgcaaagcatgaaaggattatatggtgtagtagagaaatttactcttctgatttataatgaagccatttttcctctatgaagatgacatcactggcatcaccaggcactcgtgtcaggtaagtctctagtaacggcagtgaattcataccaggttatccttgactggttctcattgtgatgtgaagcccgtacctttgtacaatgattagcagaatttacctggagttacagactatggaaaaggccaaaacaaagtttcagatcctaaattccaagatcttaaatgccttggaagtgtgtggtgagagctgaaactggcagacatctgctcagctgtcccacaaatacatagtatatattctgtttttaacacgttaggtatggcagaggagacagcagaagataagatcctggtctcggaataatttacaatctacatggaaaggtaaaaacatctacatttaaaaacagaaaaagatccacaaagagtatttatgaatgaaggtgcaggtgtgaattgatatacataaatactgtgtaatttcataataaataatgtgccttcatgtagcccttcatgactctcattgattcttaagtagaatcacaaagcaagcaaagaacagaagtggggtgctacttgggggttaaaaataagatgacttcaggcatgggcaatggagaggtatgtggaatgatgactagtttttcagagaatggacataggaaagtacataaattgtaagttaattatcatagttggaaaagagtatttatgctagctaatgagaaaaggttatatgtgtaattatataaattgatagaatatttttgatttctaggttaattggaaacttctgtagtgtctaagaggaggaacaccatatagatgtaatgggaaa

SEQ ID NO: 37702 - DNA, 943 bp, Bovine  19866881407385
  misc_feature (1)..(1): n is a, c, g, or t
ntgatgccatccaaccatctcatcctctgtcgttcccttcttcctcctgacctcaatctttcccagcatcagggtcttttcaaatgagtccgctcttcgcatcaggtggccaaagtattggagtttcagcctcaacatcagtccttccaatgaacacccaggactaatttcctttaggatggactggttggatctcataaacataaatagagtcaaaaactatattggctcatgaaagcttcacactttctctttgtagaaagatatttttatgtataaacactatttatgtttaccaccatttccccagtttagtttattctctgaagaaatgtcacatttacagacattctgttcacatattccacaaacactttattatgaatccattaggatatatatttgcaaatattttagtttcactctgctttatcccttaggcagtgtcatgcacgtagtgctgcaaacagagtagtgaagcaagaatggaatggcattatcttgctagttaccaagtctgtcgattgttcctttgtcagttcctctcaattcctctcaagaaagagtcctttcttcactctgcattatcactgtcacaaaacaggctcctagtcatttcttgcttgagatacctttatcaaagttcttgagtgcaaacaatagaaaatgattctcatgatttaggtagaaaatgaatttattgagactgtttggtagcttacagaatgacaaggaaattgggaaaaccaggcttggaaaataagaaagtgagttttcatagccagaacgccaaccctgagtcatcacacatgaacaggccaaggaagacactgttctctggccaaactgccgtggctgccccgacaaccagtggtgacagtttcgtccatcactagaataaattcttcacggttgctgcttctttgcaccactagttccaaat

SEQ ID NO: 37703 - DNA, 1091 bp, Bovine  19866881506335
  misc_feature (1)..(1): n is a, c, g, or t
ntgtttataaaataggacagtcccaccaagatattcccactacagtcataattaaggtggatatgaatttctaagtgggcaaggcaaaggcaggagagtaacaaatgctgttctctaaggctctccgtaactctaatcacagttaaactccccagcctccacgttgctttcttcttccctctactatgccagaaagtcacaggaaaaaaagaactaaggataatattctaagctctcacggttccctgccaggtctaaaagcagttacttgaattatagtgattaatgttatctatttttgagttttaatgtgatcttgctatttagaaatagaatgagaactacttgtggtttttagtgagactgccttctaaaatttatggatattttccactcagagcaatttttcaagtcatcaagcaaaaccctgcaacaatatctttatggagctacccagaagatttctaaatataaaagatcagtggtcagttatcacatctaataacctgacactacttaactgctcgtttaaaaaagtaaatggatgcctagatatggtgtcatgccaaagctgttgttgatggagatgtaagcaaacctttgcttactcaaatagaactgattgggtaatatttatagatcatgctgtatgaatgtcatttacatattgtgaaataaaaatatgagccacctggtatgtgccttctgatggtgccatgctaagtcctgagacagactgggcttacgagcgcagacatggacatcattaggaaaactggctccagatctaaccctgttggcctacttaaacgggagaattgcaaaagagtcacttgtttgttccatctctcaatttattcttttataaaatgagaattaaaatatctccttcatttcctctttcacaggactactgtgagaatgagatcatgcttgtgaaaatacttttaattttaccaaaggaaagttctccataaaaaatatgatgatgtatttcttttgagagccaagcacacatttttatcgccatatcgcctgtgaggttaactgttttccatgtggccattcgcttcaggccctattgaggccag

SEQ ID NO: 37704 - DNA, 933 bp, Bovine  19866881621879
  misc_feature (1)..(1): n is a, c, g, or t
ntacctgtccatgacattttctacctaggaaaaatattcctcaagtattcaaggtgaaatacaaacattcctaaacatacaaaaatgaaaggaaaccgtcacccatagtgtctaaacctatgccacaagaagcagtaaaggaagctcttcagtcaaacagagttggtatttggcagaaacttagatatttaggaagaaatgaagagcacacagaatggcaaataggcaggtaaatatgaaaagaaaactgaaaattaataatcaagtagttattgatagtaaacccaaagaaaacaaatgatatttcaaatgtccactgtgaactacatggacctgctgatcacttctatgttaaattaaaatgatttcgagtaatacacctcacactcttcaggacttgtcaaagctctaaaatggtgtgatatttagcagtgagcattggttttaagggcatcacttgttggtattactatattagatattcttgacacaaaacagggagcacacttgggcaatcattataaaaagcatctcctttgtgaaattaattggaaaattcgatctaatgtttaaatataaatctaagtccatcaataaacagattaaaacagctttaaaactaatcaattctgttccctgtgttagcttccatcactacattcatcttcctttttgaaaaacaaatttaaagaaaccacagaatgaaggtaaataccctgatatttcacataagctcacctgaagtgacaacatccatccagttatactggaattaccaagttactttctgtaatgcccctcattgctctaacatgctttttttgcaccttgattgatggtctcttttatgaaaaatgtattttgcgacacctaatatgcttttacatgtgctgaaattcaacctttggagacaaaggcaatatcatttatatt

SEQ ID NO: 37705 - DNA, 1574 bp, Bovine  19866881949458
  misc_feature (1)..(1): n is a, c, g, or t
ngtcatctcttttgaacgttaaagaacaggaattcaaatggcttgaatgcataatctatgaaggaaattcacaatatgatatgaacttgagtaatggcttgagaaaactagcctagagagcggtgcttggttcctggtgctcctgtttacagtctgctgatttcctttgtttcggttttccaccagtgtcttcttcccacctttatcatctgaagcatgaatagcaagttttaaattgtgtgtgatctcagaggatctcaaatctgcttactctttgatgagctcaggggctgagaattatatgcccagctggtcagggagaaagtagacataataccctttccccatcctctacaactctctgtaaaagtaattttacttgatgaactagttaggacagcaagccattgagaaatcactctcatcaaaatgaacctcccccctgccactaacacccctgccacccttttaaaaataattggctgtgtcagggctagtgtatttcacttttctccttctggctgaacaactaaaatgttttcaaagggctctgtagttagaatgtctttgctctgatagaataaattttttcactgtgtaatacagagtatgaattcatggtgttaacggtcattatactgaaaaaataggaatgatttcagcacagttcttaataccttttctacttcagtaatcaagtatttattaaatacctacttgacctttagcaccatgaggagacacccaagttgagttctatgttctgctctcactaactgggagataagaaaactaagtgtaaatgagtagagatcaggatacagcagaagtcctaactcagaaggtggaacataccctcctgtccttgcttgctggattttgtggttacatttagggaatgtcaagagatgcttcctcctgtttttggcccttctttagtcatttgcttccatccttttgtggtttcctgaccaatgcaagctttattacccaagacaaaggcagcattgctgtttattctgtcttttctttatggtgtctaatactctttgtggaaaggaatggtttatgacctttttttaaccctgaacaaattctgatttctttatccagcccctgcaatgctccttctgttcattgcctttccactcctcacctgtgacaaacctcgcaaagcaatctgccttaacctccgtgactttctttttcggtcctcctccgggagctctgtacccctttgtgtctgcagccacttgaacgacaaacatcccgactgcccgccccatgcccctgcacttccgtcagcccagcccgtgcctctgctgggacctcttttcattgctcctcgcccccacttccccaccgcgttggtcttgttttctcagctctctctaatgtttccaaggacacaatgatgttttcggggtcacaactcttaggagccaaaagagccattttctttcccattcttctctctctgtcctgttattttgtaacactaaatggagtgtgaatgaaacacagaaatcatgtcaaggaaagaaaagctctgctctgaagattaaggaaacaaa

SEQ ID NO: 37706 - DNA, 916 bp, Bovine  19866881975596
  misc_feature (1)..(1): n is a, c, g, or t
naaggagtcaaacatgactcagcaactaagtacagcagcagaaggaactaagataccacatgcagtgtggtatgtcccaaacaaactatatataaatatatgtgtacacacacatacacacacgcacaaaatctagtccctaactgtgaaagtctggagaatcatcactttggtcaatacgaaaggaaatcaagcactgataacacacatcataataaaaattgggaagcccatgtactaatttacaatgaaaaattactctcacaattataagctcaatgatcttgggctacttattaacctgctgaacctcaccaccctttcttcataatgaagagaaagtcaggaactgataggccatgtgcttgatatcagctttaggcttcctggacaaggatggatcattacaaaagtctctctcattacctgagcctctcttatccaccaggcttacactgaagaagccattgatcctttgttcccagcctaagggctttgtttagagattctggaagattgagatttatcctctggacaaaaatgcgtgtctctaactagaaatgattaactaagtgtactatcaaaaggtaatccaagaaaacctgtagtacttcagggattggccatgatttttggttttcctttcttcttattcctgctttcttctcttgatctgtgttttagtcatttcatattcccagtacccagctggtcatacatacattacagctctcaatgttagttgaattaaaataagttacaatacatgaaagtttataaatttttactctctttaattttaataggttatcaggtatgttgatgacactttgaattaacaatcacacttttacaactaatgaatcggaagataatttttgtgaatagagccatattcagaaggaaaaaacatcca

SEQ ID NO: 37707 - DNA, 913 bp, Bovine  19866882270120
  misc_feature (1)..(1): n is a, c, g, or t
ntggccttttaaacctcctgacacatttcttagcatggttttattgttaaatccaaacattaattttttggatatgttaatgaatttcccccaagacgcttgctgctcaagtgaacagactttatcaaacactggcagttttgagcatttcattttgagtttctaggtccattagatgccttgcaaaccagaggagggggttatttttgccctaacaatagaaacaaaaatcatttcaataaagaatgaatatctatttttagagaatgacaataattttaaaaaatttccctttgactaggactgttgtatgtcctagaaattctgtggaaactttgagatagcataagtgttgataatatacagtcttaaaagcaatgacctataaaaaacaagatttgtgtataattttatttctgtgaagaattaaatataatttctttggattcagcaagcaatttccttcttcccataagatattcagaagagctcaaagatctgtacacagtatagggactaaaaaacatttaatgggaagagagttaaatgaatgcatttttgcactcagtacagttcacataaattctacaattctggtccagtcaaaggttttgatattacatatgtatagtagtcattccatttacttacatgtttattgctctagcagtatctaacacattgcctttaggatgcaaggctaacaataaatcagaataccatggctttgaatgtccctactgagttttattaaaggataatcagaaaccaagataaaacatttcaagaagattgcctattttataccttatccatattttcatttgacatggtctgtgcatatagttaatgttaagctttctgtaattgccttcctttaaataagggaacaaatatttcaaagccagatagg

SEQ ID NO: 37708 - DNA, 745 bp, Bovine  19866880791803
  misc_feature (1)..(1): n is a, c, g, or t
ntgggtctcccgtgttagcaggcagattctttacccctgagccaccaggaagcccagatcatcatcattatcgggcagtagtagtggcaacttccgccctccccccagcgtttgggtgcaggtcacaggaagtgctcagtaggtgtttgttgattgactgaaggatgttagtaactgcctccttctgtctcccctaagccatgcatgggacatttgtgattctgctgccgctcagcctgatccttatggttttcgggggcatgacgggctttctgagcttcctcctgcgagcctcctgcctccttctgctcacggggaccctcttcctctttggaggtaggtgcccgcctggcatggagccccaggtgccgagagggtctgtgcacggtcccccagaaggaaggagggtggaggagactgcattgcctctggggctcggtttgccccgctgtgatctcctagctggaaggggtgaacagatttcctgcccagggtccctgggtctgtggtcccaggagagaagcctgagggtgagagcaggttctgagaatcatcttcattgtttcataaaagaagccgagtcccgagagcttcagggtcagggtcacgggctggcgggagaccctcgctgtctcatgcacacctgccatcctgacacattgctttgctttgattgattaaaatcaggcaagtcaggcaatggctgggtttcaaagatgggatctaacacttgctgctgctgctg

SEQ ID NO: 37709 - DNA, 1559 bp, Bovine  19866880595713
  misc_feature (1)..(1): n is a, c, g, or t
nataagaacagatagaattaaaagaaaaaattgaaaattccacaaccttagatattttatcaatcctctttcagcaattactggaacaacagaccaaaaaatcagcaaagacatagaagatctgacaaatacactaccaaccacataaatatataaaggaaagaagagttgttagccttggaacattctttcctgctttctgcaattttcctggtgtcctcaattacagtcttggtcttttttctgatatgcaacatatttactctatttccccctcaaatttgtggctgcaaatgtttttattttactttttaaaaaatatctttcatcttacatcatttatgcagcatttctttttactctttcttcttggtcaactattttaaaagttctcttttcatatcttctacccatttctcctttttgttctgttttaaatttatacttcctcttgcagatttctggttttcttaaaataatagtggcaaacatttccaaatgctctaaatatattgtcttttaatcattttaccacaaccctatgaagtctgtactattataaccattgtatagatgagggcattgaggcacagggaagtttatttattccaggtcacacagccagtaaatgatggagccagattctaaccaggcagtcaaattccagcatctgttctcttaactattaggctatgaagtctgtctccctagactgccaaattaaatattttagttcttattttataataactctccttgtatttcctctttatctacttcctcattttcaaaggttttgttcattctatgacatattattattcataaattacttcttcttcttaaagtctttggttatgaaaaaaaaaaaattttccaagcctcctgtggtagactgaaaaatggcccctcaaaagatatccatgtcctaacccctggaacttgaggaaattattttatatggtaaactctctgtagatgtgattaagaatcttcagatgggaaggttatcctgtatagcccgccaggctcctctgtccatgggattctccaggcaagaacactggagtgggttgccatttcctgatcttcctgacccagggatcaaacccaagttttctgtactgcaggcagtttctttactgtttgagccaccagggaagccctggatcacttgggtgggccttgaatgtaatcacatgtatccttaagagagaagcagaggcagatttgacacacagagggaggagaaagcaatgtgaagtcagcagatggagatttgaagatgcaggcctcgaagatgagagtgatacagtcacaagccaaagaatgctaacaatctccagaagctgggaaagcagggaagagtctcccctatggcttctgaaggaaggaaagccctgctgacaccttgattttccagtgatactgatttcaagtttatagactccagaatgtgaaagaacaaatttctattcttttaagtctcccagtttattacagcagccacaggaaacacatccttttctctcagttttcttgctgcttctttcaggaaa

SEQ ID NO: 37710 - DNA, 936 bp, Bovine  19866880796223
  misc_feature (1)..(1): n is a, c, g, or t
naatgtcagctgagaaatgcacacacgtctctgaaggggacaggcagagcggcattgttcttgttcaagagaccttctggcactcttgtcttccaagagggttatgaactacaggccaaaacagctctgctgattcatcaggtctctgaccgttgtacaatgtgagggcacaacaaataagctggatggtctcaagaaggctaatatgttcttcacttaataataaacacgttagtcaggggaagtactgaatttcacttttctactgcaaactctgactcatcgcagagagaaacaaagaaaaattcaaagtcaacttttacctccatctaatctgcttagggtcatcaaaagctagatgttctgtgagccagatcatccattttcactgcccacactatccatttgttttcttcaaacagcattttacacgaaatgggaacaatagtgaagacaggaagagggtaaaccaaaccagtcaattactctcgagtgggcagatctgcttacacaggcacaaaagtctgcaaacgacagcttttcttcctgatcctttaagcaccgctttctgctacttcaactgttgacaacaggtcattcacaccctgctgaaatccattcacaccctgctgaaatgtctacagacaacttcagatgggttcctactacaactgaatatcaaagccgggaggaagactgactcaagagaaaagagtttctgctgaaaaccaaagtgaaggcaaaggaaaatgccacagtggggttttgacactcactgtgcatttaaatatccatccaatcctggtctatggcacagggtcccatcctcctaacatgtacatcacacaagaacacaagacccaccatagtgagaagagcgtgcatgctaagtcgcttcagttgtgtctgactttttgcaacccttatgaactgaag

SEQ ID NO: 37711 - DNA, 2029 bp, Bovine  19866880838544
  misc_feature (1)..(1): n is a, c, g, or t
ntagcgtcctggtctttgggaaattggctgagagtgcgtgttgttctggctttgtgcttattctggacccagctctgacggctgtaatggatgatggggttcccctggaagttagagctctgtttgttcccggaggactggtgacatatcccagagcgagaagagttccggatctgcccgtccccggtcctgctgctcataggtactacatacaatgacccagtagactcccaggagatcttagcgaaccaggcacaaatttcaaaggcatcctgggtggctttaaagcttatgggtagggcttggtctctggctgtgagagggaaggcggagatcctccgccgagggacgagcggtgccgactgagttcctgagcagaagggaaaatgagcttgaagatgaggcttggagaagaaagaagggctggggagaaatatggtttttagtcagtcagttcagtcactcagtcatgcccgactctcttcgacctgatggactgcatcacggcaggcttccctgtccatcaccaactcctggagcttgctcaaactcatgtccaccgagttggtgatgccatcactttataggttattgcaagatattgaatacagcttcctgtgcaatacactgccaaaggtcatctgacataatagctgatgaattcaaccccagtggatttcatttgcaattttcaatttactgaggcctccaaaccccaaggtgataaaagtttcccctatcatggcctgtcacaaacatcaagaaatctcaaaaaaccacaagaaagacaaaagagaaagctgtgcttcctcgcaggtacagataaggagaataggaaggaatggtatcatgcaggaaggtacggagcagcttgttctctaaatgcaaattgaaaggaaaagacttacttgacatgtcctcaaacaaaaatgtgagtgtaaatatttagtccctgaaaagacagtatactctctatgttgtatttaccatagttttgatttacgaaatgcaggcttgtccaggctcttctatcgtggaagtgtcggttagcactaagaaatcatttgttttgttacagaaaagtggtagatcctttgtctgatttgcaaaggcagtcaaaggactggctagcaactacttgtaagtggatctaggcagtgtatatcaatgtagtagcaagaagaagaaagctagtttccccttgtcaagctatttacagtgaacttaggcaagatcagggactgaatcctgctcccagcagttgttcaaattgaggagaccatattcatgttccttggagaatggcaagtttaaaagccaagcagtccatcttcatcctatgctactcaactcctactacagccaatgaaaagagagcagagagatggaccgctctttgagaggcaactgctgggagaatttaatttcagacgtggatgtctggatcccatttctaccaaatagattcagaaagccttatgaaattggtctaatgaggcaagaggacttggcagtgggcatctaccaaatctgcctaatgacaggatttctcatgacagttgacaagaaaacctgagcatgacatcaacaggactaggatatttacttcatttgtgtgttgataactgtgagacaatcagagtttggacaggaaagaagataattcctggttgaactgatatgactgagaaagattgcctcttacagaatcattatttaaattgtcacagtaaaaaataagaacatgggttattcatcataattgaatccttagttctttgaaatttagctattaggattttctattagcaaaagtttaatgaccttttaattcttcaaactctcaaaatagaaaatatggtttcctcagcagttaaagatggcaggaattaacatttcaaaataagggatgtaaaattttattcttaagctgcagaaaatatggaaagtaaccatattttaatatttttttggtcaggatgctacttttcaaaggttatttaccccttgcccctcccccccctttttt

SEQ ID NO: 37712 - DNA, 1287 bp, Bovine  19866880854067
  misc_feature (1)..(1): n is a, c, g, or t
ntttagactcctctttatctttcaatgactatttggacattggctgtcatgatattttatgtatttcctgtatgtattctgaatgcagctgtgctaagactctgagggcttattttagcacacaagaacagcttgggatagtcagaaatgcacgatatgtgggatcagcaagccggagttcaggttttggctattcacttagcagctgtgaagctttaatcccaaacatctcaagtaaagtatgcctaccctagaggtttgggacattatgctgtaaggtctcagagatgcaggataaatgcaatgccttcattcattcattaagcaaatattcactgaatgccagccattgaattataagtgaaatgaataagatggataaggtcactgttctcatggagactgagattcttcaaagagagacatgtaataaataagataatttaaaatacagattaatgctatcttttgaaaaaaaagataacatgaagttatttttaaaaggcttagtagaaagtttaagagggctggtgatggaatattattagttgtctacccagaatcctctttcccctttctaatagtctgttgttttcaatttgatgtctgttattaccacataccacccatgggatgggtactgattgacttaagctaaacatattcaactccccagtggtttaagggagctacataacctaaatagtccagttgggattctagcaagcaatcttggtatcaaagttgctttctctgcttttcctctcagaatcagaggataaagatataaagacagggattgttggagccgtcttgcccctaaaatggaaagaacttgaggatgcagataaggagaaagagcacagtgggtgaatcccaccgggaggtaagctaactgtgaggttggccttatctctgaacctcgaggttacaaaagcaaataaattcctttattgcttaagcaaatttgaaccagcttttctgtttattccacaagaggattcataatggatacagaatttgattccaggagtgggatgcagtaaaatacaaacctaaaacatggacttgtctgagcagaggtgatgaggtgaagagcaatggtctgctgggactcaggcttgtgcctacaaagtgcatcaggaaaaatggaaggaaaaattcaagatttgggattctagtaaggtcctacaatgaagcaacaatgttcagatgaaatgtcccatctgacaacagaagaaagtatggttttacttagaaggctctctcggatatgcaggcaagaaa

SEQ ID NO: 37713 - DNA, 1805 bp, Bovine  19866881236859
  misc_feature (1)..(1): n is a, c, g, or t
naatattaaaaagggaactatttgtggaggcatggccaggagtagggagtcagaaggaatggtgaaacaccacaagatgatgatggggagtggccactgctgcccttaagcttgaaggggcaagcttgaattcaatcgaattgactcaaatttaatcagacccataatgtgggaaaggagccgtctgagaggagtttgaccgtcagtcgagaaggaggaccagaacaacagagactgaggtcacaaacaccctgatctttctgccactccctctcctccttccagtgccttccatggactgaacccagcaggagcccactgatgcagttcttccaggccagcctgctggggtgcatggtagagtgaagaaggatgaaaatggatctggaggaacaaatggaaaaaaccctgcctgcccagacagtgagtacaggaaaggcctaaaaacattttttccctaaattttccctacattgtaatagctatatgactaatttacacttactgatggaaaaaagtatctgtcatatacttataccagatcatattcaacatagtggttggaaggttcagctcaattctatcaaggggctgaattctctcaacagggaggatgcctcgtatttaagctgtaggaagatccccaggactgacgttctccactgttgctgtcgttcagttgctaagtcctgtccgactctttgtgaccccaaggaaggcggcgtgccaggcctccctgtccttcaccatctcctggagttcgcccaagttcaaaatgttctccatagtcttctgtatatgttggagtgttaaggggtccagaactgacagtcctgttttttgtttaacacggacatgaaaaataggcagatggagattttttaaagtcagacttagcattgataaagctgatattcgaaagcagagcttagtagaaagtcccagtggatttcctaagagggtgctgcagaacacaacttaccttcctggtcagaagcaaagtgacaaaaatgcaagtctgacccagggccagggtcttgactgatgataaactcttgagcagatgaaaatgcctatttcatgcaaatggacagactccaaaagagacaagacagaaactgaggcacgttccttaattccttctcccaaattcaggggattaaacctgtccccatcccttggtaggacgagtttcaacagcatctaaggaagtacaaaaagagaccaatcagacagacctggggtttacccacccactgcttccagggatgttccatgggataaggggtttcagttgtcccccagtctctccaggaatgcattggtgcccatacctgacttcctgaaacccctgttggactgatgatactatttgtacagcttcgtggggaaagcagttccttgtttctccctgaggagcatctgtgtccccgcgttatggggacggaagcaggaggaccaggctacgtccctgcttctgtcctgcaggtggcaggagcaccatctggactgttgtgcacccggggcagcctcagaccaagccaaagataacactgtgtccacacacaggaacacgctgtgcttttccaggttcccaggaaaccaaatcacatcagaggtcaacagtgttgttagactatgggtactcagagtacgaaggaccaatatgaggccccagaacttccttctgtcaaggactcaagagccccctcctaggtctcctctgatcctttgctaactgggttctttcaagccctctttactccatatcagaagttctcgagcagcctaactcaaggacccgg

SEQ ID NO: 37714 - DNA, 1282 bp, Bovine  19866881350727
  misc_feature (1)..(1): n is a, c, g, or t
ntggttgttgaggctcttctttcgctttgaggttaaaaacctctgaagtagtgttataaacatgaagaaaaaagtggaagggccaaagatccccttctaataccagcaattacagaacatccccattgtgctaagaggatgcagcctcaaagacactgattcctggcttccaaaattagttaacaaacaaggcatctttatatttaccctaaaaaaggaattcagaaataacggtgtgtagggtgcttctgcataccgtactgttccactgttgttatgctcttaaaatgaaaagtagaaaacccatgtaggtactcagtgcttgaatcttgcatacaatggtaactaaaactcttaaaactgtggtaatgaataatgaacccccaatggggctccacagagggtagaggaagttgttttggttagggaagtccgcagttccaactgttcatgtaccagtaattgctggaacagcgtatagaagatactcctgtctttgctgcccagtcagtcggcttttttgaggcttttagaagtccacaaatatgaatatatatatatatagtctacatctatatacatcataaatatgaggtcaggattcagcagatgtatcgactatagtttgctttggtggtgttgccaagacagcctctgcttcttcatgcatctagggaagaagtggtaaattattaatgactttctagtctatcaacagatataatctcaaaacttttagtttaattcaaacaaatatttttgaaagataaagttcagaagtacaaatcctacttacttgtaaaaactgtacatcctgaaataattcttgtatgaacctccgacatggaagtctaaatgtgcagtgtgacagcaaatgggaaacctcagagtaaaggcatatgtcatcaaatgtttgaggatacttctctttaattctaaaatgaaagaaaagactaggatgtgataaaaattataataatgacttgcctattttctttcaaaatatcattttaaaatatctttttcctctggatatatagatcaagtgacatatctggagtgagggcataagaatataaaatagtaaatattcctagctcacacttaaactataactattttaagtttcggctatctcttaaaatgataaaaacccaaatacttcttagaaagtgagaaatattctttttcactggcctgagacattacaaaatgtatttactggcccagaataactcagtattttaaagttgcaggatataaaatcatcacacagaaatcc

SEQ ID NO: 37715 - DNA, 799 bp, Bovine  19866881675834
  misc_feature (1)..(1): n is a, c, g, or t
ncactttggctgcagctttaaaaggcttgtatgttaatgtgtaccccctatcttccagagataaagtgctgtttcattggcattactcaccatgtcaaggctttctggtaaattctttagtccctcaccttgcgggaaaaggcatcagtttaccacttcccaagaaatgggctgttcataatgctatgttgtaatttgattcttgtgaggcattggtggaagacagtaatggcccagagtcgatgatgatatctagaggctgacccttaagagatgctccttaagataagacccgttttcatttgactgtagtgtcaattcagttgacgaataatgtctgactcttaatcatattactatgattcagaaaaagcaccactttcaaactgtctaggtgtttaatccaaaattgtggttgtggtttagtttctaagttgtgtccaactgttgctatctcgtggactgtagcccacagtcatggctttttccaggcaagaatactggagtgggttgccatttccttctccaggggaatcttccagacccagagattgagccgggtcccctgtgctgcaggtggtctcctgcattacaggtggatcttcaccaactgagccaccagggaattatataacagtttttagttgtttgggggcatagaatgaccaggcaggatttttgcacttaagaaacttacaaactaataaatgaaagaaagccttatatggccataggactgttcaggaaagttcactgaatcaacctgagatggtactgtgatttggagagggataataat

SEQ ID NO: 37716 - DNA, 702 bp, Bovine  19866881802322
  misc_feature (1)..(1): n is a, c, g, or t
nggacaggactgaggcgatttccttttactttctacctattgccgagagtgaggcaaatgtttttcttttttcttttttttaaaagtgcactttccccaggtctacgatgctagttttcctggtggaaaatgatccctttcttccaggaggaagtgtatagattttctatgtgggagaatggtgctgattcaccacaagcttttatttgcaaactctcattatgggcaaaattattattatttctctttggtggctctgaggtttttctaagaaccataatgaggatactcttagaaaaggaagacagtaactcaagcaatcatttttctggtttgcttttatggtccagtctagaaactgcggctctcgccatatttctatgtgagcccagctgactttctgcagaaggaggtcctcatttaaacagcaccttgatacaatcatagctcagcaaaacctccaccaggagagactgggacactaattatgtctgagtcaaagatgtcacaaaatgtttaaatgccacaaagttctgtcagctattagtgttagactgtgttgatcacagcaagggccagctacaaggggggtggtctctcttggaacatctcaagtcttgacctatggggtgaattcctccaccttttggaatacatgggatgttctggaatgtcgtgggatgccctccatgcctggcagtt

SEQ ID NO: 37717 - DNA, 904 bp, Bovine  19866880362545
  misc_feature (1)..(1): n is a, c, g, or t
ngtgatgacacagggccaagctgggccacggcctgctctcgggggagtattccaagccagcaccagagtcgggtgatggggagcaggtaacggagcagaaggtgggtctggacctccgtccctctcaggctctggaatggtggggaaactaagatccatctgggaggtgtctaaagaaggccacttggtggcctcttgggccctggctgaatggctgccccaactctgcctaggaagtccaagatggcatcgcccctcggatgttcaaggccctcattggcaagggtcaccccgagttctccaccaaccggcagcaggatgcccaagagttcttcctgcaccttatcaacatggtggaggtgaggacagggaagatggggcgatcttcactctcctcctgtctacctgcacttcagttcactcccttcttcccgctgctcacttgttcctcctcctctgtcagccccagcccagccccaccccagtgaccccgagcactgagcctttcctgagagtggcgtttgcacctgaggacacttgttacgcttgcagcctgatgaaggatgctcccaaagaaaatgataggcgagcacttggtgcttagaaagaaagtacaggggacttccctggtggtccagtggttaagacttcgccttccagcacaggggggtgcaggatcaatccctggtcgggaacccaggatcctccaggccaagaaacctgaaacaaccgatattataacaaattcaataaatttttttttttttttaatatttagtgctggtcttagttttggcgcacgggatctttaatctgtcatcgtggcacgtgaactcttactcgtttccacaagtggcatccagctccccgaccagggatcgaacctgggcccctgcattgggag

SEQ ID NO: 37718 - DNA, 1657 bp, Bovine  19866880585982
  misc_feature (1)..(1): n is a, c, g, or t
ntaaaacaaggcaacgtgttaattttagtttaggactacccagtgttgttgaccctgttcgctaagcaacccttggctgtgcatcctcagttcacggccatcaagagatcccctgtagttcagtcgtaaccctgggaccataccttgaatcgtggcttcagaagatatttttccagcatacctaaatggatttactagcttgggcagtgcccagacctcaagtgtgtgaagagtacccaccctactaactgctgtgcagctgtgtatgccaacagcaaaccccatctgtagccagggaccatttgtatttatcctgttaataatgtgactgacagtactctgctagtaatggaattataatagatcatcaaggtataaaatggcatttctgggcacagttgggcactctcagccccttatatcatctaagaaaaatgcaagagaaagttcctagcaatatttaataagcggtaaaggaaatgtggtcataggacccagtttgtattgcctcaatataaaattaatatctcccatgttaaatttgtatttacaaagaggcttcttttgataattaggggtgctgttgctgtctttgtagacatccttagtttgcatgttttcgttcctctctgggctgggtgttatgccagatcaacttccagaacaaacccgggagggcaccaggcacgagtaaccctctattgctctttctccccatccaggttaccccttcgctttattttatcggcgttaccttttctacaaggacagctacctcatccaccttttccacacctttacgggcctctcaatcgcttattataattttggtgagtgaacctagttagcaccacaattacagggagcctgagaaggaacagacccagacaaaacgtcctggagggaatctaatggagagggaagttgtgatgctctgggagcaaagagagggttttatgggcaggaacacagcttagcttctcccttcatgtacatttctctcccagataaaagcattttgagaatggttacccttaccagagggacttccctggtggctcagcggtaaagaacccacctgccattgcaggggacaagggttccatccctgggtcaggaagatcccctggagaaggaaatggcaacccactccagtattcttgcctgggaagtcccatggacagagcctggcgggctacactccatagggttagtcgcaagagtcggacacgacttagtgacgaaaacaacaaagcaacccttacgagtcgccatccacagagaggcaccggttgtctctgctggggctagaactggccaacagacccaagcagttccgccaggagcatcccttaggcccaacatccagaaatacaagcgctccctggcagtcctgtatttttatacagttaatttccttctcttcctccaaatcaggagactccttaaaaagaagaaagatccaaataccaaagttttttttttttttttctgtatatattcttgtgttcagaagtgtcaggaagggtggaaatgcaaggggggtggggggaaaacaggcaacagtgtgctttctgctccacacccaggaacccagctctaccattccctgctctgcatcgtgctgcagttcctcatcctccggcgagggccgaac

SEQ ID NO: 37719 - DNA, 1948 bp, Bovine  19866880729419
  misc_feature (1)..(1): n is a, c, g, or t
ntgtctagttggccgaggctacactgttgctcccttcagggggtcgtggaggagaaagagggcacacaggcccgactacgtacacctgggtgctgaagtcctgggtggggtccgttggggcgttctggaagatcttttccagcttatccacgtacctgagccaagggaaggatcactgaaggggctgtggccaggcccagaggaaaagggaaaggagtggtcatctaccagttcagggaagaggtccctccagagtggggagacatgtgtttgacacttggggtccacgtctttccagcaacacgccttccctccccttcccaaaccggtcagcatgcagggtacacaagcctctgccccgagacggagctacgggatgggagaagacactcagaaggataaatacagttcatattctttgaatagaacgtgtcaatatgttctaaattttcacatgtgtctcaggccttcctatttagacaggatgctcacttccctaaccctaacttgcctttcttctgtctccatgtcccagccctcccctctcccccattaggtgctcatctgatgtcactggcccaaaataaagagcacctgttggcccttgagcccatcaggaggcctggaagagccctgggactgagcatctggccctaccagtgggctcgtatataaacaacttcacaacctgctccctggcatgtaccaagaaccaagactgagctagaacagaggtcctgagggcaccagaggtgggcgcccagaggctggccgctaggagagagctgggggtcagggcacagagccaggggcctggctgcggagagagggcctgggggcgggggctggcggcgggggtaaggaggactcacttcctctggaagtcggggatgctgaagagcacctggaccaccgagttgaggtagcagctgttgcccaggttgcggatgcccggtgtagccgggcccggacagcggcttgagcggcaccgccgactcctggatcagctcccactcgccgatgcgctggttcatgtctatctccagctccgtcatcgtcttgtccgtctgcacgggaggaggcacttcagacctgcgtctttttttctttttaatttagctgagccaggtcttagctggggcatgtggaatctactttcctgacctgggattgaacccaggccctctgcactggaagcacgggcttttagccactggaccaccagggaagccctagacctgtgtcctttatgttctaaaacatagtctaggatgagagccagctggagagagcctggaacgtgatgaattatggacccagacatggaaggcctattgggcatcccccagtgcaagttctggaaggccacaggcaaccaaccgtccaggggcccatcaggcaacaggcctccacccacatgaggggatgaaacgaacatgacatcccctagctgaaatgttcctccaccctgaagccaccccttctcactcagatccccatcccagcatcgcttcctcggtcccctgggcccggcgacccctgctagaaactgcgcacagtcatggtcattccctgctgcacaagcagacaagggacgcctgcgtctcacctggtagaagcctacaagccaaggaccacccctgcctcattcagagtgaccagcacacagtaggcgctcagtaatagttgctgaatgatgaaatgattctacaaggcttttcacaggcagcccacgaatcctgggaactggggttaccgtggcatctctccccaccttgtcgcctcaccctcagccttgggcaaggaaggcaggcctgacgggcagggatgagagaatcctgagcggagggcggtctcaccttctgcatcttcagcatgtcgataccaaagtgggacaggtgctcagccaggttgggatccaggaccatgtcatcctcgtcatacgaga

SEQ ID NO: 37720 - DNA, 2562 bp, Bovine  19866880799841
  misc_feature (1)..(1): n is a, c, g, or t
ncacagacttgttcctcttattcttcgtccctccagccggctccagtaagacctatagtctcacctgaggccctgaccaggaggagtttctcacctgcaacctccccaccatgctccaccgcccccccaaccccacccctgccacatctcctatcgggcccctgggcctggggaccagatgaatgtagccggggcctgtggccgcctccctccctcctggtcgagggggccttgggtctgctcctccagatgctctcctcctcgtccccattttctactccaaccctaacccttctctgatgacttcttctctctcgattctctccctcaccactggctcagatcccgggcagcacgagggaccagcccagcctggcctggagggtgaggctgggtgtctgcagcacgaagctcaagactgtcattgtacggggagaggaccctgggaccagagagggcagggactagcccaggatcacacagctagtcaaggacagattcagatccaaagttcctcctgactgccagccagcagcatttcattctgcctgcatctcactctgccttggcagaaccacagactcacatcctgacctgggcacaatcaggcaccctgggcacactcgtgcacagacatgattccttatcacctcagcagcacggctctgtttacaaaccagttcctttgggcttgtttgtctatgggcttccctggtggctcaaacgccagagaatctgcttgcagtgcaggagaccggggtttgatccctaggttgggaagatcccctggagaagaaaatggcaacccactccagtactcttgcctggagaatcccacggacagaggagcctggcgggctactgtccatggggtctcaaaaagtcggacatgactaacaatgtctatttcagcctcacgaaaatcctgcaaggctgggtagtgacaagaccaagactagcatctccagtgtatcgaccagaaacagaaggcagagaggtacatgatagtttagcttcacacagctagtacgtggactagcccaggtctcttggctgctagtcccactgctatgtcttgaatagagggacaaataccatgcaggtctctgccgctggctggtcacagatgcccggtatgtcccttgtccctccatgggagcccttcttggcaggagtttgcctcagagagttcaggatcaggcaggagggcctccctgcctagaatccctccttggtcccctgctggctgcagaatcctgttaccagggaacaaaacctgcagttctcctaatcagggcacaggccctgtgggagagagtgtccagtgaccgccactcaccctctcagaaccttctggaaggtgagttttgcccggggcgggggagaggtggggagctggctggaaactgaaccctctgagggcacctcctgtgaagggtgatacccctgggcctcagtctccccaccctgcacccccttctttcttcttccaaatgactcaggatacagaaaatctcggggttacaagttttcttcttcctcttcttgatccatttctcccaagatccccagccttctctgccccactctcctcccttccctttctcatcacctcccgcaatccccaccctttccccttcttttctttccaatttgcctctttcaggaagaacacccagctgtcgccaggggtccccatggcttgcttgtattcctgacctatccccacccctgcctccctgagctgatagaaaaatacaacagacttaactttaaggaagatgctcttcatttgtgcgtatgtgtgtgagagagagagagagagagagagaagggtgggggagacattgtgtgtcaagtctcttcagtcgtgtccgactctttgcgaccccacggactgtagcccaccaggctcctctgtccatgggattctccaggcaagaatactggagtgggttgctatgcccttctccaggggatcttcccgacccagggatggaatctttgagggggaggcagaggtggactctttcctggggatctggaatcttctgatttgtggggtcagacccagaggacaggttgccaggtttgcccccaagaagcagatcaagtttccctggggagggaaaaatcctctggaggtggttagccacctccccaccccaaagggccctgagtgtgcgcgtgtatgtgttctactgaaggggagagactgcagggaccgtgtgtgcgcgcgccacgtgagaaactgcgatgtgtgcgtgagaactgtgtgtgtcccccacacaagtgtgagtttgtgtttcaggaggaggcagcagtgtattggggggaggtgcatccttctagccccttgtatcccacaagcagccccagcatggccaccgcccctcactcctgcagcctccagcacacgctcgcgtgagccttcatcctgggagcagcccttacagatacactggggaacacacgcgtcctcctccccgggccataccagcggcctcttggagcctgagttcgcggggaaaaccgggtgggtggggcaggactcgagccagg

SEQ ID NO: 37721 - DNA, 1228 bp, Bovine  19866881094564
  misc_feature (1)..(1): n is a, c, g, or t
ntgccctgccatggacaggtgacaggagtccaactacgggcttcttactgagacctgagagtcccgtatgatttgttttcgtttatttctggctgtgccgggtcttcactgttgctcaggctttttgggggttactctaagttgtggtgtgtgggctcctcattgcggtggcttctcttgttgtggagcacgggctctagggtgcacaggcttcggtagttgtggcacgtgggctcagcagttgcagctcccaggctctagagcatggagtcggtagctgtggtgcacgggcttagctgctctggggcctgtgggatctgcccaatcagggactgaacctgtgtctcccgcattggcaggcgggttctctaccactgagccaccagggaagccctcctgtggttttgatgcaaaaattgaagtttactatcaactcttcccctacaatcctatgaggtggaggtaaacaggctgaactcagagttccccgagagcagggacagtgaccaccattttgcatctccagctgcgcacacgctggtgcccagcaagcgccctcggctcctgaatgaatgccgacatactgagcaatctgttcaaagttcaacggcctaggatctaggtctccaggcacccagtgggcttcggcacagtatttggttctcctgtttttctggcacttcgctttagagtgagctgggaaagagccttctgtgcgtccacaaataccaaagacagaagacaccccctgcagggctggtgagatagtttgtagatagacttctcatagatttatttgtgtgtcatgttatgtatagatatatgtatatatactctttttatacaatctatatcccctcccgttccccaccaaactcacaagaggaagtataaatccttccaggatggccgtcaggctttcgaggacagccagggccaagaaagaaccatctcatgacagcttgagaacagctgtcttgaggctctggggtcactggagcagcagtgctcccaggacctgacgtggggagagatgggaatggctgcagagggacaagattctaggctgcgagtgtccagcgactcctagaatggcaggctggctcccagagctctcggcatgggaataaaagtgggagccctatggctctttggatgctgcctgaacaggctggggggtggggggcaggcggggagaggcatgcaaagcgtgggcggcaggaaagga

SEQ ID NO: 37722 - DNA, 863 bp, Bovine  19866881151974
  misc_feature (1)..(1): n is a, c, g, or t
ncctcgccaccaggcaggccatccgtcatcatccattgtaccaagcagggcccccagctgagccttcgttcaatctgttctctaaactgtgactcatcagcttggctgcctttcattctaaagtgaccagagcacactgctttcctgccccactgggggcgccaggaggcaggatggatctgaggctcatcctctctcacccttctctctagctacttcttcaaacgactcaagttcctcggaaataaagttctatcccagggtctctcgttgctattcttggcgctctggcatggcctccactcagggtacctggtctgcttccagatggagttcctcattgttattgtggagagacaggtgagccttcaggatggcgggcagagggggcctgagcagaggagcaaggttgagtgagcccgttccctcctccccaggctgccagcttgattcgagacagcccagtcctgagcaggttggcctccatcaccgtcctgcagcccctctactatctggcgcagcagaccatccactggctcttcatgggttactcgatgaccgctttctgcctcttcacgtgggacaagtggatgaaggtagccaggggcctacccgccaggaggggaagggactgctgagaggtcagacaggcggcggggacggggacagttccaggctgtcatctaccgcggaggctgcgtgtccccacaggtgtacaagtccatctatttccttggccacgtcttcttcttgagtctactattcatattgccttaccgtccgtaaagtgatggtgccgaggaaagagaagttaaagaaaatggagtaattcctggtaagtacacctccctacaacttgagcg

SEQ ID NO: 37723 - DNA, 989 bp, Bovine  19866881704255
  misc_feature (1)..(1): n is a, c, g, or t
nggccccagtgtatcccctatgcagtgctgctggaggcgctggccctgcgcaacgtgaggcagctagaagacctggtcatcgaggccgtgtacgccgacgtgctgcgcggctccctggaccagcgccaccagcggctggaggtcgactacagcatcgggcgagacatccagcgccaggacctcagcgccatcgcccggaccctgcaggagtggtgagaccccaggaagggaggggtgctttggagagggaggagggctgggcagggcagaggatgtgagtttgaaagggaaggaggaggggtaggggccggagggagaagcatgcctggagtacctggtgtgggagggggtggtaaccttgagtcgtggtcccctggggggtgggtcacccgtctcaggctggatgcagctcccccgctctgtgaccagcactgtccacaggccactggcctctcccacgtctgttttctttgtgttcttgtgtgacttcggtttgttaacgtgccttcctttttccctctgtaacctttgccaccctgtttctgttttagctcctactcccattttgggggggcttccaaggaaggtaaagaacctgtctgcaatacaggagacctgggttcagtccctgggttgagaagatcccctggagaagggcatggcaacccactacagtattcttgcctggagaatcccatggacagaggagcctggtgggctacagtccatagggtcgcaaagactcggacaggactgagcagctaacactttccctttcccgtcttgcacatcgctccaggcactgcctgtctcctccctcttcctccctgagtgtccttctgtcctgggaattttgtcataggcggtctctacgtgccctggcgaagcttctagctcagacagggttcccgacaccaggactgaggggtctccctgagtcttttcctcggaatctgtggtcaacgccctcccacgcgacctcctccccg

SEQ ID NO: 37724 - DNA, 852 bp, Bovine  19866881787506
  misc_feature (1)..(1): n is a, c, g, or t
nagggaggagattggaacctggggaaaccgggactcgctccgagaggccgcctttgagaagaaaaacccggcgtattctggggtagaagtgggaaggtgatgcctttgtgactcagttttctttccccaactccgggtcacctctgaccctgtttttccaattccaggcgtaggtacttcttggagaggggcatgtggggccccagcagtgtggttcctcctgcaagtgatgaggaagacaggacccctggagggagacttggagggaaacggtttctgggagggtggcttggagtgaactgggcaatcttacaggcactccaaacaagttgtgacccccaccccacagatccccagagcacccactgcccctctagctgtggtttctttaagagggggtggatcttgatttctgttttgtgctcaaagatttccctttgtgcacgcacttctctctactggggtaggtactctaagctcccttccctgagggtgccatcggaggactggagttgctttggcaactggaaggggagtggctgacagatggacccctgggatggactcttgaggggtagggtctgccattttgttgccatggcaatgatccagtgggatgtccaagagatgggggctcagaatcttgacgggggcctcaggtttttactgtgtccttgggactcttggctgagttctggaggatgtttctggtgctgctggtggagaggaggttcctcggggcctccaccatcctccatccaggtgtctttgggaacaagtagacatattccttgcagatcatgtgtgtttgttcaagtccttcctcttaggcagggggaggatagaaacgct

SEQ ID NO: 37725 - DNA, 1398 bp, Bovine  19866880661157
  misc_feature (1)..(1): n is a, c, g, or t
ncaaactagccaggtctttttaccattattttaggggtaagaaaatggaccagagaaataatgtaaagtacccaaataacccatctcctacatagggagctagattttgaacctagaattgaatgcctctaatgaaatttctaaaggaaaacccactaatattcatgtcttataaagaagagaaataatatttagctaaggagttcatgttaaaatgtctttcaaatataagatcttttaaaccatgaaaaaattatcaggtggaaaaaatgtgtaggatcctggttttgaagagattcataactaaggcataaaagttaaaatctatatcctaaggtgaaaatgttttactgcttagcagttttgtgacatggttatgtttgtacaaattgacatattgattttaagatgtaaaaaaaaaaattcagtatttttcaaaccaaatttctgtttaagaaagacagaatcacaatttgccttaaaatgcagtaaactgagactgagaatttgaatgtttaaaagctgaactttctgagaaatgccagaaatacaattatttagaatttgactgttgctgcctcacattgagcagtatttagtcccttctcccttctctgtgtgtgtgtgtgtgtgtgtgtgtgtgtgtgtgtgtgtgtgtgtctgatgtgagagaatatttgaaatgtgaaaaataacctttttctttcccctatccctgatggtgttaccatatggctttagcagttggtctcatccttttcaccctcctactatttatttattttaatcactacttgtgattagtaaaatgaagggctctatgtgtctattcctggctgtattcttgctccgtagtttggcccctgatcattcaatttcccttagctgcagagactgccatctttaaatgagcataatgttactcaccagttgaatgaaatccttaaaaatgatatttccttatattttaaaagcgtttctattatctgtggggttttttcctcctaaatttcaaaaccatctgtgccttctcatttatgaccaagacttttttgagtttcaaatttgcttagagctgacaaaacacaacatctggatttcaattcaaggaggaaggctcatttgaaagctttttaatgcccctggaccacaatgagatcaaattgaagaaatttttttatgagttgagtgcaaatgaattagaaacatgtggattaaatttctcttaaacctcaaagggaatttaaatattaagggaacgtgcttttctaactgcttcttgacttctgccaaagtcagaacacttgaaaaaagagttggtgatatctactgaattcaaatgtacccagattttcttctctaatgtataaagaacattggatctttaataaaggggaa

SEQ ID NO: 37726 - DNA, 2069 bp, Bovine  19866880723416
  misc_feature (1)..(1): n is a, c, g, or t
naggatttaaaacaaaacaaaacaaaagaaaccaacccagaaggtactcatggaaaacagagaacttggggatctaggaactcttatgcctctgcctgggagcaataaccaacgatgttttctcttggtcatttttttcagtaaaaatgatatgccacagaataaaagcagctaatccacaactaaacaaccaaatgggggctttcctggaaatcaaccatcataccttggtataccttcaatcatactgaaatcaatcaatcataccttggtatacaggacaggtgctggatgtgaatttgcctttttatcacacagaatattggaaaaatgtgttccagaaatgagaattaatcagatcagtaattttctgccattgccttgatttgcggtaaagtaccagtgatttggggagaaggccatggctatgcaccttcaatgcaaatatcaacacactacaaaaggtgaataacctcttggtattataaaaatagtttcccttctgcagatccccaaaagggtctcagggactcctcacagtctgcagaccacactttgagaatcaccacactgtgctgctgctaagtcgcttcagtcatgttcaactctgtgcgacccaagagacggcagcccatcaggctcccccgtccctgggattctccaggcaagaacactggagtgggttgccatttccttctccaaagcatgaaagtgaaaagtgaaagtgaagtcgctcagtcgtgtccgactcttagcgaccccacgggcgacagcccaccaggctcctccatccatgggattttccaggcaagagtactggagtggggtgccactgccttctctgcacagtgaggtttacatgcacctaattcttagggccatgttctttagaatttttattttattttttattatttttaaaggttttattttttagagcagttttatattgacagagacattcagcagaatgtagttttcccatgtatctcctcccttcacatgttcagcctccccacaatcaacaccagcgttcttttatgcattatagccttaagtttttatttaaaaattagtaagttttttcaaccataaacataagccaatttaattcaaattggccttgttccttttcagaaatttccctctatacaatcactgcctctgaattctagaaaataaagagaaatttgaatgcatcaaacattacttcaaagtttttggtggatattagatcgtgcttacagagcagggcagggcaaatagtctaatattggagaataagaggcacaaagcttaagacattgttgagatttctttgtagccaaggaggggatgaataaattataaaggagatgtaaaagaaaggcttgaaaaattaatggaggtgtaagtgatcaaactagctgtgatctgatgtgaagtcatttaattctgattatatcagagaagcagcaaccatttatgtcaccaaaaggtgccaggcaacagttttttatggtaatgccacttcaaagcacccatatttatggcatgttttgcaactgtatgttgaatgtatgaacatatacaaggtatattttaaaaaataaagcttctagttcattagttttattaattataaaatgactttctccacactaaatttataacctcctgatattcttagtaacaaaaaaaatcagtgaaaaatacccagtgaaaaataagtaaatggaaatttatagatcttcagtgtttggtgattcaaacaaagctcagtattaatcttgatgtttttcatggaacgctcatgtaggttagatgatgcataggtattggtgttcccctcagctctgcctcctccaacaaataattcaatgaaattagaattgaatttttattttagtgaagcagaatgtcaatgccatttacgtaaggatccaataaatatcttgagtttccaaaatatggtgctggtattttggatgcttgcagtaagccaataagtggttacaagttctgattccatccatgctgaaacatgcataaagtctcatttgctcagggcctctcagctccaatttaga

SEQ ID NO: 37727 - DNA, 1091 bp, Bovine  19866880783852
  misc_feature (1)..(1): n is a, c, g, or t
naattatataattaatcactgattaagtttaaagacaccttaaagtcccctgtctctaacatcaaggaattaaaggaaattttctaagatcacccagggaattcagtgttaaaggggaattttaggataccgttcttttaatttttggatgtactttattaaacattaaactctattctgcaaagattttcataaaatttggggtgaattttccagattagtaccctctaagctccctttctgaactaaaatagtaaatgtttagtaatttgctctatttttaaaagaaactaatatttttttccccctatgtaccagtcattttatcagtggggaaaatattttaactaagagtttaggcatttttattcaatatcttgatctggatataatgtgaatatctgatgtagctttaataaaatgatttagaaaagcattttttaatttaattcaagtgatttgctcatcagaaatttatcatgagatttgtttctctgagttacccttattgagtgatgatggttaacaatgcttttaaaacattcatctattgatggtttctttgagagctggtttatttaataaatttcaaattctctcctccagtgtttcccctgaagcatttcttaaaaccagcttgtagtctcattattctccagctcatcttattatagtaagaaagcaaatattattgaattggaaaaggggactgaaaataagcagtgagaaaagtcaacaaatgtctcctttgaattagagctaaaaaataatgaaatatatgaatactgggatcaaaattgttaaaacaatgttattcatgtttttgatagcaccagaatcttgaatcccttatgatggaggctggtctctccaggtaactgggatcatgggccagtttcactgggcagcatttagagcaccatacgcctttccatatgaataagagattgttaagacaatggagttagccaaagcaaaggctataaaggaaaggcaaggtccacctttgagggtcatttagggtgatgaaccatcttgtctcacctgagactgatggagttctctggatacagaagtttcagttttaaaac

SEQ ID NO: 37728 - DNA, 1590 bp, Bovine  19866880802774
  misc_feature (1)..(1): n is a, c, g, or t
nttaacgacactgaaaagcttgggaatgggaaaaaaacactctgctaattgccatcacatgtctagcaatgtcagcaggctacagaaaaactgttctaagaatcagcacttttattattgagtcagcatttgagacagtgatattagctatattatttccatagctttataactaagcaatgagagaaagctctaatatcagtcataacatgttattagaatttgcttatattaattgaagacaaggaggtatactttgcttgaaaagtatactgtactgcaaactggagaacagcttttattcacattgcaaattgtgtgtgtgggccatatattaaaaatctcataactgagttagtcacatatgcatgaaaactgttttcattgttattgtgtgtgtgagtgtgtgtgtgttttggaaaatttgtcctctcactgcagagtttaggcctgcgctctttaatttgcatttgtatgatcaagattaaattcagcagatggctttgttaatactaaaacaaaatataaaatcacctatttttgatgccaacttctttctgcatttgagtagaataaaaaagtgatagaattctacacggtggcaaacaggtcatcttggggtgaatctttgctttgatagtcagtactacctttcaatttgatcctattcacaactctctttcagacattttatctgcttttaccaaccctgtgttatttagctattcactgttactcagaatttcaagaatgccttagtagaaaaaccaaagtcatccatgcattggttcatcatataagcgtaaagtgataaaatgaactatctcatctgtatataatataaatgcaaattggaaggaattatgaaaagcttaaaggttgtctaaaaatcacatcccatttatatggcaatgattagttaataatttcctactgattaaaggaaatttcaaaaaaaaaaagtctccacattcattcactcattagttgcttaaatgttggaatgtttcatgtctgtcccttgcacacagtgccaaaacctgtgtggcctcagtttctatatcttttcagaggattagagtctctgaatttctatatgtgcacacatattacaaaaagatcaaagaaagtttatacttaccattgagctaacttaacaggaaaactatgtatttaatttcaaaacatttacttaaatatactaaagtatatgtaccatattcaacacatttctagtggcaaaatatgaaggaaaacacatatttatgtaatgtgaccctcttcaagtagcttcttctaaaaattcacatataaaatttccagacttcctgtcacagatgagttatcaaaataagtcttatttttatatcttctacccaaaaattatactactataagtaacttcaaatacttctgaatgttaaattaatagcatagcaaatgaaatgtttataattctgggaaacgtaaagaagaaagcttcttcaagaattattaacatctgatggggtagaaacagactaacatttagggccagaaataactgaaaaagaatcctattactttctctgctgcttggtactactggga

SEQ ID NO: 37729 - DNA, 1437 bp, Bovine  19866880811258
  misc_feature (1)..(1): n is a, c, g, or t
nggatggcagaaaaaaactgtcccatgattatgagatgcaaactgcaacacaaaaatatgctcacacaaggatgggcatttgttttctctgtttacattaggtcaaagggagcaatccacggaagactgctttgtttgttgctcactcacatccaactctttgtgaccgcatggcctgtggctcaccaagctcctctatccatgggagtctccaggcaagaatactggagtgggttgccaattccttctgcagtgcatcttccccacccagtgattgaacctgggtctcctgcattgcaagcagactctttaccatctgagtcatcaggaaagccccaaagactgctttggggtttgcttgtttaaatgaacaaaaaagggaaataaaaaatgcaaagaagtaacccaattcactgcataagcaggaacataatcacattggaataagttagggtaccttctttaaagggattataaaggcacttggaaaccctagaagcatactcctgtagaagaccaataattgcactgtctgagcaaaggagtatgatattatcttttaaattttaagatattaaaagaaaatgatgaccatttactggaaagaaaaaggggcagtgactctggatctatcagatggaaaaggcttgaactggtcctgtgcaatccctcctggtatcagctgcacccttaggaatgagttctgcttgggaacacacataactgaactctgatattgctgaaagtgagatacgagcttaaaaatgagggtgtgcaattcctctcatcaaaaacaaacaaacaaacaacaacaacaaaaagacagagcagattggtcaaaatgctggagcagcaataaagtacaaccaaatggattggaccttggtcaaactgtagggtccacagaaaaaaagaaatagttattctggaaagggcagtgcttccagaagtgatgaaatacctgaggcgcagcatatgtcatctgtcaattatttttaaaataagagctttgaagagagataagttgattatatttgctgtcatctgattggaaggctacacttgctttcaaatggctcttaactttgctccaaatactttcagaacttccctctgaaatgagtttcattactttttccttcaaatttgtaggatccagtttgatcatccatcacttctacatatatggcaccccatggctagtctttatttccaaaagtcatgtcttcctcagggaactaaagctctttctcccaaaacactcaaaataatagactgcagtctccaaagtgaattggtcttcattttgtccttcacatataaagcaattagatgctaaaatgatccagtgtagaagataattgttatcattttacaattattagaatgaggttttcaaatcttaatctttaaaagcaaaactcttgaaaacatggg

SEQ ID NO: 37730 - DNA, 1134 bp, Bovine  19866880824542
  misc_feature (1)..(1): n is a, c, g, or t
naatgaattgaaagacataagaagcaattgactttctgtgaatttacccttaaatcccttcttctttcctaatgtccatgcatttgagcttccagaaccaagtgtcaggaaagatttttttcactgcctggtatttacactctgtctgcattttcactgtaccccaccctcaaagaaaacatttggacttagttcagagttctgaaaggatatttgcattgtagattcccttttaacatttgcagtggaaataacaagagacaactcattccctaatgttcccattaccaagtatttgcctaaaattaattagaaaagaattaatattgtatatgctccatttatagacccaaataccttcttggaattgatgtgatatcatgtaactgtgcataaagtcatgcttttttttcaaaatatagtcagtatgatgaaaatatttattttatttttatttatttgtattaacaaaataggcttttttttgccctatcaaaaaatctggacataatatatttcatatagaaataaagcacatacatttatgtataagaatccctagatagacaaattatacatggtccatgatcgtatagagtttatcatctaatatggtattgagtaattaattggagataagcatattcagaatatgctattcaactatacaacctataattgtaacctagtctgtggcagcatgaggacttctagagaaaataaccttaaagttaagacctgacagatgaatagactctttccaccttccctaaaagaagggaagggctatgcagatcagacagttgtcattgtcagcactgcaggtaggtaggtgtactacccaaatgccaccttcactaaaaagtgtcagccagaaggaaaaacataaatacagtatactaacgcatatatatggtatttagaaagatggtaacaataacccggtgtacgagacagcaaaagagacactgatgtatagaacagtcttatggactctgtgggagagggagagggtgggaagatttgggagaatggcaatgaaacatgtaaaatatcatgtaggaaacgagttgccagtccaggttcgatgcacgatgctggatgcttggggctggtgcactgggacggcccaga

SEQ ID NO: 37731 - DNA, 911 bp, Bovine  19866880899851
  misc_feature (1)..(1): n is a, c, g, or t
nttaaaatttgtgtaataacacttgaacatgtttataaatagttgtcttgactcctgttaaacatatattgctgctatcacaatatttccatatctataaaactatttttcaaatgcaactctggtgtttcatatgcatttttcagtacagtaacttactggctacatggaaacatatggtaattcaggtgtaagcttacctggaaaactgcccaagcagctgaatccccacctagcattctgcttttgtctgataatcaaactcttccccaaactggaccattttggaagctgaggaatacataactgtgctaaggctcttacttagtgcttctcagatctggattataagaacaatttgagatatgaaggagaagactataaaaagaaaataaaaagtaaaaaatagattatttgtgtcacttacagacatttctgggctatatgcttattctattgaattggagttgcaatttcaaaatatgtccaagtaggttgacaacctaagcccttactaggcatctagaatagtattgtttctatgctatggatgcctttcaagtaagcagtgctttttctatttccagaaaaataatatattatttaaccagtgttccatctccttaagttttcatccaagaattgatactaattctgtgccctgtgttctaatcttcaatttacagcaaagaggaagaagaatatagtgtttggaggaaatatcagggtccaaccacaaaaagtatttcacctatatttactttaattcttctcattttaaaaatggagtgaaagtagttctcttacaaggcagatgtttgaggatttaatgaaactggacaatcccatagttaccctacaacacacattaaatgatagtctcttttctctgtggcaaccagagtttcaaa

SEQ ID NO: 37732 - DNA, 2389 bp, Bovine  19866880920056
  misc_feature (1)..(1): n is a, c, g, or t
nttctctgcagcactttttacagtaaccaagacaaggaggcaacctaaatgtccacggacagaggaatgaataaagaagagacatctacataatccaatggattatcactcagccatagaaagaaacgaaatgggtcacttgaagaaatgtggatggaattagagagagtcatatagagggaagtaagtcagaaagtggccttcgagtagaatcagtggtagagtggaatcactgtttgtgtctccttggtgcttgacatctcctctgtggatgctgccccctggctggctctgcctgtgctgctgttaaggtggataactgttcattctactccctttatcaggaaagaaattggtgcactctgtaccatgagtggcagaagccaagtgccatagaacttcctttacaaaaccattacaagtcaaactctctggaacaacccaggaggaaattgcttgctcatcgtatgcttaataagaaagaaaataacaatgacatgttaaaaaatcctcagtttaaagacaggatataatcacatcctgatccaaacccctggtttaaccagccaatcaagacaagtatcattaccatgttcacatcgtttgtctcccaaatcagggctatttccattacatcatgctaagggacagtacggttcttattttaagcaataaattagcagacaggttcaccacctaaaatttcattgagtatccaaaccacagtggtgtataaatatctataaggtgctggattaaacctgacaattagcattcaattaacatcatattcaaatatttctttctttaaagtgttgcatataaaaatgtagggaacaaaggtaaacctctgtgcaaaccaaaggccagtttggtattttgttttgatgaaaatgaagggcggtggaggtagttcagcataaataacacaaatcggttgtctcctccagcctttgttttaattagcattacaaaagagaaacattgcatttattaggcataatttctaacctcagaaagagaatgttaccttcagttccacagtgagtgcaagctgaattactgtttcagctcaggggaggatatatttaggcttgtttgtaaagtgtaaattagagtaagcgttctggtgccataagttagctggattacctgccttgaacctggtgtagctcctctccttctgaataattaagagtttattactgattaaaagtgattggaaagtacatgtaggtccatatacacaaccatacaagtgtgagtgtgaatctgtctcattctgcatgcataaaggataaatgcatttggacagatgtacatgtttaatacattcaagctctaacttcttcagtaaatttgatctcttagtcttttctggtggtgataaaaagaataataacagtaacaataattatagacctcttgagacttggagcctagggagagggttattgttgttcagtcactaagttgtgtctgactctttatgacctcatggaatgtagtactccaggatcctctgccctccacaatctcccagaatttgctcaaattaataaccactgagtcagtgatgctatctaaccatctcatcctctgctaaccccttctcaactctcacatctgtacatgactgctggaaaaaccatagctttgactgtatggacttttgtcagcaaagtaatgtctctgctttttaatatgctgtctaagtttgtcattggagaaggaaatggcaacccagtccagtattcttgctgggagaatccccatggacacaggaagtctggtgggctgctgtccatggggttgcacagagttggatgtgactgaaagcaactttgcatgcatgcatgcattagagaagaaaatagcaacacactctagtgttcttgcctggagaatcccagggatggaggagcgtggtgggctgctgtctatggggtcacacagagttggacacaactgaagtgacttagcagcagctaggtttgtcatagcttttcttccaagaagcaaacatttttgaatttcatggctacagtcaccatctgcagtgattttggagcccaagaaaataaagtctgtcactgtttccattggtttctcatctatttgctatgaagtgatgggactggatgccatggtcttgcatcgtgcatcgtacctggactggcaactcgtctcatacatgataaagccaactttttcactctcctctttcacattcatcaagaggctgttttaataatatcaataacctcagatatgcagatctgagtatctaaactttattgatctaaactttattctaaaagactaccaagaaagcagggatagaagcccccctctgtgtcaaaactcttactgtggtaggaattcggtt

SEQ ID NO: 37733 - DNA, 785 bp, Bovine  19866881011953
  misc_feature (1)..(1): n is a, c, g, or t
ntaactattatttgtatgcaaacagcagcatctagttaattagtggtgctacttagaaattatgggtttctcaaaaaactgcagggtgtaataaaatagaatagatgatcattagctttcagtaatgaagttcatggaaaaaaagcacagccctgcctttgtttaacctacaagagcaaaattaaaatatatagcctgaatataagcatgttacacttaataatattaaatgtaatatgcattttagcttacatttaaacacataagtatatttaaattttcaatcaaacatactaatcaaatatcttagcattctcagttttatttatcaccatacttgtaattggtggccatcaatgtagctaagggaaagtaatttatatgacttgaaacaactgaactgtgctgatgtgctatttagcaagactccaataagcttgtcttattttattcttcccacaggtaataattatgcataatatatgtaaatatgtgtgtgtatacacacacacacacatacacatcttttctcctccaggaaatagagaacattgatagtggacatttctttctttaagatttaaaaatctgttctctttccaagctctcaataaaagaaatttaaaaagcactgtgtaccagagttttgtaacccagtgccaattcttggaagacaagtctcttgtcatcattgttcactaatcctactatgctgacaccctactaggtatgtaaccctggagcatattactgaatttcttatggcttagttttctcacctccag

SEQ ID NO: 37734 - DNA, 2292 bp, Bovine  19866881052130
  misc_feature (1)..(1): n is a, c, g, or t
ncctctaggggctcaaggttggttttaatcatgcttttttgtgctgaccggagcccctctcatatactcttatcaccttgttcctgaaaagtcctaaggtacctgttggctacctgcatatctgttttaaaggagagcaaactgtcttccagagccagatgagcactcaagcacaggactgaggtcaggacaccgttgtctgaaggcagacactgataagttctcccagggcaggtacaggtttcagtcacaagcatgcagtccctggctctgccagaacactgtcatcccatagagagctatttggtgtctgtctgttgaggtcttcaatgccatggacctgggcctgcacagagggtatcttgacacacaccagacacgcagtgctcacgagaggattcccaatgtgagcagtaactgccagcgcctcaataggcactgtggataaggttgtttgcaataaggctatttgtttcctgttagtttgcaatagccaggtagaaacaggtaatgaaaaagaaaagaggagaaaaattcaaaagattgagtttcttggatctcccagaaaattcttggaacatggacatttttatcttggcccagcatcaaaagattaggtcacatagcagcaagacaaaatttttaaaaccaaaggaccctcaatcaaaggatgtctcacttgacactcggtaatatagtcatagactagatgtcaatgtaaaaaaattcagtttaagaaacaaacaaaaattacagatttatattgtcaatgcccctatatagagaaccctcatcattatatttctattgattactttttacatccccttttaaaaatgtgtttatcagttatacttcctgcagcaaataattaaagcaatagaaatagacaaattcataatcaaaatatggcttgaagaggatattatccagaaagggggactgggagaatccttagcagaactttgcttcatcagtggtggtgtcaaagggattgtgagggcaatgaggtgttcacccctgtgctggtaaaggcaggaagagtttttggtgttagaatctcagtaggcaagagtgtttcatggctgagtaatattccatcatatatattactcagccgtaaaaaggaacacgattgggtaattcgtagagatgtggatggacctgagtctgtcatataaagtgaagtaagtcagaaagagaaaaacaaatattatatattgatgcctatttgtggaatccagaaaagtggtacagatgaacccatttgcagggcaagaatagagctatgcacatgtagagaataaacttgtgaacacagtagggggaagaaaagtaagactgatatgtaaaccttaccatgagtaacatagctagctagtgagaacctgctgtacagcacagagagctcagcccggtgctctgtgatgacctagatgggtgggataggaggtgcggggagggagtttaagagggagggaaaatatgcatgcatatgactgagtcaattcattgtacagcagaaactaacatattataaagtaattatacttcagttttgttttgtttttttaataaggaaaaaaaaatttttttttcttgttttacaagattatttctgtaaagggaatcccctttctctctcctggtttgctgatgtgaggaaattccttccagcacactccgctcagttccttctagccacagtttctaaaaatctctacgtaaggtgacatttctcctctcaacacttctgggaatgcctgccatatatagcatcagattatgtatcaacactttggattacatcattttcttgaacacaatttcctatgccaataacacagaggctactgccttgcataattcctattctcattgaaaatggagatattagcattaatacacaccaagcagttattttttttgcaaaaatagaagtgtaggattgaaagatttttatttatattttctttttctaataccaaatgcctctgtttccctctctgctgggctgccacctgtccccagcagatgccttctgtattaatccttcgacagtgaccattgccagctgattccttgaactctcagtgttcttagcaggaaaacttttctttcctggagttattctctctctctttttcaccttctctgctattttagttcccttgttatacccatcacctatttttccttttccagactacattggaagaaggaaatgaaattataaaatacttggtaatctgtaaaattggtttatatgcttccaaaaaatactaccttctc

SEQ ID NO: 37735 - DNA, 564 bp, Bovine  19866881064092
  misc_feature (1)..(1): n is a, c, g, or t
ntgaaaggtgaaatgcacaaatgactccaaatagatcaaaaggccttgcttgctccagaatggcactcccctcagtgcacttggcgtggaatgaagcgtcatttgaacataattgatggagccgagtgagagagaatttcacaaagagatctggataaataacaggctcagctccaaagtgaggtgaagaatgaaaggcagtttgttatgaagtttagggcatttgggtttaattagtgagataaattgtgaccaaatcacctaacctcttaacctttaaaaagaaaggccaagcttgaaaattttatataccctgaccttgaagaattaaatacattttttaaaaatctctttaggttatagttctcactgagtagtgaataacattctgtgattgggacagcttttaacacaggagtggtgttatcatagctatgctatcattgtgccaaactacatattttaaagtgttattcatagaaagaattagaagataacttagaaataataaatctaatatcttaccaaagggtccaagcttctttctttgcctcattggaaggg

SEQ ID NO: 37736 - DNA, 863 bp, Bovine  19866881179817
  misc_feature (1)..(1): n is a, c, g, or t
naggagtgaatgcacaacctgaatttctgcagacagtgctgtaatcagccaccccaaactttatgaagtagacatatatttctgcaatatttcaaaataatcaataaggtagtaaagcttttccaaacaatgcttacacttaagacatgttgtcaagtctccataaaggtgtcttatgagagctcattctctacttcaagcttgaaaaacagcatgttcttttgtcttctctttgtcttctttctgaaacattctgtactgtgcaccttcagagaaaaaataaaaagcctcgattttatttaagccactgttattcttggcaccaaatcctaatgtatgcagaaaaagatgatgttctattcccaactgatttgagttgaatgtcagtttgaaactataatatgtggtgtcaggatccaggccatttctcctcctataactgatgggattttcttttttttcaccactaatcattgctaaattttattgaatgcttactatgtgtcatgcactattctaagtccttgcacaataatttcataaaaaccttagatgcaaccctatggaacagctattacaattgctcccaattcattatacaaagccttcatcacagagaaattaaatatttttcccaaggtcaaaagggccactaaatgttgagactggtatgaaccatgtggactcatgaggcaatatccactttgttaatcattaatggttaagatatgaccagcatagttttacatggggtggcggattcagctaaaatacagagaggcctttagcctgactctataaagaccaagtctgcacagcatcttagaatttatttttaatatactttaagcttgatttatatt

SEQ ID NO: 37737 - DNA, 868 bp, Bovine  19866881180305
  misc_feature (1)..(1): n is a, c, g, or t
ncgttgtgtttttacatttagaggtgatgaatagcaacctcatttttcacataggattaattttctgagattcctttattgcctctgcccaaagaatcaagtagttaatattttctaattatccttccaagatccttttcacattagtctttgtgtcccactatgagacacacagggatttaggcctactatgtaaccctctacaggtattaaagaaggtttagttgagaggcattgggacatatgttgaaatgcctcctgaccacacatgaaggctattttatttcaatattctgagaaagcaaataaagcacagaatgattcaccaactagaccgggtctcagagttcctttgttgggaatttagactcatactcagcttgtcagatttaaaggcctatgttttatatgtaatatcacacagtccctggaagttgcagaattccaaccataatggggtaaaatcacagacacatgtcagatttagcatttatcatcataatgttcagcacaaaaatttatccccctctgcatgcaagacactgccattaatcattttgcctttttctcacacaacacagcacatgactcaagaagtctaacatgagaatggaatttacacttcccatgataggtccatttttgaactgtatagaacagattcacctctaatgctacccacctcatgtgaagagttgactcattgggaaaagactctgatactggggagggattgggggcaggaggagaaggggatgacagagggtgagatggctggatggcatcactgactcaatggacatgagtctgagtaactccgggagttggtgaggacagggaggccggcctgctgcgattcaggggtcga

SEQ ID NO: 37738 - DNA, 1215 bp, Bovine  19866881270681
  misc_feature (1)..(1): n is a, c, g, or t
naaatgtagggggtctcatgttctatattaccctggttttggtttaaaagactgtttaaaactctaacaccgaaaaaatgatacaaaatttttaaaataagtgtagaaaaactatgagatgcagataaagatagaagaaaaagagcagccttgtcacttttttcttccttgataaatactaattagtaccgattgggaaaaggtgaaattattggtgtgcccaggagtaggaaaaagtagatcttcttttcatttgactttgaatgtaacagaggaaaatatggcaaggccacacctgggaattgaaattatattcattaggagggctgatggagatggaagagggtataactgggagcaatgctgtgctgagtaataagcagacagctcccctgaatctcttctttaaagcattcgcattgctgtgatagggtctggaaataggactttagtgtccttaaatgttcaaacctttgtatttcaaacctgccactttctttcagtataatacaggcaaagagtgtaataggtagattggccgatcatttttctccataaatcatcctgctattccaagattttactggtttatcctctaacccattgaaattttggcagagaacatgatgctgaatttaaagttttcaaagagaaagtagataggggtcccagctgctgttggagaacctgcaggttcctctaaagcaaagaagactgcatttgaatgacttcaaattgtgctgataatggtgtgagaaatgctatttcacatccaggatattaaaaaatatatatcacagctttttctctcttttctctctcccattgatttattcatttttctatattaaagtattattgaatttgttatttagttcctctgagtctgcactcttatcttctttgtctaaaattgatataaagaataaactggatactaaatagtaaatattatttgatttagccaggaattatattaaaatcatagagctctctggacatataggtgtttttatttgactagtacaataacctgaatgtggaaaggaaaaggagcagtgaattattggagctaatagtaatcagcttatattatttaatagcctgcatttaaaaagcttttctctttttaactattctatgatatatattattgattgatcatcttaaaaacaccaagtttaatatctcccatgtaaatactatgttggcagc

SEQ ID NO: 37739 - DNA, 1268 bp, Bovine  19866881297407
  misc_feature (1)..(1): n is a, c, g, or t
natttttacacaccaaaaaaaaacatctttaacatgaaatctaaagttaatgcaaaatagttcaagctgatagaattttaaaggatttaattatgaccattagaagttagaattggaaatagacccagtattccagtgacaactgatagaaaagtatgtcagagaccatttaatattttgctgacatccgcacaatttgttggttctatttatgtagatatggaccaattgaatcaccaacagagtagagttgaatccgaatgttccctttcacctaactgtgtaagcagtatgctatgttttgctaacacttttgagtttggatgacgaaggacctcagattgatgtttttatcctggtgggttttttttttttttttgcccttattttaatagaaatactgagctaatgcagcatatctgctttgggaaccactgtttttcactttgtttataggcttgaattcactgggcagctgataatatccacattatgaacaagtatctactgcagtttctcttacttgatttttcactggtttaactgaacatcacaaaacacagcccaacaaagcacctttgttgcaaggtattttgttaaagatagagatactttactattacccttttacttaccattacccctatgaccttctggcatatgctaaccataaagggtctgtgtcctaccagtccatcttttatacttttattcatctacgtgaatctaagaataatatgtaaatgaataacatgaaccacttatctaaattaaacaaaaggttatattacatcattgggacaaagaatgtcatagtcaagggtaagggttatttaatgtaacaagatgttggttttatttaaataagttcaaaagttgttgagacagctactgacttgaatggtggaaattgatacattacctcaacaaatatataaagcaggcaagaaataattatttatttacattattcagctgataaaaatttagcccaggaactttctcctaatcacatttagcaaataaaaacagaaaatccttgtttaaatttgaattttagagaaacaatgaataatttctaatgtaagcatgtcctataccatttggaatattcttacagtaaaacaaaaagtaatatctaatgttatataaggtttaaatatagctggggattctgtatattatctggcagatatacccagaatcaaaatagagctataagattaaaaagcatgtcttttgatgtcaaattcatgaatttacaaatt

SEQ ID NO: 37740 - DNA, 1491 bp, Bovine  19866881297568
  misc_feature (1)..(1): n is a, c, g, or t
nacagattcttacagagttataagagtgaaatcatagtttgcatttttactcatatacatgtattttttctattaaataatgtggggcatataaaaaacaaattctctatatttaaaatgtaaagaattccccaaaagtctgaaacatatgcttcctcctcctgtctttcctaatggtgccaagccacatataattttaagttaagatgcttggttgccaacaccttaaggaaagagcttcttttgctcatcatgttgttcccaaacccaacattggtcaataaaaatatgtttgaataaataaatagaaagtatcacagctagtagataagtggtatattgtaatactaaatataggactgtaacatacagtagtatttaaaacctaagtttcatgaaagtagtgagggaagctggctagaaattaaatatgtaactgatatatataaaactgtgaaaatcttcttatggatgaaacaatgtatgtacatgtgggtaggtgtgaattatacatttccatctaataccttgttgtaacaagataacaattagattagtagcatattgtaagatctcatgctaagaaaaaaacttcacaaaaattctatctttccatattgctctgttatataagccagctagaggagactgctatcgttttaatatgaaatactagtattgttggtgtggcagtaaactcagtgctatttatgacttcagatttagatataagatgattgctgaactttagtttctatgacttctacaagcattaagcttgattgaacctcatgctattagtactgacaaatgaatcaacaaaaaatgttgatgtaaatcaaaattatagtatttaagacagtatctgactctacatttagtctagcattcacaaagtacttttgctttaatttagaaatgatatttagtaccaaaacatacaaagtaatcttggtaattacttgtaaaagtgttcagtcatattacaggtctttactgttcattgactataattatgttagatatacacaataaatatctgacaagtaccataagacaggtgtatttttcattctttctgtcactgaaacaacaattttgaaaatgtttagttgtatgtaggtaagcaaagtataagaacacatttacttaaagatttggaataaagattaaaactcacaatgctcagttgaatatgttgagaataaagaatttcagcttgggagttgctaacaatcattacattttctgtatttctgtagcacaaaactggaggataaaatttaccattcataatagatcaaaaaataaaatgtatcctggaaaatttcaatgaagaacatgcaaatcttttctgaataaaagtataaaacattaaggagggatataaaagaagacaaataaatgaagaaatattgttaatgaataagaaaaagtggtggtgttaagatgacaattaagttacactattttttcattcctaaaaaaatc

SEQ ID NO: 37741 - DNA, 1435 bp, Bovine  19866881327754
  misc_feature (1)..(1): n is a, c, g, or t
nagggatctagccagggaccccctacagtggaagctggagacttaaccaccagactaccagggaatttccagtttggtttgcttttggtttggatgtataaaaatgggctggagtaaattacagcatgacaagtgcaggggaaatgaatgattcttccttatttagtaagaagagatactaactccctggcagtccacgtgtgagtgtggaaagaagagaaatgaggaaaaacgaaaaggaaggtcatcttgagagaatatgaaataggcagttatgaccaaaaaatagtttttcttttttttatggccttttttaaaggccagaaatttaatatgcatttttaaactgttgtggttgttattaaaccaatttcctattatgccccacctcccacaatcccagcagaagcccattctatattttataaaatacagtgctttctgtgaaacaagatttctaagggatccaagaaaatgatttcatctcatacttttcagaacagagagagcacacacagatgctggttcagaaccagagtcaacaggggatggcaactctctactctcccttgttcgccatccaacatttgttggctgaaatctgcctaccagagggctttggattcccattgggatggaagagtggatttaatgatatctatttgaaaggctctagaaaactccagctgacatatctgtaagttatataggtaatacaagtatcatgaaaatacatatcagcacttaaaagagaaaaatatgtaaataattagaaattcatcttttctcttttgcctgtactatcatgaacattagccactgctacatgtaatgaagtgtggaagggaaagggtagagccatagactcagagttagaaagagactagtctagtaattttcaagattattgctgtttttgaaaaaggattatacagtttttgggatcttatatagattatcccccacttcccccaaaataggataacctgctctacttcatcaccccttgtgactttaaggaactcagtttgagaattgtaagtgcagttcagaattcacattttacatatgaagaaatggagtgaatagagctctttattgccttggctgcaaaccaactgctgcataaggcattatgacaacccagagaatagcgaaatgtccatgaattatttttatagacattatgagataggttacatttaataacactgtcttgtccatggctggtttttaatccctttcataatgccataggaaattctagaacaatatttgagagtgtgctgcaaacccaaaagtttgaatcttaaattgccaaagacaatcagtaatctcagattctcttgaaactgtctcagaatcagtctctttggctttgtcctgttccaagactagacagaaaacatgcttattgagaaagtatcagtcatta

SEQ ID NO: 37742 - DNA, 1374 bp, Bovine  19866881430609
  misc_feature (1)..(1): n is a, c, g, or t
nagaaagtgatgtgtttttgccaggcaaggatactacacaagcaggtaatgggtcttaaaaatgttgcaaatgttaatggtgttagatcaataatattactaccacaggtaaaatgctattacatatattattaagacattgctcaaaatggagtgactcaaaggacttggagaatgtatgagtaattgcggcaccatttatataataaaatgctaatggaagtttcgtcatacaacatgctgtgtatattctttccccaagattttacaaatggcagttttgcattaatgcatgatacagacccccaattgctccatcacatttcattttcctcctaaacatgctgctgctgctgctgctaagttgtttcagtcgtgtccaactctgtgcgaccccatagatggcagcccactaggctccccctgtccctgggattctccaggcaagaacactggagtgggttgccatttccttctccaatacatgaaagtgagacatgagtcaactcagaatgcagaagatcagagtctttctctactcattcattcaatttccccagaatctcttatgaaataaaaggtaaaatagtacagtataacttatatgtttaatttttctaaatatttaatgcattgcctaaataaaactggccttaatactgtcatctgagcagagtatatcaaatggtagctccagagagcattaaaaaaaaacaaactttctatttactagttagtcccaaagataagtgattatgtttaatctttaacataatctttctttatttgctagctggtcccaaagataagtgattatgttctttcaatgaagtcaggaaaacatgagctagagctaaattacttcaatgtgttaagagttttattcaaatgctattttttttaattaactttgtccttacatgttttatacagataatatgtatacatagatgataaaaaattaaatagatgaatggagagctggacagatatgtaaagatctttgattcaaactctgtagctctctttcccaaaatttttacacagttgcttacttttctctattgatttaaatatgtaccattagatttattttagctgaaattctgtctgttgaaggaaaaagtaaagataaaaaaagaagacagaagagaaggaaaagaggaaggatgaatggaagaatgaaggtgcaaagagaaagaaaaaaaaaaagaaaaatgaaagaatgaaagaaggaagtcagataaccatttaaataaggggtgaaaattccttagccaaaatatgcaaacaaaggccagatatgggtgagatcatgttataagctttcaggaagactctttccccataacttatactcaattctatttctag

SEQ ID NO: 37743 - DNA, 1117 bp, Bovine  19866881506236
  misc_feature (1)..(1): n is a, c, g, or t
nttctttataagaactctatcatttaatgtcttcaaccctgcatgtacctctgtctcttttatacacatagaaacattatcagataattatcatcatatgatattatgttgcattatgataatcctgcaacatggctaggatgtaggagggaaagaatgccacatagtttttacagacatattttctgagttattaacagtcatggcttttatagcagatcacaactcaacatttgaaaactttttatgcttggaatagtaaatcataaacagacatttttgaaggtccctctgggcacctaagagcacttctagtggattgaaagcaactatatttgtatgtactctcaatttctctaatttaagtgacaggaaaattgtcaaggcagatgtaaagtcaatcatgctgcagttggtgatgatggcctttgtcaaaaagaggctccaaattcagagactaaatccatgagaatgttttgttgttgttttgtcttacaaaattttgaattttgggctctcaactaagaaaataaatgagtcttatttatccatagttgtcagtttgaacattctccatgggtggcttagacactgtctcaaccaagagtcccaattgtgacaattaggtatcactttgaacttgaattatagtcccagtagtgaaaagtcagagctttatccacttaacagttaatcttctttgttctactcattcaacattattaggcaaggagaagcctttctatgcctgctgccttcttcctttcctggataccaccccccaccactcaccatacagaccttacacacatgtacctgtatgaaccagtgtgcaaagattccccatttgaagctaaaattttcatgcatgaaattcttttttgattaaatctctaatgctgtgagaatcagagaatatccttagtatttctcaattggaaaaatgaacctaccactttcaaaaaagggtgaagtttatttgttagaggaatgtggtgagcctcaaactaacatttcgttagtatcatgtggcaggtctagtgatacgtgctctgtataaattgcctatataaccttcaaaaattatattgaagttagtatcattagttctcctcta

SEQ ID NO: 37744 - DNA, 1585 bp, Bovine  19866881545136
  misc_feature (1)..(1): n is a, c, g, or t
nattcaggtttattatactccaggggctttgcttcttaactataattccacatggtaaaaacgaatgcagctatgaatttttgactgatgtactgacactaaagctgtcgctaatcatatttatgactttttcaataaaatctttaaaaattttttctcagagttgagtgataccccgacacatcagaaaacacaaatttgagagatgactatagccatcattggattagatataaattaagcctaattactggagtctagtaagatcggaatgcagacctgcagaatgataatgggattcagtagacatacattctgggctccagagaatggggtgataggtggcaattatcattagtgacttttgaataaagatgttagagtcttctcactcattagaccaaacagtttaatggttattagaagtggctgtaaaaggcactgaaataccatcagaaagaggggtaatgattattattgcagcaacctattatttctataatggccctgtgattaagaaatcaacatcagacttttttcccatcagctgtggcttttaaaagctggtggcagtggtcacaaatcaaacttagaacagtttctatacctttggtggaactcacatggcatacaccactttcttttccaactgtgacattaatttgaatattatcaggggaaggtcaaaacaggtcttcaataaatcacttcaaaagtttggtcagagttggaggcatacacacagcattcactatgaaaagaagactgcagttttacattcacaatttgttaacaaatctcttaggaacaaggatatatacatggctgtcatttttttttttttttccctacacactggttgtaaatacaagacatgggaatttgttgaagagttacacatcataccatgagaaaaacaacacccaaattctatgctaggagagggaaccgtgtagactacatagtaaattaaaagaggtaaaaactatactagaggacattatgcttaaggaaacaaattctaattattttgaataagactttgaattcttaaagtctgacctaaatgacaattttaattggatatttacaatgaaaaataagtagaaaacctacaagcaataagtcaatgattatacacttgctaaaaacatgtgctcggcattttttaaattctctaattaaatcctaattaggatgagcactggagtgttaatttttgctagctatacctctggggcattttttacaccttcaggagcctaggcttattcagatatgtaagagataattattaataaaaaggaccactgtgttgttggctcagagagttgcttatttgtgttttccgcctctgcctgaacagcctaggggacccctgtgtgactatgaagagtaacaccttcctcagctaaccaataggtaaagtatgactttttctgcatccttgagccatggcttttcttccaaaaaaagagaagtctgtttagatgctcagaaaatctgaacataaggtgaagagtcaaacaggagtattcaaattttggttccacttaacaacttagcgtgctaacattaggttcag

SEQ ID NO: 37745 - DNA, 1651 bp, Bovine  19866881825682
  misc_feature (1)..(1): n is a, c, g, or t
ntagtgggttgccttcccttctccggggatcttcctgactcagggatcaaactctggtctcctgcattgaaggaagactcttgattgtctgagccaccagaaaagctctcaaataatataataatatccaaattatgaaaagttatcggagaaggcgatggcaccccactccagtactcttgcctggaaaatcccacagacggaggagtctggtaggctgcagtccatggagtcacgaagagtcggacacgactgagcgacttcactttccctatgaaaagttatatgaatggaacagaatgtaaattattttctaaaataaccaggatattttgctataaactttctggaaagtcaataaattattttaatgttattcatgtgtctgcataaataattaaaatatgtatacatctagaaataaaatgaaattcaactaaaatggcaaataaggggaatgatagttatataaatgacaaagcaatgaataattcttacaaaagaataattaacaaatgtttgtaattctgaaaatgtctttgttgtttaaaaaaaagtattatatgtcaagatgctaaacagtagctatttttgtccttttcaaaacagttctctgtttttctgcagccaggaaatgttctccacttttaaggactgctgtaattagattaaaatgttggaaaattgcaaggattttctattattgtcataacaaatgaccacacatttagtggcttaaaataaagcagatttattaccttacagttctggggagcggaagtctgaaataggctaaaatcaaggtgtcggcatgtctgccatcctcctgatggtccaaggagcatgtttccttcccttttcagtttctaaaggccataggcattctgtggtcaacagaagatagaggcgatcttcaaattcagaagtttataatcttcacttccctctctgactcacttcctcttctgcatccttcactcactttaaaggaccctctttattatattgagtccaccctgataattcaggacagtctcttcatctcacagtccttaaccctgaccccatctggaaagtcacttttaccatataagtaacataaacaaaagttcctatgactagagaatgaatatctttaggggatccattattctgtcttgcataatgtgttaaacttattagtgagcttaaggggacttttggtatgtttttcgtcttttcattttctgaaaagaatacacaattatttagttatacaactaaaaaataaaaaaaaaaagataggaagaaatccaaattgaaaataatgccctagattaggtgtccagagattcacattcataacggtgcctattctggtaactctttgtatatctgtgagcaagttactttcaaggttccgctatttaatttcttaatgtaaaattaccgagtttaaaatgaaaagatgtacaactttcatctgaggactgaaaacctggactaggactccgcaactttatgagatagctctgactggaatggccatgtaggcagaaaagcaagcgaatgttctccagcagaacactaaaggcactattaaagttgttgctaagtctgttgggtgttatttggaatgctttctctgtgttttccatgttcacttgtattg

SEQ ID NO: 37746 - DNA, 1496 bp, Bovine  19866881843171
  misc_feature (1)..(1): n is a, c, g, or t
nattttttttttaatctcatgctgaaccatttcattctcttcacctttgtaacctccagcaggtagttaaaacctataattacagctccagcagcaaagaacattcaaattcattccactccttaccaaattctaaatgtgatttctttggtttcctatggttgcttggttacatttcctgtttgtccaaatgaattctgataaagcagaacaatgtaagcatgctcaagtatttgtaaagcaagacctttaaccataggggtgtatatccttaccccttatctttgttttcaaaactagaagctgacaaatattgtacgtttaacacatatattttgagtctaggaaatggtatagattatcttatatcaaaagcagaaataaagacacagatgtagagaacaaatatatggataccaagagggaaggggaagtgggaggaattggaagattaagattgatacacacacacagaaagtgaaagtcactcagtcgtatctgacttcttgcgaccccatggactatataatccgtggaattctctaggacagaatactggagtgggtagccgaaaccttccccaggagatcttcccaacccaaggatagaacccaggtctcccacactgcaggtgaattctttgccagctgagccacaagggaagcccaagaatactgaagtggtggcctgtcccttcttcagcagatctttctgacccaggaattgaaccgggtctcctgcaatgcaggcagatactttaccaactgaactatcaggaaagccctgatagtgatactctattttactatatataaaatggattactaattagaacatactgttatagcacagggaactcaatgcactgtggtgacctgaatgagaaggaaatccaaaaaagtacatatgtttatatatggttgactcattttgctgcatagcagaaactaatgcaacactgtaatacagctatactccagtaaaagccaattaaaaaatagaatccaaaataaacatttatatcttttttaatttcattgactatcaaaatagagattcctattctgtgagtctagaaatagttgataattgacactgtgcatcctagttcccttccattctttcctgtctccttcatctccttgtttccttctctcttctctccttacctattcccttcacctccatcctagtcaccagcagcagctcctgggtgtgttgtttaatttgtatatgcacgttttttctcatattaaactcaacataacaataagagtaacttcacagtattactataaggtctaaatgagttaatatatacctggtacttagaacagtgcaacagaaaaagcatggaatcagcactgacattaagattaccttcattatcacaataagtatcctctgctatacttctcctatttattgcaacatgagtgccatgtgtgcataagtaaccgctttctacactatcttatttaatcataataaaaatt

SEQ ID NO: 37747 - DNA, 1368 bp, Bovine  19866881980256
  misc_feature (1)..(1): n is a, c, g, or t
nttcttgacttgtttataatgtatttctttacatatttgtctgttaatgggtatgcaaatgatataaacacaaaataaagcttggtgtttcccccataagattagagcctatcaggagaaataaatttgatattaaaaaacatctaaagtataatatgtgtaatatcgtcactggataagaacaacagaaatgttctatctcatcacgagatgttcttatctcatcacaactatgagatgaagtaagagaggagagatttggaaaacctgaatgagaaatgaatagtcctctagtcactttctaaagtgagattaaggaagatctgtattagcaattttgaaaccaaagtcagaattgatcatacaaccattctagaagaaggatcctcttaatttagcccatggtgatataagaaaatgttaatagttcagtcttcatctgcaaaaatatttgagtaatattagtaatgatttttttgagggggtggtcatttgcagactctgaattccccagccagggactgaacttgggtcacagcaatgaaagcccagaatcctaacaactaggtcaccaggaaacatttaatcatgacttctgaaatttactttaggcttaatattttttaaaaaatgccttgcctgagaaattttggaataaaaacaaaaataattggaatggttcttaatgtgtttgatattttgaactacttggaagaatctttacaataatttgcatattatattccattctatatagaaactacatttgaaaaaaatgttaattatataatgtctaagaaatacagtttcagtgattcccctacttgttaataggatgtttactctcttgattgtactaacttggtatttttaaaaggataaattttggggagttattcacctatttaatccctgccttttctacttacttggctttgtctgtaaatcttctaaaactattttttcatttacaaaaagagggtttatgttctggggattagtggattaaataaaatgtattcattaaaaagtagcctggtttctaggacctagcaaacacttaacaaatgttccttttccttggataaaatacctgctattatgtctggttgatagtggttattcagaactcatggccttcctgtgaaagtgaaggtcactcagtcacatccaactctttgtgaccccatggactatacagttcatggaattctccaggccagaatactggagtgggtagctattcccttctccagggtatctttccaacccagggatcaaacccagatctcccacattgcattgcaggtggatagccttcctaagtctccccaaaattatagataatagataactaatagaatatat

SEQ ID NO: 37748 - DNA, 1720 bp, Bovine  19866880521934
  misc_feature (1)..(1): n is a, c, g, or t
ncaaagagctggtcttagaattatttttccccgaggaatttaaatacattagtgtttgggttttgacagtaaatttgagactctggacggtgtcacaggatgcagccttctgtacctaatggggctggggtcccacatctccctagaggcgacaactctggcctcagaatgcaaagggccctgtaaacagagaaggggacaatccagtaggggacacaggctccttgtcatcagaacaggtggcacagctgggctgagctggagcctgtgtttctagattctcagccccgagtctaacattcccactctttgttgtcgttcttgttcagtctctaaatcatgtccagttctttttcaaccccacggaatatagcccaccaggctcctttgtccgtggatttcccgggcaagaatattggaatgggttgccacttccttctcaaagagatcttctcaatccaaggatcaaactcacatcccctgcattggcaggtggattctttaccgtgagccccctgggaagcccacgctcaccctttgggtaaacataagctgattcatcgggctcaactctaggccatttctacattctgaataatatttgtaaatgacctgttcccgtggattgttcagaaagctagcacttagattttgctgtatttctttgccatgaaaaaagcacttacggtcagtgagttttgtttgttgagctacttctttcttggtcacttgctgcaagcccacagatgatcggcagaaacacgggacttgggaaaaatggcttaagggcagtttcacatcataaaaacttcttgctattatagaacagaaaaaaaaaaccctgaagtcaaagaagagggaacggccttagtgacattggagggggcgtttctagcgagtaggtcagtaggtcagagccatatgaactatctgccttccctgtttctctccactacttccctgagtaggtcagactgttgtctcctctcccaggtaaaccatcactaagtgtcctccatggagtggagattcaaggggtcaggagtttctcagcacagcacggggaacgctgctgaaataaggcggttctgattcttgcttggccccagcagccttcactgtggcttccttagggctgctgtggccccccgggaaatcagaggcttcaggaccgctgtgctcatctcagactcctggtcgccatggcagcccctcagctcacagcactgtaaccttcacagaggttgcaggcagtgctggggagctaccaacctatcctgcctgtgcccatagggcagggggttgtaagaccaaataactcagactgaaacttgagccaactatctttaattgagatcatacacctggtctcagggcttagcgaagcacaggttcttgacgtctcagtgcagaaagaatttagtgagaggcaaagtaataggttttgttatttgttgttcagttgctaagtcatgtcaaactctttgcaaccccataaactacaacacaccaggcttccctgtccttctgtccttcaccatcttctggagtttgctcaaactcatgtccattgagttggggatgccatgcaaccatctcatcctctgctgtccttctcctcctgccctctattttcccagcatcagggtcttttccagtgagtcagctctttgtgtcaggggtaaagtttggagcttcagcttcagcatcagtccttcca

SEQ ID NO: 37749 - DNA, 3423 bp, Bovine  19866880635197
  misc_feature (1)..(1): n is a, c, g, or t
naaaaaggagcaaggcctgcctggtagaagaaggttatgctttcactgggtcctacaatcccaatttacaatacctgttgccttgagttcaggagatatttttaaggaaaacctcagacccctgagttccagattagcctccaatattgacttaaggtatgatttttccccctctatccagagacatgaaaacccctgtctagatattctagtccatgtccccaaggttcaaggggttaaacaggctttcaccacattagcagattacccggcatatattcacgtacacaagtgtactgtgagattcatcattaaacatccttaacaaagtgttcgctaagtaatacacagcgcaagacaccaacattctctctgcctcggtgtttctcctctagaaaacaggaataataagaacatgatgaggatgaaatgtgaatagcatttccccaaatgaaccagctactcagtgacgtcaaactatcatcatcaatggtccgaaaaaaatttctcagaagtcacttagggcaatgttcagaaacagaaattctaaatgtagcaacattttgctcgagaggatgttttcagcaaaaaaaaaaaaaaatggggaatgtttgtggcaactgtgagtgctggtgagtattttaaactgttgcgtatttagtaatcgttttttagggttattatggttgtggattagtagaaggattctaagtgtttcagtaaggggcacagagatgtccgtgccacatttcgttaattactagaagtactaatattttgcagaatctttaaaagaggctctgaagattaacttataacttctgccaggcttgttttattttcctaccaatacttccaaacagaagatacactcttgctcactgtaatccaagcagtcatagtgagtacagctataaagccagaattcatgtctcggacttggacaactaagtaaatttctcatcactcgggtcttttttcttttttggctatgccttatggcatgtgtgatcttagttccccaaccaaggttcaaactcgggcccctgcagtggaagtatggagtcttaaccactggaccaccagggaagtccccttatcagtcagttctatatattaaatattgtagccctcattatgttctgaagtgtcacagctcactaggctttttgagaagcagcagaaacatatttgaaaaggagagaaatctttatatgtgtgtgtgtaaatctgaattttattcttctttgtactctaaacgatgactgtagccatgaaattaaaagatgcttctccttgggaaggaaagctatgacaaacctagacaacatattaaaaagcagagacatcattttgccaacaaaggtctgtatagtcaaagctacagtttttccagtagtcacgtacagatgtgagagttggaccataaggaaggctgagcaccaaagaattgatgctttcgaagtgtggtgccagagaagactcttgagagtctcttggacagcaaggagatcaaaccagttaatcctaaagtcaaaccagtcaaaccagtcaatcctgaatattcattggaaggactgatgctgaagctgaagcttcaatactttggccacctgatgggaagagctgactcattggagtagactcaggtgctgggaaaggttgaaggcaaaaggaaaagggggtgacagatgatgagatggttggatggcatcgtcaagacaaaggacatgaatttgagcaactccaggagcgaaggacaggcaagcctgaagtactacagttcacggggttgcaaagagttggacatgactgaacaacaagtgctgggtatctgatacacgagttagtgatgtaaagtaagcttctggttttcccatgtccgcttattcgatcatgacgatttcattctacttttcttccctggatgaccctaagagataccatcctgtgcccacaagcagcaatgcagggacatgcagctaagaataaaattatgacaggccatcattaaaaagtctacaagtaacaaatgctggagagggcgccgagaaaagggaaccctcctacacggttggtgggaatgtaaattcacgcagccactctggaaaacagcatggaggttcctgaaaacactaaaaatagagctaccatatgatccagcaatcccactcctaggcatatatccagagaaaatgataattcaaagagatacatgcctccctatgttcactaccgcactatttacagtcaccaaagcatggaaataacctaaatgtccattaacagatgaatggataaagaagatgtgatatagacatatatatatatatatacacacacacccacagtggaatatgactgagtcatcaagaagaacgaaataatgccatctgcagcaacgtggacctagagattaacatgctaagtgaagtcagaaagagacaggcaaatatcatatgatatcatatgatatcacccggaatctaaaatacggcacaggcgaactcatccgcaaaacagaaacggggtcagacatagagaagagacttgtggttgccagagggggagagggagggctggaccgggagattgggattagcagacacgagctatgacgtaagaacaaggtccttctgttcagcatggagaactctactcaatatcctgtgataaaccataatgggaaaatgtgaacaagaatgtctatatatgtatacctgaatcacttccctgtacagcaggcattaaacacatcataaatcaactctactgcaataaaatacaatttgaaagtgaaacttttagtggctcagtcatgtcaaactctctgcaaccccatggactgcagcctgcccggctcctctgtccatgggattctccagagctgggcagccctgtgtttgggtgctggccctaggtcacctcaggcctcgggtcctaactcattagactaacggaaaatgggacaaccagattaaatcaccttcctctgaagattgccatctgtacgactcagaaagctccttgctccgcctggcccctctggacagtgctaaacaggcttagccttctgcaggcaaacaggaaaagtaggtcagctcagcaacacggttcttgaccggtgacgaaccagtggcgcgaaggcagggcagcagtgagagaggggcagcgcctccccagccctcctgtgcccaggccatccgctcccgtggaggctctgggcactgcccagggggctcagacagccgtcggggacagacagagactcagggagtgaggaaaactcaaaggaagtgtagagaaagtggttcttgaaaaaaaccaaactgcaggaggaacaacccactccagtgttcttgcctggagaatcccagggacggggagcctggtgggctgccgctcggggtcgcacagagtcgg

SEQ ID NO: 37750 - DNA, 1954 bp, Bovine  19866880719435
  misc_feature (1)..(1): n is a, c, g, or t
naacttttggagacaccctaccccagacctatagccttggtatggactgggcctggtacgtgaattttaaaatattccccaggtgattctgaagggcccggcactaaacaagaaaattcttcaagattcccagaacccttgtccacaagaagaggagacttagaaatttagctctctacattaacaattcttccatctgctgaaggacaggcactggagtcagtctcatccatgttcaaatcccagcccctgctgtgtggctcttagtgaatttattaacatctctgagcctcagtccacccatctgtaaaatgggcacactttacagagtggaaatgaaacttaaatgaacaaatataaagtgcctaacagagcacaaacagaaaccagcattttgtcactctatcattttactctagcctccaactgcaaatttttactagatagttttctagtaaaaaactgttctctagacagttttcaggctttctttcggcaggggggaggtgaggagtggatttcattttgcaacaacctactcactgcacttgggtattttaaaagcattttaaatataactaagtaaaaagaattttatttgcaagttattttagagaataagttggcttccctggtggctcagatggtaagaatctgcctgcaagggcaggagacccaggctcagtccctgggttgggaatatccactggaggagggcatggcaacccactttagtattcttgcttagagaattccatggaccagagcagcctagcaggctacagtccatgggtttgcaaagagttggacacaactgagcgactaacactttcacactttctttaccactgagccaccaaggaagcccttcatatacataccttcatttccttacctgtaaattgaggataaaaacacttaccttgtaagggatttatgacagccaaatgcttagatctcagcatcatgcctggcaaagagacatgctccatgaaggtgagccagccccactcagactctgtgaactgggggtcaatcactaacaaatgctcttctgtctcttaccatgcatgtggcaagcttgagttgttttgtttattcaagcattttgaggcaataactcttggcgagtcccaggtgttattaatatctctgaatcaccatgtagttctataaatacctctcctagctgttatttttccccttatctcactaaatgtaagtcagcaatgaagttatgaattaccagctcccttattctctgctctataattaaggaagtgttaggtgagagtcctcgctgaggatgggggtgggttagtgcagcaagtagcatgaatgcaagaggctgtctattacccgggcactacttggggggagagtgccatgggaacatctcaacccagaggagcagagctgggttcccaaaagctgaagggcatatgaagtatcagtccacgggaattctccctgttggggctttagtttttgaaaacccagcttcccagctttgccagaactttgttttatgcctcactgtttcacaggcatctctttttttgcttccccgtgcctactaggggcttccctcatagctcagctggtaacgaatctgccagcaatgcaggagactctggtttgattcctgggtcaggaagatcccctagatcagagactggctacccactccagtattcttgggcctctctggtggctcagatggtaaagaatccacctgcaatgtgggagacctgggttcgatccctgggttgggaagatccactggaggagggcatagcaacccattccagttttcttgcctggagaatcctcatggacagaggagcgtggtaggctacagttcatggagtcacaaagagttggacatgactgagtgactaagcacagcacacatgcctaccagaatcaaccagcaagccattccagctgtatc

SEQ ID NO: 37751 - DNA, 1400 bp, Bovine  19866880799852
  misc_feature (1)..(1): n is a, c, g, or t
ngtttggactgaaacaatgtaagcagttttcatgattttccagcacaggatgagaaagaactggcagagtccctgaagctgggaagttgtgttcagaggcagatggtctcccgggcctggacaccaacagggggacaggaggctggaaccgtgctgggccccaggggctgcttaggggccagcctcacctcatctgggctgtagcccttgacctcagctgtgaggcttgctccttttgggtggtttgtgaggagcttcagagactctaggcctgggaccttctctctctgagccaagaatctcccttcacacttgggggaaatactccagctcttgaccctgggcttgcctcctgcatgcccccagcttggagaagagagccccaagtttcctgctctaagtccacccacccaccgccacatgctgaagtctgggggcgcagggcggcccccgctctgcctacagacccctgggtggtggcagtggcagctcatcccctgacccatcgcgaggtgctctggagcatgatctggaagctctccctggaggctctccgcttccttggcccactccgatggcttctgcccccctctagatcccagtgaccaagctcaagcgggcggtgtcctcacagcggtcgcacctgcagctgctgctcctggcctccggcgggaggcgagcttcacgggggcctcggacccctccccagcttttctgcacactgacgccagtcaggaaagcaggcacacatgccttcccacggtcttactccttctgaaaaaaatctctttattactacgtttgaacagaatttactagtgtttcaaactgatgatgctaaaagttttcacctcagattctattaataagtgatgactctgggcagaggccaaatcagcatcaggtggaccccagaactgaccaccccggccctgccctgttccagggtcccaggtggggctgctggacacagggtttgtaccgtgacacggcctgggccacaggacagtggttatacccacagaaggcgtgttctgtgtcacagcctccccacccgcaaagctgactcaaagcaaggaggaaaaagatgctttgagctgcaagatgcaatctctctgcctccctgacctcccccgcacccccctccccaggaaatggggacccttccttgagataagaagcagtaacgcactgacactgttctcagaccaagcgtggtgagccaggggccagctggatgcaccagtgtctgaagggggatctggtgaggatgggtcctcagccaacccctctctgtgaccccacttgccctggggaaccagggggagagagatcccactggggagtccagacgaagcagtcctcctcctgcaaatttgcagacagccgagggcaaggag

SEQ ID NO: 37752 - DNA, 1246 bp, Bovine  19866880811358
  misc_feature (1)..(1): n is a, c, g, or t
nccttccagcccccaagcagagccaggctggatgttccagccatctgacggcaggcctatgagagactcccacgcaagacaaacagaagacacttctgcaggcccagtcaaccctctgaatcatgagaaatcataaatggttattttcagccaataaatctgagtgggttctctcatacagcaggaggtcacggacagaatccacatatgtgtgactgcgtaggtctctgggtggaggtgggaggtcactaaaaattcgcaggcgagctggagcttgagaacaaaacttgtacaactactgagagcatgatttgctcttagcacagggtcagatttacaatagccctctcacacataggtggtgctaaagaacccacctgccaatacaggagatgtaagagatatgggtttgatccctgggttgggaagatcccctggaagaagaaatgtaagcccactctagtattcttgcctggggaatcccatggacagaggagcctggtgggctacagtctatggggttgcaaagagtcggacatgactgagcaactaacactttcactttctcacacataacttttctggaacacagttatggttgcccaagagatggcactcccagaggtgcatggaggaggtgatgctggaaagatctgaggataatgggcactaacctaacgggttaacacgactggccttggtgtctcaggagaataagacactacagggtggtcggccctggcctgctcagcccacttcacagagcgatgagagtggctcgtgctacagaggcaagaaacccagggccagacgcaaaggacactgtggagggttcgggagcaggacccgatgagtcggcctctggacgtcaggtcggggggctgaggagctgatggggatgggcccgagagccccaccaggggctgtgctgcagcacgcgcaacacccacagcagggcccccaccacagaaggaaaagccaaggagaacaggcgcccctaaagctctgctcgatgggcactgcattcctgtcccgactacagtctcttccccagtgcgtgaaatgactctagctcactgcagtggggccaaacagaccctgcccaccatttcctgggcgtgggcgctgcgggcagatgccaggaggaatttaaaagaagctggctattttgggtgttagaacttgccagaatgccaaggcagcaatatgtctgcctgagtgcaattcctgctctccagacatggag

SEQ ID NO: 37753 - DNA, 842 bp, Bovine  19866880845611
  misc_feature (1)..(1): n is a, c, g, or t
nccttgcattgggagcatggagtcttaaccactagaccatcagggaagtccctggttttcagattttaatagaagtttcctaattagtagagcatcagtttaaaccagactgtttggtgtagaatctttctgacagtctctcactcctgcctgggtagaaaaaatatatcacttgattttgcttcacagtgtctcacaccaatgtggattttcactgattataagagggtcaaatataggatacttttgccacctgatgcgaagagctgactcattggaaaagaccctgatgctgggaaagattgagggcaggaagagaaggggaccacagaggatgagatggttggatggcatcaccgactcaatggacgtgggtttgggcggactccgggagttggtgatggacagggaggcctggtgtgctgcggttcatggggtcacaaagaatcggacatgactgagcgactgaacttaactaaactgaaaatataggagctaagcctttaatcactgattcttttttttctgacacttttaagaattattactacttggaacaaatgtatcaatcctagcatgtcatcatacattgagcctttgactctaataggttgagatattggacattaggtttaagaatttccttttgctaaataaaattggatttaataattacattgccagcaagactgtgaaaagtattttcttaatatatttcatgctgatttctttcctgggacattgtgtaagccaagaagctagctgtgagaagatgggtttagtccttgggtttttattagttatcctggaggttcaaatgtatgtaatatttcatctcattt

SEQ ID NO: 37754 - DNA, 2324 bp, Bovine  19866880923967
  misc_feature (1)..(1): n is a, c, g, or t
naccccgtgtgctctgaccacgtggggttatttacattcaattagaatatttaaatacaattaaaaattctgtctttgggggatttccctggtggtctggtagttaggacttagtactttcattgccagagccccaattcaatccctgattggggaactaagctcccaaggggtggctacaaaaatgtcttcagtcacactagccccatttcaagtgctcagaggccatgtggctcgtggcttccctagcagccagcgcaggttacagaccacttccatcatcacagaccactctggtggacagcactgggtccaggctctattggatttgtgtccacgggtgcccaggtcttcagaagaaaaggtacaattccttagattcgctgcctttgagaaggcagctgtttgctggcctgaaggtcagaggaggagccctgcactcttcaaagtgcttcacgggagtggctggcctcatgctggggctccgcgtcagccacatggccccagctagagctcgggagtctcggcacacgaggctcctcttcatgtttgtctggccgaagtctgaattctctctcgggcccatgggcaatcgcgcgtttgcatttcagcgagtaaacccttctggatgacaattcatgaccacagagtctccacagagaatcagatctggagcttctcatttcaggagtcagttctgagtcgtcaggaaggttcagtttttgctcttgcttttgttttccatcttcgtggagtgtgtacctttgttcttttcttttccagtcggatgtcatggatcagaatttgttaaatttccttccagagcaagaacactcggaagtctataaaatgctctcttcccatatgcttgtgacggacgccccttccccagaatacttaaaatgtaagtttaccttcactggttttatgagagagaaagataaggatcttatattagaaaggaaagttaagagtctacagccataccacccttaaggcgcccgatctagtctgatctcagaagctaagcagggttgggcctcgttagcactttgatgggagaaaggaagttagaatgaattaagaagggaggactaattttaaaaataattttccttgtgactcagaacatatccaagatccttagaggtatattttaagtttaaagctaaaaccggagtttggaatatgtaagactttgaacttttatgtggaaattttgaaaaccacagagctttagaataataactttgttttgcatgtgataacaagagatttctcttgttatcctttttttcatatgagagccttttagtaataaaggatacaaaaatcactgaataatctgtttgttttggaggacgctagaaaactagatttgtatgatactaagtaaccaactaaaaactgaataattaggtcaaaactctcttctgaggctgtcgtctgattatttatatacatttgcagattttgcggaattttacagtttttatcaaaatcagcaacttggatagaaagctggcctggtcacttaatgaagcgcgttctttgatgatggtagcaacagtgccttatacttattcaagccttagttccttttccatgaataatttgtcctgttgtacatctgattttccttcaaagcaaagtggaaagattaaattaaagagagcagctctatgtgagcagctttattttaacataccatatgaaaacgaccagaactaatcaatgccgacagaaccaaccgcagacatctgtgattaaattaagactaattggctccgagtacgggatgcaaactatctataaactatgggagcagaaaaacctatgttgtcaaggttataaaaccatgtccgaaagtcagctgtacggagacagctagcccggccatgtgttgaccaaactctgtgtgtttcccacaatgccgcttgtttagtctagaatcattggcgtaatgcttttattccctttctctcctttttttcctctaacggcccagctgacaacgatttagagttttattgccatcttctcagaggcagcttgaacccaaaggaatttccaacttatgaatacataaaatttgtaggaaattttcgctcttacaacaatggtaagcattcattgtcatacaattgcggggacctgcccggggggcaagagtttcgcagttgcggggagcagggagaagatgtgccttccacatttgcatgtggatttctgtgctccaaagatgtgcttttgttgctcgtaaatgggtatcgcccattcgggaagaacactcccccacacctgtttatgccagcgcagtaagt

SEQ ID NO: 37755 - DNA, 1243 bp, Bovine  19866881055060
  misc_feature (1)..(1): n is a, c, g, or t
ntagcagcacacactaccgctatctgcaaagccatcactctcaaatgacttaatgagtaaaaggaaataaaaagcagaggagtaacatattaaggagaaataatgggaattagaagatttatgcggttcagctctttttaatcagccagccagcttgctagcaacaagagatggtttccactgaggaaggtcctgtggagtggaatgtagtcaccagtgacctctgtcttatctggggttgcagtaggaagttgcttgttcttcattttgctttagccatgttgtaatccccagaatcaaaatatttttaccctttatgcaatcgtttacttaaaaaatctgaacctccaggattttgtcccagatgaggatatcttgcttttaacttttgcttcttcagctttctctggactaatcactttatcttccatttccttctgctcctctgcggaggctgcctgggggacttccgcagacatactgctccctctgcggacaagaggctgagaagagacgtgcccgagatagtggaatttttttaatgtgtcacctggcatcatggaatagtggcagtcctgtgtgatgtccctactgggttttccttgattttgaattccaaatgtttcagaaccactgtcatacaagaacagttcaatccccacctcacccctggggtcttccctgtcttttagggctcccacttttcctttcttttaaaaaaatatcagttaggatattttccctgtaaagtcattagtatataggtgcaggacaattggtaaatataaaaactcacaaagaaaaaaaaaaactcacaaagaagaaaatagtaatcttctatagtctcacttctcaagtgaaaataaatattgtctaagagatgcccttctatcctgctttctgagtttatcacttaactttttaacattctgtataagttgtgtggtaatttcataatatcctatcctcctcctcctatacaattaagtgctgacttggtctagctcctggggtaagcatttacatgtatgagccacttaatccacaaacaaccttgtaaagtgagtactgttattatttcctctttgtaactgaggttcagacagtttaagatatacacccattttaccgagctgctaagtagtggagtctttctgaccaggggagcctggctctggagcccagactccaaaatagtctgatccagtgcacttccgtcataggaggaataaataaaccacag

SEQ ID NO: 37756 - DNA, 1100 bp, Bovine  19866881063948
  misc_feature (1)..(1): n is a, c, g, or t
ntgatattttgccgaatttgaatagcaaccagtaaagaaggtcaagttttaaaagaagcaacatgggaggggattgtaattaaattcgctctgggctgggtacggatgattcatcccacacaacatactggaaagcacgtgaccgaaggtatttttctaaataacctcaagtgctagtcgagttattctttaaattgcatgccagcgacatctccaaactggtatttcgcttggcaggcgctgagcctctgccatagcccagattttcctgcagcgagaacccagccttggtttggcagttgtttctgctgccttccacttctgcctggaaggatggcacagctcacgggtctggggagggaggtgcatggtggactccacacgggcagagcacctctgcgtgggtccatggagctgcgcagtgccctcagatgggcaggatgaaggcttaggtcttttccgaatgatggcgctgctgaaattcctctctggggaagattctatggggcacaggtagcacacttggtaacgactccgcctgccactgcaggagacccaagagacctgggctccatccctgggttggaaagagcccctggagtaggaaatggtcaacatgttccagtgttcttgcctaggaaatcccatggagagaggagcctggagggctacagtccacgtggtcgcacagagtcagacacgactgagcacacacaggcacacaggaaggttccgtcgacccaggacccccaggccagagtgtgccccaaacctcctccaccaggaggtgtccccccaccacaccactcctaccattcccagcttactctggttagtacccgtgatacagctgcatgcgggtcctgaccctcgagcctgacccgagctgagcccaccggagcccttcctttttttcagaaattgaagtgtagttgatttacaatgtcgtgtcaggttctggtatacaataaagcgattcagttatacatccatataactactccttttcgtgttcttttccattatggtttattaataggacattgaatgtagtggcctgtgctgcacagtgagaccttgttgtttacctgttttataca

SEQ ID NO: 37757 - DNA, 596 bp, Bovine  19866881126955
  misc_feature (1)..(1): n is a, c, g, or t
natgccgcctgcagtcccgtggcctggcaggccccctgcagtgctgtagcgcagtctagggggaaagtttggggtcacacacataccggcatcgcggctgcctggccgagtcctggcactgggagctcttgggccgatctgggcaaagccggggtgctggcctctgccctcagcttgcttggagtggctgcaagaaaacacggccccttgcagacttgcacacacttaacagctctcttatcaaaagagggagagagaacttccctggtggtccagtggttaagaatccacctgccaaggcaggggacacgagttccatccctggtctgggacgattccacatgctgcggggcagctgtacccatgcgccacagcctctgggctcacgtgctgcagctactgaagcccacgagccttagagcccgtgctctgcaacaagagaggccaccacagtgagaagcccacgcaccgcaactggacacgagtttccgctggccacagctagagaaagcctgcacacagcagtgaagacccagcacagccataaataagtaaatagataaaaattttaaaaagagggggagggtgaccacagg

SEQ ID NO: 37758 - DNA, 946 bp, Bovine  19866881298556
  misc_feature (1)..(1): n is a, c, g, or t
nccccctgcccctaggggagggaggtgacgggcgaggaccccttcgtccctgtccaccttcccatctcaagcctcggcacatcacttggacacaacaacctccttctggcgtgagagtcctttgattcaatgttactgctcattcgggcaggtactcaggagcagtatcactgcaaggtctgaattcgccaaatccattccacgaggtggtgcacctaccgtcaggatctttgaaggtcagcgtgatgaacttgctggccaccatgaacatgagaatcacccaaaagcacgcggccaacagaagccactggtggtgcatgttgtcaaacatcagccattcagcgattcttcctggaaaacacaagccaaatggccctgctgcttacacacaaatcagttacgccaaagacaataaaaagaacaggcaatttcagttaacagcctcgatacaaatgttttaaaatttttttctactgataccatgggtatttgaacttggtaacattatatttttaattactaacaatttataaagttgatgggtttcccaggtggtgctagcagtaaaagatccgcctgccaatgcaggagacgcaagagatacacgtttgatccctgggtcaggaagatcccccaagaaggacatggcaacacactccagtattcctgcgtgggaaatcccatggacagaggagcctggcaggctacagtgcatgactttgcagagtcaggtatgattgtgcaggcgtgcaatataaagttcataataaatcaaattttaatggaaggagccatttctatttggttttagaacacatgataagcctttactcgtgcagttgagcctgctgactctttctggcccaggcacctaccaatgcctggaagccagggcatgagggcgctcactttggcctggacttttgctgtagccaattctaagaag

SEQ ID NO: 37759 - DNA, 960 bp, Bovine  19866881524859
  misc_feature (1)..(1): n is a, c, g, or t
naatgtggatgagaactaattgctgatggtccaataaagttattgaaccgcctttgcatcttgattttccttttctagttggaggtaaagaaggcttgtgtatcttataacatttcccagttacagggtcatctggagagcatttcccagctgccatgcctgggccccttctcccaggagttttaaaagactaaactggtaagcttttgagggtcttagatttaatgaaagaggtacagtttgtcgttcttagctccatttggtaatccgatgaggtgttttcacttctgatttgtgctcagttgttcagttctgtctgactccttgcaaccccaccgggctcctctgtgcttagaatgttccaggcaagaatactggagtgggttgccatttcctcatgtagctaaaggtcagaggtaacctttcttaaaagaacaaacgttatgttaaatttagcctgaaaccaaggtgttgcggggattatgtttcatcactgatgtggattaaatggcataaagaggtgcccttttgaaaccctattgatgagggtagtggggttggaggctacctggagtgtatgctgtgaacatcatcgttgggggggcggggtgggtctccaggtatccagtccaaaccttagacactgaataagatacagacacaaaccaagtcagtacaaaattttgttttttaaaaaaacttggaggccaacattgaaagcgtggtttgtacacattttttggaaggacacaaagtgaatacaaccaaatacattaacatggtttcaattaccagcattgaaacaaaattagtgcaaaaaaagccaaatacaattgcacagatagtggctctcaaatcttaaaagtgaactctgtccctcccgttcaagtgaaggatgagtgcttgggcttctctcaacttggttagtatcagacatctctcactttttttagcttccaa

SEQ ID NO: 37760 - DNA, 1170 bp, Bovine  19866881771299
  misc_feature (1)..(1): n is a, c, g, or t
nttagaatatcatataggttattttatgcagtcttgcaggaaacccattaggaatgtgtttctttcctaattttatgaatggagaaattgaggctgggaaagagtaaggaacttgccaagatcactaagccatcaaggatgcaaaccagggatttggactcaaggtacatgtcactaaaagtgtgggattttagtcgatgtgttatttttttctaaaaagagcctccttgagattggatatgagatagaagaagaatgaaatcagcgagcttgcaaaaagtgtaacatacatggcagatacgaaatagctttaggatttttttcaccatgcatatctttaatttttgctttgaaggattagaagagtatgttttggtggaagctgctcagcatgaactatttatttatgacttaaaatgtgatattttgtcaaaaaatttccaattcataacaaagtagaattataaactatagccataatattttgcctccttttttgatccaataagaaatatagatttctatttattacagtatttaccactttggttcaaggagaataaccaaggtctttaaacaccacagagatgaagatgtcttttgtattaaaatacagttgaacagcaagtctactgaatgaaagaaaaaaaatgaatgattgctttttgaacataaacctcttatctgtatcatattgaatacaatagcttatggacattatagacacaacacacacacataatagcaaagatttgtgttctataaattctataaaagaaagttctataaagcatcagtcaacaattacttttcaaacatctggtctgtgtctaccagtcaactgggtactctatgcacaaacatacatttttcaaataaacctataggataactgacttgtatcaaatttgtttccgttgcatattttgaattcattgtttctcatattcaggatgaaaaattatttttaataataattcagaaatgggaaaaggaaaaactgagaaaaaatctgcattgatattattcaaaaacattggtgtagactgagttgtgttcaagccttgacccctcaaggtgactttatttggaaacagcttttaaggagctaactaaggttaaatgaggtataaggatggagccctaagccaataggactggtgtccttta

SEQ ID NO: 37761 - DNA, 4557 bp, Bovine  19866880813115
  misc_feature (1)..(1): n is a, c, g, or t
naatgaaccgagtgcttctggtgcttttcctggcctttttctttttattatcttttgacctcttaatgcaggatgctcttggtgagttgtggatgaacacctttagagaacctgaaaggaacatgactttgcatttagatgcaagtaaaattttctatcttaaaagccttattcttctcagattgacatatgttatcccttttcttctctccttggcttctttcctgcttttctttctttccctggtgagacacatcaagaatttccaagtcaacttgaaccactcgagagacttcagcacagaggccgataaaagggccacgaaaatggtgacaacatttctccacctcgtcatcgtttactttatttccattctaattggagaatggatcttctttaagctacactggtatgaggtcatgatgtttgtcatggtgattccaactctcttttcatccggccactcgtttgttataattttgggaaacagcaagctaaggcagattgctttcagactattgtggggtcttaagttctctaaaaactaatcaaaacctttagcttaatagacattaaaaaaactttctgtattctacatggaaataccttaatagaagactttgtatgttcatttttaattcctagtttttcttttattaatccttttaagtgttattaaactgcactggtttgccttacaacatgctgttacctaattatattttctcaaagtcatctgatataatgttcaattaaggaaattgcttctgctgtaacatttgctcttaacaaaggattatttggaacctgaagaagaaagcttataaaactgtacaatgaaatctaataagcatatatgttcaacacaattacatatgaataaatgtatatgaaatcacagtcatagaaagagaaaagagtaatgcaattttaaactaaacgtaaatttaaaattagaatagtaaaatatttttttaaaatttagagtgtaataagtgcaataaatgtttatataaatataaaagtataaatattactctgatgttactaattttggaaaggatctgaaacagttgaaaatttcatacaccattcatagaattacacatatgtaaaacaactttatgcaatagtgtgactttaagtagttagggtgaacacgctaaacctaagacagttcagttcagttcagttgctcagtcgtgtccgactctttgtgaccccatgaaccgcagcatgccaggcctccctgtccattaccaactcccagagtccacccaaacccatgcccatagagtcagtgatgccatccaaccatcttatcctctgtcatccccttctcctcctgtcctcaatctttcccagcatcagggtcttttcaaatgagtcagctcttctcatcaggtggacaaagtattggagtttcagcttcaacgtcagtccctccaatgaatacccaggactgatctccctaaggatggactggttggatctcctttcagtccaagggactctcaagagtcttctccaacaccacagttcaaaagcatcaattcttcagtgctcagccttctttatagtccaactcatatccatacatgaccactggaaaaaccatagccttgactagatggacctttgttggcaatgtctctgctttttaatatgctgtctaaacctaagacagtaatttcactcttatttttatacacaaagaaatctttgatatatatgcaccaatatatatatgcaaaaatgtgcatattactctttttcttagctgaaattgagaagtttaataacagtccatcagtacaaaatgaataagtatattgtggcatacgaatacaaatatactgtggcaactgatacaacaatgaaaaggaacaaattagatccataacattttttagttctttgttaaagaagaaaagacatacatgtagagaagcaaatttgcaaagcatagtacatattttgtgtaatgtttgtatatatttgtgtttatgtattgatgcttttactactgtaataaaatactccagattcattcataagtcagaacacaaataagcagatgggagaattttgcttgctaatggtgctattaaatatgaaagaagtatacagactgtattatcaagcagagtatatagacatatccatataaaatgcaataaaagtaaagtattgttttgtttgccataaatttagagtaagcagagaaaaaataacaagtaaatcattttaagtatgttagttttaatgttcttgatgaagtcatgagtgaaagtattctttcaaattagccctggtgctgagaatgatgtaagtatcctaagaccatagagaagattgcagtgttctctgacaattagaaaactagacaaatacatatctatcagttagaattctccaatttagttgtgtcataattatatttaatgatttatatttgaaatatttaataaaaagtttaaaaatgtctaaataattttctaaagatcactgtagataatttaaccttagtgaaaatagtaaagtttaactcaagttgaatacattagaaattgagtagtctttagtttgtgtattacctgagctaattattgataggtaatcttaaaattacagggttaagtccccaaaccttctttctaacattagaggtagtgaataaagactactgaaaaataaaagccatggaatagaatggtgtctctgtgataatgtattacattttgcttatttgaatggcatttgggatgaagttctgttccttgactttcctgagtgagagcctgtagtaacaaccgagcagtagacaagctgccatccaacttggtgaagaatgactagatcatgattttacttacactgtgactaaattttggaaacagaagggaatgcttcctatttttccttaacactactaaaattaaaaggctttctttaagatgttggtatccttttttttttttttccagtttccccaccaaagacaatggatagaagagtaagagactgttcttatcaattgaaacaacaggactggtaaaatgaatattcaaaattaaaagctcaacagacatatttaataaccaattagacattgttgaaaaacaaattagtgaattagatgattactacccagaatgaggcataaagagacagagatgcacaatacaggttagaggggaggagatatgaaggttatagactgaaattctgacacatttctgtatttctgagaagtgggagagaaaatattggagtggaaccaatgttgtccagattttttcaaaatgttcaaggcattaattaaaaaaaaattattgaatttcagacagtatgatggagacaatttaacttaacaccattagaaaccaggaggaaatctctcaagtaaccagagagaaagagtagattatattaaaagaaacagctgttcaaatgatttttaaatgagaaatgtatctgggagccagttacagtttggctgattgtcagtttgcatgcgtgctcagttattcagtagtgtctgggtctctgtgactccaagggctgtagcctgctaagctcctgtgtccatcagattatcccagcaagaatactggttgccattttcttctccagatggtcttcctgaccagggatcaaactcatgtctcctgtggctcctgcattgacaggcaaattctttaccactgaatcacctgggaagaccctgattgtaagtttaggttaaatctttctggaaagaaagattaggttaaatctttctggaaaagcttgattcaatgattcacttattctccttttgggaccagggtacttgcctgggcatgttttcatggtgattaaagatgagcaagcccggggcagccccagtgtggaaaccatttaaaacctatatgatgtgcctgtagtggaggatgtgcatgtgtgtgcatgcatgctcagttgtgtcccactcctagtgaccccatgaactgtagcccacgaggctcctctgtccatgggaatgtccatgcaaaaatactggagtgcctagccatttccttctctgggggatcttcccaacccaaggattgaatctgcgtttcctgcaaaggcaggcagatttactactgtgccactgtgccacctgggaaacccatggtaaggatacaacaaaattatttcccaaaggtataggtacagtgaggattaaagaatttcatgaaaatgaggcaatctatttcagtatatcctcttgattttttcacacttctctcatatacaaaacatgctcatttctatctgagcatgtccaaagtttcgttcagttacagcattattcttgaattccaggatcttattatctatatcttatttagctatgtcttctcttcatctggtaatcaggaaactaaaaagataagttatctacttgacaaagatctgtaaactgattctgtcatgcttgatggtgacccacaggtctcttaacaatcttcactcctttcattcgcctttctttttgcccctctgattggatgatctctactgctttgt

SEQ ID NO: 37762 - DNA, 1512 bp, Bovine  19866880869237
  misc_feature (1)..(1): n is a, c, g, or t
ntcagctttacaaattgcacaagggcatgttatttgtaccagtcttatcatcagtaggctgtacaaaaaaacagaggtccttcagggtacataaattgtgctttgaacagttgctacaattattcagtgcagggtgaattctgagatattgaaagaacgcttttcggaactagaccataatctgagttataatcagttacatgtctgaataagtcacgaatgtagaggtggtctatgaggaaaaatacagtgcttactagttaaaatagattatataagttaatgaaatgggcatcacttaaacaccagaagaatatggacgatccattaagatgttaccttaagggtattcggggcttggaagtaatgtcagtaatattctaagccttccccgcctaaccacatatttcacaggtgcccatgaagaaaattatagaagccttcatacataatctgaacgtttcatgggtttacatgagggaaaatttgatatttgcatgtaatatgtacctcaaaaaataattaatctgtgtttgctttacatgtgttaatttccggcacttccaactgaaacagtcctaatacataggaaaatcattgcctgagattgtgactctttaagttttaatagtatgttgtgaatacagagactctgccctaactggcttatttaaacagattaatgttatgaaatcgaacgggaacagttcagagcagactaacccgagttttaacgcgagctttggacggggctctagggcaaataacagaattttacttagtttcctttcttcattttaaagtgaaacgagtatctgtaaggctgtttgtaatggctatataaaataactgtgtggcatatatgtaaataagtaacccgttccggacctaccaagagttaaactctaaacgctgaatgtcactttaagcagcagacaggaaggggaggagcgccagccgcagccccagcctcaccgccgctcggagagaagcggtgtctgcgtgaggcgggagtgctagcccggaggccgctaagtccccggcccctccaggtcatcgccatcagttgggggtccgcggggtctgcggtcaccctcggttccaggcaccgcaccgggctagcggcaacatcgcgtccatggccaccacggcggctccgtcatctttggccctcagggcctcgagcccggccgcgacccccagctcgtacggggtcttctgcaaggggctttcccgcaccctgctcgccttcttcgagctggcctggcagctgcgcatgaacttcccgtatttctacatcgcgggctccgtcgttctcaacatccgcttgcaggtacatttttagagccctggggatgccgccggcgttccgggcctgcgttgtggccgactcccaggaggcgccgcggcaccgtggagcttggggcgagcagtcccgctgtctcgcgagagtgcttggtctccctccaccgctgcgctctcgcctctccgccgtctgctctcctccgatcc

SEQ ID NO: 37763 - DNA, 1463 bp, Bovine  19866881070185
  misc_feature (1)..(1): n is a, c, g, or t
ntggggctttcttggtgttactgctgtgcaggctttgctctagatgcggagagtgggcttctcattgtgctggcttccctggttgcagaacacgggctctagggtgcacaggcttcagcagttgcagcacaggggttcagaagttgcggcttccaggctccaggacacaggctcaatagttgtgtgcaagggcccagttgctccatgacatgtgggaccttcccctgtcagggactcaacccgtgtctcctgcattggcaggcagactctccaccactgagccaccagggaagcccccttgatttatttatagcttaatattatacaaatatttaacctgctctaccttgcaaaggatgggcatgtccaaatgattgtgtatttgtccttatatattcagtggtaaacatacacccattttttgattagtagaactgttaagatgaccatgatgcttgctttgtaaaacatcgattcacctctgtgagtagattgttagtttataggccattctagggaaagtttctgatgctcagtggaatttaccaatacaatattataaagttaaaaaataaaataaaataaaaaattttttaaaggaatccagtaagaaaaacagaagttaaaaatgagtctttactgtctcttgattaattcaatgctcttggactatagaaaattctggataaatctatgaagctaaagatttcactcttttcgggtggcagttaagataccacagtagtcgtaaggcattctgtctcagcttgctatttcccaaaattaggataaaggagtggcttgaaggaaaaacagtcgaagttaacacaaccaccaattgggccagacgtccctgcagtttaaggaaaacccaagctattaataggatggaagagacatgaatgatgaagaggaagaggaaagacatcacgattttcatggctcttttatgggcctctgtgctgagatcctttgagctggggttgaactgcaaattcctgatgtgtctcatcaaggagagaactaagaggagcagtgaggtcagggacagaagaaaggggattaagttgatgaagttaaaaacaatcaactggtgaagataatgagtttcacttacatctgaggaccacgttgagtttcttacatatattttgtagctgttagttaagatatgactaagtgtatatattgattcataattcaaaaacagtaaggacaaagaccccaagagaagcaccagtaccacactacgaattcgccaccgcagccaagtgaagcaggggtgggagaagttggctactttaaagaagtagaaaacacttagacaggtggcaaaccaggtagctaggtgattggacaatatccaaaaactactaacaacttttgttagtttatcaatggcatataggtgggccatagtaccaataaaaatgagtcacatagtattacccaaagtgactatt

SEQ ID NO: 37764 - DNA, 1161 bp, Bovine  19866881155942
  misc_feature (1)..(1): n is a, c, g, or t
ntttatttgatggatgaaaaaaggggggttagtgagaaatcagtgttaatctccctcttaccccaacattttttgtcacagggtaggttattatctggagaaggaaatggcaacacagtccagtatccttgcctagagagtcctgtgaacagaggagcctggtgggctgctgtccatagggtcacacagagtcggacatgattgaagcaacttagcagcagcagcagcaggttattatcattcagtctttcttctccagattgcatgggaccagcaacatacatattgggagtggctgttcttgtattgtggcttgtctgccactgagtcacccacagaggctcttttcacagggctgccaagcttgatctcatctgctgttcaagcatactgcttataatatctatacatcaattgtaattactctagcctatggcctggtcttttattagtcctttggtatacttcttttacaaaaatagggctctgttccttataattccatcttcctaaggttgctgcagaagtatgggcttactcctagttagacatttacactgaaggttcacttattagaagcaaagtttgcttattatttgatatactttaccaaagagaaatttagtaactaaaaaaacaaaggtaaaacttagatgttacttttggttattatcttataaagagtgcaagattatctttaagtaatttatatgaaaggctatccaagacaaaacaaactcagctaaatgtattcagcttgatttgtacattactttttaccaatccaagataactacaatgataatctttggtaaaatactaagttagtgtccaaaacaatgtatgtacattttattttgtaaaatgaaagttactttttataacagacactctatttttttttaaactttattttgttagagtatagccgattaatgttgtgatagtttcaggcagatggcaaagtaactcagtcatacatatacatgtatccattttcccccaaactttcctcctatccagtctgctacatagcattgagcaagacactctatttcttatcattaaaaccatcatcagaatcattattgtaactgatacataaaagcaccacagagtctagatgtgctagccgtttcagttcatttcaattcagttcag

SEQ ID NO: 37765 - DNA, 894 bp, Bovine  19866880142341
  misc_feature (1)..(1): n is a, c, g, or t
ncttggaagaaaagttatgaccaacctagatagcatattcaaaagcagagatgttactttgccaacaaaggtccatctagtcaaggctatggtttttccagtggtcatgtatggatgtgagagttggactgtgaagaaagctgagcactgaagaattgatgtttttgaactgtggttttggagaagactcttgagagtcccttggactgcaaggagatcaaaccagtccatcctaaaggagatcagccctgggtgttcattggaaggactgagctgaagctgaaactccaatactttggccacttcatgcaaagagttgactcattggaaaagaccctgatgctgggagggattgggggcaggaggagaaggggatgacagaggatgagatggctggatggcatcatcgactcgatgcacatgagtttgggtgaactccaggagttggtgatggacagggaggcctggcgtgctgcgattcatggggtcacaaagagttggacacgactgattgactgaactgaactgaacttagctatctagggccagtatcctacttttctccatcctgaatcccctcagggtgcacatttggaagtggctgccgtggttgttggcttgatggtcacaacatattttgcttactggtatggcaggcagtatttctcattcatgtgactatacccgggtcctctgcactgcagacagattctttaccctctgagccaccagggaagccctatacaacagtaggacaatcctactacacaagtgtaggtgttacctggattcagtggcctgagtgctttcccctcccctttaaagtttcttttggtttcacattttaagggtctatcattttacaaataagtcataaaaaatagaaaacagatt

SEQ ID NO: 37766 - DNA, 924 bp, Bovine  19866880355880
  misc_feature (1)..(1): n is a, c, g, or t
ntgtacttttcctctgaagctcttaaatatatatttgaattgattgcagatatacttttgagagatcatgttccactgagcatcatttattaatggtccttgctgctgctgctgctgctgctaaatcgattcagtcgtgtccgactctttgcgaccccatagatggcagcccagcaggctccccagtccctgggattctccaggcaagaacactggagtgggttgccatttcctcctccaatgcatgaaagtgaaaagtgaaagtgaagtcactcagtcgtgtctgactcttagcgaccccatggactgcagcctaccaggctcctccgtccatgggattttccgggcaagagtactggagtggggtgccattgccttctccgattaatggtccttaagccaccaataatttgaaatgaacaatatgcagagtattggatgtttattaaatttttttaaggggaatttttacttactcagagactcagttgcctcttctgtgatggtttattttggcaaacattaacccaccccattttccaacagctttggttcctgctgtccatcctgtgagcactgcccacccacatcagggacattattgaattgtcttgaattgcttggtgccagtacttctcagggaaacataataggaagatttttgtttgtttttctgtttcatagtgttttcatgttttaaaaaatagacccctgtgtaaaagacaaaattatgtttactgtctgctagaatgcttacttcaaacttgtcgtaataacttgttcccttcgtttcaataattcagtacaacttcaaaaatatgtgttttcttcttacaggtggttgatagtaaaagattcctttttactgtatatgaaaccagacagtggtgctattgccttcgtcctgctggtggataaagaatt

SEQ ID NO: 37767 - DNA, 1875 bp, Bovine  19866880403761
  misc_feature (1)..(1): n is a, c, g, or t
naattgatgcttttgaactgtggtgttggagaagactcctgagagtcccttagactgcaaggagatcaaaccagtcaatcctaaaggaaatcaatcctgaatattcattggaaggactgatgctgaagttgaaactccaatactttggccacctgatgcaaagagccaactcattagaaaagaccctgatgttgggaaagattgaaggcaggaggagaaggggacaacagaggatgagatggttggggcatcaccgaatcaatggacttgagtttgagcaagctccgggaaatggtgaaggacagggaagcctggcatgctgcagtccatggggtcgcaaagagtcaaacacaactgagtgactgaacaacaattataactagacttattttggtgatcatttcataatatacatacatatctcatcattatgttgtacactaaaactaactcaacaattttatgtcaattttacctcaaaaaaaaaaaagcaagaaaagcaagttgcagagaagtgtgtaaattttttaaacttatgtactgtttcccactgtaattaataataatacacaggatgcatctttgaagtgaaatgaatgtattgttttccaaataattttcatccagatttgcatccttgcctaattcaattttaacttcaagtggttgcaaatgaatcttttattattaagataaactttgttgaagtatattgaatcatttaaaaaaaacccattttgtttcatagcatgttttaaaggctgaatgatctacataatggtttcctttctccttaacttggcctatgtcgacccaaaataaataggcttacctcatgcttggtcattgtctccatgaatacagctgacgttttctgttttcttttagaccatctgacacttccagaaaaaaatttttataacaaattagccaatgagacaagtaagttacacttttgattttggcatcggcatcagcagcattgattagcaatacttatcagaataaaattttattaatctggtctctagttttctgcacttgacagttgctttttgaattttctgccaaggctggttcagtggtattagctacaagtagtatttttgtgagtacaacattcaaaatctgactccataaaacagattagaaaatttcacaatactgcatttttttactgtctggtttttgatgttaaatacatagattagttgaaaataaactagactgttttgagtacaagtgactagtgcaatataaatttatctcagtttgaattgcatcatctaaaatcattcttcaaaaaaaatcaccaagcacatgaaagagcattaaagtttgttcaaatgattaagtttatgttttattgtttattaaagccttaactgagaagaaacaagcaaggaaattttttgtttgggatgagaagaattaatcctaaatcccgtactcctctatttcagtaaaatgaaacttttaccacaacgtagactccttagtaaccaatgaaaatagagaattaaacagtaaacttttaaaattaattttttattgaagtatatttgattcacagtgctgtgttaattactgctatacaccaaagtgattgctatacacatacatacattaaaaaaatttttttcattatggtttatcataggatattgaacatagttctttgtgccataagtagaaccttgctgctaaaaattaaacttttaattagaaagtttcatacaaaaaaaaaagtttcatacgcttttatctatttagaagcattaagagatctcactgaggaattaggtgagtaactatttgtacattcagaaaaaacttctcacctttgaacttaaggtgattttatagttacataaa

SEQ ID NO: 37768 - DNA, 910 bp, Bovine  19866880444240
  misc_feature (1)..(1): n is a, c, g, or t
nagctgcattcctgcactgcccccccgccccccgcccccgggccacacttctttgcacctgtgcattactcattctgcatgccattctctccataattacgaacagaaatccttgttctcttcaatgtcattgtgtccttggcatcctgctcagggtctggcaactagatcgggttcagcaaaggtttgttgaacagaacaaagcagcacccagaatttctaaaatcaggagttgaaggctgtattaccggcctctctcttgatatctaatctctttaacagtcttagagcttgtatttctgtagccctgactgtatttatttttgaatttattttgtactggggtatagccaggtaagaatgttgtgatagtttcaggtgaacagtaaagggactcagtcatacatatttgttgttgttgtttagttgctaagttgtgttcgactctttgtgactccatggactgtagcctgccaggctcccctgtctgtggggtttcccaggctagaatactggagtgggttgccatttcctcctcctccagggggatcttccccacccagggatctaaccgaggtctcctgcattgcaggctgattcctcaccgctgagccaccgggaaagcccccagccacacatacacatgtatctattgtcccacaaacttcactcccatccagcgtagccctgaatttaaatcaagttctttttaaaactgtgttagccatcgtgcttgttgtgaatggattcactaacttcctttaccattcatgccagtcactgggagttttaaatatgctccttctacccgccgtggatgattattgtctagctccagtgctcttggcctctaataaaacaattgctgcttgttatgtagtagttagtaacatttctgttataaagtctc

SEQ ID NO: 37769 - DNA, 2719 bp, Bovine  19866880497168
  misc_feature (1)..(1): n is a, c, g, or t
ntgaagttgctattcgtgtccgactgttcgcaaccccatggactgcagcctaccaggctcctccatccatgggattttctaggcaaaagtactggagtcactcagtcgtgtccaattctttgggaccccacagactgtagcctgccaaagtcctctatccatgggattctccaggcaagaatactggagtgggttgccgtttccttctccagaggatcttcccctgacccagggatcgaacccaggtctcctgtgttgcaggcagattctttacagtctgagctacaattctgacaaaaggaaagaaccgacaatggtttaatcttaggcactcagacgggcagtctgagaaacttagggatggtttccctggctcctctcacaccacaagcaactccctgacactcaaaactgacctctgtgcatatagatgtatgtctagtgtgtaacaggaagtttgctttggctggtctcagagggatccatttgtctagggaggtctgcacggccaatgaagccactgcctcccttgccatcttagcagctttaagagggtggagtatttttctttgaggccaagtttggcccagagaacttcctcactgaaattttctgccaggttggggttgcttttcttgcataagtccaccccttactctcaccccatccccctatttgcctttggtcaaatttctggaattttggcctatgtttgtggggttaggtctattccttcctggtgcagtggatgtaaagatatgctttctcttgggtgaaatttacaagcacattttcctctttgacaggaacaaagagccacaaatatttcctaaggggagaaaaaagcttccagatgcaggactccaaataaatgtgagggttcccccccccgccactttttcctttggcattttttaagcttaataattgcactggacatatttatccagaagaaggcccacagttttcccaacttcactgaaatttccaagttacaaatacatccacctctcccttgcttgggctccaggccatttatctctttcttaaggcagtcaccacagatgtcttgagtttcaaccctgtctagggactgaggaagataggagaaggcccctttttcctcttagtctcctgagctctggtaacacagaataatcaaggtgggagggacacttctaaactcttgaaccatcagtaaactaattttaaattatctctacttagagggttactgaaaagaaaattataaatgtcaagaagacctttcaacaaacttttacaatctgtagcatatttctatattttttaaactaattaaagcattctaattggtatcattttctatttttagtttataatcttaaaatttttctcttaccatgatcagaataattgtgggagatacttaactcacatgtggaaaatcattatcacccacacgttttttaaaaggtttttgaagaaataaggtacttatatttgattagaaaaacagctctccttttaagcgttggcaaagaatgcactaagtcctaagaaatcattttggttctatgtcttaacatttacttataagcaatcatggagacatttaatgcagctaaatggctttaaagaaggctgagcaccaaaaaattgatgctttcaaactctggtgctggagaagacgcttgagagtcccttggacagcaaggagatcaaaccagtcaatcctaaaggaaatcaaccctgaatattcattagaaggatcaatgctgaagctgaagctccagtactttggccacctgatgtgaagagctgactcattggaaaagaccctgatgctggggaagattgagggcagcaagagaaggggacgacataggacgaaatgcttggatggcatcaccaactcaatggacatgagtttgagcaaactccaggagatagtgaaggacatggaagcctgtcatgctgcagtccatggggtcacgaagagtcagacatgatttagcaactgaaccacaacaacaaatggctttagccagtttttattctaacaggaatgaaattaaagtgcctaggaatcagattctgcttcaggaggtctggggctagagaaatattccacatctctaataacaaattctcaggagatgcagacactgcaggtccatggagctgagaggacgtagagtacagtacatcttcctatccctaagctgccactcatgggtgaaatacatatgtggacacgggtatcatacagcctcaagaatacaggggaatggactgctccctccagaggttcccttggtatgttttttacagtggattgaaaagtgatttaatctatgctgttcaaaaaataagcgaatcccttctaaattctaagccctaggctagtcactatctaacataaagttgcataatactgcataatataaaatataaagaccttattaaatttgacatctgtactctgattatcacctctttcaagactaaagaattctctattgctccttccacccttgcagcactttttattttgaaaattttcaaatctatagaaacactgaaagtgtaaaataactaacaaatttaaacctagatttaccaatctttaacatgctgctatactctctttctgtctgtgcatacacatctatatacaattaaatatacactgagcttattttaatgtttgaggtcaaactgttgacaataagttgca

SEQ ID NO: 37770 - DNA, 1608 bp, Bovine  19866880511306
  misc_feature (1)..(1): n is a, c, g, or t
nctgagtgaaaaatgttatccacatttcctttctaattttgaaggaaaatagaatcctagagctatctattagacacttattggtagaatggtagaagtatttgattcctggtttttatttgtgaagagattagaaggagctttaacaaaataagaccaattagagaacttttagaggaggaaatggcaacccacttcagtattcttgcctggagaatacaatggacaaaggagcctggaatcacaaagagtcggacatgactgaagcaacttagcagcagcagcagcagacaaattttaagtaacttagtaaacgaagaaaacaattttgtggaatagagatacacaggacttttacataggacaataaagctacataggacttcttttttttttttacttctgtatccaagtagtcaagagctcatgctaaatgctaacagtaaaattctcctttgctaaacacttttaaacattccattatgttcgagataattttatgctttgagaaaaggggagatgggatcacactgctgatatgggggtagagattactggtgagggtgaccagttcttccatgaactcagtttccagtggggaacaccaagaccccatcctatggacttaccactcctgaattcagtgagtgatctggaatgacctggcactttagatttttttcttctctagatccatctaggtgacttgtagacgcttctttccacacaaccaaagaaagccatttgggaatgctatttttctctgaataggcctcttgtgttgtgattggctttgctcttgggagatggactgtaaatggagacttgcaattgttaaaaataaagatttttacccaagttcattgctacctctgctcatatatgcttggttttcaatttgttactcacttgcaggtggagcagggttatatgcctctaacttaaacatcattgattaagcaatatagcaatcttctgtcagtatttaagtacagagctaaggaatccactcctttttaggcccacttgccaggaatcaccttgaccaggcttcagaggaatgccctctttggtgaggctctggaaaagctggatggagagtaactcatatcctccttctacttctctgtgagtgagaaatgctttaaaagaaagagagatttacatacctaggaaggtcaccatggctcagatattcttggcctcatctttgaaattgctcatcaaatagaggttaggaactctgacatatttggagaaaaaaagagatcaaatcaagcaaacaaagttttcaaaagttacttctagagaaaagaaaagtgttcttacctgaagtagccaatctccttcattctctgagaaaagatgctttggctaccttagttcacagtaattcttagatttatttggaataaaagagtaaaatgaattttcggcccctctgatagctacaatcattttatgagttcataaagccaagtctttagaagaaatatggccttcagtccctgttaatatatcaaagtctaaaagtctgtatagtgttctattgacttatttttgaggactatattcttttttccccccaacatatcattaagggcaggg

SEQ ID NO: 37771 - DNA, 1960 bp, Bovine  19866880524889
  misc_feature (1)..(1): n is a, c, g, or t
ntatatttatttatttttaattggaatataattgctttacaatattgtgttggtttctgccatatatcaacatgaatcagccataggtatacatatgtagtctccctcttgaacctcccctcccacctctcaccccttcccacacctctaaattgtcacagaacactggtttgagttccttgagtcatacagcaaattcccactggctatctattttacatacggtaatgtgtatatttccttaattcgtcccaccctactctctcaactcatcccacgctctccctcccctactgtgtccacaatctgttctctgtgtcttcatctccatagtgaaaagggaaagtgaagttgctcagtcgtgtccgactcttagcgaccccatggactgcagcccaccaggctcctctgcccatgggattttccaggcaagagtactggagtgggttgtcatctccattactgccctgcaaataagatcattagtaccatcttttagattccatatacatgtgtcagtatacagtatttgtttctctctttctgacttactccaatctatataataagctctaggttcatctaccacattagaactgactccaaacgcattcctttttatggctgaataatattccattgtatatatgtaccgttgcttctttatcccttcatctattgatggacatctaggttgcttccatgtcctagctattgtaaatagtgctgcagtgaacatcgggggtacatgctgtctttttccctcgtagacacacacttagtcttaatggcttcttttgatttcctttttttttttttttaaataggcttgtatggttgagtgcctgaattactgtaccatttgaaacagtgcctgcaaacaaactgcttttgtctcagttactcattcaggaggacatttatatttcagggttgttctcggctatctttctgacccgagtgaagacattcaggatccagtgagtgataaattcttcaaggaggtgtgggtttcaacagcagctcgaaatgctacaatttatgataaggtgagattttcgtatccttctcctttttaaattgaattacatcacaaaagtatatcattatttctgcatattattggtacagagtattcttaacgagtgtaaaaacacaacatacctccaaattataatcaaataattctttgtagacattaagaaaacagagtcaaaaagagccatggattatggtttagaagagacttgagtggcattctggtctcagattccagaatcccatcatgagcatccttagcaagtggttacccagactttgtacatgtctagagataaaaagaaaaagctgctgctgctaagtcacttcagttgtgtccaactctgtgtgaccccatagatgtcagcccaccaggctctcctgcccctgggattctccaggcaagaacactggagtgggttgccatttccttctccagtgcatgaaagtgaaaaagtgaaagtgaagtcactcagtcgtgtctgactcttagcgaccccaaggactgcagcccaccaggctcctccatccacgggattttccagacaagagtactggagtggggtgccattgccttctccaaaagaaaaagcagatgggatcaaaaaatgagtcagacctgggttcagcccagctcacacagttgctggtcgtatgagtatgtgtatagtaatttcatgttctgagccttcctttctttcctctcttataaattggagggaatattcatgaggtggtcatgaggataaaaaataatctgttaaatgtatttagtacaagtagattatatccattctaatgacgaagcttattaatagtgagaaacttcctcatttggacagttaaatgtatttagcacatagtagattatatccattctaatgatgaagcttattaataatgacacttcctcattttggca

SEQ ID NO: 37772 - DNA, 1351 bp, Bovine  19866880557435
  misc_feature (1)..(1): n is a, c, g, or t
ngtattgggacatgtattgattctttgtggtatcacacaaggtactgtgaagaaagatcttctcttgaccttgatggaatgattttaaagacttggaacctgcatattttttaatggtttgcaatttaattccctaacagaaattaaacatgctatgactgtctattttcataaaggttcaaatccaaagcaaagtaagaatagatcaagatgggaatatttaaaagctattatttgtcttactgactctcaacactttgtaggtttataggtccctttaagtatctgatgaaggatatgaccccccccccaccttctaccagaaaaatattcatgcatacatccattttaaattgcatataaaacaaatgtatactcagtttcctggaattctggtataggacccctgattcattgagaaactcaggtgctctgtacagtgagggctgcctggcatataacagaatggcagaatctgtgctctcagagcttccagtcccattggggtggaaacagcatgcccccaagacgcagttcggtaatagtgcccttcgcgtcctctttggctcaggagcaacagttcctgcccagcactgcaccctccacagaggaatcctgcaggttagtaaatgcccacttcagcaaggggcccaggaaggtcacgtctgccttttgtagtcatgtggtattggaggacttattcacctctctgagccttgctgtcttgtcaaagtggagatgctaattctccttttcagggttactgtggacatcagctctgttcagtcttgagagggtgctgtgcagatggtgatgctgggcagttatatctccttttcttgggagaattagtaaaagagatttcaaggatttcaactacacagcatgttactctgaattgagggtcacagattctttgttttgattatctgggtattactttaaatcctctcacttggagtaaacatgtcaaaattacttaaatatagattgcacaccaaatcaaggacagaaatatctttgtaaaaataatattgcatgtatacttactgtgatattatgattggttacttcaataaagataatcttagatggagctatgccttttaaattgggttgaggcaggaggaagagcccataatggtgcccctgtcaaaatgaatgaaaacaaagggagaagaggcacagcctgctgcagagagaggcacagtcccatgaaaagtcccctgaactgtgccgcaggcctgatgacctactgactgtgtgatcctatggctgtgattattctcacaaaaacaactcagttgtctcaaacctgtggaaccagagtcctcaggaaatggagtattgg

SEQ ID NO: 37773 - DNA, 1361 bp, Bovine  19866880736965
  misc_feature (1)..(1): n is a, c, g, or t
nttgagatggttggggttctctccggctgagtctgagagtccccttcagttgacagttggtactgttatgtacacatttatctgtgtatctgtctattcagtttgcttgcttctttacttacttttatgtaattactttgaagaagtgataagatattttggaattttatttgtaagttaaccttaccattttccagatcctgaatgacatgatttaaaggaatctaatttgctagtccagaaaaaatgataatgccaaataggaaagtttatttctgatttatggtggaagtagacataataattcttgaattgttgtttgtacatgactatgagacccaaatccaaaacctgttttatttttgaaactggtgttgttgactaatacgtgatttttctttgcagtggagaagaattagaatgtaacctgaaagatcttaggccagcaaccgattatcatgtgaggtgagtattggggacctcggattgctaaaataaatggtttgctcctttttaaaagtatttggttaacagcacttgcctagctaaaagtttcagcacctttgctcattggccattcctcagtgccctacactttctggcatcaagattgggagtccacagaagtgcttctggtcatagaaaagtagatgataccctgaacagaattttaaaattatttttataaagtaacttttatttcacatattcttctaagatctattggaacatgtggcttaatgtatgatattttctatcagttatttcattatagaccttccatgcaaaccatatgttcagcacgaatgactaaataaagtccttttcatgtttcaagtttggaccataaaaggcaataggttttgaatttgaagtctagtaatgcaaatatgaacattatctctaacaagagctaatgcagtttgccaaagcaactcacatagtttggtttgtagtctgaaatctcttctgtgattttttttcaatctcttccatgactgctctggaaggcagggcctgctaattttaggaagaaacccagccaaccaccaacctgcaaagagaaaagtatcagagctcatctgattatccaaagatatatcaatttgcgaacaggcagatttcttaatctgaatgtgatccataatatcttttaagttttcattaaaactttcattttgtataatttttaatttatccagaaattcttattttatctaacctggtgaacaacaacaaattctctctcctttcttcaattgtgcatgtgtatatcaagatgatgtaataaaattgcaagcatcctttgttacactttacaaggttagttcacacaacatgtttctgtggtggtggtgtag

SEQ ID NO: 37774 - DNA, 744 bp, Bovine  19866880767539
  misc_feature (1)..(1): n is a, c, g, or t
natggattgtgagttatactagatcctgagaagacaagcagggagctcagacaattagtgaaaagatcctaaaacaacatttaaaggctgtgtccaaattcaagctaaaagactgtgccctattcacatgtacgttatcataaaacatttaatactgaaagaaaatcttattcaaagaggcagtgtgtaattgtggagtctgttaatagttcaagctatagattaattttcattctttacactttcattgcgccacctttagttagccatttaacagagctcagaggtctggggatacctggcctccccgaagccctgagaaagcactcaacgggcggtctaaactgtaaccggtaggcctggcaagtaaagtaagggaactcctcatttcggggaaaaacttagggataatgaaacgcagaaacgtttgtggtccttaagaatctacttgcctttagtactttacaaagacagtaaagataaaatacaggcgtggtgatagttctggactgactctacaagttctgaagggcctcacacaattctatcctaagcttgaagctccactttcttggatctgagacctaagtcccacatacctgaagctggagcccctttatacacacccaggtccttgggcccttatccctgccccgccccggcgtcatcacttcgtgggcgccacagctggtagctttgtggccacacgcccaggacggtgcatctggcgggctgggcgctcag

SEQ ID NO: 37775 - DNA, 1219 bp, Bovine  19866880811697
  misc_feature (1)..(1): n is a, c, g, or t
ngggttgcgaagagttggactgagcacgcacgtacttgaactgtttgcaaggtacagccaatgagaagcaggtccctagtcacaagcttacccagagggggattgtttatggtgtgggtttagagtcaaggatctgtctctggagaccagaggtttgtgggggtaggggttggaacccatagaggagagggggaagttgggaggtttttaaaccaccaagaataaatccagtaagctaagactatagtgatcatctattacaggtggggaagtttcttaatttaaaaatgtatcaatccttgaatctcttttattggtccctagttgagatataaaaacacctggattataatttcattggctaatgaaaggtccttgccagaactcacccgtcggttcagtcactggctcctctcatcttttgtttgtgtaatattactactacttgtcagttttcatatagttggagggagaagattttaatggtgttgagccaaagctagcataatttgccattctagtaagtttctgtttaaaatgtgtcttgtattaaatgattatgtttgagtttaaaatataattatgtaattttatttcatttacttgtttattactcaggaggcagttattgagttctaaactaggtgcttaatgaaatattctatgttgttctgactttttttgcaaattcaagacatttttctgtttacttcaggggtcttttgctcatatttttgagatgttgtagagggagctgtgtttgccaccagactcctagggcaggatgtgacaatttagtcctttgctcctatctgaaatctgaaaaatgttaacaattggagcacctataggctatgtttaaaactaaatttatataagaattaaaggcttttgatacaaaccttgttttaactttttggaagatgaacttttttttataaaggcaaccaatcagaaaaatttgtttaaattaagttgatataatacagactcaaagtgttcaattatgaaaagctttctgttaaaataactatctggaaaattgtcttcatacatgagcaaatgtagtatgtttgagacataatggaagattctaaaatcccaggaaataacacgatttaatttattcttaaggggctcagtcagtttctccacagctggtgggagagggtctctgttaaaaataaattcattgttcggatgtaactaattaggaatt

SEQ ID NO: 37776 - DNA, 1370 bp, Bovine  19866880815285
  misc_feature (1)..(1): n is a, c, g, or t
ntgggggagttttaagagcctttactagaagaaagaggagcaggtgtgcctcaggcctctctgccctcaatcagcgccatctgttttgcacagtggatgtccatatcagatgaactgaataaaaggttctacaataacctttaaaagcaagcgaggccactgaaggtctacgtcagaattaaagtcccatctcagtctaaaattccatgatagcttgacttttatggctccattagaaggtaacaagcagctatacctggacctttgcaaaaacgcaaattcaaagaaacaggcgatggttgaaacataagccaatacatagcatccaatgggatgctgataacacagatgggaaaaccgcgcaacagcatttgctcctaaacagttgctctcaagagtccctttctccagttcctaccatgtggagagagctttttccaccaagacacaaacgagttttgtttttttggaatgtctgtctgcaggatatgacagggagtccatactcccaccgacctctgtaggagtgtggcttgagcaggctgcagcccagtctggccttctaaagcctcctttcagatgtctgcagcagactgggtctcaccccagaagtgaactcctgctgataagaaatccttcctatggccaaacaaatcactgttggattctcgttgcattcttcacttctgtttttcttcctcctcctcccttcctataaaaaaaggtgtcttttaagtatatctagaaggaaacctgaacagctaggcgctttcccctcttaatgtgttccttatcccactggtgattcaagccctgggccgctccttgctcagcacactgagacggctctgttctgctcagtggtgggaggccacgtcagcaggaaacagcgctggctgccaggtcacattcaagactgtctggagcaagccagcgtgcagcacccgcaggacagaggctgctctatggtttccctcaggcaaagggaacgctcagcctggaaaaaaaaaagcctggcctctgtgcaccacaccaacccaggcttaagggagactccaaatactacaggttagagtttccccattttgaaatgttccccaaatatttccagttacagagttattggtttcccttctcctctttttcttagaggacgtactgtactgcatccaaactcatatttggaaaaggctgccacaagccaaatcaaacttcatcgtggctttctggctcctcagtccgacagaggaaattctgcacacccaacccaccagtctccgcagccctgacacgcgttgagtcaggacggaaaacctgacctaaaggggctgacacacagagaggatcactacaggccttttttccccccg

SEQ ID NO: 37777 - DNA, 2626 bp, Bovine  19866880893049
  misc_feature (1)..(1): n is a, c, g, or t
ntgttgttaaatatttacaacccacactcagtgggatgcctagaaacaaggaggttgatactgctttcttttgtgttatttgtttggttatctttaaaatacatagtcacagtgagggaaagaaatagctaatagataagggaacaagagtgaggaagcaggttgaaatacagaggcatgccttagcctagaggaaaacatgggactacctcagataatgtgtgtggtaaaactatgctgacttatttactggtattgcaggttatttttggaaaatttacagctttataaaatgattacccaacatgttgttctcagctaaaatccttttttaataacatttacactccaaaattaaatgattttttaaaatataaactgttctagaataatttcatacatttttagagctcagggagttggatatgcttttgagacaaaaacatctttaaggtgccttcatttgttttttaaaaaattgaggtaaaattagtgtataatattatatatcttgcagatgtacaaactttcactcatttttaattacatgatgatgatatgtttgtgtgtgtagatagtgaataattcagcatttcataatttatgtcccttgggagatagttacacatatacctggcagtcagacagctaagctagattgctcagggttttccccgctcttaccttgatgtagaagtttacttgtgccagtgtcatgttttttgagcatctccccagaatgtatcactgcttccctcacaagcccatagcagctcccgtcgacatttctgttccggggcaccttgagcacttgtgggacactgagagctgcatctcttctggcagaggtgcgcggcagccctttagaggagccgcccaaggggttgcctgagcagggctcggggatgttgtgcagccttcggctccatacacattgctcagattgaggtccacctgtagaaccaagccagagggcacatttgggggtggagggatggggtctggtgcttgtgtgtgctcacaaactggttactaagtattaaagtagatgcaggggttaaatcctccctaaaaagatgtttttcaagccggatggttgtgtttactgcagggattgcacatttgttggaaataacatcaagtacagtggagatgagtcatttatttcctagccacttggccaatatcaaacaattaaaaaccatttcatggataaggccatgcagccagaaatacctacagggactgacttcatgatacacttattgaaaagagcaggctgaacttaacttgtcctcactagggagcgtgccatgtgactctgaatgatgaaagtagcgcacgtgccaagtagattgttctggtccagtcacttctactgggtgagttactttgttctctgcactataagctaactgttaacatttctgttttaatagcactttatgaaaattctcatagtatcttcacattttatgtgtgccacaaagaaggaaattcagtacttaattaaatttaaaaacagccattttaaaaactaggtgactgtgaaaggctgacttcaacacatcaatttaaagccattgtggtcagtttccatcctgcctctgaggttttacacaaaactggcttcctgtcaaggtccactatttaccttccttcaagaagggtttttaacactcagatctaactttggggtttaaattttattatctttgttacttaattgctatgtttaagaattttagccaagttctcttccacttccccccttactgacttttattgaaagtagaaacgcaagtttagaggggatgattatttcctaattccatagattcctgtagaattttcctcctaaggaactggccgtaccttcgttgtcactcttgagttgggtgtagaatgttcaggattgtggacaagtcagatatttgttgtccccgtacgccacacaagtgaacaaaccacagctaccccacagaagactggtgagtcaggacagataccacaacttcagctttgctgtgctggtgattggggttaggaggtaataagcaaagttatgattcattgcttacaagtgaattgtttctaactaggctgtagttgccttcagtctccattccaggagggctcccgtggctgatggggagagaggaaggaaggatacgatgacttgttccctccgtccttgctctgagagcctgggaggcttggtgaagaatgtgaggaagccaagcctccagtgcgtggagatggttgggaatgttatacagaaacctgctgtgtatcgttactactcctttcccttggtctcctctgactccctgggtgaaacaggagagctcagatggcacattttgtaaatataattttcagcagagagtcagacacaactgaacacacaaacacagctttcagctaaatgaaacatgcctttcccatggttgacttttttttttttaatagtttttgagttcaaaccaagacaatagaatttcattatgcaaatctttgaaccacttttatagcatcactgtcttagtgttgctctaatgtttaaagtcttttctgtttactgtaagataaaacctttgtgtttggttggaaaagaaagggactc

SEQ ID NO: 37778 - DNA, 1853 bp, Bovine  19866880902823
  misc_feature (1)..(1): n is a, c, g, or t
ncatcaggtgaccaaagaattagagcttcagtatcagtccttccaatgactattcaggattgacttcctttaggattgactggtttgatctccttgctgtccaagggactctcaagagtcttttccagcagcacagttcaaaagcatcaattctttggaactcagccttctttatggtccaactctcacatccatacatgactactggaaaacccatagctttgaccacatggaactttgttggcaatgtgctatctctgctttttaacacactgtctaggtttgtcatagtttttcttccaagaagcaaacatcttttaatttcatgactgcagttaccatccacagtgatttttgagcccaagaaaataaaagctatcactgtttccactttttccccaactatttgcatgaagtgatgggaccagatgccatgatcttcattttttgaatgttgagtcttaagccagctttttcactctcctcttttacctttgtcagaaggttctttagttcctcttcactttctgccattagggtggtaaaggaattacttttggggtctgtctttccttatagagccttaatctaggctctataagggcaagatctgacacagagtaagggcttgagaaatatttttactgaatgaatgaaagttataaaacttatggaaaaccactgcaaccattactttgagaaattaagctttcataacatgcaatgttaaaagtcaactttatttactgtggtggtggcggtttagtggctcagtcatgtccgactctttgcaactccatagattgtagcctgccaggctcctctgtccatggggattctccaggcaagaatattggagtgggttaccatttccttctccaggggttcttcctgacccagggatagaacctatgtcttcgccttggcaggcagattctttaccactgggccacctgggcaccccatatagaccataattcatgtattttaaaaaactatttattaagatcaaaaccattttatctttaaaagctaaatctttaaagtctatgtattttgcttatactaataattccaggaaacactgttaggatattaaaacatttttaatctggaaatacattaactagaaaaaacaagaccattcaaggaaaagcagtacaagtttcatccctggtgcttcttgttatcttgaattataatagttatttcaaggcaatttatttttcctgtacagtaactgtgtcaataatttttcagtcttcagcattcaaatcctccccaatgtacacactgtgtgattttaagaactcaaaaggaaatccttcccaatctctatggagtgattaagacattttcattgctttcttgaaactgaatttttaaagtcattcctaacatgaaaatatttttgacttaactttatttctatgtacacatagaatataactcaactacaggggaataaaacagtccaagaaagaaaattacccatgtttttttttaaaaatccttaaaccaattctaacatcactgaaacagagcagaaggcatctgctttgtgtttaagcctctagagataggtctataagatatgcctgtccaattattcaggcaggaaaaaaaaaaaaatcagtgaacactaagactctgacccagatattctttgacaatcttaaatgcatatactctcttccactacactcataactgtcagacaatgtgtcctaaatactagttctaaaagtacaattcaccaatattatggggaagtcccaggcaagaaaagggatatctgaattgaaacatgttccaggttctatcacattatctgcttatcatattgcatgaaa

SEQ ID NO: 37779 - DNA, 1505 bp, Bovine  19866881016597
  misc_feature (1)..(1): n is a, c, g, or t
naccatccacccaccccattattaaggagattgcacaaatcttttcatattatcagacagtgaatcctcatcatagtttttcttttttcattctggcttcacatcaacacttctaaaacaataccaacagacaaccttactttcctactcagaatatatgatgaagaggctacaatactggttaaaaacaaggggatttcagttacaaaattatatccctctgagtaacttcctttataccatgcactttggtttttaccaaggataaaataaaaggatgaaacttacctctcactcaatgaagagcaacagaaacttctttagtttctgtgataaaaggaacatgacaattttaactgggtttggaccacagaagaagctgagctcttcttgtacaactctctgcacacaaggacagcttgtttcattcctgttctggaccaactatggacatggaacccaagcactgatctaaaatcaaatgttagttaaggaaaagaaaaaggaggggaaaattcttgaaatactttctcctagtcaatttgcccttgctatgccttgggagacaggcaggcttaacagaagaggtgatatttgacctagctcttgaagatctgagttggagtacgctaggcagaaggactggaagaaaaagaagagagaatgaggcatattcttgaaatagggcaaaaacttggacatctggtgaggaaatctaaagtacttgggaaggcgagaatcaagcagcttagacaatggggatcaccacagaggttccataaggagaggggcagggcatgttcaaatctgatggacctgcagccataatcagaggatgggatggagaggaagctggataaggacgtatcttaaaatataaggtggtccttctcaggctgagcacagggactcctaactcaggtgtctaaaaaatgtatgaggagatgccaaagacagggcccattagaaaggattccccaggagggagccgagagttctcactcacttggaactttaggtgttcctagtggggcaaagcctttgactgagtggatcccaataaactatggaaaattctgaaagagatgggaataccacaccacctgacctgcctcttgagaaacctatatgtaggtcaggaagcaacaattagaactggacatggaacaacagactggttccaaataggaaaaggagtatgtcaaggctgtatattgtcactctgcttatttaacttctatgcagagtacagtatgagaaatgctgggctggaaggagcacaagctggaatcaagattgccaggagaaatatcaataacctcagatatgcagatgacaccacccttatggcagaaagtgaagaggaactaaaaagcctcttgatgaaagctcaacattcagaaaactaagatcatggcatccggtcccatcacttcatggcaaatagatggggaaacagggaaacagtgtcagactttatttttgggggctccaaaatcactgca

SEQ ID NO: 37780 - DNA, 2058 bp, Bovine  19866881046449
  misc_feature (1)..(1): n is a, c, g, or t
nagggcagtgatgtcccgtcactggagtgtgggtctgggagaatcagactaaaggtgattctgtaaaaacagttgagaccatgtgcatgtgtgctcagtcccaccaggtttctctgtccatgaaatttcccaggcaagaatactagagtgggttgccctttccttctccaaagacgtctgtaactggctgtgattaatgataaacaccattgcactcagaccagcttgttgaggccagatggtgtcaattttcaagggtaaaattcatttggacttttaaataccgtggctcagactgtaaagcatctgcctacagtgcaggagaccctggttcaatccctgggtcgggaagatcctctggagaaggaaatggcaacccactcccaggactcttgcctggaaaatcccatggatggaggagcgtggtgggctacagtccatggggtcgcagagtcggacacgactgagcgacttcacttggtgggacagtagcttaggtattctttctgttcttcccattttctagcttaatatctaggaatgtgagcttcttacccttatctgacagagaacttttaacacttcatattttttaaaaaaaattttccaactcaaactgtgtttgccatctagtgattaattcatgccattacagtaccctagttcagatttcctcatttttggctctgcagttaagctcaaaggcctctagactctgtcctgttggctgtggcttctgtctcaagccacactttccctagtcttcatttggtaagctgacctcagtaatgaagtctgacccctctgagagtagtaataatattcacccaaaagaaatatgtagcagttttttttaaaaaaaaaaaaaaaaagaaaaatgtagcggtttaaaagaaaatgcactttaggaattatgtattatgaaaagtttcggtagattccaatttgaaaattaacccgcagcagcatctttgtgagaatgtagacctctcagataaatgggtgagattctgaccatagtagataccatggccacctccagacttgcccttcttcctgtgtgtcttccagagataaggacattaacagtctcgcctccaaagaggcagtatctatttgaacataattctccaaatttccgactttctgaatgcagatcaaagtaaggacccacactttcttcttctaaacatttgttacatccttgagttagcaaaagcagctcaaaggcttttctttcaaaggctgttgttaatcagttgggagagtgagctaagaaatattttgtatatgcaggagatttaaaactcaacgtcagttacttaaaattcttgacggacccacggtaatattttgcatttgaagcagagttttcaggggtgaagcagagcttctgaacgatgatttctgcactagaaaatatcctgggtctaataccttgtctttcccctgagatttaggctgtgggaactcatttactcagtgattgctaactgaatgcctactgtccacaggaaatggttaggataatatcttttcaaatatctttgctgtcacctctctaacttccatggggtccacgcaaggccttcttacaaggaattttgtcctaggaaggattgtgctgtagagagatagtggatacagttcccactttactgccaagtgcagcttatttttcaggttgttacgaatggttagcctgaccgccacttctggcttccagtctagcaacatgcccttctccgccaaagcctggaacgtgatagagggtattgtgggaagccattcgctcagtctccaaaaccgtgaactgcttggctgtcaattttaactgttactgtgtcttttttcccttgtgatgaaactctctatgtctgatttttgcaggggaagccagagataccgggtgtatgttgtgataccacttctgccaggttttgaaggagacatttcaaccggcggaggaaatgctctacaggcaataatgcacttcaactacaggtaccgaagttctgaaatcctctgttttcagactttcagtcagtcatgcatgta

SEQ ID NO: 37781 - DNA, 978 bp, Bovine  19866881085423
  misc_feature (1)..(1): n is a, c, g, or t
naaaattatgttagtttggctatagagtgattaattctgttattcttaacagatctagcacagatccaaatgtctttgtttcctttatatgcaagaaaaacatatatccaaaagtaaacattttcataatactgcattaacctaatacagggattagaataacaagatcagctcatgcattttaagagtataatgttgtaatgatgattttgaagctgcatctgtctgtgttactgaaacaaaatgttgatgctgccctaacagaatttgagttgatgctgactctcatcctgaccctgtgggaccctgttcctgatgattgtacacagcactgaggcaagaggaacttaagttccaggaatgcatttatggttaatctgttgttcaggttactcagacagccaatgtattttaaagcaaggctccagccaagtggggaatggggagagggctctaacagaactggataattgccgcttgctctccatttaaatcagcccttgtgcccatgacacttttccctttagccagcaaaattggcggcgggggcttgtaatgtgtgcagtataactgccagttcactgttagagagggacaaaaagtaacctgcatgaagaaaccgtaaaaaaatacacactgggcaacaaataaaagtggccacagtatatgagcactccaggagtgagcacacgcctattatagaacaaactcctgcttgtatttctcagagaatattgttgaattaaatgaaatagatgttaactaactcagggcctacaaaagacccttggtgttcatttccttttgcttctctggatcagtctccaattcacatgaccatccttgctgggtaaatggcatttttataaccctcaatcaccggaaggcagtttgtagttctggacagggatgtcaattctctgttgtaatcccacatccgttactgaatttctaaatgactagaggcatgtcccttaa

SEQ ID NO: 37782 - DNA, 1068 bp, Bovine  19866881123407
  misc_feature (1)..(1): n is a, c, g, or t
ncactactatatataaaatagataaaaaaggatgctactatagagtgtgggaaactatgttcaatatcttataataacctatgatggaaaagaatctgaaaaagtatgtaactgaagcactttgttatatacttaaactaaaatacaacattgtatatcaactatacttcagtttttaaaaaagactgtattttagagaagttttaggttcacagcaaacctgagcagagagtacaaagattttctgcagattccctgcccccccacattactaacatcccaccagagaggtatacttattataattgatgaacctacatcttaggatttattcttggcattgacttttttttttaaagagcttttttggaattgtgttagtatttttttaaagagattgcattttaaggtattgcattttaaaagcaattttgtttcccccaaggcggggcttcaggaggcaagagctgtttttcaaacctttcccctcatgcaaaaatattctgggactgctttggatgagcagtacagatgtcacaggtttcctgttgctcccaggatgataaatagctatgaagagaataagaataacaacaagaaagtataatatgcttactctgagctaagagtaagcatattatactctgagtaagagtatattaagcatattatactctgtatagtaagtatagtaagcatattaagcttactctgagtaagagtaagctcattgtataagagtgcactgtttaatgagccattcacttttacatttttatacatgaggaaattgaggtccagagaagttacttgtccgaagtcacacaattaagaagggcaaaaccttaaaaaacagagtggaaatatttcaatatgattttttttttaattttgctttcaacagcttgcatataggccattctaagagtgcaggcttgcttacttccacagatgtttattgaaaccctaccatgagctgttcagagaaggatggccagatcacagttcctgggctgtgatttcagcactggatagaggcatgccacgtctcaagaaagtctttacaat

SEQ ID NO: 37783 - DNA, 2002 bp, Bovine  19866881149111
  misc_feature (1)..(1): n is a, c, g, or t
nacatgggcaagattaaaacttggatggatgatcattaatgttagttggttttatggccttttattccttacttatgtctattttaggtggaaaagtctcattcatctctatggttctcaatcctgactgcatattcaatcttttatgaaacttcaaaaaagaaaaaaagagaacaggtgtcctggtctcctttctagagattttaatttagttagtttgtattatatccaaggaatctgtgcccagggaaactctgatacataactgtggctgcatacaaccacattatctcatataggtttgatctaacacatatataatagtggactattgagactagattgtcgagttactagagtcaacatgtcaactcaagcacaaaattactaaagtagttgttaaatagaaatgattggaaagcttagtgaaaatggttgaactgttggtccaaacagagtcaatcttggttaaaatataggaatggggaagagcaaaacatgatatttttctgaagtcaattgtcataccacacataatcaaaacaagtccatgtcttcaaaagagattgtggtttgctatgacatatcctgaactgacattctctttctcattgtcttttcagctgtagtggtttttgctttcatcctctgctggctgcccttccacgtaggacgatatttattttccaaatccttcgagcctggctctgtggagatcgcgcagatcagccaatactgcaacctcgtctctttcgtcctcttctacctcagtgccgccatcaaccctattctctacaacatcatgtccaagaagtaccgggtggcagtgttcaaacttctgggatttgaacccttctcccagaggaagctctccactctaaaggatgaaagttctcgggcctggacagaatctagtattaatacatgatcaagcacattgctcagtaaagtcaacgttcattattctataccagaagccatagtacagcggaacttgggaggaagtttgaaggttaattttggaattagggacacataggtctgaagacaattgggagcaagaaaagatagactttgtagtgtgtgagcagtttgatttgattgcacactcatcagtgctatcatacacgatttctgcatatctcactgcctatcatttttgcattgtgctgttggtgctagcaagggctctgcagttcggagaagggaggtagtgtagagagggcaattaggtcactttttactagacggattctaactctaatttctttttcataatgagaattttttagtaaaataataaaaaacttaaaacatgactttcagaagctagcaaatttcatggggtcccagatcagtgctgtccaggagaaatataatgcaaagtacttaagcaatcaatataaaattgttaatagaattttatgctttttatgttaaagtctttaaaatctggtttgttttttaaattttaagttcaccttaatttggacattgggtgttcatcagcaatacttgatttattgcaatttcataaattttgccgaagaaaaagtagagtcattaacctaagttgtctaaacatacttaaaatttctctaataactaaaacaactataagttcttaactttaaaattaattgaaagtagaaattcagttctttgagttgcaatagtcacatttcaagtgtttcaatagccaaatgtggctaatggctaccatattgcacaatgcagctctaggttatatggaaaattattgttaatctcataaaaatgctaaaaataaatactcatttcctaaaatgtttttatagtgaaattagcataggagaatgttagagtgataaattctaaggattatacctgaatgccctgtaatttctgcttgggagaaaatggatatgaactataatatgcatgcatttttaatcaagttgggttgcacgtgttagtaatcaggaaatgagactttttaaaaactgtagaaaatcacaaatta

SEQ ID NO: 37784 - DNA, 1342 bp, Bovine  19866881191903
  misc_feature (1)..(1): n is a, c, g, or t
ntgccaccatctccctctctctccctctgtctctctctgttacgtacaagcacacacacacgagcgtgtgcaccgtgagagcaggtagaattagtgtgctgctgtgcttggggtgggagatacaggcacttgtcatccacatggcttttctcattctcacctgaactctggctattcagtcccaggctcctgctttctcaccatcttggaacttctaagacctgtgcccccctggccagcccaggcctacgggattacagttgatggacatgaggcccagcaacctgtgtttcattgggctctccaggtggtgatcgggtgcagtaatgtttgaaaaccaactgaccctgtgaatgccaaacaatgtttaaggaagattttaaatgagcagtatgggaggcattccattaaaacactgaacttaagctgaagcatattccttttgtggtacctgtgtatatatatatatatgtgaggggtagtgaggggaagttccttttttgtctctagcatgtaaatagtaacttatggcaaaacctctagaacttacagggccatatggggagaaactgaaacaaaatggtaagaatgtctaatatagaagaagatgaagatacagtgtacttttggcatttgacctttggaattgttgataatccagagattcagctacacatttgataaaattccatcacatagaatcataatttctaatcataacattgaaagctggtgacaaaagcatcattcttgtgcttttctccttcaaggtcatgaactgtcttctcatccccaggagcagtataccaagtttttgtatcctgatcccttctcagatggccctccctgacattttcttcttttcctacatttggctattactgttcagacaacagaatctgaccccaatatctctttactgataattagcacgaatgctcattcattctgcagataagaactgctgttctaaggatgtggacagcctttccctctggagctctgagatgatgagcatctctgggttcttggaggctctgtcttgctgggtggcttcgctctgggaggagggggctgcatccacctgtgcagggctgacagtggttccctttgtctggaaggaggagcctgatgttaataaggtctggaatgtggggagtccaggcagatttttcttttggaatttttttggtcctggctccccttaagagatagcactggtgcttttctgtttgagatgtttagtgcggcttttgcacttcatgagtggctgatttcttctttcacttgtagcctttttatctcatgagcacatacctcttaggcatactcagactgggtg

SEQ ID NO: 37785 - DNA, 985 bp, Bovine  19866881213730
  misc_feature (1)..(1): n is a, c, g, or t
ngactgtactagaattttaggattctagaaacaaaggcgtgaggtttaaatagcattacactgaaatgttatattcgataacccaaatccacattgggcacttctgacaaaacccatcaacagaccaccatgctctatgaaaactttcatctgagataagcttcacagtctaactctggtttcccagctgtggcatctttcctagtattaggtgtgccagaagaggaatttgtctcaaaacatgcccccttcctcaaccttcatttctgattagccagaagaatactaaaattttttccttaatcagctcatatagaacccagtcatgcttatttatgcaacaacaaactcagttttgtcgaattgatgttataaaacactcatgacaaggatgagctctaaagctgttacttcagtctcatagaagcatcgttggtgttttattcagtttataattaaatatgcatttcaaatatttctaacactttattactaattttagatgttggttccaatatttcctcctctcctatatggggggagatggggtggtggagaaacaaacaagaatagtatatgatacactgaaaatcagtttacaaacacgttttttaaaacaaactatttctttaagagtccacaactgatgacgtcctcataagcagctctgtatttcacctgatgggactaaacacaccacaaataccaggtgttccttagaacttacaaggtactgaaacagaaaattcacatgaaacgatgcttataaagacacgaattagcaggtgcaaagacacaccgtgcaagggagtgtctatctactgtttcagattttagaccattacaacaaaattttaacatgaatatgcactttactaattcagactgatatttttgaagactccaaaatgtggaatttttcaggaaaaaaagatttttttcctttcttttaaggaaaaaagaaaaaaaaactgcagagatttgt

SEQ ID NO: 37786 - DNA, 1198 bp, Bovine  19866881255948
  misc_feature (1)..(1): n is a, c, g, or t
nctgactttatgatgtttaactattctacctaaacagtaagtcaatctcctttgaatggtgatacaagtggtgattgccagttacaaaattattggacaaggcccaatgtgacatttgtttcagcgctagagatataaaagagtctactgtgaaggttactattgtaagtctgtatagaaattacttaaaccgctttgaagtatctctgaaggactcataaaaaccactatttacttctcaatgattacacactgattagagatcatttctgttatgtatttattaaatatagatgtgaacttgagaacagctgctagctaaaggcatatatatatttatactcatgttcacaaatgataagattgcattatcttgcagctatttcatatgtaatcctcagtgttctctttctccctttaacctcctgttcatcctggtatttttattctgtgaaagtttactgtcttaattttcagactatcttatatgcaaatgatattcattatttggatccaaaacaccacttactctcataaagttactacactgttactcccatgttcaaaaatattctgtgtaagttaatagcttctaaatttggtctggtctttggatttaactatgcgggaggcctgctgatccaatctagggagtatgttaagaaaatatttccatagcaatactggcttcacttctaaagtaccatcacaaaaaatacaaacataaaggaaaatttaaaaggaaaaggtcaaagagatcattattcacagaaaaaggatattcaaatttagggatttcagaatcatctgttactataattccttaagtgcgaagacccttgaatctgtctccagatctatggctatttatctgtcaacggattgtttcttgtagggactgttgttctccttaggtcgtttactcatgtctggagccaacaaatccattgtttctacaagctaaacattagcggatagaaacgatgcagaacctcaattcctggttacatttatttacatactgaaaacgaactgtccagcagttcaggggagacttcatcgagcatcaccatcagagcagactaaaccatgtcaggttggaactggctgggactgcagaagttaattcctaaaacacttagaatagtatccagcttatctctctggtatagcagtggtttatgagtatagtccccaa

SEQ ID NO: 37787 - DNA, 843 bp, Bovine  19866881261054
  misc_feature (1)..(1): n is a, c, g, or t
nttgtgatttgctttctgacttgtattttttttttttagataattgcctcaattctgtttatcctgatgctgtttatatagctttggaaggaagtactgggatctctgttttcatacttacctttctctccaagtaggaaaggctagataaactaggataggcaggcttccaacatgagaaaaggagacagggtggaagctggtaggacttactatctctccccaagtgagccttcagaaaacatctggatgcaatgccacactggagtgtgtatggactagttattccataaattcagcttctgtaactacatgtgtttggtacaagtaatacaaagtgtgttcacagccaagtgaaattttaattctacttgcttttttcaaaaccagaatctttacattttattatttggacattgtagtcaacattttgtacttatttgcatatttagtgcttcttagaagtcattccaggatgattttgcattgtaattttacaattcctgaaatcctgtatattaaagtgaaagagtttatccaaagaatgtcaggtttgtttgtttgtttgtttttaagaccagtgattctcataatatgactagattgaaatctgctggtgctcctcaagggactctaaattcatgttgatgctggggcagtcagttgctgctatgcaacttagttttgagagtacatttaataatttcctctaattttatttttgaactgttaattatcctcactggtgtctcaacaccaatgctaattttgttttgccttgacaactggaagggaatcaatcacttagtgattccctaaagtggtacaaggaccagaatattt

SEQ ID NO: 37788 - DNA, 811 bp, Bovine  19866881269954
  misc_feature (1)..(1): n is a, c, g, or t
nataaggctttacaaagggaaaagaaaatatttacccaagtcaataaaatgaaagcaaacctatgactgctgtcgctcttgggggttaggctaggagccgattgctctttgtgttattctgtctggacacccaagtggaagcttacggatagccagaccttgatggtggtcactgagaggtgggaggagggtcctacaatcaaatgcagactgtccgaactactctcctgttggtttctggctccagttaacatctggaatgggaagttgtaaaggttttttgccttttgtctaagtggctttcccagcgaaatgtgcatcttggaaaactcagacaaaaggcatcttccctaaggagctgtgcccactttgccttggactcgatcccgtattcaatgaattaagcagcagacacaaggcaagggcggtgaggagtacagtggagacgattcggattttgttcccatgtttcaggacctctcagagaagcaaaaatgaattgtaaaatgccaaaatgattgcatctatttttatttaaaaggactctttttcccataacacccttcctgatgtcctccatcatgagcctttgagtaagtttcccaaagagtctttcaggggaacaccagtatttgtgagtaacggccgcacagtatcagcctacctgtaatcggcagcaatactgtgcagcaggtaacaggtccctcatttcgaagccggtgtctgtcccatgataaacgagttctaaggattcttcatcttctccccactccaacctgtacctctgagatgtcggcaccagagctttcag

SEQ ID NO: 37789 - DNA, 1046 bp, Bovine  19866881317149
  misc_feature (1)..(1): n is a, c, g, or t
ntattaaaattttatagcctgtaagtgctttgctgcaaactaatataatttcactttaaaccggaatgatgagtccagtaggtagaaaattaaaataaacaaatgtaagataacttttgcaggcttacctcaaatgccacctgctcctcaaacctttcttagacccttacatgaacgtgacctccctcccctggaaccaatgttttctttgtatctctcattctcatctggcctacattatgtctgcttatctttgtttcatacctttctctctgcttcccttaactacatcttaatttccttgaaagtagtgtctagttttgcaaaatacctaacacaggacttaatcatagaaggttctcattagccttaagaaaaaaaaaaaaaaaaaaacacgagaatgcaagccaggtcaagcagttattaataggacagtgagcaaaggactcttggccagtggcttgaatgccttctcttggtaaagggtgccctgatagatttctagggggctagacatataaactcccctcgcagggcaggcacaagcacactccccctctctcaggtcctcactaatattactgaaatactgaccgtttatatgatactttgaatttttgaccgtggatgtgtggatttgtatttcagcacctcgaagtaacacagttagaaggaaatgcgtgtgaaattttatgggagacggtaccacccatgaaaggcgaccctgtcaactacatcctgcaggtgttggttggaagagaatctgagtacaaacaggtgagcaccagcatgtggcacatgtgtggcctgtcggtctggttggctcctggcctctgcctgttgctgtgaggattcagtggcaagtgaactacatttttcttaaaattgatcgtggaaactgattcacacgcacccattacctgactctctaggatataatagctctagcttatgttcttacattttcagtttcttaagcatggtctcatgggttttaagttctatatttgtatttgatattgcctgtgatattcacaagtatcaaa

SEQ ID NO: 37790 - DNA, 770 bp, Bovine  19866881328428
  misc_feature (1)..(1): n is a, c, g, or t
ngcacttaacttacgagtattaggtcaaattcttataagtaatgaagtcatcttatgaaagaagacaaaatctggaggaaagaagtaggtccatcttctcacattgctcactttgctcagaactgcctctcagaagcctgtgccaacatggatccagggcagtgccaggactgcaaggacttgaaagctgcagctctcacctgaacaagggtcccatccccgctacagtagctcagcagccctccacgtgactatccacccaggcaagatgcttaaactgggagtcccaggttaatggttaaaccatagtctgtgatactagcaccattcctctgccctctgaattctttgtggaggaaaagttcaggaactgtttttattttctcttttacccagagtcccaggtgctctgacaaccggccactcaacagtgggtagagtggcacagctgtggccacatcagccccttctcgcctcctcttcctggcctgtccctctacacgtggactgaatcatgctaaaaccacccacgtaccttcgtgaagttccagcgctggatgaagtgacgggccgcatcgcgagctgccttcccgtggactgcagaggctatgtcatgccatggcatccgggggggtggagtgcctgtcaatgaaatctgcccaggtgcaccaggcaaggatccacactaaattctgcgcccacaaggcacacaagccatctgaccctagctctgaccccaactatgatacataaaaaaaaaaaaaaaaaac

SEQ ID NO: 37791 - DNA, 1565 bp, Bovine  19866881350019
  misc_feature (1)..(1): n is a, c, g, or t
ncctgtttccctgttggtaaaatggagacaaccccctccctcacatgttgaaaaatgaaatgatatagttactattaagagcctcacactgagcatagtatttgacaagtcctcacgcgtttgctttcttcccctcgattctaatcaaatttaaattcttggctcagtcaagatttcagaacgtgccctttagccttctgtaattatcaaaaaaacccaaagcagacaaaataaacaacaaatgaccaaaagagacaatgaacagagagagtccccactccatagacaaccctgcccacaaaagtagtggttcttccagaccgtttcatgcgtatgccagatattttatgacacacgtagttctttttttatatttctctgccatgcccctccaccagtatcaccaattttgttctctctagtgattcctcttaaatccttaagcggtaccatgatgctgttacttgagtcattcttcactgggttcctgtgacataaaaaaggctaaattaaatgtcagaaatgacactctattttctttgataaattgtagaaataaacagtattgtatttttttcttcctagggtcaaaagaatggacaataaatttgaagcaatgttcctcttaaatttgtcatatttgtgaccattattttgagatatttctaaaattattttggtctttaaacttttttcctctatgttcttataaagtaaaaattgaaataattgtacactttagccctttgatgcttaacctttttctgatttatatgctatgatacaaaaagtgaaattatgtcattgttgtcatagaattttaaaatttgaaatagaaatagaagtgaataaatgttttaagttcctcttgttctttgtgtgatgttccgttaaactgtaatttcatattatccaaattaaggaaatgcttttcagcctttcttcattgccattacggaagtgattctaaatcttcaaagcacaattgaattgtgggcataatgagaaaggtctcctgcaggaggcctatggccctccctcctgacctctctatagctggtctttggcacttaggacaaacagtttaattaattagaaaggactttagttggggcttccctggtggctcagacagtaaagaatctgcctgtaatatgggagaccagggtttgatcgctgggtcaggaagatttcttggagaagggaatgactactcactccactattcttggctggagaattctatggacagaagagcctgatgggctacagtctgctgctgctgctgctaagtcacggcagttgtgtctgactctgtgcgaccccatagatggcagcccaacaggcttctccgtccctgggattctccaggcaagaatactggagtggattgccgtttccttctccaatgcatgaaagtgaaaagtgaaagtgaagtcgctcagtagtgtccaactcttcgagaccccatggactgcaggctaccaggctcttcggtctatggggtcacaaagagttggaaacgacttagcaactaacactttggtagaggactttagaccaaa

SEQ ID NO: 37792 - DNA, 945 bp, Bovine  19866881371953
  misc_feature (1)..(1): n is a, c, g, or t
naacactgtgaatatactgaaaacttctgaattgtacactttaaataagtgaaaattatggcttgtaaattatatccctaagaagctgtttttaataaaatctgccaagacaggaataataagtagagttgtaaaaatcaatcaacacatagcaatactcaaagaaagaacaagtaattttccttgatcctacagaataaccagcaacaaaagtcatttttatatttcttgtaacaaaaataggcaaactactacttataaccaaaaaaaaaaaaaggtgaaaagatattgtcaaaacacttaaagaaagcaatctgtcaattcctactttgaatattgctttaatttcactgttttcactaccagaagactctgctcagtgagattattatgttttcacaaacagaataatcacatcccagaagtttctgccaaactagtatccatgaaattataatatgtatcacaaagagaactattacaagctcagaaaaggcatgcaagtttcaatgactagggaaacaattcgataaagacaagacaaattctcagtcagtgatcatttccttttcaagatggggtttgaaagaaaggcacgaaagataaatgaaaagtggcaacactcagctccttgtacgcacacttgctgggtgctttttgggaaagaggcagggtgtaatgtttttagttgctctcagaaagacaagttcgttcatgcaaagacagaaggtagataccactcatggctgagtctctgctgaacacctgaactgtcacagcattgttaatcagcgacgcttcaatacaaagtaaaaagtttaagaattaataaaatacaataaaaggcagataccaaagtggaaggtaggtgtatgctcagaatatgatccactggaatagaaattaactaggcctatcctctgatctcactcagttttagctgat

SEQ ID NO: 37793 - DNA, 2394 bp, Bovine  19866881376500
  misc_feature (1)..(1): n is a, c, g, or t
naagggattgcattacatcctttgggtagttatgacattttaataatattaagtcttccaatccatgaatatggcatgtctttcctttatttataccttctttaatttttcccagcaaagttttgtagttttcactgtatgcttttacctctctggttaagctaattacctagtattttattattttgatgttactatatgtgaaattgtttttttaattttcttttcacattgttcatgtatagaaacagcttatttttgtgtgttgacttagtatcctataactttgctaaataaatgttcattggttctaacagctttttttgaggagtattcagggttttctacatatgagatcatatcacatgcaaacagatcattttacttcttcttttccaacttgtatgccttttatatctttttcttacttaactgttttggctaaaatttctggtactatgttaaacagaatggtgaaagtgggcatccttgccttgttcctgatcttagaggaaaagctttcaggctttcaccattgtgtatgatgcttgttgtttcatgtatgaaacatggcttttcatacatggttgacaggaacaacatgggtttggactgtatgtgtttagacatacagttgttgtttgaactcttatttctgtagagtcaatagtaatctctgatttagtaatttgggtcttcctctttttatccttaattctgctagttttgtcaattttgttgatctttttaaagaaccagcaattagtttaattgattttatctattgttcttttattcactatttcacttacctttgctctaacctttattatttttttcctactgctggctttgggtttattttgttatttactagttccttaagttaggttgttgatttgagatcagaaaatatctgtgttttttcttagcatttacagtagccaaaaatgagagctctgtgcctactcgacaaaagccctaaacattaaaaagcagctttcaaaaaacatttagagaaattttcacgtgattgaatagcaagagactcttcaaggaaggttcctggacttttctaaccctctaaagcatagatagaaaagttaaaaagagggaactaaaatcaaaagaagaattttatttaaaaggctcaagctctgattaagaggagactcatgacaaatactaagttccacttcgaaagactattttataaagcaatggttggaatgcgaaataggaggaaaagagacgaaatcattagagatgcaaaaagaaagcagaagtattgaatttctactttagctttgtctttatcagagggtgtaacataaagctaaaaaactgaaagcaatcacaagggttaaggctaagataagtgaagaatcagatgggaagagaactcttagttcctctgtttcggtttctaaacacagatgtttgacataccatgaccctaaaaatactgtaggtggaattgtggaatctgtgctttgtagcaattgcagagtcatggagaagataaagatcaccagaagactggagcgaaaaaaactgatatccaagttttcagcaaggaagagaatacaactcaagaaagaaagtgtgccttggcacattgattctacttgatattatagatctggtttccatctcttaaccattttagaatatctgcaactggctcataaaaaatatttctattaatttaacaaatatttattatgggctgccttttttcccccaccttgtaacatttgcatgtaatccatactcataaacaggagggccacaaatatttttaaactaaggatgaaatcatatcaaagcgttgttggcaaaaagaaggataagctttgatgatctgaagatgcttccccaaacaccacagtggcttccttccagcaggctgctctgcatgggctttgctggtggctcagagggtaaagaatctgccctcactgcaggagacctgagttcaattcctgggtcaggaagatcccctggagaagggaatggctactcactcccctattcttgcctggagaattctcatggacagggagctggtgggttatagtccatggggtcacaaagagtcggacacgactgagcaactaacactttcttccacatttcatgtctctgcaggtcatctgccccctttctttcagcttcatgcccccattttgtgtattactcagtatcccagatattaggacctggaaaactacatttcctggtcacactttccagctgtcttctgcttaggtcagcccatgggaggtaccggtgggagactaaaggagaggaggaaggaaaacaaacttcctcttggcttcaggaggtgccaccagcgtggcaggcagctacatgttccagcaaccttcagaa

SEQ ID NO: 37794 - DNA, 754 bp, Bovine  19866881388426
  misc_feature (1)..(1): n is a, c, g, or t
nggaaaaccccttctctgagatggctgtagtttggatgctattagagtggaagctttttccccctcctgctttgctctccctaagccttcttcagctctgtgtctgactccgcccgccccaccgagtgtgggaaccgtatcattgatgaacagcacgctctgctcacaggctctgtgaatgacaccattgagagcctttccgcatctctgaatctccttgtttgtctccctcgcaccccctcaccccgccatattcggaatccagaatgccacagggacattcaagttacttttttttttttcttacttggtactttaagtgcacttattagacttgtttggcacattaaagcaccaacctgacattctttctaagaattttaagacacgtcctagggagctctcattgtctcctgctttgttaattgagaaatgacaggagtgatgtcactgggagggcttacaagctgaggtagactatcatttcacgagcaaatctatatggtctgtgcctttaaagcagactgactgaaaatgaggtattcctgctttactggcttaaaaccaaggaaggggacctgctgtaaatgaagtcggtcttctaagattgattgcacccttccttgtcctggcgtaaatttgcaaacaagattttcatcaaaactatttgggtggtttgaaagtgaaattactgcatatgactgcctttaaatctttgagaatctttgcgagctttcattacactgaatatcta

SEQ ID NO: 37795 - DNA, 1468 bp, Bovine  19866881404349
  misc_feature (1)..(1): n is a, c, g, or t
ncccactccagtgttcttgcctggagaatcccagggacgggggagcctggtgggctgccgtctacggggtcacgcagaatcggacacgactgaagcgacttagcagcagcagcagcagtagaagtcatctgttttccattggtttattctgattagttttgtagcacatttattgactctatatttgtaaaggggacttccctggtggctcagatggtaaaccgtctgcctacaatgcaggagacctgggtttaatctctgggtttggaagatctcctggagaaggaaatggcaacccactccagtattcttgcctggaaaatccaagaatgaatttattgcgaaaactcggtggtgtgtgaggacagtgtggatgtggaagagccttgagtaaaatgcatgagttctgtgattgctttggcctactcagatacacatctgtctagggcagaaggaacccagaccaggataatgagggttttgtcaggatgatttctcttgagactttctgactgacatgaaaagcggttacagctcagtcatccagggatcacggatgcagggcacagagtggagcttctgagaccccagaaaccactcctctatgtgtatagaactaacaacctggcttcccagcccaaggaagattaagatagcaaattgagtatgattctcagagttgaggaggtgtggtttgaggtataacctaatgaggaagagaggaaaaaacataatttaaacataagaactcaaagcaggggtgaatttctctgagtaggtaaggtcaaaatgcctaggaactccctactatatcaccttgtgactgagcatagtattataaacagtgaccctacatccctaataaaaaataaagttatggccagcctgctctataatgaagttagaaaatgtataatttccacccacaatcttggcaaataaagtttttggtccttaaagttaactgtttggatagtaagccttctacattcattgcttcattttaaaaattccatttaaaaagttcagtcatctttcttaggcatgtcacattctccgggtctcctcagagcagtggggctgaggcacacctgtttaaattgagtacatgtgtagttttgtgtggattaccaaccaaaacagaggagactcactttttggggggagtggtcaccatttaattattgatgcatggcaagccttccccagactcttaaccttctttaattgtcaatggctagggccgagtggttttcccaatttgcagcctgaacatttgactttgtatttggaaaagtcattacttcctcccaacctatctccatccctaggaaataaccaaaactaggtactaaccatagtacagtattgctttataccctaagtcttatgttttgcatctatggttttcattcttttataattcttcttcctgccttttctcttgacctttcgacagtccatggca

SEQ ID NO: 37796 - DNA, 835 bp, Bovine  19866881467267
  misc_feature (1)..(1): n is a, c, g, or t
nctttccttatggtctgtttgttttgccatttaccgactcactgccgttttcgaaaagtcctgcttttgcttgtaccttttcttctggttcagaatctttcagttgattcctcttctacttctttcctctcagcagtttcctttgatggtgaaacctgccttggaatttgtacttgagcttcttaaaccctttaggaaaggtagttctgtcagcattcacttctctttctcttctattccaaaaggctaaggacaaagaatccttacacattcctgtgctgaggaatctggggtttctgctatcctgtttttaccagggtgtgaattccctgggaaggtacctgataagatctcccatctcttccctaagctccgggtaggacacaagcattgcgtttggaattggctccagacactcagataccattaatttagtaatgattacatgaggctttgaaggcaaacaaaacagcttctctaaaaggtgaactgggtaaaatcagaatgggatgacctctaatgacttctctagctctcttttctcaatctgtgaattcatcctcaaggaagagttcatcagaaggggagaaccatcattcccctttttaggcttttttatttgtactctgtctgcagtttaattttgtaatcagagcttagctactatttgctcatctgtaaaattccttttaacttatctttgtaagaaagtctgctaccagataaaatttcagattgttcagttttaaaatgttttacttaaaaagagaagatagttcttcagtggaaattgtgacttcagagataactttcatgtctttgaaatctgggaaaa

SEQ ID NO: 37797 - DNA, 1043 bp, Bovine  19866881733836
  misc_feature (1)..(1): n is a, c, g, or t
natgcctgtatttctatttttccccagtacttcttgtttcccagatagatatttggtttttctctgttcttttcctgagttgattatctgtgtgataattctgccacctagaagatgtacattaccttcccacacatgcaagaatcccgaagcttcttgtatgtatatccacactgagttctattataagaattgtcaaatggttgtcaaatgccactcataaaaaggaaaatgacactaggtttacccctgaaaaaggagccccttgcattcaggatcccgaatttcaaatcagccgtggtatttttgttgttgttaacttaagccaacctcgactcttctttctattgttgtaagcagtgagccctgtcttacctgatttcattttttaaaatgtatttgcaaaataacgtgtgtattagtaagatacctggccgtttttagaagtcaaagaggtatagatggcagaagcattctctttgatgctttcataggtcagagaaagctacaacaaatgcagtggtctctgaaaggatgttttattgcaaatagaaaatgatcattattaacaactctgacattatactgcatgaaacatttacatgttaagtattctttctgcttctgctagtctgtgacccttgaatttttcacacatgaagacatggatgcatatcaaataaaagattaaagatcatggataatagtaatacaatggggaaccaaatgttcatgtttcattaggaaaaataaaaagaaagagagaaacttaccactgccatttttttatttattgatgcaaaaatgctgttcagtacaaatgtagcccttaccatccaaagtgagatacagatgagtattgagagtctgaggggaaagcaaaggccttgagagtttctcccatcacatagaccagtgaaataaattattgaaccatacctgagcccaaaagcaaactactttcgatttaattctccgcccttcattcttatgctaagataagcatatgatggaccattaacagcctcctatgggaaacctgc

SEQ ID NO: 37798 - DNA, 832 bp, Bovine  19866881936673
  misc_feature (1)..(1): n is a, c, g, or t
ngtgtgtgtgtgtgtgtgtgtgtatgtatgtatgtgtattcatctagttagcctcttcctcacttcttttgagtgcatgttcgtaactggtatactctgcagggtattttgcaagtatattgctctgtccacaatgggagctttgtatttattctgatgctacttggagataagtgacaagtgacactaacacccctttcagtgatttaaaaaaaatgctgttgactaaagaagaattgtggagccatttatctttggcttcctccgagtcttcagtctttattctcttctgaacacccagatactgtggttatctttatttgggacatattggtaccgggcccagctaattgaaatgacacagaacaggatgagagggacaaggacctggaaccccaagtggtttgctagggcttgggaggcactgggacaacaggatcaactgcaggaactggaaggaaccctagtccagacccattgttggccattcatgtgtaataggcagtcactcaggccaggtgtcctcactgaccccttcatttgcattccagtgtgagtgagtgagtgcttcactccagatgggtagaacatatcaatatagaatgtgggaataggcagtatatttataaattcgttgtgattaacatccttatcattgctaatatatatttttttcaacttttaggcttatgtattctctcattgcgtgggtatgacagatacatatgaagctgagacctggtagaggttaacacacagctacagtcacatagggagaaagagcagggctcttgtttttcaaataattttatttattttttggttgtgctgg

SEQ ID NO: 37799 - DNA, 1115 bp, Bovine  19866882168480
  misc_feature (1)..(1): n is a, c, g, or t
naccctcctcttaggtatgctgggacaatcatatgagaaatggaattgaaagcccttaccacagtgctgcatacatgcaaactattatcatttctgaaatgtaccgatttcctatcctccaacatttgggtttttcaggttttcactatcacaaataagaggcaaggaacactattacatatagatctttgtggtcctccataattatgtcttaatgtgaaattactgcatcaaaaggtatgcagagtgtacgtgcatttgatacacattgtcaaactattctttaaaagatgtgtgttgatttatagttaattcgatggccccttggaagaggtggctatgaaatcaggaaccgatgatgagttataagtagggaagcaagaagcagtcggcatttgtagactgagcccagcacataatacctaccaaatcctgggcaggcctgctggcctctcttcttctaccttgaatcaggtccagggtctgccataggagggaacctgagagaacgcgatgggcactgaatggccctagactgaaggagaggttagatggaagagattagaagacagtggcaaaatccttatcagatcaataaaaacaaatcccatgattttcttctttggattactttagtgttattaattaccacatttttagacactacttccaagttgtaattaactcatattaacagcatatgtatagaattttgtgggatattgaatatgttgaatttttacactgtggtgatcctttattctgagattatgtccttgttactttttttctttttaaagttcttttaaaattgaaataatggtaatggtggtagggtattttaaagtcttttaattggcaaataaaagttggccacctttactggtcttctaattttagtcttacattttatcggtacctggaatccatatatctggaagctaatgtccaagtgacacataagctagtcttgaaactttcatttgtccaaccagtattcagtgagtggatgctgtgtgcaagatgaacagaaatctctgggtcacacattagtataacaccatgaagctgcaacaccattgtctctggggatgacaggctgtaaacgacagaaa

SEQ ID NO: 37800 - DNA, 839 bp, Bovine  19866880812247
  misc_feature (1)..(1): n is a, c, g, or t
ntagatttcatttaagcagcatgtgatctgatgacccatgagttgtcagggctcccattcttccctgtctagagcagcccaaagggctgctgactaagggaagctgaaaaaaatgagctgacctatttattccttcacattgcccctcccccacagccttatcaaaagagaatatcattgctaaagataattaccctgttctcgccaaccttgcggtgtattccaggtgaaaaatcacttgcctctaggtcacagcccttttttttcccttctggaggcatttatccccactgaagccagaggaattatgctaagaatagtaatagccagaaaagaaagggccattatagccttttccaggtgtgaccactgggtagcatctggtcaagaatagaccctcagacacgggtgcaaaattctagcctatgctgcattcctaatctttgtgcaagggacttagctgaaaaatagacaatgctaattttaggtgtttaatcattttggggatccattcattcaaaactagtacaccaaaaggaaagtctaggaactttaaggaagatgcttatgtattttattttatattccacacaccttatctcccaattctgattgcattttcataggagacttggaaggaaatgctgttttccagctgcacagtctggtactcttcagatgcacaatttaagccctttttggcagcttctcttcctcagtaaggtctgtccatattttatgactgcttttcttttccttatgctcgtttgaaaagtgaaagtggaagttgctcagtcatgtcagactctgcgaacccacggagtatacagtccatggga

SEQ ID NO: 37801 - DNA, 948 bp, Bovine  19866881076270
  misc_feature (1)..(1): n is a, c, g, or t
nggattgagaagaattggggagtgactgttaatgggcacagggcttcattttggcgtgatgaagaaattctaaaatcaattgtgatgatgggtgcacaactctgattatactaaaaaccactgaattgtacattttgcccagatgaattttatagtattgaattatatctcaacaaagtaactgtttaaaacaacaaaaacaaaatgttctggtggatgacagtaggagaggtgtttggtaggcagcatgtccagtcctagcggctgccataaacaccaggtgcgatctcaaagtcaaatgtactctcctaaccaaagctgttagagcaggaagagtcctcagtctggcattctcattttattgctccatcaaatttaatttgggtttgtatggtaataaaagccaattccatctactaatatcgctaaaagaattctctctgttcgctgctttattaattgctcaattgaaataccatggattatttccaagcacacagtttgaaacactcagaattagcctgtgcactctattgtaaagcgacctccaaggtgccttctacctttaagaatcttgtacgagcctctcagtgcaggaacgggatatctgtaatgtcaaaagccccaagcagctcagcaaaattggaatggtaacaagcttctgtgctcacaccctgggtaggatagtagtgtcaacacctccagcagagctgatagagctgtctttcagtctgtctgcaggctctgtttacattctgcaggttagctggaaacactctcaccacctccaccccctgaaaaagatctctgggtcaacttgacatctcctagatgctccatgtactatatttcttcctgtaacaagctctcctgctatgttgctttatatgatttctttgcaaagaataaattaggctgagtgtgtaaacaacatataactctagagat

SEQ ID NO: 37802 - DNA, 1284 bp, Bovine  19866881544138
  misc_feature (1)..(1): n is a, c, g, or t
ngttgcttgctttaatagtatttgcaggggcatatattcttatagcaaatgatcatcaaacttctaagtcaaagactggtaaagaaattagaactggaaccttatagctgaatcacaagcatttagccatctcgtgaatttatgaaattgtctaagacagtactgatttacaagaaatctcacagatgaaagaatctcaacagatcacctgcttccccatagaaccttcagacagatccaggattataattcccattttactgaaaggcattaacaccataggtgttaagagggtagaaaaatttaaattgtcttactgttaatagtaatattggtagtgccatatttaattgatttatgtaaattttaggataaagcaaacaaatatgctatcactatgcaccaagatcgtcaacataagaaaaaaagggacacagtaagtaaaatcaaagaacttatgtaaaaattcggaagtcttacatgtacattggaaatatcaaaatgaacttatgatttattattttctttctatagagacttccctggtggctcagacggtaaagcgtctgtctacaatgcaggagacctgggtttgatccctgggtcgggaagattccctggagaaggaaatggcaacccactccagtgctcttgcttggagaatcccatggacggaggagcttggtgcaggctactgtccatggggtggcaaagagtcagcacgactgagcgacttcaccttcactttctataaagtacatatttcctggctttgtccactgaaaagtctagaagcagtgaccacccagtagcaatgagtagtgccaagactgtgatttctaagtaatatttcccagcaaaaggaaccagaactttctggaggaatgactgattctaggtttgggggacaaaatgtacaaaaaggtcctggaataccttgttgtaccagggaacaaatttgctttcaaagatcactgggacatgagagccaaatgcagctcccacaggcccaaaatggaacaatgaaagcatcaaaaagatttactataatctatggaagcaagaatatatttaaaaatctacaagagtttttttaaatttttttttactataggtatcaacttttattcacactacaatgaaaaccacacatttatatccagaacattcaaaggacagaggatctaatcaagccaagagctatctgtgggtacatggagcttactaagtaacaagtactaagttcttggagccaagatagtggtgcctaaaatttgatcttgc

SEQ ID NO: 37803 - DNA, 1695 bp, Bovine  19866880123066
  misc_feature (1)..(1): n is a, c, g, or t
nctggagccgattatacagagtgaagtaagccagaaagaaaaacaccaatacagtatactaatgcatatatatggaatttagaaagatggtaacgataaccctgtatgcgagacagcaaaagagacacagatgtatagcacagtcttttggactctgtgggagagggagagggtgggatgatttgggagaatggcattgaaacatgtataatatcatatgagaaacgaatcgccagtccaggttcgatgcatgatacaggatgcttggggctggtgcactgggatgacccagagggatggtatggggagggaggtaggaggagggttcaggatggggaacacgtgtacacctgtggcggattcattttgatgtatggcaaaaccaatacaatattgtaaagtaattagcttccaattaaaataaataaaaaaaaataaaaaataaagataaaatcattaacttatcctagcccctataaacagcaatgatacaaaattaacatttgacttccaggaaaaatgcattcttgggtgctcttaaaaaacacacggtctcaaaagcctaggcttaattttttaaaaaaattagttttcaaactcagcctccttattcaaaattgcatgttttttgttttttgttttttttttggttaacaatttcaaacatacacacaacaaaaccagtgcagtgtttatttttactaacagtttctgagaaggcaagtgtgaataacatactgtttaactgctatgatttgagctcaacagtctgggtgtctgacaacgctattcctgagcttgtctcagatttcagaagtgactgcagtgatagcaaagagcctgtgcaggacagaaagtttcgcagatacctgcaagtaccaggtatccattgtaagtttcctgactgaacttttgtattaatacagtgtaactcgagtttttagcatttctattttatcgtttatatgaatatactgagattgtttttagagacccaatcaaccatgtcatcatagctgtaaacatatacatggcatttcctttgttccaggtgttattccaagtaggttctattccttaacttcatcagcttaccacaatcatatgaggaaacaactcttgtatttctgttttacagctggctaaactatggcacagagaagttaacaaatttccaatatcactcagctagtaagttgttgtgttaggatatgaattccatacgttttatccccagggcctcaccataacactgctggcctctctatacaaaggagggtgtgtttgcaataaaagcaaagtgaggaataagaagggaaaaaatgaaccttcatctttaattttttaccaagcaatgctacaatggaaatttaacttattagctggcaattttaaatttaaaatgggtaggtttaaatttctaaaatatcttttcctcagtatttttcatacgttgccaataacatagccgtttgtttttcagtactcaaaaacattatgcacatctgattttgtctaagtttcagccttcttttctgaatgtacaatcttccacaaatacatgctttgacccccgtctttcattgtaaacaagagaactattcataatggaaattatttgaagcctgttacattataaaatacaactgtcaccttctgttgggtaactgaacctcacttttttcccatttataa

SEQ ID NO: 37804 - DNA, 1277 bp, Bovine  19866880510915
  misc_feature (1)..(1): n is a, c, g, or t
ngcaaaacctagggacatggtgctgtgtctgctttgagccagtcccttctccagtgtctgctctggctcacagtgactgcttcatttccctcctatcctgctgaggcggggtccctagcagccatgttgactgccttgcttccctctcatcccactgaggctgggtccctggcagccatggtgagaactataaccttatctttcaaataaagcttttattatctttacagtgctgactgcaacatggtggaaagctatatttctccatgcatattaaaggagcagatgaaatgaatgacaaaagaggggaaaaaaatgatacaacacagagtgaaggagaggtggggagagcaggatgatggattttctccagattcccttttacagtactcagtatccttgtcttcccttgaattccgagaatccccttgaattcccctgaattctgttgaatcattacacccttgtaatacagtcctctttatttttgttttttaaaagctagctatgattggcttcagatgccagcgagcagagtcctagggagcctactgtgtatatcttggtcttcacaactgtagaacatggaactatgtgctggcagggagaaagctgttcattcttctgttagaagtcacgctgaacacccaaatgtggcctctgcttggcttaactcagcagtcacaatttccccaccaggtctttcacatacctgttcgtagtctgtgtgattgataagattgtagttgctaaagggctgaagtcgctgacttcatcctgatgacagttacattttagtgtatcacatggccagacccttactctctgtgattaaacaattgtattgctttgaatgtgtctgtagttctgtgggagcatttttccagtgaaactgtgggctcttgggattctttttttttttttcctgcagaagttgaggaatggagatttgacagtggccaggcttgaagatcataagggtttcttctctgatgaggtcatgatcataggtgatgatagcaccctcagaggagcaccctcagaggagcaataagttccttaagggcaactgggaactcaacttaggtgtgacttgggtgcataggaaattactttgtagtcagaatggtgagctctgaacatactggttacacttctgcaaataagaaactctgcttaactcatcagcagacagctgctcacataatttgatttgaagaatactgcaaagtttctctctccaaaaaaaaatttcctcaaggaggacatcacccacc

SEQ ID NO: 37805 - DNA, 1008 bp, Bovine  19866880519013
  misc_feature (1)..(1): n is a, c, g, or t
nccctcccctcttttcctccctagtaacaataagctttttttcttacatctgtgactctatttttgttctataaataggttcatttgtaccagtttttcttagagtccacatataagtgataccatatgatacttgtttttgtctgacttacttcactcagtatgacaaactctaggtccatccatttgctgcaaatgaattcgttccttcttttttatggctgggtaatattccattgtatataagtactacattttctttatccattcctctgttgatggacatttatattgcctccatgtcctggctattgtaaatagcgctgtagtgaacatttgaaagcatgcatctaaggctggaatttttatctgctttcttctcactctatccctggtgcccagaacagtgcctgattcatggttggtgctgagtaaagatttcttgaatgaaacaatatcagttgtttttaatgtgagtttaaaaacaactacaacagtccagcagttttgaggctatgttgggcacaactgaagtgatttagcagcagcagcagcagcataatatatcactgtgcttctgctgctgccactaagtcgcatcagtcatgtcccgactctgtgcgaccccatagacagcagcctaccaggctcctccgtccatgggattttccaggcgagagtactggagtgggtcaccagtgccttctccgatatcaccatgggagacactttttgagtgaattttctttgtctccctgatttatatgagttataagtgcatgatgctcaataaattatacatatgtgtacatataatttatgtgcatggtatcccaaatggtatatttaaaattgttatattattaacattttgaaatggttttaaactagtaaattttgaataatcatatttagaaaaagaattttctgcacgagcattttctgtatattaacataattcaaatcattaaatcatctttatttcatatgtgcctgatgttgctgagg

SEQ ID NO: 37806 - DNA, 1781 bp, Bovine  19866880549488
  misc_feature (1)..(1): n is a, c, g, or t
ngtgataatgatgactgcagacagccctcctgaggagatgtcaactttctgagacacatgaactctagacttctatatccacctccacttggattctaacaagcagcgaaaacttcgtacccagtgtggaacttctgatcttcttccaaactctggtgctacatataatctccatctcaaataatcaggtcatcctctgcttgttcaggccccaaaccctggaatcactttcaattcctctctttctggtataccccatatccatgccatcacattcttttaagtctattaaaatatacatctagaattgaaccactaaacaccacctttaccacaaacatctcctctaacatcatcctctcttccttgaattatttttctacctcgtttccccgcttccacctttgtctccctgcagtctattctcaacacagtagtcacagtgatgctggaaccatcaccagagtcagatcatattgctctctgctcaacaacagctctttattctaacactaggaaaatcgaaggtatttacaaagccactctatttaaattgcaaaatctccagagtcactccacatggttgtgcaggatgtttattctatacaggtgcctggtcaagggaaataaagtgaagcctgaattctacctgaggctttgcttgccaaatcatgtgccttggtataaggctctgtctgtacaatgtttcgtagaggttgttaacacacctggatacatctacacatgtactccctccttcttactttgctatattttctctttatttcctagctccctcttgtacattatttgtttacttattttgtttattatctgtgttcaccaactaaaagatgagttccatgagagtggtggttttgtcttttgttcattactagatcctcagcacatagtaggtattcagtaagtatttctgaaattgaattgggtttttttggaaaaggtagtgggaaaatgcatcagtagatagaaaggtatgtgggccaaaagagggaaaatttttcatgtgggagagaaaaggaaaaattgctgacataatgtcctcaggtaagtgaaagtgataagctctgctaaatcatggagacaatgactgtacaaagcaaaataaaacttccatcacaaaaaccacaggaaagacatagcatatgaatgcagatgcaggtgtgttggtaaatgtttaggtaggagctgtagaagctatcattttcccctcaaatgtttatttggaaagctttcagacatacagaaaagctgaaagaatagtgtaacagacatctctacattcatcaccaagtgtcagcaattgcaaatattctgttctatatgttttatctgtttgtctttctgtgtatatttcactgactcatgttattcctggagacctcataacgtatcatccctacataaataatatattcacaaagaagatacttctctcataccaacaaatacgtaatccatatttaaacctcagagatttcaatggtcaaggctttttatacatcttatacgtttcacacatgcaactgattatattccttgaaattttcaggagaagagaatgtgaatgatttttttcccctaatgctattcaatgtctagcatttgttgtaaactggacattaaatgtggagaaggcaatggcaccccactctagtactcttgcctggaaaatcccatggatggagcagcctggtaggctgtagtccatggggtcgctaagagtcggacagacttagcgacttccctttcacttttca

SEQ ID NO: 37807 - DNA, 1598 bp, Bovine  19866880582977
  misc_feature (1)..(1): n is a, c, g, or t
ncaagagggcatcagagggcagacacactgaaaccataatcacagaaaactggccaatctgatcacatggaccacagcctgtctaactcaatgaaactaagccatgccgtgtgaggccacccaagacaggtgggtcatggtggagaggtctgacagaatgtggtccactggagaagggaatggcaaaccacttcagtattcttgccttgagaaccccatgaacagtatgaaaaaggcaaataccattagagatttcaaacattaaatttgaacgcaatcaggaaaggatgggtaagaaaaaaattattgattaaatcatggatccttcgagaaaatagggtatttatccaggaaggaggagagagttgggttaaatatattgataatggtgaactttgagtatctagtggattattttacagaagggaaacaaatcttattcttatagctccagagagaataccaaggaatggaaatttccagggatagatttcaccttacaatgagaaagaatagcctaatgattcaagttatttgaaaacagaatgacatgccctttaagatagtgattttcttattactgaaagcatttagggaaaagctatttgacatccatgaagcaagttgtataagggattcctgcaaactcactaggcattttaactatgcgaaaattctgtgctgtgtccctgcactgcctgttcctttagtaaatcaatgaagtatagtactgcttatggtaagaaagattttctttgtgtagttcatatcctgaagcctccctgctataatctgtaagtaatgggtatgcaaaataggtgcttgtctacatcttgaaattattaaaacaattcatgtatttaaaatcatttaagtcaccattcagacatcaaatcagggattctaaattctcactttttaaataaatcctgtttttaagcctctactcactttcctcgagattattttgaccatttagacaaatgacctggatttttctatcatgttaaattggagcttcattatcatatattttcagcactcctccttttagcagattttgctcagagcattctgcaaacgtcaccatgactgaataggtaaaaagtctcccatcccatatgacagacatcaatatttccaaagcagaggaaattacattccaacgagtttattaaaaaaaaaaaaaaaaaaacacacaaaacccagcccatctcaacagatcccaaatcaacactgcagagaatgctgtattcttttctctcttagcctagagagagcagcatgacctcaacacttcctggctgcttcactgtggaccaccaagccactgaaaatggagacaaaagtaaagtcttctgccctccaagatgaacacaattcaccaaactaagtggtggctttttgcccactgattaaaagggagaaggaaatggaaacccacaccaagattcttgcctgggaaatcccatggacagaggagcctgggggtggtcacaaaagagtcagacattacttagtgaccaaacagcaacaacagtaaaagggcagaacaaaggcatcttggggactgccggagggcgacaccatctgttgca

SEQ ID NO: 37808 - DNA, 1785 bp, Bovine  19866880723679
  misc_feature (1)..(1): n is a, c, g, or t
ncaaatagatggggaaatgtggaaactgtgacagatttaattttgggggctccaaaatcactgcagacagtgactgcagccatgaaattaaaagatactcactccttggaagaaaagctatgataaacctagacagcatatttaaaaagcagagacatcacactgccaacaaaggtccatatagttacagatatggtttctccagtagtcatgtatgaatgtgagaggtggaccataaagaaggccataaaactgatgctttcaaactgtggtgctggagaagactcttgagagtcccttggacttcaaggagatcaaaccagtcaatcctgaaggaaatcaaccctgaatatttgttggaaggactgatgttgaagcagaatctccaatactttggccacctgatgggaagagttgactcattggcaaagatcctaatactgagaaagactgagggtaggagaagagggtgacagaggatgagatggttggatggcatcattgactcaatggacaggagtttgagcaactctgggagatggtgaaggacagggaagcctggtgtggtgcagtccatagggtcacaaagagtcagacacaacttagtgactgaacagcaacaatatgattttattaataataaacacaaaattactttaagttctgatattttagaagcactgtctttttatctagaatcatttaagatttcatgtcttttagaagttttatttttgatagttcctattatctttatattaaggctactcttggaaaattttagaatacttgatgcctcccatctggtctttctattagaaactggaaaacctgaaccatggatctgacttaaagaatagaggtaaaaaaaaagctggaagagccatgcgtagtgggagttactgtgaaaccttgagagccactccatgtggtggcttaattgttctctggaatcaatcttttttatgagactgcacagtttccagctcgacttttcagttttctcaacatttaaaattagatactgaaaaacacccgttgcagactcttacccagaaaaagacagcactggcacagagggttacacgtatacactttccccatgtggtaaagggaacacgctcttcttcctaattaaaaaagaaaaaaaagtcaatcaaggatttcaacaaaatcatttttctcctaattggtttgctgtatcctaggtttaattttttgtatgtaaatgttcacagaaatttattcataataacacaaactagaagaatcccaattgcccatcatcaatctattcaaaggataaacaaattgtagtatatgtatgtaatgataagttacttagtaaaaggagaactaagaatacaccaagcagtttgggtgaatttcacaaggattgtgataattaaaagaaactagacacagaagactatatcctagtcattttcatttatataaaaattccacaaaaaaacaagactataggaaaaatcactttttcctatggctataggaaaaaatgatcagtgcttgtcaaggtgaggatttcagggaggatctagaatccaaaattattaatatacaaggggacacttggcataaaagaattgctctatgtttatgtttgtggtggtggttaccttcctgtatatgtacacgtttcaaaatttatcatattgtacatttaaagttgataaacacacatacatacacatataaacatatacacacacacagtgagtgtggagaatccttaaaaaactggaaatagaactgccttatgat

SEQ ID NO: 37809 - DNA, 1477 bp, Bovine  19866880759930
  misc_feature (1)..(1): n is a, c, g, or t
nctttaaacacgctgtggctcctcggggcctttgtgaattctccccacactataaggaatcctctgaattctttcacacaaggcagtcacctgttctatgcataccagtgttgcccttggaaaatacaactaatcattatgtttctgaaggtcacttgacttggggtaactgatgggggcgtgtgggtactcccgagacagatccaagtgtgaccaagagtgccctccacgtctgcttccattgtaacctttgtcctttcctttgcttcatcattatcaacagtgttcagcaagctgatagcttctgagattgtatcagattcaacaatgcatcaaatctcttccttcaagagcagtcttatctatgcagaagatctgctctctttcttatcatctctttttcttcagtgcctcacagggcaaaggaggaaaggaaccaggcaaagataatggagatcttcagttgttcaggttttcctttgtgcaggctaaactctgaaccctactaccctcaggctagaaagctcaagtgcattctctcaataaacacgtcctgggcctagcactaaaacctgggcattcaaaaagaagctagtcttgacttgtggaagaaaagagtattaccaagttcaccacagtacgacatgttctacaacagaggtatgcccagggtgttactatagctgaaaggagcaggagaggaggacactgggcctgcccggacagacttctaggagtcaggcaattcacacacctctttactggctgctaagcaatgaaggagctgaccctacagtgtctctggggggttaatgatgttgcagtctgttaatgcagtctgtttaacaccactgtcactgaactgctttggttactgcatatacatgcacattctcctcacatattcacctctttattttcagaataaaacatatggtgcttccattcccttccgaggctttcaacctcatcgtgcttcctgccctggagagttgctttgactatcaggaaaagaacactgtaatgacttggatggagcaaacaaagagggaagaatggcctgcttgctgaaaggaactagaaaagcgggtgtggagccactaccagaagtgccgatggtgaccaggccctcggtggtcccagctggtgagtgactgccctgtgggtgcccacatgcatccccatcagctgcagctaggtgcagtttatcttctgatcatttttcatcccccacccctggcctcacccatttctagtggtaggatactcatcaagaatggtttttaacctttcacaggccaagcaactctttggaaaaatggtgaatttctaggatcccgtctccagaaaatttctcagaagcacataaacataaaatattatacacacattttggagattcacaaacctcctgaagcccatacatggattatgaggaggggcatactgttcagtttgaatggttttgaatttctat

SEQ ID NO: 37810 - DNA, 750 bp, Bovine  19866880798467
  misc_feature (1)..(1): n is a, c, g, or t
ntagatacgtgaggaagtagaaagttgttctataaaaaaagattttaaaattccactgtgccttctgaaattatataaaaaaaaaaaaaaaaaactttgacatttcccgctagaatagtagagccttcttgacagggaattgtctgctctgttctttggcactttagttattccaggttatacatttgacaatctctatattttttaaaatttgaaatcctatcattctttctagagtatccagagctcaagtctaattttaactaatccagtgtatagatgcttgcttgcttttttttgtttttgtcttttttttttaggattctttcctcataataaacatctgggaagtggttaacattgtgtagcattctcataaatttttataaagcacaatgaaaagaaaagcaagtcaaagtttctctttctttatatgatctaaaaagatctttccacagaccacgttttcttatcttccctgaagagtgaaccataaaacacgccactggccactaagagcaattttccgatgatcctcacgagaaagggaaaaccttccatatatttatgacttttcacaatctatttccttcatgttcaaaatcatgtcagatgtcttattgccatgacacacaatgcccagtagagacagtttgatatggctcccatcacttccgataacacatcactcagagcaattatatattggcttcacatgctttttaaaaagcagtctcaggaagacctttt

SEQ ID NO: 37811 - DNA, 1094 bp, Bovine  19866880812679
  misc_feature (1)..(1): n is a, c, g, or t
naatgatggtggactgcaatagatggctccaagagcctctatatttaataaaatttctttgctttcatttcctatttcctgggcttctagtaaaagttgtggttaacattaaaacctggtttcccagaaatcccactactgggcatataccctgagaaaaccataattcaaaagacacatgtaccccagtgttcattgcagtcctacttaaaatagccaggacacggaagcaacctaaatatccacgtataggtgaatgaataaagaagttgtggtacatatacacaatagaatattactcaaccttaaaaaggaacaaatttgagtcagttgaaccaaggtagatgaaactagagcctgttatacagagtgaagcaagtgagaaagagaaaacaatatcatctattaacaatatcatctatggaatctaggaaaatggtattggtgaacctactttcagggaaggaatggaggcacagacatggagaacagacttgtcgacacaacagggaaggcaacggtgggacgaactgagagaagagcattgaaacatttacattaaccatatgtcaagtggatagctagtggggagttgataacacaaggagctcaacccggtgctctgtgacaacctagaggggtaggttgggtggggtgggagggacattcaagagagaagggtgtatgtccacttatggctgatccacattgccatacagcgggaaccaacacaacattgtgaaacaattatcctccaattaaaagaaaaaaaaaaaaaacaagcagaaatctggtttcagtgtaactgggaggaattaagtaaaaggtctgtgtctgtgcttcatctggtaataaaggagtaactcaccttgaagtcagcatggcaggggtggcatcaatccatgtccaggacagggataaacgggttgcaactgaaggacagcagaggacaagcagagggctgggagcccatgtaaagcactcctgaagaccccctggaagaaattagaaggaacctgagaagggcaacctgccctcacacaggtggagactatcaatcaggaggcactaggttaaaccagaccccatttaca

SEQ ID NO: 37812 - DNA, 1485 bp, Bovine  19866880850271
  misc_feature (1)..(1): n is a, c, g, or t
ntggtgacacacgggggctgacggcaattgggagaatgggaaaagcccaggtgctacagatgaaaataccatcttacacttatgagtcatttatcgggagcccacaaagtgtcagctgttggaatcttttgctaagattccctgaaagagattccccctgaaataggtttcctggaatctgaagaacattatcatcccatctgaagatcagtaaggatataggaaaacacatagtaattatctctttgcagaaaccacatgctattcttcaactcttttatctttaagtacatgtgtctgcagcacagccacggtcatgatctcccttaacctgacacttagtgggcagttcctgcacgcataatgtgacacagacagcggggaaggacttggggctctccgaggttaagagcagccgttcctatgactgctgttaaggaaaagaattcattatgatggtgatattgtaactgccactcaggtaatatgagtgaaaatgccctatacccagcaccgttggggcttcccaggcggcactagtggtaaagaacccgcatgccaacgcaggagacatgagacgtgggggagatccccgggaggagggtatggcaacccactccagtattcttgcctagagaatcccatggacagagggcctggctggctgcaatccatagagttgcaaatagtcggacacaactgaagcaacttagcacaccagcagtataccagcctccttgcctcttcttagcaaccccacaaggccgaaaacacaggctgtgaagtcaagaaacttgctctggttgatagattctagggggccaaagccaaccgcaaattcatgtcttctgactataggcctgtcttccctcctcacgactctgtattagcacaggcttcataggctctttcttccttttgctttaaactgtcctctttagggaataactcaccccaatgaacccaagaggctctgtctttaaaatcttctactttccctaaggagcatctatgatcagtgagcttacactctttcttcactatctgtattacttagaaacaaaggtgggtttgatttgttggtttttctttttttgcttgttggctttagaaaaataaaagtatcttatgttttacatagattgagcattcaggacttgtttaataagtaacagcagaaggaaataaaacaatacaacaaatgaatgcaattgtttaaaatcataatataaattataacaaaacatttaaaataatgttaagggtttatatgtggggaggttgtattatttttgttttaaacttagtggggaataacttctattagaaactttgcacaaatcagaaaaaagtaaaaataaaaacatgttttagtttatgtccatgtgatgccacaagaaaaatctcaccatcatcttgtctgtgccaagtcaaagattatttttcaaacatctagatagaatgtcgaagaaatcataaaaaata

SEQ ID NO: 37813 - DNA, 1350 bp, Bovine  19866880863901
  misc_feature (1)..(1): n is a, c, g, or t
nttgaaaagaaagagagagatccaggttacagtgccagagaatttactctcctagagacagaggaacttacaacataatctcgcatatgactgggcttttttcagagccagtcagtctggtttaatcattttgtgctgccgaatacacaccatagactataaacataggtttagattcttacctgtaaggtttccaataaggtacatagataatttttagttaaaaaccgtgtggcctcagatactcatttattcagcaaatatttattaagaaatgagtatgtcattcaatatgcaatattaattttctttcatttttaacatggaagacagctctaccctaattttttttaaatgtcaggaacacggttacttatccaagtataaattctacactgcagtaaagctgatgatctcatattaaatagatttaagcaatcttttcttaagtaagcagtcttttcctgatgtattcctgtttgacaaatatagcacatatgctaatttactttagcaacctgacaaaccaagaaaactggtttgatcaattttttaaatattccactagttctttgtgaactgccatgccaaagggaaataacaagaactgtcttattaaagtaacaccaaggtgatatattaacatgtttaagcaaataaaaatgccctttccttggttcaactatttaagtatttatagttagtaataaaacagagggcattataaaccaactccaagatctgccagttatcaagagatatcaggtaaatatcttacaaggtctttgtaaagaaccaaataagaactaaaattgcatacgctatagtataactttttctcagtggcagtacagcaatatctattaaagaagtttaagttgtatgcacttttcaacaattctgcatctaggactttattctgaggaggatacacaaaacttattctacaagaattttcgtaattatgaaaaattagaaacaactaaaacattcaacaatttgtgaataaatagtttgttttgtatatgtattcacttatagtttagattcctcgtataaatggtattatgtagcagttgtctttgacttatttcactacgcctaataatctctgggtctatccatgttgttgcaaatggaaatatgtcattctttttacagctgagtagcattccactgtgtgtgtgtgtgtgtgtgtgtgtgtgtgtgtgtgtgtgtgtgtacctgagctcacaagtgtgtgtgtatcacatcttcttaagacaatcactggattgtgtccacatcttggctcttgtatatagtactgctatgaacattggggtgcatgtatcttttcaaattagagtt

SEQ ID NO: 37814 - DNA, 1114 bp, Bovine  19866881022799
  misc_feature (1)..(1): n is a, c, g, or t
nttatacagactttgacatgtttaattgatgtgaatgttctaccataggagaaaaaaatgttcatttttgaagataatgcatttccaatttcattgtgtgagtctgggataaaacagttcagggtgtagctaggtgggggaggaaacagaaccaagtttcttattttggagaagacagcctgtcaacacatgctccttacatacagacaccattgtttataggtgtccctggtggtatttcccttttgcagcggttgtgcctatgaagggtccccaaatgaatcacaaaacaggcaggccaattactttggacacttttaagagatattagttgccactcctgcatgaagtaaactgtaagatagccaaatgtacctaataagtcacattgtcattcagacatttagcatgttttggctggagaccaaacagtagctaatatttgccacacggaagaataaagatcaagttcatatattaagattctctgtctccttcactgtgaaatacacctttcattttttttatccttgtaagagggtgagtgctgaacatgtgggcagaggcagttttaactaaactgcccaaacctcagtctcaacactaattcataatctataaaattcaaacacatctattgaactccgtatattaatagagctgatagccctaattaaaagagacttcttaaatgaagcaaaaattactttgacacaaaagaaaagcttcaaatttcctaaccagctctgctttctgtgatcattaaactacacccatgtttatagaagtgacaggcatattgagctgctgattttatttcatcagattttagaatgcagaaaacatttcagccctgctcacggcacccatatgtgtatctttaaggatatgtgtgtgtatgatgaagtttttattttaaatgccttattgcttttcttgttacctctgcctgatgagaactactgctgggaacctcattacagaaagcctgcaattgcaaaactgaagttttcatatcaccatcatcatactcctgtaccatctcttgtgcccagatgtatgttgcagagtatttttcttctccctggaaactataaaagtgaaaggagaaaac

SEQ ID NO: 37815 - DNA, 760 bp, Bovine  19866881054316
  misc_feature (1)..(1): n is a, c, g, or t
ntaaagtatttaactaataatttttatattgaatatacacgttgaaatgataatctaggtatatcaggttaaataaatcttattgctaaaaataatttacctattatttttcttaatgtagctactagaacattttgtttggctcccagtatatttctattagatagtgcttttcagcagattttgaaattgctaccctaaaatgatttcacatcagcttcctgagacatagtagaggaaaaaaggacatcagtaggctaaagttttcctgaactagaattgtataacatttagttgccgtgtccttacatgtagaagctaaatgattttccatggtagatctagcccagagcattttaagacctaatataaacatggcattgtccaatagatgaaacagctgctgaagattttgagtgtcctggtacctgaaagcattaaataatgtcaatttgtaagtgtgccagaggcacggttgttaatctgatgctgctgacttaaagtgaaaaaaaaaatgtatgtaagtcaatgaaagttcatgctcatttatttttccgtttgtttcttttcagccttggaaaaccttgaacagacaaatgtctctggttttggatcattgaaaagtcagcaggacttccgaaccccagagtttgtgagtactacttactctatcttaaatttgtatcagttacctagagaaagagggtttgtttgtcttaaactgagttcttggtttcaggggctctaggtctggcacagg

SEQ ID NO: 37816 - DNA, 4546 bp, Bovine  19866881072749
  misc_feature (1)..(1): n is a, c, g, or t
natcgggaaaggagtttgtcaaggactgtgtattatcactctgcttatctaacttatatgcagagtacatcatgataaaccgtgaactggatgaagcacaagctggaatcaagattgctggaagaaatataaataacctcagatatgcagatgaccacacttatggcagaaattgaagaactaaagagcctcttgatgaaagtgaaagaggagagtgaaaaagttggcttaaaactcaacattcagaaaactaagatcatggcatccagtcccatcacttcatgggaaatagatggggaaacagtggaaacagtgacagactttattttcttgagcttcaaaatcactgcagatggtgactgcagccatgagattaaaagatgcttgctccttggaagaaaagttatgaccaacctagatagcatattaaaaagcagagacatcactttgccaacaaaggtctgtctagtcaaagctatggtttttccagtattcgtgtatggatgtgagaattggaccataaagatgtctaagtgccaaagaattgatgcttttgaactgtagtgttggagaaaactgttgagagtcctttggactccaaggagatccaaccagtctatcctaaaggaaatcaatcctgaatattcattgaaaggactgatgctgaagctgaaactccaatactttggccacctgacgcaaagaactgacttatttgaaaagaccctgatgctgggaaagattgaaggcgggagaaggagggagcgacagaggatgagatggttggatggcattaccgactcgatagacatgagtttgagtaagcttcaggagtcggtgatggacagggaggcctggcgtgctgcagtccatggagtcacagagtccaacacgactgagtgactgaactgagctgatagactttcacatgtctgatgctcattacctgctgcatcttttgtagcatgtgtatagctgttcatgttttctcctcagtatcagtctagcccatggtctcccagttccacggtaaacatctattccccaaactgcggtctccatggtaaacaaacaggagatatagaagccaccttgagaatagggttctcaggggaacccggtgtgatatttaagggaagcctcttttgtagacagaaagttacagcatcagtaagaatgggtggctctcgttgggtagggaggccgattgggaacatgccaggacagagtcgggtaagttgacccaaaccaaaatcttaaattaggacagtgacagcagtgcaaatttgggagcaaaatgagcccaaagacaaagcaaaactgaaagcagaaaaggcagagtagaataaaaggaactgaggaatccgtattctgttcttctcagggtggcattttggaaggtccagcttgtagtttgctgagttgaactgaaataaagtaagtcttagaccatgtttactcaggccttatcctcaaatagttcagattttagaaggctccagagccgtgtttttatacagtggaatgtatttatatcgtttgaccaagggggagcacagaattattatcgctattactttgtttccttcagctgttgtctttctttcatttgaaacaagtcctgaaaacagtgctccttgcggcatgataaggacattaaaaggtttccttcccagcccaggtgtctgtaatgtgactagtcgaacaaagtaccactgtattgtctgtgtaaatcgtgggtaggaaatgctctcgtgaacccctcctgtgcctgcagacaacggccaccttgtagggccgtgatctcatgatcacgtgttgtctcgtgatctcgtgctgctcgtccctacctcccactccactctgcaggttgaagtgggtgaggttagctgaaccatgctgacataaggggtaagtggagatgtggacactggtgcatgagttgttgccaccccaaacttgtgaggagctgggaacatgttgaaactggacatcgagccactctgaggtgagatgcatgtgtgggtgatggtcaaagtgaaagagtcttggctaaagactgacctttcagagagtcccttggtgacctcacagtggtggaaaaccacctcagttgtggtttggttttttgttcaagcacaataaaaatctgcattatgactgctttgttaacttaatattttatcccaaatattttcccattctgttctttccccagttttcatggcggtataatcgacgtgtagcatagtgtacatttgagctgtacagctccatgctggttttttgtctctgacattgctatctttgctgacattttctgttcactgtgtcagtaaactataattcatcacattaggaattttcaaagcagttagttccagaggaatctcatcgagtaaatggtggcatggttggatgctctgtgaccatgtgattggtgactatcattttgggacccggaccctgaatgtagatggggtgcaagatgacaggtatcagagtctgaagaaggggatcaaccaaagtgaggctggggactgagtaccagagacccagataaacgtgtagagttcacactgagaagtggagactacagcactaggcagtctggttagaaccagggatggggaaccattcacatggtgacggagcagataagggtggccctgcagaatggcagcacagacatggggcatcccaggctcccactagtgtccccattcccagatatagttgagagcaaaggcgatatgatgtttcagtgcagggatgcagcaggcatgactgcccagcagaccccaggttgattccaaaccccaaggagtaggaaaaaacctgggggttgggggctaataggcagaaagtttgggtagtggtcaaggctctgtgtagaaaccctgcctctgttggcactaacccaggaactcacatgggcctgattgcttgagtatacatggggtgaaggatagggtatggagaggaattctcatctagcaatcacggatctatccagcagcaagctggatagaaaccaggctgcagtcaatatggaagcacatggaatgaaataacagggctaaaaaattacattttaagatttaagtcttgagaataagagcctcttttttgagtttttcaagtttttcaagtttcaaatagttcaagtttttccagaacttgagatttctgtctgactctctggatgttttagaggcaggacttccctgacagctcagctggtaaagaatctacccacaatgtgggagacctgggttgggaagattccctggaaaagggaaatgtcacccactacagtattttggcctggagaattccaagggctgtatagaattccatggggtcacaaaaaagtcagacacaactgaaggactttcactttcaggcttcttattatcccttatctcatgtcagttgatgatgtttcctttgtttagcttctatgagatttggcataagtaatacgaaaaagtctagactggcaaaagagtataggattataacaggataaatcagggaagatgatgagaaaccacagaatttagaaaagacagactcaggaagatgagaattaaagtggagcaggtatgttcccttagttcagcactcatgattatgcagagagaaggatgtgggaagagtacttacgctatttggaattttgtttaactgcattctctttttgagagaggatactaccactagggcttccctggaggctcagtggttaaagaatacacctgcaatgcaggagacacaggttcgatccctgggtggggaagattccctggggaaggaagtggcaacctactccagcattcttgcctggagaattccatggacagaggagcctgatgggctacagtccatgcagttgcaaagattcaaccatggctgagcatgcctgtactacttaatagaaaatacaattgatttcctgaaattcaaatttgattgtctttaactaggtgaagatagatgtgaccctgaagagttaagatattaactcattaaacaaatatttacttggtatctactgttttaaggcctatggtggacaaacagaaagcattctgcatgtgtggagcttgcgttttggtagtgcagatataaaacacaaaataaaatacacaggatgatattaaatccttcagagaaggaaggattatttgtgtgtgttgtgcagggagttggttatggttttcagcaaggtgtacaagcatatctccctgagaaggtgaggagtggaaaggcctgaagcaggggtgctggagcagactctttggaaatctagatgaagagcatcccaggcacacagaagaacatgcacaaaggtcttgatgtgggagttggtgaaatgtttgaggaaatggaaggaggccagtgtgactggagtagagtgaagggtggtgagaatagtagctagtggggactttacaggtgattgcaaacactttgattttactctgagttgggaacttatttgaggatgttgtgcgggaaaaaaaatgcacaacctaacagt

SEQ ID NO: 37817 - DNA, 1427 bp, Bovine  19866881133278
  misc_feature (1)..(1): n is a, c, g, or t
ntcggaagcccaatattgaatagctgataaaaatttatttcctgccaaagattaacattttccaaggcctgtaacttaatgccatgtctatttatgttaggatgcctgaagtaattggtttagtataggcagaatatcctaaatatccaaggcttcccttgtggctcagctggtaaagaatccacctgcaatgcaggagacctgggttcaatccctgggttgggaagatcccctggagaagggaaaggctacccactccagtattgtggcttggagaattccatggactatacagtccatggggtcacaaagagtaggacacaactgagtgactttcactaaatctgaatctaaaaggcagaatattgcttaatactttatgagtgggtagaataagagtactaatatttaagtaattatgagtaaatgtcttaacaactctggatggagttgatggatattgggtactcattgataaatggctcagttctgtaaatgttgcacttcaatgagagaaagtgaaagtgttagtcactgagtggtgtccgactctttgctacctcatggactgtagcctgccaggctcctctgtccatggacttctccaggcaagcatactgactgaaatggattgtcagtcctttctccagggatcgaatctggatctcctggattgcaggcatattctttaacatctgagccaccagggaagctccttaaaaggattttgttagtggattggttgtgaggtagagaaaggatgtgaggtagagaaaggaggaggtcaagggtgacactaaagtcctgacctgagcagctattaaaatggcattgccagttgctgagttggggaaggctgttagagtgtttggggtgatataataaagaattgtcttttggacaagtagagatgctctgaaaaaatatggatgtttgtatgccatgtgcaaacaagattttttcatctttagattgttttagtataattggttcatgttcatgtgtgaatttgttcttggcttctaagtctaattgatggtttcttccagttttcatttcttttcccactcttgaattgaggcaaaaatgttaaagactatgatcagaaataagactggagaggaagattgaagatgtcatagggagttgagcaataaagctgaaatttctgcatattatcttatacagagtaattttttaaaataattttatttatttttgacgatcttggattttcattgccatgcaggcttttctgtagttgccacaagtggggactacactctagttgctgttgataggcttctcattgcagtggcttctctcattgcagaacatgggctctagagcgtgtgggcttcagtagttgccgtgcatgggctcagtagttgcggcttccaggctgtagagcacagcgagctgtgtgc

SEQ ID NO: 37818 - DNA, 1195 bp, Bovine  19866881228583
  misc_feature (1)..(1): n is a, c, g, or t
ngaaacagaccttgcacagaaaaaaaaaaaaaaagcaagtttcctataacactcactcagagtgctaagagaatacatgatatccacaatacaaaaacagggttctagtttaaagaaaagtaaagaaaggatcattctgagagtaacatgtagctcttaggaatcaaaaatgagcagaatggggggaaaaaaaccagcagcagtattaaaaaatgatgttgaagaaattgtaccaaacatgaagtcaaaatatgaagacacaggggaaaagataaaaatttaaaaatcagtccaggatgcacaatgaacaaaaaataagaatgctaaaaataagaccagagaaaatgtgaggaggaaatgagagaaatatttcaagacaaatatctgaactgaaaaactgagcaccctgagtctctgcgtggacacagcatgcagagcacccagcttggagaatggacagggagccatcaagtcactgaaatgtgacttctcaaacactggagcagagagaaggtcctgcaagcttccagaaagaaaatcaggcttcatacaaaggagcaagactcagaatagctttgaatttctcagcatcaacacttcaaggtacaagaaaagagagcaacagtttcatattgccaaggaagatgatttttttttttaactcactgtcccatatatggccaaattcttcattcagtgtgaggaaattttcataatttaaatgtgcaaagtaatgcaggaagtacagaggtactccactcagaaagagaaatacatgggttcaataaatgggggttcccagtctaaaagaggggcatggagagcccaggtaacagctctgtggcaggactactagcaagccattaatccaggtggcaggagactgaagagattaattcaaggagatgaaattgatagactgacttatgtgttagaaagcagtgagaaagttacacctgaaaggaaagtctggggctgaattgttgctaagtacacagaaaactaaacagtgaaccaccaagacaattattaactccagagaaaacgagatattgtgcagaaaagagaaagtaagcacagcagatgacttgatgccagctgtgaacagtctttatggcatcttaataatgcaaagcaaggctattactctaaccaaaattatattgtaactatgtcaagaggatgcaggaaagga

SEQ ID NO: 37819 - DNA, 3044 bp, Bovine  19866881458375
  misc_feature (1)..(1): n is a, c, g, or t
ncatggagataaaaggaggatgaggcacagattctgacaggagcttcagaataacaaaaaacaggatcagcattaatccctgtcaggaatatacttacagtaagaatattagtaacatattgacctattctgtttttaaatcttaccttgacattctttaactttcctctagaattctaaaaaattcagttacgatttgtattatttgtatggaataatcacttttttccatttgttatgtcctactttaattaaatccattaaaagcacatgtatatgtttaatatggacaaattctgcattttgtctcactcaggcaatatttgtaacataaatctttcaaatatacatgatccagcacatccctgaatttgcaatgccatcatcacaagtaagacaatactttcctaacagtaccgagcactcacatgctagcaaagtaacactcaaaattctccaagccaggcttcatcagtgaattgtgaacttccagatgttcaagatggatttagaaaaggcagaggaaccagagatcaaattgccagcattcgctggatcatcaaaaaagcaagagagtttcagaaaaacatctacttctgctttactgactaaaccaaagcctttgactgtgtagatcacaacaaactgtggaaaattcttcaagagatgggaataccagaccaccatgcctgcctcctgagacatctgtatgccagtcaagaagcaacagtaagaactggacatggaaaacagactggttccaaattgggaaaggagtacatcaagcctatatattgtcaccttgcttattttactcatatgcagagtacatcacacgaaatgccaggctggatgaagcacaagctggaatcaagattgccaggagaaatatcaataacctcagatacgcagatgataccacccctatggcagaaagcgaagaggaactaaagagcctcttaatgaaagtgaaagtgaagagtgaaaaagttggcttaaaattcaacattcaaaaaaagaagatcatggcattcagttccatcacttcatggaaaatagataggcgaacaatggaaacggtgacaaactttattttcttggggtccataatcactgcagatggtgactgcagccatgaaattaaaagacacttgctacttggaagaaaagctatgacgaacctagacagcataatacaaagcagagacacaactttgctgacaaaggtccatctagtcaaagctatgatttttccaatagtcatgtatggatgtaagagttggactataaagaaagctgattgccgaagaattgatgcttttgaactgtggagaagttggagaagactcttcagagttccttggacagcaaggagatccaaccagtcaatcctaaaggaaattagtcctgaatattcattggaaggattgttgctgaagctgaaactccaatacttcagccacctgatataaacaactccttgaatgctgagaactcctgatgctgggaaagactgaaggcaggagaagaagggaatgacagagaatgagacggttggatggcattgctgactcaatggacatgagtttaagcaagctccaggagctggtgatggacaggaaagcctggcgtgctgcagtccgtggggtcaccaagagtcagacacgatggtacactgaactgacagggatggaatgtaaacatgattaatataattaacactgctgttaattatacatgagagttgttaagagagtcaatctaaatcctaagagttctcatcagaagggaaaaaatttttgtctatttttttaatgttgtatctatatgagatgatgaatgctcactaaacttaccgcagcaatcattttatgatgtgtcatgtgtgtaagtcaaatcattatgctgaccactttaaactggtgttgtatatgtcaattatatcttgataagtaggaaggaaaaagttaactattgaactggtttagacggttcactgaaaacttgtttagtattccatattctgaatagcaaaacaaaactcaaatctaaatgaatcaaagattcttataaatggccttcactatactcaagcactataggtctaagatttgcctatgtttctctctctctaaaaataagcccaggccagagacgcagacttcaagaaaattactgcagtcttaaaactaagattatcatagtaagagtgcactacactacctagagaaaatctgtaacatcatttaatcttcctcagcagtaaattttatatttgattctagagctaccaaacaaaaggctattcaataaaaaacaatgctaatctatagcaattacccagaaaaacaaagaagttttgatatctaaagttctttaactaaagaaaaatgtttatctaaccattaaagttcttttagtgaaatttcactttaagagtaaattattaaagacatatatttattaatctgtaaatcaggggttatctgtaattctgagagaccatgttaattcaaattaaaaaaacagtaacaacacccaaacatggtattcaaatgtataaaaaatgaagttgattaccatttagttttaagagcaatgaattcattaattctatctataaatagaaattaatcgtaacctagcatggaaaatgaatgctcacctctccctgcttacaattagctcatagtaaggtgttctttagaaaaaagataaacagcttaagtttcaaagaggaggcacaaagcacttgaagtgacattttcctcatgtcctgctgcaaagctttcttgtattagagaaccataacactagacaacaacaaaagacaggcatattctcaaacagatatgtgggcttcccaggtggatcagtggtaaagaatccaccctgccaatgcaggaaccacaggagacacgagttcaatccttgggtctggaagatcctctgaaggaggaaatggcaacccactccagtactcttgactaaaaaaccccatggacagaagagcctaggggggctaccgcacatggggtcacaga

SEQ ID NO: 37820 - DNA, 1840 bp, Bovine  19866880051342
  misc_feature (1)..(1): n is a, c, g, or t
nccaccacttgatgggaaatagatggggaaccagtggaaccagtatcagactttatttttctgagctccaaaatcgctgcagatggtgattgcagccatgaaattaaaagacgcttactccttggaaggaaagttatgaccaacctagatagcatattcaaaagcagagacattactttgccaacaaaggttcgtctagtcaaggctatggtttttcctgtggtcatgtatggatgtgagagttggactgtgaagaaagctgagtgccgaagaattgatgcttttgaactgtggtgttggagaagactcttgagagtcccttggactgcaaggagatccaaccagtcccttctgaaggaaatcagccctgggatttctttggaaggactgatgctaaagctgaaactccagtactttggccacctcatgcgaagagttgactcattggaacagactctgatgctgggagggattgggggcaggaggagaaggggacgacagagagtgagatggctggatggcatcactgacttgatggacatgagtctgagtgaactctgggagttggtgatggacagggaggcctggcgtgctgagattcatggggtcccaaagagtcggacatgactgagcaactgatctgatctgatctgatcctctcttcaataagttttcctgaagttcttcctctaaattctcatctagtatacatttactatgagttatttttcagtggattaagaacacaggctatcctcaaaagattagtaatctttatccttaattctaactcaaatcatgaatataattaattcctcctacagttatactttgccttttacatttagaaatactgcaacaagcctctttttttggaaactggaaaacataattaaatatctctaagtagtgaagagtcagttggcaaaacagaacatatcactgtgtggtattaatgccatttatgtgagcagccattaattccaatttgaggcccctttcaaaatcttgcagagattaaaatggtctctggattttagaagatttattatcaatattcttaacttctggaacaaaattattccacccatccctacttccacattttccacccatctagtccatgctatacttacatacatacaagcagcatttcctaaatgagaaatgagagagtccccataagctctgtataaagtaacttcagatgactgcatacaacatccctcttggagcttcactaaacattggattactgaagattctgagaaggcctatggcaaagaaacctgtttaactttgttaaatttactacccgagacctctgagaaaagttgagatagatatgagtgtcttgagaggtcagtggggtgtcagagaacttttaagattgtcaaataatcagccatcaaaagtgaaagtgttagtcactcagtcatgtctgactctttgcaaccctgtgaacttgtagcctaccagactcttctgtccatggaattctccaggtgagaatactggagtgggttgcctttcccttcttcaggagatctgcctgacccagggatcgaaccctttcttctgcactgtagacagattcttcaccatctaagccaccagaattagcagttgaggggagcctctttttccaggtgaacatgaaaaaaacctagattgctcttctctcaccattcaccatgtttctttctctacccaactttacagatgaactacttttaaaagagggcttgcagcagtggcagactagaattacctgaggaacatctagaaaatacaaatgcccagattttatctaagaccaattaaagtagaatctttatag

SEQ ID NO: 37821 - DNA, 3658 bp, Bovine  19866880433618
  misc_feature (1)..(1): n is a, c, g, or t
ntggtaaagaatctgcctgcaatgcaggagacctgggttcaatccctggttgggaagatcccctggtctggtgaattccaaggactacagtccatggggtcccaaagagtgggatacaactgagagactttcacttttatttacacagcagttctagcattggctactgaggcctcatgaggtagctccacagtcttagggacccagattgcttctgtcttttgttatcactcctactttcttggccatattaatgttgtgaaattgagcacaattccatgtccatattccctccaataagagggagaaccagaggacatgaaaagcatgacctttccaggatgcagcctagaggaaaaacaatgccgcattcaagataaaggtgctccattttaaagatgcttggaagaaacaaacgtgtcgagttctttatctgtagtaagttttaatataaaagatagtggagattcaagagagaatatttacttttgggtaaatgtcctacaagatcttcattcacataaagtttcaactattggtgtacatgggtaaggttagtaatcttgagtttaagagtacaatctaaattttttttctaaaaaataaaagtaaaatttgaggaaactctcaaccatgtgctgtaaatggaaataaagtaagtttttacattagaatatttttttaaaaaaaggatgcagcctggaaatcgcacatgtgagtattcacatgctattggtagaaattagttacctggctgcaccttgctgcaggggaagctgagacacatacctttcaaatttttattcagctgaaatttgaggttctataactaaaggaagaagtgaagaatatatggaggtgagatgagtggataagggtggctggccatatcaggtataagtgtaagagaaattttttggaaagtcaggtggttctagcaggagagaagggaaagagttgggtccattctatattttataattttcctgtcttcctacagtcttgtttttcctcttctgacctttctcagccttgactctgatatgtgcttcttttcttatcctaatttggttcttctaaagtatctccagatcatctaatagctctacaattcactgctgctgttgctgctaagtcgctttccaggcaagagtactggagtgggttgccattgctttctctgctacaattcactaaattaagtgatacctgatgagagtagagaatttagttgttggaacccaccctgtgccacagacataatgccgggtttggagatacagcagagtaaaagcagacctgattccttctctctaggagtgtagattacagcaggaggaaatggcacaaatatatatcaaattgaagctatgtttctgtttatggccatgatggagcaataggacctggatttatcttatctttctgcatgaaataattaaagaactggataacatatatgaaataattcttcagatattaggcatcaagcaaaagaggcacactaatccctgaaagatgggaaatgaaaagcaagtcccataaatattttagggtgaaaaaagtctttatttctcttttgtttctgaaagattatcttccaggtttagagtttagaacaggagggtttgttctcaacattataagatgtttctccactgttatctcatttgaattatttctgaggagaaatctgctgtcatccttatttttatttctctgttcattcaatgtacttatttttcttctggctgcttctgagactttctttttattactggctttgagcactttgattatgacatgacttggtgtagatatttttaaaatactgtgtgtgtgtgcttgggagttgtagagcttcttagactggtaggtttatgcttttcatcaatttttttttcaatttttttctgtcctgaaagaattaatccccagtgaactcacatcacaagaaatgttacaggaagtttttatgttagaggagaaataatggtggatagaaatatggatctcacaaaggaatgaagagcactggacacagtaattatgcagggaaatacaaaatagtttctgttatttaaatctctgaaaaaaaaccattgaccatttgaaggctagtaacaacaatgtaaagttgggcttataacatatgtagaagtaaagtgtatgaccgcaacaacttaaaagggagagaaggaagtatactggtgcatgcatgcatgctaagtcgcttcagtcatgtccaactctgtgtgactactgtggactgtagcctgtcaggctcctctgtccatgagattctccaggtaagaatactggaggtgttgctatgcctttctctaggggaccttcccccacccagggatcaaacctgtgtctcttatgtcttctacattggtagatggattctttaccaacagcgctacctgggaagcccatactagtacagtgctttatattatatgcagtgctatattgatactatcaccagaaggtacatggtggtaagttaagatatatactataaatctcaaaacaacactaaaatgccaaaacaagatattagtaataagccaacaaagaagataaaatagaatcagaaaaagtgcccagttatccaaaaagaaagcagataaagaagaaaaaagtgaacaaagagcagacttgacaagtagaaaaagaagagcaaggttatatgtaaaaactaaccattttaacaaccatgttaagtgtaaattctctaaacacctccttaaatgtggagattgtctgattagataaaaaagcaagagtgaattatatggtgctcaaaaaaactctttaaatattaagatacagataggctaaaagtaaaataatggaaaactatgtcatgttaagaataatcaataaaaagctggagtggctatgttaatattagagtaaatgtcagagcagagaatactaccagggataaaaagagtcatttcataatgataaagctgtcaattcaccaagggaaaataggagtcctgaatatttgtgcacctgaaagcaagtttcaaaataatgaagcaaaaatgaatagaactgcagagagaaataggcaaatccataattataatggaagatttaaatatcactctcacagtaattgatggaataaatagacagaaagtaaataagagtataaaagatttttacagcactatcaaacaatttgatctaactgacatttataaaactctctactcaataatggaaggatacatattattttcaactacatacagaacatttaccaagatggattaataaagtctcaaaaattttaaaggattctaattatacaaagtatattatctgttcataatattaaaaaagtagaactctatagtagaaagatatctggaaaatctcccaaatatttggaaactaaataatgcacctccaaacaactcacatgttaaagaatgaatcaatagggaaatagaaaatattttgaactgaattaaaatgaaaacttatattaaaatgtattacatgccattatagcagcatttagggaagaatttatagcactagacgcctacattataaataagaaaggtctagcatcaatgactttagcttccatctcaagaagatgggaagagcaaattaagctcaaaataaa

SEQ ID NO: 37822 - DNA, 2038 bp, Bovine  19866880441031
  misc_feature (1)..(1): n is a, c, g, or t
naaagctgagcactgaagaagtgatgcttttgaacagtggtgttggagaagactcttgagagtcccttggactgcaaggagatccaaccagtccatcctaaaggagatcagtcctgaatgttcattggaaggactgatgttgaagctgaaactccaatactttggccacctcatgtgaagagttgactcattggaaaagactctgatgctgggagggattcggggcaggaggagaaggggacgacagaggatgagatgggtggatggcatcactgactcgatggacgtgagtctgagtgaactccgggaattggtgatggacagggaggcctggtgtgctgcagtccatggggtcgcaaggagtcggacacgactgagcgactgaactgaactacttcacagcatgagaactatattcaatatcctatgataaactataatgaaaaagaatataaaaagagaatgtataaaagtgcataactgaaacactttacaacagtagtttataaaacattgtaaataaactatattcaattaaaaaaagaagacacttgttaggatattttcaaaaatagagatggtacagacatacttgtgtaacctacactttctgtttatgcagtaagcaatgatcgatgtttcttattccctgtattaaagatctggaccatccactgtgtactatggctcttgcttcttggatgtgccttgaggaggtgtcagctttcccactgattgctttgttccacttccttgctttctgagagaacttagcacaggttagctttctgactaaactcaaggagataaacttttagaaacttatccttcttagaaattactgtaatcaactcagaaattaccatacatacttgttatttagatcttcttattcagatctatttttaggtcttgttagtcagtccatggggtcgcaaagagtcgggcacgactgagcgacttcactttcacttctcacttttcatgcattggagaaggaaatggcaacccactccagtgttcctgcctggagaatcccagggacagaggagcctggtgggctgctatctatggggtcacacaagagtcggacacgactgaagcaacttagcagcagcagcagcagtcagcatatttataaacatatcactatatcactttttaaatatattttgtatttgtctaaaattggtttcctttgtgattttacatattttattttatatatttaaagaccttctgagaaagtggtcataggtctcaccagaatgccaaaggggccatgacacacgaaaggttaaggactctgagagactttttttgcaatttccctttgtctgaagatgttttcctcttgtctttgtttttggaattttattttttttctggatgctaaactctaagtgggctattattttctttcagcatgtttaatatatctatccatttgtgttctggctttaatgattgctattgagaagtcaatgctaatctaattgttatgactttgaagatagtcttctttttaaaaccactattacggtttctttcttttttcattttcagtgaattgggtttagatgtgttcttttctcttttataaatctgtttgacttcttgaagctatggctttattctttccatagttgtggaaaaaattgttgaaaattctctgcaaattttgcctcagctccattatcttatttctttccgggaccttctcactctgtgccctgtctttcactctcttctgtattttatatcctttagtgtgtgtgtgggcatgctaagtcattttagtcatgtctgactctttgtgaccctgtggattgtagcccactaggatcctctgtccatgacattctccaggcaagaatacaggagtgggttgccatgcccttctccaatcctttagtctaacttgtattatttggttatttttctggtctatctcccagttgtctgattatttcttcagctgtgactaattttctactaccattggcattgaattcttaatttgggatataatatttta

SEQ ID NO: 37823 - DNA, 1810 bp, Bovine  19866880461238
  misc_feature (1)..(1): n is a, c, g, or t
nagggtgccctgtagcctctgtggtcagagcaaatctgatgtcacaggttttattgattttctgcgtaaaccagttataatgagcctctaatctctgctttgctatcctttaatcgccaacgccgtcctcccgagggaatccctggatccaaccggggctggaccccgacaggtttgaatgagtcagttctcctggcatggctttggaccatgagctgcttctgttcaagtttcctcagtgtgtgttcctcgggtttccttcagcccctaaatcataattacaacgtgatctgcacatatgatttactcccttactggaacaattccacttgagcacacattgttataaagtctggatcagcagaaccagttttctcatgcaagagcccacatttacaatatggcgctgactgctctttcagaagtctgtcttcattcagcattcttgtacccgcgtaatctcagggcagtgaactggcacatttcatgtaatgtgcaaatacaatatagtgaaggagtatagaaaagcagattttcatacagagctttgggcaattgtgatctgagaactgctcaagtaatcttagcaatctcatggggctccagctcacaaatcagagtttctcccataaacttgaaacctatcacaagttgactcttagaatcacttaatcctttctattcgcttatgtcaagacaaataggtgcttctttacaatgagcattttgcttagttcccagtggggcaaacagctgtgttcattgattcaagctcttgcctctgctctctcaaacttttttttcactcttcttaccgcaagtgagattgtggtatctgaagcctgtaactatgcacaaaagaataacaagcagggatctgtgttatccttaggacactgtccacaacttcagtaatttatttaactgggtttaatcaggaacacagtttacctttagttattcatttatgccaggttcaacagtttaaagaaaaatataatcacctaagttcaattaattatcttttttttggagacagatgagagatggcaccaaatgacaaacaatttgcctaaagcccatcatttctgttcttggcttatgaacatcaagtctctacattcttttttgacatgatcctaatcagatataacacccacttttccttaattatacaatgggacaagagaaattagagtattccaaatcaatgactaaagcaaaggcattcataaaaaagggaccctaattatattatagcaatttccaatgggagcattaaattacatatttcaaagaaaatctagaacaaacattaacattgtgatgtccagttcagtgggaaagcacttgaattggaaaatatggcctcagtgtctcaaagtttattagaagcccattttgcaacaccaagctgtatcatgctctgaggaaaaatagtaagcaagatcatatttgagactgacaaagggattagaaaaagcaggaggggaagataaaataaaattaagagaacattttataaatgttaactctcacagctgtagtacaatcctgaagcaaagttgaaagaaatgtaatgaaatgatggctggacttggttttggtccaagacagagtgattagtcttgcaaataatattttaaatatatttgctccagagcaaggggaaacagtacccaaagcactgcaagaaaaataagtttacttaagagcaagaatatttaaagttttaaccaggataaatgtctagtactaggaaaaagaataatacatttcatgagggctaattcacattcatcaaaaccac

SEQ ID NO: 37824 - DNA, 891 bp, Bovine  19866880518347
  misc_feature (1)..(1): n is a, c, g, or t
nctctgacgtcctaaggtatttggagaggccaggtcaacatcagcaattctgagtttcagagaaagtttatttctctaatggtttgtgtttagagaagatttcagcagaattactgcatcttgactttaccctgaacccttcattgatcatctgccttcttgctctcattctttccaccagttctgtttttacagactgatttagagagaagcaagtggtgaggcaaatcatcagtgtcaatgtattcatctactcaggctgctattaaaaaagcatagcctggggacttaaaacaacagacatttatttcccacagtgctggaggctgagaagtccaaggtcaatgtcctggctgattcctgttcctggtgggagccctcttcctggcttgcggttgatggtctcgctgtgttcttgcatgatggttagggagaggtgagttctctgatctcgtcttataagggcagcacgaatcccaccatgaggcttccgctcttgtggcctcagccgaacctagtgacttccaaaggccccaactccaaataccattacattgggggttagagcttcaatatatgaacttcagggggcacaaatattcagtccataacaggaaaaccttgattagttagaaattatcaaactaactctcaatgtgtcactgtaagagaaagagacaaatcacaaattaacttggctaaaaggtatcttgaatagcctgaagatgctcatccacccagcttcaggtatcgttttgtgtttggtatcaagccatcatgatcagtgggaacattgctcaaaacactgaaaaaaatcccaagattcaacagtcaatatgaagtatgttttctaaacacattcataaacccagacttaaccacaaaagtttt

SEQ ID NO: 37825 - DNA, 2430 bp, Bovine  19866880588771
  misc_feature (1)..(1): n is a, c, g, or t
ncctgcttattaactcgtatgcagagtacatcatgagaaacgctgggctggaagaagcacaagctggaatcaacctcagtagcctccaaatgctttccttcccccacatccactcgcagacttctggtcattatgatgggacctttccgtcgtcccttccccctccccctctctctttctccctctccccctttccttctttctttcctttcttcctcaccctaacccttcctcccttcctctgtccctcactctgttagttcctctccctccctcactgcctcctccccctttcccttttctttctttttttcccctcccttccaaaaacaaggcatgcaactatttttaaaaaactttttattttgtattggagtatagctgattagcaatgttgttagtttcaggtgaacagggagcgggactcagccacgcgtatgcatatttccattctccccaaactcccctcccatccaggctgcacataacattgagcagcattcactgtgctatacagtcggtcctagttggtgatccatttcaaatatagcagtgtgttcatgtccatcccaactccctaactattcctttctcccatccttccccctgggcaaccattacttcgttttctaagtctgtgagtttcttcctgttttgttagtaagttcatttgtatcatttctttttatattctacatataagagatgtcatgcgatacttacatttcccaagaaccgcgaaattctaaatctgcccaagtcattaaggactgtcaaatctagctgcttcctaattgaggacaatgagcttcaggaaagtttagccactcaccccacacacatgattgagtgtgtttgtggtagaaaggaggcatctttcaagccccagaactctccacctgttcttttttttaatttatgctgttttctaggcttttccgcttgcagcattttagttattaacagtatctctaatgagtgataaagatttaaaaatttttatttctttgtaagttgattctagatactctatttttgctcactagattgcccatttctgatcagtgttgtggcaggaattcatgtcctcttggttctaggatttgatatttactgttgtagctgagaggcgcagtgtcacacatgaatttttaatgattttgtgaggaccattaagaagttagttggtttctgtgcaaagttcagcccagcaacaacagacccagtgcagccgaatcctgcactgtgggattgataccaaacatagaaacagagcagctctgactgctccagggcccaagggaatgcattctctctggatgtatgtaaaccacctgcaagtgacaggcagctcacaaggtccgcggaaggtggagctaagtcattgtctcaaggaggtgataagggcaaattttattttataacagtatatacttagtaattagaaatagttgtggaatgagacattgtgcttttgaaactataaatatctgctgatttcagtgtcagcaaacagttttctggcccaatcttagcaatggatgacttttgagttattttttccagtgtgattggtagttggtacattttactaagtttcgtttgcccgtatttgtgagctctgtcgggagagggctgggagaaggaaagagaaaggcagaaaagacaagggaggacatgactagaagatttttctttgtcactactgagcaaaataaaattcaaaattgcttcataattggattttacccaggttttatctagctagctaatactggcttcattaacaacatgctctaagctgaaagttcttaatctttttttttttttcctctaagccatgcaggatgggtgatggctgggctgtggaattttcccatcgtgtgccagggttatgagcaattctcagtggaagagctacagcaactccaccccttaaacctcccctgaagaatgcagttgggaatgcatgggagacagagtgatgccattatagaaaaaagcttggatctgctctaatttattatctagaaattcagctattcgtgaatgtcaatatttgagaaatgacttgtaagttgcaacatgccaggagttcagataacactggtgaggactattgcttgtagtagctaaattaggtagccagacttttgttccttgagaataccaggaatcttgcctctcttcttaacagcaatatcgtgtgtgtgtatatatgatatatcccaaaagtatagattacttgaaatgagaagtgtaactatctgctgtcaagattttaaggataaggaagtcaacaatcagtgtaaatgtctctggcagattaaagatagatacaaattctttgatgctcctcccctaaggaggtgggttcattatcctgccttcgaatctgagctgactcatacctgctttgagcgacagagt

SEQ ID NO: 37826 - DNA, 1156 bp, Bovine  19866880593896
  misc_feature (1)..(1): n is a, c, g, or t
ntatttttaatgtttgtaaaatttaggtttttattattactttttccttattctgtatctggaatttttttggttgcactacatgtagaatcttagttccctgaccaagggttgaacctgcaccccctgccttggaagtgcagagtcttaacccctggaacatcagggaaacctctttattttgtaatctggcagcaactgccagatagaaagagccttcttaagttttgaattactcatcagccctcttccccacagtcatcagtgtgtgtattttctatggcttgctgccctgctctgtgacccagcccccactggagaaccctgtggaactgttggctgctgccggttcatctccctttcctgtttctcttgcaggagacagagcatgtggtatccagccagtcggagtgtcgagggaaaccgggaacaccggctcaggagagtgcacacaaccccacctccaggtgccaggaaactgtgcgagttcaaccaaggtgggccctttgttgtcagaagttgcaatgggcctggggttcctttcccaaacatgggagcacctgtgcttgctacccccacgcaagaggcaaggctttctctctttcattggcatcactatgaagtcagagaaactccgtaatggggcctagaaggagaatcattgagtctaagagaaatataaataacctactttctctcccttcagtcagaacataatcagccttaaggctcagagaagagtacagaccttcctgccctgagaaagagaaatgctggtatcattttgtcctctttctttccatgctagagatgattagcgtttcttctgtgatcatggtaattagtaataatagtgtaggcatcaagccaattgcttctcatatattctgtcatttagctctcgtcccttccctgatgcgacttagcagcagcagcagccttccccagaaagtggatactcttagcctcattttatggagaaggaccctgaggctgagacattaaggcacttgcctgatattgtacaagtgaaaaaggctgaaccagaatttgaacctacgaatgtctgattgcagcatagcaggtgtggcttctttgctgatccaagagatgtctctaagcccctgaagtggccctgggctggcctctctggtct

SEQ ID NO: 37827 - DNA, 3886 bp, Bovine  19866880617814
  misc_feature (1)..(1): n is a, c, g, or t
ngttaaaaacctgcttttaagtttatgttcttaaagtagaggtgacttacaatgttgtgttaatttcttctgtacagcaaagtgattaacttatacatatatatatatatatatatatatatatatatacacattcctttcacattcttttccatcatatcataagatgttgaatgtagtttgctgtgctatacagtcggaccttgttgtttatctatcctatacaaaagtgttcgtgaatgcatgccatatgctcagtctagtctctttgcgactcctctgtccatggaattttctaggcaaaaatactggagtgagctgccatttcctcctccaggggatctccctggcccagggattgaatctgcgactcttgtgtcttctgaattgtacatgcattctttacccactgagctactagggaaatctggggtataagagtttacatttgttaacccaaaactgtggaaggaaagctatgacaaacctaaacagcatattaaaaagcagagacatcactttgccaaaaaaggtccatatatagtcaaagctatggtttttctagtagtcatgtatggagggatgtgagagtctgatcataaagaaggctgagagccaagaattgatgctttcaaattgtggtgtcggagaagactcttaagagtcccttggactgcaaggaggtcaagccaataaatcctaaaggaaatcaaccctgaatattcattggaagaactgatgctgaagctgaagctccagtaattgggccttctgatgcaaagagccaactcattggaaaagattctgatgctgggaaagactgaaggcaaaagggggtgacagaagatgagatggttagataacatctctgactcagtggacataaagctgagtaaactctgggagatagtgaaggacagaggagcctggagtgctacagtccgtgaggttgcaaagtcttggacgtgacttagtgaatgaacaacaacaaccccaaacccccaatccatccccttttacctcccccttggcaaccacaagtctgtattctaggtgagtatgtttctgtttcacagataacttcctttgtgtcatattttagattccatatgtaagtgacaccatatggtatttaagatgctgaatttcttcatttccattccatcagcattcttatgcacccatggggtggaggcaggatgggggctgaggagaccctcaatacatgactaccattctatgcagtataaataaagaaagctatttttagaatccatgattacccaactatgtaccagactctcaaaattctgtcaagacaagttaatttttttttgtaatctctatcatatccctttaaaaaacgaaaaagaaatcctaaaaacacactatcaagaagagtacgctgataatacacagatctctgctttagtacagtctaaaaaggcacattttatgttctttactattaaaaaactctgggtgctcattcccttactcattctttctccttttagcagagcccatttagactctgcctacttctacaaaaaaacatttgaacaagaaacaagtagctattaaaacacacacaagttgtctatctcaaaaacaaaagatgaaaggatttatcccccaaggaagttgctgccaacaaaacttcctccttccataaagcaacaaagctttttcttttatctgaaatgttacaaaaatagtcaaagccatcaaaggccattatccttgctaataccccaatcttcaagcccctctaactggggacttccagatgaagagtctaatgaactccagttcgcaaatgtaaccaccaacttaattggtagtaacacattgctatagaatagctcctgtttatacaggcaaggtctttaacgacattaaaaggcttaatgctgtcataaattttaatacaatattttaaacacaagtgagtttatcactctcaaaagtaaatttacttagctgggtaagaaatccacaacttcattagtattctcctacaaccataaattcccctttgtcatatctgagcatttacagaattggcactggctttagctataaaaatcaatcaaactgatgcatattcatcaactaactgctctaaacagactgatgtgtcttggttctattgcaagggaagccagggcttaagcaaattacagccttgctgggtgtcaaactaggaaatgagagggttgtattaagtgattactaaagcttcattcttgctctaactgaatgcagttctgtaactatgagttttaaaaagctccagatactaaggaacatgccagagtagggcaatatgcagccccaccactcagatgtactgaaaatccaaatgaaaatgtaaacacatcatctttcagaaggaagcattaaggtatttatcagccatcaccttattagggcttagctcctaaggatgagcagttgctgggaagaaaaggattgaagtaggcatttaaatcaaacagcctataagagctaggcaaagagcatacatagagatctgagtgggaattgtgggaaaacgaagagctgctcctcagttccaactaattattgccttgcaagaatgtacaccctgggttatcccatttttacatattacaaaagaatgcaaaaatccataaaacctctgatatttaaacattgaatcccgaattgatgcttttgaactgtggtgctggagaagacttgacagtcccttggagagcaaggagatcaaaccagtccatcctaaaggaaatcaaccctggatattctttggaaggactgatgctgaagctgaagatccaatactttggccactgatgcgaagagctgactcactggaaaagaccctcatgctgagaaagattgaaagcaggaggagaagagggcaacagaagatgagatggttggatggcatcaccagctcaatggatgtgagtttgagcaaactccaggagatagtgaaagacaggaaagcctggcatgctgcagtccatggggtcacaaagaattgaaccggatttagcaactgaacaacacaaatgtttaaaacagtctagaagccaattatatctccacattagatacacttgcaggacaccaaatttgagatctcagatgtgggacactataccactaaggaataaaatagaaagatggggggagatgctgaataggaggaaggatgcaaagaaagaggatagaatgggctaagtcaatatctgaagttggctctgttgagggcattcagaagaacaagcaaacttggaggcaggaagagattaagacggtgagtctaaaccttttgggtggtcatgggtagcatatgagattctcataaatgctttagggatttcccctggaaaaataaacctaaggagtaagaataaagctgcccaccaagatatctgtatgtttgttccttgttttcctccccttgttaccttacatggcaaaagggattctgtaggagtccttaagttaaggaacttgacatggagtgattacagtgagttatctcagtggatccaatctaatcacatgaatccttaaaatcagaacctctctcctgcccaaagctgtaacagagaatgacctgtcctcacaccggatctattcttttagctctgaactttgtgctctgtcatctgtgttcagtcatgcttgctctgcacctttttgtaaaagaatgtttcccacagcctgaaatataacatggtagcccattctcaaggctctgacctttaaaggtttaacacttttccattcacacacagagaaaaaagagaatgacctttgtcctgttgtaggtttataggaacattgtaattagacctacatagacagctgcaagaacaaacaatcc

SEQ ID NO: 37828 - DNA, 1924 bp, Bovine  19866880623291
  misc_feature (1)..(1): n is a, c, g, or t
ntattttgaaaggccttatatccccaaaggaagagatgacaaaaaggcgagacattacagtgaatgttgatgatctttgtttaggaacatgacagtctcaagccctctgtggcttctgagatgcgatgatttatcttatttcctcagaccctgcgcctgtgcacaaagatgggcagaatgaggcagacagcacaccagaagacatgcagtctgttgagactagcaggctgctctatcacatcaccgacggcgacaacccactgctgtcaccacgatgctccatcttcagccaaagccagagattcaacttggaccccgaatcagccccttctccacccagcactcagcagtttatgatgtaaaaaaatcttgttcttatcttcacttcatacagtttttaaatactccatttataaactacagtaaagtgtgtgtccaaaatagagcaagcatgcctaccaaaagcagctgcgggccctgaaccatacatggcaaaaaatcagtgtgctttcgagttaagaatgccgtttgaagctttcttgtgtcagaaggaaatggtctcaagacacaagctgccctatggctcacaggtttgaatgttttttatgaaatgaccagaatcctaagaaatgtgcatatgtaaataccagaaatgccattcttggtgagctcacgaaagtattatttctgtgtccaggagtggcctcaatggatggattgtggcaatgcttggcaagtcgttcatctcaatttcttcttagattcttgaaaagtggtagcttataatagctccccctcaaagaataaagtgaaactatgtgtgttttttttaagttccattagtagttttgatgcatagttaaaatgagtcttcccttgactaaatgtatgtgctgggattcctacattctctttaatacctcctgctgtcactcatgaatttatccagaccttgttccatggactgtctactgatgaacttgagggagttagtgaattattactattttaaagtatgttaggtgagaaaataaacatattttctagagagggaatccatttcttttatgattcataaaggctctattatataaagaaaactactcatctgaatcctttttgaaaatattgttagtctgggctcaatccctgatgactcagatgtaaagaatccacctgccaacgcaggagatgtaagtttgatccctgaatcaggaagatcccctggaaaaggaaacggcaatccactccagtattcttgcctggaaaatcccatggacagaggagcctgaatggggtacagtccttggggctgcaaaggactgagcacaagcatgcatgcatgccatttattgaggataacgctgtctcattagtctgaagttggcgtcctccaagatttatgaaatgcatttcctagactaatactctgacctttgtagacaaaagtccttgataacatttgcctataacagagttctgtgaatcaggggtctccaatacccagcagatgctaccatagaagcctcatcaaatgaggaactggcctctgaactctgataatccagaaagctgggtttgtagacaagcagcagtgtttactggaagaccattgttttgttcttttaatttgttttttaattggaagaatattgctttacaatattgtattaatttccgctgtttaacaaggtgaaccagccataattgttttaagttatatcttttaaaaaacattttcttggagtatagttgatttacaaagttgtgttagtttcagatgtacagtaaagtgagtcagttatacatacacgtgtatccactctttttagattcttttcccatataggccattatacagtattaagtaggattccctatgctgtacagcaggaccgtattagttatctgttttatacgcgca

SEQ ID NO: 37829 - DNA, 1494 bp, Bovine  19866880688484
  misc_feature (1)..(1): n is a, c, g, or t
ncctatgtagtcagcaatgttaaaatccatttgagtgcagtggttttctagtggttttgtttattcaaatattacagagcaattctcaaggccagaagtggttgttgagtcagagcttctaacgactgtaaatttgagctacataacatcatcgatgttacaatacaattcgagagagaattgggtgtttagaaaaatgagaggatttttagagatcctatgggcattttcctttagcttaggaagaatttcgggaaacaaaatgttaatcattataaaagtcacagctctaattctgctgagataaaaatcctagaaaaagagtcatcaggaaatttctgtggttatatttaagggaacactataaatcaggatttcagggaaggatttttgagctgtgtttgaggggaacagactggagatcctgtttgtcaataatgtaaatacataagtgaacagcaaaaaactcaaaactagaaagatacatctgtgaaggcaaacacaacctacaactgtggcaaactggttgtgactatatacctataggtctctactcacgatacagaatctattttcaatattccctgacatgacacttagggaaagctgtggagctgaatgcattctgaaattattctgctgtaatacatactaaacagaacaggacagaacacagaagagaaaggcattccatcaaagtggttcaaggtacagaaaagttttttctcatctattcctcccaagatttcttccttcaacaccaaatccttttatattttaactagtgacagcagaggggattctaagacatgtttctctgagagtcatttttaattgagctttcgttatttacaaatatagaataagggctagatgttgctttagtttttaagattaatctacttgtgtatcactggcaaataactattgggtttaaagacggaagaagtatgttcaatacatttgcttcatgtgtcatatgatgctgtactgtaaaattaacagttataatatatagccatcattcatatgagcaaacaatttaatgttttaagcaaaatattgaagaacctctccattctataatttaaaaaaataatctcagaaaacaatagcatacaagcactctgtcaaatccattgcttcctttacattcccaattttactatcttggtctgtaatatgttatatttttgcctggactataataatctcctaaaattctgtcttcctccattccactcatcctatgaaacatggaagattaacattataaaacactgctttgtaactgtcatatacctgccttaaaaacttcagtaactcaccattaaatctagaacaaaaaacaggtagccactgtaatttattgagcaagttctgatcaacaaagtgctttagtgtgttgatcttagtatcagtctgatgaaaaagggagataggaagactatacacaggtaatttcaataatcggtcaaaagacaagaacttaat

SEQ ID NO: 37830 - DNA, 1487 bp, Bovine  19866880711858
  misc_feature (1)..(1): n is a, c, g, or t
naaaaaggctgcacattccaggctttctattgacctttgagatgtaaaagtttctcatgagggaaagaaagcatccctgacttaaatgtggactcacaaaatacctgaggcttgtggaggaaacaaatgactctgggttcttttcaactcacagcacacagaaaagcagcaatctgagatttcagtgagtctcaaaagataatgtttgtaggtggagctggcagccaaaggtattcgtgaaatattagtgctgcaagtttaaaattttatttcccaggatttgaaaaaaaaataagcagccacagtttattaaatctgggctatcaatggaattttgaaatatctttcaatctgatggacttccctggtggttcagtggctaagactctgggctcacaatgagggggggcctgggttcattctctggtcagggcaccagaccctacatgccacaattaagagtttgcctgctgtactaaagatctcacatgccataatgaagattctgagtgctacaactaagaccctgagcagccaaaggaataatttttttaaattgccaatttgagggttttacccttgttttaatttggcagagagagatcaccaattgcacacattcataaagaattctagagaaatgaatgtcatgctgtaaaggagagggagcacaacagtgcagagatcatccgcttggaaggaagtcagacttctgtctgagctgacgattaaacacttaataattctgtcttcttgggagagtcatttaacaccatcactgttcctgaattagcacaactgactcctaatttgttttcctccttctgctcttaactgtcacgatcatgcgtgctaagctgcttcatttgagtccaactctgtatgaccctatggactgaggcttgccaggcttgtctgtccatgggattctccaagcaagaatagtggagtgagttgccatgccctcctttaggggactgtcctcacccagggatcaaacctgtgtctcttacttctcctgcattggcagacaggttctttacacttttgattaaagttaaatattaagtcctttctatgacccacaaggattgacctctctcaccttactcctgattagtacccactctccctctgctctggccacactggcttccttgttctttatgcataccaagcccagatccaccttggggctgtggacttgctatttcctctgcctgtaacttttacttggctggctccctcattacattttgttctcttctcaatatcctcccaataaccaggcttccctaaattatttatctaaaaaaagtaccccatgtcattcttgattaccttactttatttttctgctagctcttgtctctgtctgtagctgtatacatttacacggttgccagtctccccaactacactataaacttcacatgggcgtatttccagtcggttctgatcactctatcccagaagtcccaagcagt

SEQ ID NO: 37831 - DNA, 753 bp, Bovine  19866880731768
  misc_feature (1)..(1): n is a, c, g, or t
nttagctgtaatctgtggagaaggcaagggcaccccaggaactcttgcctggaaaatcccatggacggaggagcctggtaggctgcactccatggggtcgctaagagttggacacgactgagcttattcactttcacttttcagtttcatgcattggagaaggaaatggcaacccactccagtgttcttgcctggagaatcccagggacgggagacctggtgggctgccatctatgggttcgcacgtagtctgacacaactgaagcgacttagcagcagcagcagctgtaatctgaatggcacactggaacaagagctgagctgaggaaaaccttccatactctccactcctcatttttactttatttacttacttatcattatttttaaacatttatttatttacttgactattgtcgggtcttagttgcaatgtgcaggctctctagttggtcctgctggctacagagcactgagttggtttgctgtgttccacagagcttagttgcctctgccacatgtggggtattagttcactgaccagggatcgaaccacgtcctgcactggaagccagattccttttttttttttttttttttaagagctttttattgaatgtgttactaaagaagtttagtcaaaaagaccaaagcccatgtcatcatcagactcttcagattcttctttctttgcttctacttttttctcctcagctggggcagcagtggtggacaggataggtccaccagccc

SEQ ID NO: 37832 - DNA, 2839 bp, Bovine  19866880731960
  misc_feature (1)..(1): n is a, c, g, or t
natagatatgttaaggaagcagaagggccaaaagaaccgaacaatcgctgaggtgctgcactccatagtctagattacagtccatgagcctagactgagaaaagtcttcactgaatgaagcaaatgctcaaatatatgttttcttttggagttattgatatttctctgttatcatcatcatctaacactgatgatagaaaatagttccctgcagaaccactgttggttagttttaactcgttataggacccaggaccctcaaggccctggagacaacataatgagatgtattaggaagtttagcctgtattgcaccagaacccactgctactcccgatacactacctcactgaggtccagtgctcttaagtggagttgcttctgattgtcaacttgctattggcacaaattctgctgtttcctgtgatgcccatttctttgattacgtcctccagtcaccatcagactactatttcacactcaattttagaattacaccagagtataacccacgcttgtagttactcagttcaactcctgtttattgagcacatattatgagccaagtattgtggttagctgtttattaaatgtttctcctcgttcaacaattattccttgggcaccttaaggtaggatattttgcaagactttcaaagcactctctcacacacacacatacacacacacacacacactttctctctctctcttcttattcagtactgtctcaccctcctgccactcagagcctattattttattctaaccatgtttttatcccaggtctggtaagaatgtccatctccaaaagatcagctcctcccagtcaagaggtttgcgaccactcaaatttatggtcaacactgaaagttttgttcatcccttattccttctgaaaatatctctttttttcttgacaatttctatggaagctgttatattctcaagtgaaccaaccacactcttacctcagccaggactgaggagaacttggagatacaggcacctaagccaagttaggtcaaaaagtcccttccctatttggactcagaacctgagggactatcagacaatccttcctcaaaaactgaaattataaggtgtaaaacatagggactttcaacagttgtgtggggaaagtccacttgtggagaaagagaatgacactcaggtgcaaggaaaaccagatatgggagctgataaaagaacattctggcaacatcaggattcaggggttctctacttggaggtcttactggatccctgccctttcctttttcctcatttttctacccttctattggcaaattccactttttgcttaagatagctcaagatagtttatgaaaagaatccatcgttagtatatatttgtttcctacacatgcagaccaggaaatgaacccaaccaatgttcatccagatcatgaacctaattttataggttaaaattaaaaacaacagtaatagttattatttactggacccctgccatgtggtagtattttaatacatgatttgtaatgcaataggcatccaagatacatgttcctacctccaatttatagagtttacagataagcaattaaaccccaaagaggttcattatccataagtcataagggaaatttggggaaattaagaagcctcaagagttttcatgggtgatttttctctgttggtttatgtgaaatgatgaagatctatgatgagatctggaaaagtcaagtgatttttcacaagagcacataaaattcaccataaaaactctaggtacactaacatttaaaaaattattaactctacatcaaggtataaatttacacctattacatttcaaaacacaacaaaacaaaattttgcatgaacacagacagtgttatgggggaaatgttaccctcagacattgctcgttgctgtagaaactggtaaaagcttttctggagagccatttggaaaaacattttaatagccattatgcgatcatctcttttgacccatgcaattttacttctggaaaaaccatcttaggaaataacccgaaaccctattcatcaagatttttaccaaacctaaatttataacaaaacaaattggacacctctgaaatgtgaaaaatcaagatttgtttaaggatgaaattgtggattgattaaactcatttaatcagtgaacaatgaaatgttcattgcatgccagatgctatgctagacacagagggaaagcagatgcatggtcctgccgtgtgtgaacactgttaatttgtgtgaacagaaagagaactagaatgaaaaatatttttatatttttaaaactttttttcttcctcaaagaatgagaagaggcttataaaatagaaaaaacaaggaaaaattcattttgagatagaaaatcaagttcaggaagaaagtgtatagatactacttggttattaaagttgacgctcaaatttgtttctgagcttccagacaggcaaaggagatgaagtattaagagtgactgatttaagttgttagtgaaaagaaaacacaggagtttctcaagacaaatcagttattcttcaaattttaatctaaaaaatatcattttgtaaatgtccaatgtgtgatattattggcatttgttggggtttagaaaattcttagaaataaaatatttcaagcatttggaagtgtatataaaacaatataatgagcatatgtgtatcctacacatagcttaagaattaaaatattataattaacacctttttgtacctttctacaattctgtttcttggtatctctacccagaattaatcattctccgaatttagtgtctctcatcttcaatttaa

SEQ ID NO: 37833 - DNA, 1211 bp, Bovine  19866880746135
  misc_feature (1)..(1): n is a, c, g, or t
ntatgattataagaaaacttgctcaagaaaagaactgggcatgtccgaaagcagtcaaggtgctacaaaatgagaagaaaagtaagacaggtcactagagaggtaaagaatgcagaagattgggaattcccgtgggggacagagaggacaagcagaaccatctaagacatcagtcatagttaataggagaaaataaggggcaagccagaaattgtctgtcatccaatgaagtaagtcagcaaaaagctggaaagcccttacgttgtgattttatgcctgaacagatatgaaagtcgatattggggaggacactcgcaccctgactaaatgaaaatagcctacttgacattaattgttataattaaattcactgtgtcagaggaaatatcagtcatttttttgaataggggtttctgtaaaaaacagttgacttaactttttttttttttttttacttttaaagtaaatgcttggtattatatagacagaattatataggttttatagaaataatttcctgacttttctactccacctcctcaaaaagtaatatttaaatgtcactctcttaaccacaaaaaccaggccaaccacattctgattttgtcatggttaccatcagagtccaatgcacagtttggtcctgcatcacatccacagaggaaataagtccagagatgtttcggaatttatccagaaacaagacttgaactaatgttcccacagtaggttcttgttatcaactagtcttttattcctccaagccaagcaaataaatgcttaaggatattagataatagtaaggatttggattattctgtgaaaatctttttaatataaataataaatgcagctgaagacaaccttattataaatgtgcttcatgtaggggatagtgattcatagctcatttgtgtcatgactcatagctcttggaaaagaacaagattccaagaaaataaagatttttattcagatctggtcagttacttaaccactttcatctccatctttttgaaaaacagcaacaacaaaaatactgcagccaggtagagtgcttataaaaacaacaatataaaaatcttcattacgtgaatcacatgataatagaatttctctgctgtattaataaaatatgagaaatttgataatagctatttcggaaagaatagctatcgagagaggactttaaaaagtaagaattaggagag

SEQ ID NO: 37834 - DNA, 1616 bp, Bovine  19866880813017
  misc_feature (1)..(1): n is a, c, g, or t
nactcaagttcttccaaatctgactcaagaggttatgtaatccctctaaacttttgtttttccatttgtaaaaaaagataatcataaccatttcatgaggttgtcataaaaatggtacatgcctggaacatagaaaatgcttaaataggtgttagctgattttattaataatatcatttattgatgctcagttcttgatctgtactcaatgttaaatgtatctctccaaagtaaatgtgaagaatgaaatctgtttcacgtttctctaaaatatggaagacctaaaattatattactgaagttttcttcgttattaggggggaaaaaaatctcattgtgtacacagagatcttaggaatgaattggaaattctacctgcagtccaggattccaacgctgtattatcagagaagactacacaagtctctctttctcctagagtcttcctgtgggtgagcaacaaacttggaatgacgtgccgttagcaccttattacaaacgacaattgggtaatttctaccaggccagactataggatgacaagaaagagggcattcaaggagagatggctgggtactcaaagcccacagtgttgaaggtgatccttagtaggagattcaaggtcggaggttacccagaaccagactctgccggcagccctttgagcgcctgtgtcctccgcggcaccacacgcctaaacaaacaagtggtgtgtgtgcccagcagtgggcagggtctcaagttcaccgtaactccaatggtatctcacgcttaaccttgccctacaactcaactcaaattcagaaaatcaccacagtttcatgaatgcagagggcatttcatctcaccgcaaaactgactaaataagaggtcacaatgccaaaaaagaaaagagataaaaatcacaaggccaataagaaaagtacaagatcaaatgaagtgccccgccaaagttgttctaacagagatcacctggagcctatttgctaggtaggactggacttcaagttattgtatacttaatgtattacactgagagcctcccacatcatattcaatgtcaatagcttagtgttaaaaaaaaacaaaggtcacattaatgaagcacttatgtctccaaaactgcgttaggcgcattacaagtacaatcttaaggctgggcccactaacctcccagtaagattaaaatgggttatattcatctctttttataagagagaataagttatttgaggggttttaagagttttaaaaatcatatttttttgctacctccctttacaactagaaaaatgaactaaataaacaaatatgtgtatgtagataaaacaaattacttgaatcaagttggacagatgcttcattcataaatgtaaatatttgctgacctcaaagaaccagattctccacacatattaaaacagccacatacattgcttcagtgtttttccaaagccactaaactgcagcctaagaagaatggctctagataaccctgggacttttgatctactgagaagagtctccaagtttggggccattgtttcctgtcctgggtaagtgaagatcctggagatcctcctccactctccctggcaaagacagcagcagctcct

SEQ ID NO: 37835 - DNA, 857 bp, Bovine  19866880816695
  misc_feature (1)..(1): n is a, c, g, or t
ntttgaatgcctgacttatctttgtctggtgtttgtgggaggtgtctgtgaaccctgaataagaaacaccatctgtagttcatttctttggcataagggtccatttagagagatttttggcatttaaaaccaaactgttgtgctgccctctggctgcttctgacaaaaaaaaaaaaaatctaacagaagaaactggtaccatgctcccctgcaggtctttctccatgtggaatttcgtggttgtcctacagcctagctgaaattctactcctcttatcagattggcatgtcttatttctcagacagggctgcaaacacatttgaaataaattagggagatcctgctttctgttaaagacctttgtatgtgcacacttgtaattttccagccagtaagcttgagagaattttctaacagttcagatatactattattttccattttcacttctctcttttttttgatgcctgcaggttgggaaaggctcaggggacatgccactttatttgctccacattttgtcaaaggtggaaggtttttaatggttcctccctgcaagcttccagagggggataaatgactcatgcagtgacacttatcatctaattaagacaaaacatcacatctttccaattaattcacttcagattcagaagacccaaatgtaatctatactgagggcacatctttatcaagcccacacagacagcagaaaagagataccctctttcatcattcaaacagcaataccattcctcctttttcaagatgacagtctatcaaatttacaaaattttaacaataattgtaccttagattcatagaggatcacttaggaaagtctcttgctgaagaa

SEQ ID NO: 37836 - DNA, 2294 bp, Bovine  19866880882946
  misc_feature (1)..(1): n is a, c, g, or t
ngaaactctgcctggagcccccaccccaatgcagcatccagcacttggctgtcctttgactctactctgtcatttaccctgtcaaagacaaagcttactcagccccacacctaaatctctactgatcatcaggtctatgttggtttcaaatagaaacaaaagcaaaaattcttacagcagtgataaccatggcaaaagttagtttcttgattttctataaatgcttgcagaaaaaatgcagaagaggatcactgtctataataaaaaatttaaaagatgattacatccatttatctgtttttttaatgaaaagagaacgtgctataagaaagtatatcaaacaatgcgaaaaataaataaacatgcctaccatgctaatgcacctaagtgacttgaaagttatagaaaagtcagcatctctctccaaagaatcaaaagtttaccaaacaagagagcagaataattggaccatctcaggacagcatgactttcattttcctaaagccccctggagtgtagaagaaggaaaatgaaggaatgaatggttgcaagctccctcttcacttgtgacatctgggcgctgtccccactggcggtggcaacactattaatcccaccctttgatgtggcaagtgcccaaaacctgttggctggtttctggccagagaaggagcaatttcaccctgacggctccagagagggcaaacacacacactgccagatagaagagggaagaatcttttcccatctctcccactgtcccagatggccaagtctgggtgcactgcctctagagcatcacttcaccacccataatgccgtcctgctgctgcagagcagtgcagggaaagacctggaaaaagcagcttcaagaatctccaggcaggggcttccctggtggctcagatggtaaagaatccacctgccaatgtaggagacctgggtttgatccctgggtcgagaagattcccctggaggaggaaatggcaacccactacagaattgttgtctggagaatttcatggacagaggagcctggcgcactacagtccatggggtcacaatgactgagtgactttctttcttttctttcttggctgtattccttcccagcacctcccctggctgagttcaccctccgtttctgtatccccttccagcatgttgactttggaagccatgggtaaagggacaggaggggagatacatatgcccgtgagtctccacccagagaaggctgcctcccaacaggaagctgcgtggggcttcctgtgagtggaaaataaacacgtgtggggcttggatatcatacttgacctaaccctctggtcagggatcccatgccagccctgaaagtctattaagagttgctcaagcttctgggattgggggctgggtgccagagatttccttccaaaaggtagtttgaatggttaacctaaaacaataaaaagccagtcattttatcagcaaaaaggaattattcaggacaggcaaagaacttcaatttggaacatgcagtttatgactaaccacatgcaagtttggcgaaggaaaaactctttcttagagagaaggggaagcgggagggctgttctaaacaaagagtccattggaggaaactgggagttggaagtgtggtggcttttcattggctgtgctgtgctggtctctcattggctgagctgttgccaggtggggagaaaatcttcctttctctgctgggcagttaagtagtaactttcttcctgatggagactcaaggtaggtctctacctgttgggatctgtatctacattgagtggtatgtgcatgagagctccattttattgaggtttccctttattaattttcacagatcatgttgttcttttgctttaaaaatctagcaatgctgagaaaccattacaaaaacattaataacatgggagacatgctcattgtaaagttcagtgaaaaatgcaagacatctttaaagaataaaagaattctgtataaaagaactctgtgagggcagaggactaggtgggaggcaggttgttcagtcgctcagtcgtgtctgaatctgcaaccccatgggctgcagcacgcaggcttctctgtccactatctcctggagcttactcaaacccaagtccattgagtcagtgatgccatccaaccatttcatcctctgtcgtccccttctcctcctgccttccatctttcccagcatcagggtcctttccaatgagtcagctcttcacaccaggtgctaatgtatggagcctcagcttcagcaacagtccttccaa

SEQ ID NO: 37837 - DNA, 929 bp, Bovine  19866880966208
  misc_feature (1)..(1): n is a, c, g, or t
nctgtttttcagtaatgaaaacatatggttttcatcatgtaaggtatttttgatccttagtacaaaaagctgaggggaggagggggtcacaatttaaaaatcctatattaccattataaataatgataatgagttgacctactgttcctgtatctaaacttagctgatagttatatgatcagaacatcaatgtatgagattcatgtttggtacaacttcatgagcaaatggccgaaatttctctatgttacttaggaagctagatatactcaagatacactaataaccatattttctaaataagagaataaaaacaggatatagttgcagccaatgggtttcttaacagcctagagcaaaagtaaacaatacattgcaattttcattagtatttcataaagcacaactaaattgtcctttgctttacacagtactttatgtttttaaaccttggttacatctgaaacctcaaatcaaattattctcacccataattacctctgagtcatgagataatagagaaatgtaaaaaaaaaatagggacaactccactgggatcctgtatatttaattatgcagtatctattaaataaagactcatagttctttaatggcatttaaaaatatataagcactatacacctctgagcaatgtgccctttggggttttgatcccaagtaggtcatcccaagggggctttatctacatatggccaaagacccacctgcttgcataggacattatctagcaggctctcttaatgattcaaataggtcactgcacaattgatttgtatgcggcacattcaaatagactgaataaatttgccagttccattatgtttgttcatttttcaactgccaaaagcttgcacaatatgtgcatatttaaaaagtggcaaataacagtttaggacacacttgcccca

SEQ ID NO: 37838 - DNA, 1125 bp, Bovine  19866880973138
  misc_feature (1)..(1): n is a, c, g, or t
ntgaccctgaactctaaaaatagacttaattccctcaccatatttatacttttaggaatgactcatacatttaggaaattctattttttcaaaagttgtttctgcctaatccttaggtaatcagaaaatctgattagcatgaacattttattattgttaagtattttagttaatgttttccttttatcttttgtcctttagcctggaccacagttgtgtagaagtctgtcatattcaagggtatttcagaacatagcattcggcctatgaaaaaagtaggtcaacatcaagataaattctctttagtttatagcaacataacgagtttaaaccaagctaacaatcctattgcatcattctataatcatgagctattgtagaggaagagacttgatctataaatacacaggtaatttttttctgaaccctaaatcagggtatatggtaatacctttggggagaatgatcaattatttaaaatgttggtctctgctagaaaattcaggatcaagagtcattgtatccaccattattcttttccactgacttggaaaatttcagagattgtgaagaaattgtcaaatccattcattcattcatttaaagttcagcctttccagatgccctgttcaaatacagcagaaagtctttaggtttgtgttgcttgatttctgcttgagacgtgctaagcacttttcttaaatggaaaatgggcctgttctcacatgtcactcttgtggagaagcgtgttttcctattctggtagatgcagcacttatgtctgggtttcaggccttgtcccaaatgaagtttttgaccagtctagaatctttaattaacaaaagcaaaaagcttttttgcctctgatttatgttaaggtcaactggtggaaataagttctctaggccaatttattggagaaggaaatggcaacccactccagtgttcttgcctggagaattccagggacggaggagcctggtaggttgccgtctatggggtcgcacagagttggacacgactaaagtgacttagtagcagcagcagcagcagcaggccgatttatgagtgccctagaatatccatagttattcattttgaaacacggaacaaataagataacag

SEQ ID NO: 37839 - DNA, 1065 bp, Bovine  19866880977939
  misc_feature (1)..(1): n is a, c, g, or t
natgtaggcttcctgacagaatcaggctcttttttgttctgggtgctgacagcagcacatctggtcaacaatgctgactttttcaaaaagaaataaaacaattaaaattttttgcaagttacatgccaggaatctcttaccccattatagaaagtttctcaaattccaaaagcagaaaatgtgatgttctgctttctgtccatagatatcctggatctcaggtcagttgtatgggatcatgtggaaagactcaactcacagaacttgaaatttcacaccaataagggaggcaaagatacagagcaggatgtgtgttgcgtgctgttggatcgcctgtcatcagcaatacttgaggggattagaaacacaccagaagtttttgttctgagaagccgtgatctttaatggaaaaactgacaaaccataactgaaaattctagaaactgccaccctaatcagaatagacagaattggtatagaaccttccagaaagccccatctgtgagcctggcagaattggctacagaagccttcggttttccaacaaattttttagataccccatgggactgtatctgaccatagtcatctttttattaaagtgtggtttgcatgaaaacacttccctctgtagctcagacggtaaagcgtctgcctgcaatgcaggagacctaggttcgatccctgggtcgggaacatcctctgaagaaggaaatggcaacccactccagtgctgttgcttgaaaaatcccatggatggagtagcctattaggctatcgtccatggggccacaaagagttagacatgactgagcgacttctctatctattgcatgaaaacatgcctctcaacatccctagaatcagtgcagagcaaaaacaaaccaaacatctcagtacctgccaggaagagttttgtctttcccaaaagattctcagaaccaagcaattcagggactaggcttttaaaacaaatggaaaaaaaaaaagttgtggctgtctggaagttctcactgggtactttggaaaaatttctacgtagctctttggctctgaatgtatttt

SEQ ID NO: 37840 - DNA, 1748 bp, Bovine  19866880994734
  misc_feature (1)..(1): n is a, c, g, or t
ntctgttctcttggccttctctagtttcccctcggtgctttggaattgtgaacgtctctccctacttgcttctgcctgagaatggatgcaatcccaagtccaggcctcctgatctctggtcttgttttgtatctcatcctggctccaactctccccaaacctcagcctcaggcttcaagccagggacacttccattctctcagccagacaggcttcccaagggaagggaatatttttctttgttgcctctgaaggcccccacagagctcttctaattttgcctccctccactgttgatttcatctcaatttgttgtcagcaccaaggacacgtttctctactttgagctttggcagcactgttagctaaactccacaagccacattcgggtctcacttaagtcacttttcttttccttcagattgtagtaagttttcagttagtttcttcctaacttatttcacatctttctcagctttctttgaccacttctgtgccaatatacactgtggattatttactgaaagttacttaagtccaatcctaaattgagggccctactgttgagtgaatgattagtacagtaagaaagcttctgttttccatttgcttcaattatagggtcatttctctggttcactgcatcaggaaggtactttggagtcaattattttgatctattcattctggaaataagagataatattctttaagaggaaggatggcctgagagaatttatgacaaaagcttggcactttaagcacagataggttctaattctgttgctaactcacgacaggacttcaaaaataccgttcagaggtatgctgcctattaagtaaggatgaaatgcctctcaggtttcagctgaggaataaatcgctaaatcacttttctaacatattgtgttttgcagatcatccactgtcaggaacctgagctaaagagcagagaaatggctctctggacatcatcacacatcactcataggtgagtcaactcttctaggcaacagaactcactcatggaacctagaaaaaaaagtttttaactaaaacataaatgagtcaattctttctgccaatggaatttacacatagaaactaaaaaaaaagtttatctaaaatgtgttagctaaactttagtttagcataatttatgatgttgcaaagctgggttactttagtctggaatccacaggtcaaaagaacttaaggacgtttctccttgtatcactgagtgacattctaacctaatgaaatgatttaatacctatcttcctagtatcttgtaagttccatcagagtagagtcagtatcctgttgtgttccatccacatatgttaaataactaagaagtaaaaaaaaaagatttttaattaaacagccaaaatattatttaaaagtgaacctgatatcaggattttgttttgtcagggattccaaaatactcaggagttgaacattaaatcccacttgtcacacgttactggcacagttcacaattaccatttggtgtgtgctagcaggcagaatttttagaggaggttgatctaatttttagcgatatggaaggtttctaggtttctttgttgagggtatttttttttttttttttttttttggtgttaagtgttctaagtggaatttatttagcctacaaatgttgaacccgaggcataaaaacaaataaaagactatttacataggctaattagattggaggtctaaatgggttagcatcacag

SEQ ID NO: 37841 - DNA, 1872 bp, Bovine  19866881007958
  misc_feature (1)..(1): n is a, c, g, or t
nactgctgttgtgtcttgcccgctcagctctgtcgaggtgatggagtattattgctccatgatcttttgcttctgacttgtaagattccctatccaataaaccaagaatgttgttatcactgtctctgtgttcttttttcacttttgtggctgggtaattatgaggctctgcttcagagtacagctcaatactatgcaagcttagcaagttatttatactttctggccttcagtttcctcatctgcaaagtaaggattataaaacatgtttcaatggatcaaattagataagacatggaaattcctttgtaaactatagaaccctgtgtgatacaggatgtaggggcagaaacgctaaagagagcctagcatgtgtggaactgacagaagaaagacaatttgcttataatgagaaataaacagtcaaaaaacaaagattaatttggtcttcagtgtttggcatagaattttcaacttaaagcagaagtttcactattcattagagtattgacaatattcatatataacagctatgatcaggtacattttaaaaatcgggttcctactgcagtgatactaaatgctttgcctatgttatttataatcctcaaaataaccccacaaaatcttattatcatttgacaaatgaggatgcacctcaggtatcttatcatttaaaggttgttgctgctgctgctgctaagtcgcttcagttgcgtccaactctgtgtgaccccatagacggcaagcccaccaggctcccccgtccctgggattctccaggcaagaacactggagtgggttgccagttccctctccaatgcatgaaagtgaaaagtgaaagtgaagtcgctcagtcatgtctgactctttgcaaccccatggactgcaccctaccaggctcctccacccatttaaaggttacctagtgcataaagagcagaatcaagatttgaactcaggtctttctgactgactcctgtcccctttgcatatgtgaggacacaagaatggcaactcagttctggtttggtcaacagtgactctaacgccttattttgtaagctaagttgtcagctcttagaagagcaaaatgtctcttaagccaaatcatgcaagctaggtgaaaatatgacctgcagatggacccagccctggagtttgctgaggccaaggtttacaggatagagctgacctcgatcggttaatcctcccattaggaggattttctccatctcattctcatgagttgcactagcaaataaaacaaaataagaggttgtttggcagcagttcaaatatgcccctttcaggtgtacttgtgttttaacagggaatttgtcaatctagaaatacattcaggacccaaacgtgaatcacctattcttcaattttagaaaccatggtcagaagctgtggaagatattttaggacaaaacacgtttattcagagcctctggaactacaatcctgaaatgtacaggaaaatgcacaatgtatttctattaatatgttttattagaaggaaaaaggcaagaaagatgagaaacgtttcagtactgagcagtcaggtttcagtgaaagcaagggtgtcatcaccccaatttaagatataagagtagtcacaggagtctgaagccagtggtggtctaaacacaactcaaacagtgcttgatactcaagagttaaccattcaatctctctctccacaagctgcttcttcctgttctgctgccagctaccttccttgactctctctacttgtactggtgaccttctctttctgagatttcctacttggtactacttcagtttctgcttactctcactgtaaattccattcaaaatttccaaaatatgatcagattgatt

SEQ ID NO: 37842 - DNA, 755 bp, Bovine  19866881074860
  misc_feature (1)..(1): n is a, c, g, or t
nctcctctgtccatgggaatctctaggcaagaatactggagtgggtggccattcccttctccaaggaatcttctcaacccatggatccatgtctcctgccttgcaggtggattcttaaccagctgagcagccagggaagcctgatatactcaagtatatccagtgacaatagtttctgtctaccttcagagttttgttgttctgtgccagtggaactaaacaggaattgaactgaagctactaagagctctctctggacatagctgaggctgtgtcgaaggtgggtcaattaagctcaaaggtcaaagctagactttatctcattactggaatagtcactgctttgctggctcagaaataacttcttctgtggtaacctgcaatggcagtcctacatcaaggccgaatgttcacttttctatgaactaatctccaagacattctctcaccttcctcaaatgcctttgaggcaggtggctcagattttccctctgccaccatcatcccattcatcttcataataaaatttgataactcttccaactctctcgtctaaaccatctaaattgtaatccccaatttagagatcaaaaccacttaaaactgtttcagatcctgaacctcaaactcaagcacgtgaaatgaagaggtgtcattcatattgagatgcaaagaatgagtaaaatcagaggcaaatggaagaacaattgaaggaaaggaatctgcatctccaaaggatcaactataaatagaag

SEQ ID NO: 37843 - DNA, 1161 bp, Bovine  19866881079571
  misc_feature (1)..(1): n is a, c, g, or t
ntgctcagattaatattctgtgacaaattgctgcctgggttgggggagagattttttgacattagattgcatcctttattgttttgggcttccctggcagctcagatggtaaagaatccacctgcaatgcaggaaactcaggtttgatccctgggttgggaagatcccctggagaaggaaatggctacccactccatccagtattcttgcctggagaattccatggacagaggagactggcaggctatggtccatggggtcgcaaacagatggacacaactgagcgatttctctttattattttaatttacttaagagcacaagtataacactaaaaaaaagggaagaaggaggctctttgaaataaaagtggcagcagttgaaaacatattggagagatttccctggtagtccagtggttaaaaatccaccctgcaatgcaggggacgcaggtttgatccgtggtcggggaactaagatcccacatgctgtggagcaactaagcccgtgtaccacaactcctgagcccgtgtaccacaactcctgagcccgtataccacaactcctgagcccgtgtaccacaactatggagcccgcgcaccacaactagagaatccttgtgcagtgaaaagtcacgcatgatgcagcaaagatcctgcgtgccacaactgagaatggtgcagccaatatttaaaaaaaacatattggaggaaaacacatctaatatttaaagaaaactatgcaaaaagtttaaaagttttaagacagaaattcatttttctaaaaccagtagatatcatttaagcttagcattcataaactattttagggcaaagataaggtcttaactatagatttcactcccttctgcctctactgtgcaggtggaagacacaccacacaggtgatttttgtagaatgcaagagtcagatgaagatgtacttgttctgctttttttccctcataactgatgcctgtcccattgggagtctttgtgtctgaaatgctgagaactgttctcagtctctgaccattcctcttagttcttttaattactgcttgatcttccagaacctgaattttaatgagctagctaaaaatagacttgtcactgtaagcacctcttcacatctgcttgctttctgagtccctgcaaggtt

SEQ ID NO: 37844 - DNA, 796 bp, Bovine  19866881101950
  misc_feature (1)..(1): n is a, c, g, or t
nacctctggtcttcttcctctgaaatctaaaccttctgatccttctacttctatgagatccttgcctcaagagccctctattttcacatctgatggggagtgtgtgctgctagccttggttattaaggctgcccttgccctgtggaaagccatggtcagcactgttcatttccactcggcatcaggggagaaattcctgaaaggctctctggtcttattagaccaatgagtctgcgtgctcatggtaactcatcacatttctcttagaactaaagctgaagctgtcggaagagcaagggagtgctcccaaaggcccacctaggatcccgccctgtgagcaacccacagtcccaagagagaatgggaagccagaggccgtgggccctgagccgagctcctcgggagaggagactccagatgctgtgctgagctgcctgaaggagaaaagagagcagcttccttcccaggaggatcctaaggtacctcaccagccttcacagggccccagcactccacatggtgccagtaagaccatggttttgaccagtttgtacacataaacatctttgtgagactggctctgaaatttcagtcagatgagttcctagtgggctgttagctatgacctacagtattgccacatggttcttgggtgttgccattctgaaggttatagtgttgcatgttgatgacagaaaaatgggaaagacgctagcgtatatcatatcttgttctcccttacgttcccctgataagttagcaaatgaacccaatactaggattatagcctcatttt

SEQ ID NO: 37845 - DNA, 2512 bp, Bovine  19866881147368
  misc_feature (1)..(1): n is a, c, g, or t
ngtagggtgatccaccactgcaggggttaataatcagctgcctgttgctctggctaagccatgagaaaaacaccatgggaaaagaataaaagcaaaatatagcagtacagtataatctaaaccaaaatatatcaggttattaattggggtcgtcatgccctgctaagctaaggaaaacatagtatggaccttggaacaccggatcagcaccaggttcagaacactgcttgtgcacacaccaagatgttttcccaaggcatatgtgggtatatgacccccagctgggtgataccccttgtacaagaaaatagcagatagttcaaagtaatgaataaaatgagagaagtgtcatagcaaaacagatactttctgcatgccaagatactaaataaaagtgatgtggctccaaggaacagggctcttgatccaagaggtcttgagttccctggtcccatctttaaaaccttaattctgtctctagtttctttttcccaaactgtgtgttgaccactttcaatccctacctgctgcgctggccgcagcataccgtcttagttcaccagggactaggggacttccaggagcacagactctgagtgctaaagccatgacagttggttgctcttcattcatgttagggtcagcaagaacccctaggatttttcttcattccagtgcattccactcatgccaagctgtgctactcacacaccatccagtcatgcaaatgaattctgactgtgagccttttattttgactcccacttcagttattactgctgtaaccccagcacccatttccttagaatggttgctgttattcactgacctggtctgcttaaatcagatgggattattttcactagctgctgcctcccagccagaggggatgtaaagcttcctggcttatttagaatgtaaccctgtctctttcagctgctaactgtctgaactggtcaccagataggctgctgtcaacctgggataaagatgccagacatgaagagtgatgcatttcactgtttgaaaacttcttggttacaaaggagtaactgcaactggccccactgaagttttgactagttgtttttcattaagtctttcaatcccttacctaattagcttctcagaagcatgtgtctttttttgtcgttgttttggtcgcttcgcgtcttagtcgtggcatgcagaatctagtttcctggaaagtgaaagtgttagtcactcagttgtgtccaactctttgcagccccatggactgtagccctagttctctgactaaggatcaaatccatggccccctgcgttgggagcatcaagtcttagccccctggaccaccaggagggaagtcccagaagcatgtgtcttgtgggcagtactacccaatattcccttagaaacctgaagatgccctatgagtgcatgagcctttaaagtgcagtcattcccatttaaaattccccattagaagtaaagctgagcattagtgacaggcacagcccctacttttaagagatggtgcagtctaattagggaactgtgctcacacacacacacaaacacacacacacacatacacccctgcaagccccagggattacagatgtcaggagctgttagtacagaaacccatttctgactgaggaggaggggaaccaggtgtgagttcaagcaccagagtctctgccatctgcagctgtttccttcccaactgacctcctgactgtctcctacacctcaggaaggcatctgggtgccctgggattgtcccttatggaggagaggctgactcaggtctggaaggtgtgtgcaacaacccccccgcctcaatcttctcttctctgttcacatccacccgcgcaggtctggcagaggtgcctgccagagcccccacgatctctgattattctaacaggatccgtccctgaacagatggccacctcagtcacagtggacttcatatctggccaagatagggcattatatatctaatgagcaatctagcaaatgaagttgaacaggcatgcctcgttcttcatttaatcatcccagctgttggctcctaggccatggactggtgggcaggctgaattgggcctgagtataaaggtgcaggcatgggaagagcctctcagagaccaacaggacaccagatggagttagatagcattacatacatttagagtatgaacctcttatgaacaaagagctggctggccaacttgcaccagagtgatgccattatagaggcaatgtttaggaaatagcaatttccatgctgatgagagcagtgtttgttcatttttattgtctgctgcagtcattctctttttttatttttaatttaactggaatatagttgatctacagtgttatattagtttcatgttacagcaaagtgattcagttatacatacattcatcctattttagactctcttctcatgtaggttatcaccgaatattgagtagagctccctgtgctgtacagtagggccttatctgtctcat

SEQ ID NO: 37846 - DNA, 2772 bp, Bovine  19866881156301
  misc_feature (1)..(1): n is a, c, g, or t
ntcagctttcttcacagtccaactctcacatccatacatgaccactggaaaaaccataaccttgactagatggacctttgttggcaaagtaatgtctctgcttttgaatatgctatctaggttggtcataactttctttccaaggagcaagcgtcttttaatttcatggctgcagttaccatctgcagtgattttggagcccccccctaaataaaatctgacactgtttccactgtttcccatctatttgccatgaagtgatgggactatgcatccttccattttaaataccctacttctttatttcagttaatcacataggtccttggaattatcttctatttttagtggaagcaattttacctcatattctctttttaaatcaaacttccattttcatcatttaacggttgactttgtcctttacatgactgagttcaatattcacttatatctttgtcatcatcatttaataaatactcaagtgaacaaactaatgcagtgatcttagcttcaggctagtctgaattggctgtcatgtgaactcaggtaaatgtttgtgacttccattccctttgactttctcctgcagtattttctgggttcttggactcatgtgggtgaagtctctgagggcaaggcctccacaatgatgtccaaatttgccttggatggttgatgatagagatagaagcactactcacagacaagacagcagagtgttctcaaacgtttgtcctgcactgagttatgaataaccacatactatttagcccaaggttgtacatgttgaggggcacagcagaagaaacatttatgtccctcttgttaccaccacctttaataattgatttccctgagagaaatcactggtctggacagaaaaagtattcctctcattctccctatctaggacacaatgttgtgagccagatagattcaatgtttattaatcattctctatgatctctactgccttccaaagttataacccttaagatctcagcacctcatcccaactctgagttcaagttttctctagggtctaagattgaggatacccttttgactaggtccctaatcaaaacattgcctttggtggatcacagtccatgatatctctagtaaacaataattcccatcttcaagaaatgttaactttgtttggtttttaatctaaattcttgggttgtacatggtttggattcatgacaactctaccaaaacaactagcaatttcaactttctattactagctaatagctatccatccctcatctgaaaatgcttcttaattataaaagttgtgtttagatcttagcaccttataggttcgtcacattatgtataaaaatgaggttttaaaatcccattgtaagtcttgaaaccataaaactcttagaagaaaacgtaggcagaatactctttgacataaacatcgtaatattttttagaactctgctgtaaagcaaaagatgatgaaaatttctcagtcgtgtccgactctttgcgaccccatggagtccatggaattctccaggccagaatactggagtggatagcctttcccttctccaggggatctccccaacccagggatcaaactcaggtcttccacattgcaggcggattctttaccagctgagccacaagggaagccttttttttttttttttaaagagtttgactaaagattataaaatgaagaaccagatgttaaaattcaattttacccaaatagaataggcagagctgaatataatttagcaagactccactgaaaaatataaatcaccgaagacagaatttcaggaaaatatcatacagcaaaagggtactactaacatttgaaagaacctcactccattgatagttttcaggactagattgagcaaattactcaggaatatatgctcagtaacttctttttgatatcactgttccatcctactatcagaactgcttcttatgaagatgacatattctattactattactctcaaaaaggtacaaaatccccaagattttttccctgctaacaggctaataagtttatctgatactgtttcacaagtaccagcagaagacataagattcctggatcacggatcagagacaaaggactttattactcatgacaaaacagtaaccataacttcccattggtttgctttggctcaccatgcccttccaaatcccacaggaataatataagtgggcctaatggatgtcttcataaacagcgggctacatttcaagaaaggaacactgagcttggggaatttactacttttatagtagtaaacttgttctctgtatgaagaaaatacatcacctcatccctcaaggttgttcaccgcaaacacaaaactgagcaatggcccaagcaaaatgcagtcagggtcttgcattcttgccataccaaggcagaaagtataccaatcttcatggcccatggtagatggctctcctaacaatctcaatgttctagtcataaactcagtctcaccaaatcttgacatttatgagactgctttcttccctgagtttaatgtttagattcacttttggataggcctttaaaaataggcattattttaaaagttttttgaagccctttatatacatttacattaataactatagttattgagcacctattaaatctggaaacatgggacatcttaactagccttgttcccaactctcacctttattattttccagtaagaactactagatatggagtatgcttgatatttaccaaagtgt

SEQ ID NO: 37847 - DNA, 1414 bp, Bovine  19866881171403
  misc_feature (1)..(1): n is a, c, g, or t
nattgtggctactatttacttggccccaattatgtgccagacacttgacatcacctcacttaatcttctgatgtagatacagccattagcccggttttacacacgagcagccaaggctgggcagagatgaatttcctgttcaagatcacacagctaggatgtggtggatcagggttcaagtacaggccacttggctctggagtccacaggcttgtccatcatgctctcctgccttcactagacaggagtggtggagtcgtgagaagtcaagcttcacatgcttgattcagtgatcccaaccaccatgctcatcctcaggaatccatgattccagatcctgctctgtcaccagatggatatagagactctgagtcttttcccaggatcttgtctccattttccatagaactagaaatcagaggagccttaaacatgttagctgctaaattcttcaaacaaaatcttgctgaagcccagtgattacatcagatgaaatcagggctgccctgattgaagctgagacagagctcattcagcccagtttagaacacacagctgacaccaccaccaccctccctccgcccccgccaagagtttcctcctgtggttgctcctgaggtccccgctctgcacctctagattctactaaacaaatttgaaaaccactgggctggattgtttctaggatgtcttccaagtgcaagattcatagatagatgacctacatatcatcaaagtcacgaaacttgggcaaattaaagttggctcttcggtgttcagagtaagctccatgagtataacttggaaaggttgctccctcccttctttcaagagcctggggagaaatctctcactttgttatgagagatacttggaaaaaaaactgttttgcatcctcaaaaggggatttattggaagagcagccagttatcaggaattcatgacaatgaaacattattattaataaaacacatgaccaaaagataacattcacttctttgattatagtgcacagagttgttgtttagtagctaagtcctgtctgactttgagaccccatggagattgtagcccaccagactcctcagtccatgggatttcccagacaagaatactggaatgggttgccacttccttctccagggaatcttcccaacccaaggatcattgaacctgcatctcctgcacagcagtgcagattgtttaccactaagccaccatggaaacccaagtgtacagaattgttgctgttggtagtttgttgtttagttactaagttgtattctactcttttgtgaccccatggactgtaggagtaggccaattacaacccaatgccttttttttggtaacagctttattgagatagaattcacataccatacaatccacctatttaaatgtacaattcaat

SEQ ID NO: 37848 - DNA, 804 bp, Bovine  19866881357388
  misc_feature (1)..(1): n is a, c, g, or t
nctgattttccttgtctgctgctggagtgttgctggatctgcaatgccctcgtactagaaactgtagcaaagcagctagggcctccatccccaggggcctgttatagttcttacctggcagttcttgaatcagactgatctggatttgaatccaagcacagccacttatgaactctgcgacctgggtcttgttactttatgttcctgagtctcattctatccatctgaacagtggagttaatagtgacttcttaaggtttgtattaaatgagggagtccatatgtattgcttcttacagttttagcaccagggaagtaagtggtcctagatattactaactttttcatctgtttgagtgatacttgaacaggctatcccatggcaacctctgccttgttgaagaataaaggaaaattatagaccttaattttccactagatttttctgcctgcagctacagactctagattgtggagagtctgtatatataacaggtcacccggcagttggctattttagaaaagaatttcgcctggcacctcctgcctttgtctggagaaactttagggccaaagcagacacttgcctacacatttaaacatgcagattgatggatttgggggcagtgaaagaagtcttcatggtcacgacttctctgtgtgtgaaagtctttgatgtaatcagaccttcagtgtctcaggaaacagggcttcccctcacccttcctgtctggatgccaggctgtggttagaggtttgacatgtcactggacttgaattggttgctgtctgtaggctttcctt

SEQ ID NO: 37849 - DNA, 1676 bp, Bovine  19866881567054
  misc_feature (1)..(1): n is a, c, g, or t
nccagagggatactattttgttcgctctcatacactgagatccttagtcagcttcctcacagaacaaaaaaggttgaagataaaatcacaataattaagcattaaaacttcatccattctacatatccacatgggaaattttatactgagtttgaaattaagaaaaaaaaaaaaagatattgagataaagcagtagctaagcacatcctgagtctgaagtaaatctactgtgaggctatggggaaaaaatagctgatttatctgaaggatgcctcagctggggaagttgctaagcaacctgcaataggtgaggcaagtgtctaagactttctacaagctcctttgtgtggaaacaaacatttagcctctttctacagttttatagaggaaacaatcacctagacaaagaggaaacaaagccctattctaagagacagaaagaatggatgacagatgtattcaggtagctatgtctttgtgtcccttcaccatctatttaagtgctcaataaatatttgtttcttgactgaatgaataaacaggtatataaatatacgatatgaatggttatggtaaccttttcaacccattgggctattaagatacaattcaagatcaagagggacgggctttctacattagacaccccaatgccaaatggctatgaggtactttcatgaagcagagacacacaaactcacacgacacgagtttagagagagatgatcagcattcaagtgaaaagtccaataacatttctgttaagtaaagtcattgtgatctgccttcatttccttaaattagagaatgatgtttctggcttccttctttcaagagtgtgaaaataaatgaaaaaaaggaagaaaaaagatctctctccctctcaaaatgaatctcaaaatatgctgaatatattttcatactgcatcaatttttatttgtaaagcctttactttgaaaaatcaaactgtgcatgtagcacagaaataatttaatgccattacccagcttttgctgagaacctccactctctctatcagtttgttctgtcacacagtgctactggcaatgtaaaaatgaccaatgcaataaatatcacttaataattacaaaaatatactttctgtaattagctttccaggaactattaaataagcatcccccccccatatttgtacccagttctcttacctgctgtgcagaattctataatttcactccactcagacacaacataatcaccatcaacttgttttgaggcagtctgcactgctactgtatactcagttcttgggctcaaaaaccagtgtccacggacagtcatcggcaagggaacagcttttgccaccagttttgttggaacatcctaagaaaggaaaggaggaagagaggtacgggtgggtggaagaagatgaattaatgtagcacgtataacttgagtcacctgtaaacagtgtggaagaacttattaaattcctagctaaaatgtttaaagatatttagcaattactatcttcaaatctcttattcttcagatgtaaaaaaaaaaaaaaaaggcccgatttgatcaagaaacatgcaaagattacacagctagctaatggcataagtgtacatggattcatcttcttgacttctagtataatgttcttctttgtacattccttaatatgctc

SEQ ID NO: 37850 - DNA, 1552 bp, Bovine  19866880421444
  misc_feature (1)..(1): n is a, c, g, or t
nttctccttctcctgagaatttaaatttagggcttggtgttttgggaagccatcaccatgtgctttacaactgtaactttatcttcatatccagtggcacctgtgtggtcttcttttttaaatacgatctaaaagttttgttttgagtgtgtgagctcgcgtagggcatacagctagagaaccaaatgggaaatttctgaggcaaatggccctttgtttataagaggaaaggatcagactcaataaacagatctccagctcttgaataaatcacgctaagggttgctgttgaacccaaggtggaagactggattaaaccacattgatacagcagtgatactgaaatactctctcccattccccctttctcttgtgctatctcctttcatccgttcgttcactgattaaacaaatatttattaatattccagagaaccaggcaccagccagtcagatgccaaatacaccaggtctaaaaactattcatcacccataaggtaataaataggtatgtaatccttaccatttcccaagtctaccacctaaaaacatgtccaaaatacctggttttagctttgagtaaattcactcagcccacaattttgcagtcacacttaagagagacaaacccagtaatactgtctggaaaaacaagttccccttctcaccctttctgatctaagattttatgacccagagcttagatagtaaggtatagtcattttatcagatgggcttccctggtggctcagaggttaaagcgtctgctcgtgatgtgggagacctgggttcaatccctgggtcgggaagatcccctggaggaggaaatggcaacccactccagtattcttgcctggagaatcccatggacggaggaacctggtaggctacagtccaccgggtcgcaaagagtcagacacgactgagcgaccacttcacttcacttcattttatcagacagagtacttacgacagcaaataatagaaaatgcacttaaatggcaaagggtatatatttactcatgggaataaaatgcccaaagataggtttggcttcaggcatagattttcaaccaggtccctcagagacactgtatgtttagagaaatgtatgagaatataatttcacaacatttttgttatataacctacagtgtccacgcttagctctttcttgcatttcagaacctaaacaaaagaaaaccaacaattaataataattataaaagtaaatataactcagaaattcaattggaaaaagtagaatcaagctaaatcattaataaaatattaaactgatggtgttatttgtaaagactgcgcatgtgtggtgtgttataatttcaggaataatccatgtgaactatacactctatggaaattatctatatcacaacttgctagatggattaatggtttataaaaaaaatccgttagttttacttcccaaagttcatttttccttgtgctgtcatataatagttcatcttcaataagtatctggtaatgtgggataagaagctctgagggccaggcacataatttataacca

SEQ ID NO: 37851 - DNA, 2472 bp, Bovine  19866880519592
  misc_feature (1)..(1): n is a, c, g, or t
ncgccttgctgtttaatggagggaggtggcccgtggaacctgcatgaggtggtttttaattccaatccgatttgttcctgatttcttggtttcctggtctcagcaggatgccccgcaatgtgggcggtagcctggccgcctcaccctcacccttgcaggccatgcgggcggctttcgcggcgcccggtgtgtgctgcccagggctggccgcggccgcggggccggggtgcggggggctcctgctgcccagtgtgggaacttggcccgcctgccttcccgcgctgcatctgacgtggaagtgaagtctttataacctttccagggcgatctggcggtttctgactctgggtgcctgggtggaattgctgtatgtatgccagctggataaatactgagggctggacgtggttttctgtttatgaagtgccaatcccagccttttctgtccactggtgaagagtttgttaggttctgctgctataaagcaatgagcttttacaaggatgagcaataagtcctgccaagctttaatgcctcattgtgtcctaatactggatgtcaacaatctagttgagctttaatatatttagtttatctctaggtgtttcagtctgacttgcagaagtaagaccagaaagaaaaaaagaagaagaagaagaagataattttaaagttattctgaaaacatgtgcaatcccataaatgtttacaaacatggttggattttcccatctggaaatggtggtggccaagttcccttctagcttcagctccaacatggctttcacattccaagtacaggtatttcctttacgtgggtattaaacacccaccactgtgtaggagactggggttctcagaaccactcacaccatatctagccctagggcagccctgtaccttagaaataaaacataagccgtgaatacaagccccataggtcattttaaatgtctagtagccacctaaacacggtaaaaagaaacaggtgaagttgattttagtaatatatcctacatacctagaaacacgattttaacatgtcaatataaaaatgactgaggttatttatgttctttcttttcatacaaagtcttcaaaatccagcgtgtgtttggcactgcagtggccaaaccatcatggaagccacagagcttgggagcctgttgatgtcagctctccaggtgagcctcctggagcagaagcagggggtgacatggatctggatgagcaagcagccaatgtcctgcatgtggggaaacacaggccttaggggcgtgtaatctcaatgagacaaaacatgcacacactctttagaatgcaacagtgcactgtattccagtgagtgactgacagtgctacccactcaccagattcatatccagctcctggatatgccctgaaagatggccaagatttcccaaagtaagtggaattgaagaaggaccttgttgaagatcgagtaagattgttgcaggtggagatgagcatagtggtatttccagactgagaaacaagcaaaattattataaaaccatatttagaagtgttttttccactgtttttgttgttgcttagtcactaagtcctgcctgacttgttctcgaccctgtggtctgtagactaccctgcttttctatccatgggatttcccaaacaagaatactggagtggattgctgtttccttctccaggggatcttcctgacccatgaactgaacctgtgtctcctgcattggcaggcgaattcttcactgctgagccaccagggaagctgtcttactgctgatagtggccagtattagtctctgaagtttggaaaagaaaggatgatgagggagagagactaatgatatttactaaaggccaggtaggagctggggcttgctcctagcaggtcttcctctgagtggatgctcaagccttttcttgccatttccagtgttgaaagaggccagagtttccccagctacatcccgaatcctggcgggtgttccatagcaaagtattctgcaatagaataaattcgaaagactgtaccctcttgagcattcccaatagacattagcatgttacagtctctgagatgacgttttagtaaagataccagttaaatttgcttcgtccaatgttttccaagcctcttggaccatggactcctcttacccacgtcctatcccataacattcattgttctcagaacacacttcaagaaatgtaatcctaaactttataaaggctcgctgttgtcaggaacttcagaggacaaatgttttctgaacagacagcagcctcagctgcagatagtgagggctggctttacattgagaccaggtgggggacattccacccatgtatctggaattttctttgttctatttctccagggacccacctcccctgagggataggactttaaggtcttgacaaatggtcactttcatgaattattgatttggcaaaaaaaaataa

SEQ ID NO: 37852 - DNA, 1095 bp, Bovine  19866880542089
  misc_feature (1)..(1): n is a, c, g, or t
naaaagaaccccccccacaatgcaggagatgggggtttgatccctggtctgggaagatcccctggagaaggaaagggcaacccatgtggctcggtggtaaagaacttgcctaccaatgcaagagacacaggttcgatccctaagtcaggacgatccactggagttgcagctggcaacccactccagtattcttgcctagaaaactccatggacagaggagcccgtgggctacagttcatggggtcgcagagtcggacatgactgagagactgagcacacacaaacgttatcagttttttaagatatatcaggagatgatttgttgaccagagtagctatggagccgttttaatattaataaactttggtctatcagataagtattgggccaaatgactcgggaggtcatttccaatgctaatatgagattttacgatcatgtacttttttcttaataattgattttgggataagtacaaacaagttcagtttctagggagagctttagtacaaactctgtgaaattcaaacaggaattaaatacaataaaagtaaattcagtcacactgttctgagcctaaatttttcaagttttcaaaaaaaatatttacaacatattttttatttagttgcagctgtgtctaataaagctgcaactgtgtcttatttccatcctttttacatgatctggtgctgttaaacagtctgcattatttttctgtgataatagattcctctttaattaacgtctcagcatttcggtgccaatagaatacaaccccccagactcagatttgtgaacatcgcctgcgaacgatatggaaaccaacttgaaattttcctctgattttcaacttaccttgacttcagaaaacagacacatacacacgaaaaggcctttcctgggaaacagtctgtcctgcgggacacttccccttctgatggatgtgataaacggggaaacgacttgtttggcaaagtataggacatcattactcaagtctgagttcaacagttcagatctgtaaggccttggggaggaatgaaaagtactttctttacggaaaatgattttgcccacgctttcaaaaactg

SEQ ID NO: 37853 - DNA, 921 bp, Bovine  19866880566560
  misc_feature (1)..(1): n is a, c, g, or t
nctgactctaatctggctcccgtccctgtcactctcatcaaggttgcaaactgcctcctgttgccaaatcctttggtgcttctctaagttcagcagctcatctcagcggtgtgttgtaccatcaatctgcctcggctcagagcccttcatcccagcctttccttttcttcagtggcctttacttcttaaactgaggtctgctgttgcctgcctccgagcttggttgattcctcttttcttccctgggttggttgttcttaactctgcttgcccatcagcaccatctggaaaggtttctacatgccttggtgctgggaccccagacaagggggattagactctccaggtgacccttctgtgcactcagttccatagatttgcatattatcctcaagagaccaaactgctactgtgtgtgtgtgtgtgttagttgctcggttgtgtccgactctttgcaaccccatgaactgtagccctccagtttcctctgtccatggaattctccaggcaagcatactggagtcggttgtcattcccttctccgggggatcttcccgactcagggattgaacctgggtcgcctgcattgcaggcagattctttaccatctgagtcatcagggaaacccattgaaagattatgtgcattagtcacttcccattcactcaggagggaagcatatttggggaagctcatccgcccatgttactgatttctctcagaatcagtttatgacctgtgcccagaaaaatcaatctcgaaggcacacttgtttattacccaaaaagcatcgccctgcttgatcacccttctttcaccatgcttggcaatgaatagctctcagctagtttccaaaataaaatccatcctaagcaaataaggactcgcccccagtaacacttttgcagggacgtgttgcag

SEQ ID NO: 37854 - DNA, 1541 bp, Bovine  19866880621232
  misc_feature (1)..(1): n is a, c, g, or t
ntccacccgcccatccatccacccatacacccatccatccatccacccattcaactgtcttctcttcattcattgtcttatctggggctctgggcacaatcctatttcatattccactctaagttattgtttcctctgttggataagaatagttattcccaatgctgtcatcatatctgctataagatttgtatggttgggctggaggaattaagaaacacaagaggaaagggaagtagcactccacattttccaatcccctgatgccagcatagcagcagcagaaccacctgaaggagggtgacagtctcagagtttccggtaccagctggaagtgcagtgagagttgtccaagaggcagcagaaagcagcggagaggaatatgcaacccagagaagcagctgcccgttggagcaagaaaccgttttaagacaaatccccctctcccaaaatatggaggaaggtaagcccagtacttgggttacacatggattatgtcagataatatatattctgcacatagtaagcactggatatatggtagctattaaaataataataataaatctaaacaaattccacctgtgggactatttatctgcggaggaatctggagagaggtatagcagatctgggggcctctgggaatggagtaacattatttaaaacatcaacaaatactggaaacatagaaacattgaatgccagagctgggaaacctgaagaagcattttaggtcaacactctcattttacaaatgtatagactgagtccctgagaagtcaagtgactggcttgaaaccatccaacatctgtagcaactgagctggacacgctgacttccaattgactgggactttttaaaaattgtttttcaaaaaaatcatccaaatctaaggtccataaataaattcaagaaaattctggataatggctttcttagatttagcttaatgggaagttattggcagatatcgtcccagaaaagtggaaccattcagtgggaaagaaagtgtattagggtttcagtgatagacatgaattcttaaaggaatgaaaattcttccccagaaaatgctgtaaagatgcccattttgtgggtgtcttgaaaacttgattttctgttttccatcttcatacagtcaggaaatcttgctgagatgctaacaagggtctgtagaccttctccaccctacagacatgggagcatgcgcaaggaaaatggacagaagcccagtgtcatcaggctcgtggtccatgggataaggagggagccccaggccagcaggtcctgagatcagctccagggagagaggctggtcttgtgtgtccatcaaaatcctcctatctccacttggaacctttcaactaggaccatcttttgtcaataaacattcatcctgggaagcaaccttacaaatagagtaacaccatcactgtcaggaagtccttgacctcaagtttcagaaccaagactagcacataatttttttatttctagatcttcttggaagggcatgatgttatagcatcattgtcaa

SEQ ID NO: 37855 - DNA, 2030 bp, Bovine  19866880644038
  misc_feature (1)..(1): n is a, c, g, or t
nactataagaattaccaacttttaatgagtccactgaagcagataatcaatgaggcttctaaaaggcagttttctcctccaggtcttagcatcattacaagctcctgaaggatggaagttgttctgaaagacttaaaaaggatgatatgtacacatactccttttaaaaagctgtttttctatgtttttaaaaaataaagttcaaaaatactggaaaactttctctcaacatttattcttttagcctgcctttgcttaacttttaaggagaggcagaaggtacatagaacactagcaatcagaactgtgtttaagtcttaattctgccccttattatctacatgtttgaggataagttgtctaacctctttacatttgaaggcatttattagaaaatattaatagaaatatttgtgcagcctacttcctatgacttaaatgcagaaaacacagaactggttacagcagagtctcagaggtctacattcacgctttttgtttaatttgaggtttcgatgtacacactggcagtagcatggcctcgtagctatgtgaggtattcagaatgtaattggttatcattttaatacctgcacgtgttgggtggtctgagatgatgaaagaattcaggcttctcacaagttcaaaggtgtttagtggtagacagaaaatgaacccacataacttgagaagatctaaagaaacagaaaatcaaatgaggtaatccgcctaggttcaagttgtagatgtggatgagaaggaaaaagaattaggtcatgcatgagacatgacttgagaagtcctgtgtgtgtgaaaaccccctttgagttatagagtcattgacgtaatcagttaccaatacaaactaatgcatcccatcaaagttgctgacaagatgcaattagtgtcctgggtaaaatttttctttttgcaaccccaggcatactgagaaagcaacccatgttacacatggcataacataacagtgtccttaattgctggaaaattgtcctgaaatcatctaacactcaccagaaattgcttgtcaaaattcacatcagttacttgaaagggtaaatatctttctcaggggtaagtatctcataactcctaggggagttagaattcagcttttaaatgtggaagacaagaaataccagggtttttaatatttggtggctgagaactcaatgactgagcttgttcttaaaatttggttcatgtttatgaaaaattggcatattagagtgacaataactgaaaattaaaatgtgaattagatattttaatgtggtctcatgactttagttttaaatctttccaagtttatatcctctattgggacatttaagagaatttgaagtttgttatatttatatttgcttattagatttattaggaatggtttgttagacaatcaaagcacttaagaaggaaatcaaatacatcaaatttgaatatgcagtctaaaatatttgaaggaattgaattagctaagtttataatcgagaccaagcattatgaaaagaattctaagagcaaatgttaaaatttgctaagagaataaagagaataccatttataagcagaatttaaaagcataaggaagaactagggttttatctttgtattgtatctaatattaattttagaaactaaataaactctgtatagtctcttctatgcagaaaaacctacaccctcaagttaatttaaaaaaatttaaatgaacaacaataactcaagaaaatgggttctgtcaattgaatggactggattcaatggagtgtgggttgaaacccactgaattcttttctcaccactttctattaaacttttctgtggaaaagttcttaatctattcctctctctcatctcacatgactcttttctgccactctcataaaaataaagaaccaaatctctttaatgaacacataattccctttcagagtaattttaaaaccccaaattccattcatgcttaaaacttttctcctccctcagcctggattgcttcaggcctggag

SEQ ID NO: 37856 - DNA, 2710 bp, Bovine  19866880741216
  misc_feature (1)..(1): n is a, c, g, or t
natgagagtatttacactgtggaaattagcaaacactacatatatggcctttcttttctttttttcctgagagagctagtttaccaagttccactgaagcaagtccatctctgcttctaaagacaaatataaaacaggatacctgcccacaggggtattatctcatttctcctaaaacagaaactgtatcctatctctgcgaggccaagtccatatgaggaagctgaggcttgcagctgacttctccaagggaaagaacactgaatggagccccaaaatcatcttgatcagcatcttagttccacccaggtctgacgttatggtaccacattttttctgccccagagtcagatgaagctaagcaagacgagggggaaaagtcaaatggactgtttaactttataaatgattttgttgtttttctgtttctaagtcctgtctgactttttgtgaccccatggattgcagcacatcaggctcctccgtcctctactgtctcatgtccattgagttggtgatgctctctaaccatcttatactctgctgcccccttcttttgccttcaatcttttcccagcattggggtcttttccagtgagtaggctcttcacatcaggtggccagtgttttagagcttcagcttcagcctcagtattcagcttctaatgaatattcagggttgatttcctttaggattgactggtttgatctccttgcagtccaagggactctcaagagtcttctccagcaccacagttcaaatgaagtcaatgaatgcttaggatagaaggagctgcttccaccccagcctcttgtacatttccacgtcatgccggccctaatggggagtgacagctgatgaaagctgctattcatggtcatctgaaacagcttttcctcccagatgaaattcggtgtggcatgagtctaaacatgcagaccaaaggccgggcgagtgtattccccaggtctctaagggctggcagaggcaactcagtttgtgaagggggcttcctgagagggcatcacacagccccagtgtaaacaataggagtctttgtgccccacccccccggccctgagcttagtcccgagagggtggtcctggccctggactctgcccatctcaggctctcctctttgtttataatcagcagcaggcactagggtgactttcgagttcggtgactcatacttcccatcaccctgtggaacaaagctgggatttttcctcactgcctcctaggtgaaccacatctctgcagggagtcatgttgggtgggcgacatgatgcttcaaatccgagatggctattctgactccttgtctggaagaaccaagagcgaatgcatgtccagccaaagggctttttgtgtggagtttggggacactgggttattccagcaaactgtagatggacctttaccagcctaaggcaagcagccaccccttggaacaagaagccagagcttctactctgagtcttgccatctgacactgacgtgaagttacaaacatatggtttccatcaaaacagagttggctctattccatcagcctctgggatccagggacttagaaactaggggcagtgtggtttctcatagtgagaggttgggcacttagaaggtgtctggacatcggggccaggagttgagtccatttggaagaaccaatgcacaagctccaagagagtaagcatggaccgaagtggcaagatcaagagaatataaaagaatgaaatcctgccatttgtagcaacactgacagacctagagattgtcataactagctaaagtaagtcagacacaggaagacaaaatacgatgtcacttatatgtggaatctaaaaaaaaatggtacaaatgaacagatttacaaaacagagagtcacagatgtagaaaacaaatttattgttaccaagggtaaggtaggaggaaggataaattgggagatttggattgacatatacatactactacatataagatgtatgtgtgttagttgctcagttgtgtctgactctttgcgaccccacggtctgtagcccaccaggctcccctgtccatggaattctccaagcaagaatactggagtgggttgccataggggatcttcctgattcagggattgaacccaggtatcctgcattgcagacagattctttaccccatctgaccaccagggaagcccaattaaagatggagtgaggctaaagtgtacagacttacttcccattctacataatgaatgtatctcattggaaaatgcctctcacaaactttcattgcagccctagcatgtgccaatcctggagcgatgtgtgaatgaacacatttgggcgaattactttcccagaaagatgcactacagtaaagagaatatccctcagtcatgtctgacttggtgatcccatggactgaagcccgccaggctcctctgtccatggaattctccaggcaagaatactggagtgggtagtcattcccttctctaggggatcttcccaatccagggatcaatccttcattgaaggcagattctttaccatgtgagccacaatgtatgtaaagagaatatgctgctgctgctgctaagtcgcttcagtcgtgtccgactctgtgcaaccctatggaaagcagcccactaggatcttctgtccaggaattttctaggcaagaatactggagtggttgccatttccttctc

SEQ ID NO: 37857 - DNA, 1455 bp, Bovine  19866880813217
  misc_feature (1)..(1): n is a, c, g, or t
nggggagagaaaaatccgaaatgaaagctccgccgtgatgataagcaaaccatggggtgggttactggggaaagtgctccctggagccagcacagggtccatgtctccattcattcattgtcccctggtctcattacctggacactctctggtgtcattaagatatcagcgtgatgtaggcatatctgcatgggcagtttaatgatgtctggggaaggcacggtgtttattcatgggtgatcttgggcagttgtcagactccagcctggagataaagacgccgggtctcagggatgttaatcctcccgctggcacttgacaaacacgggagccggctattaccaaactgattatttccatcattaacaacccatccatcagtctcctttgcccgacatggccacatgcattcatctcatcataaacaattatctgacgagtgccgagaattggtgctcagggtggaattgcccaacctggtctgccacaagatgtagcaagctgacccccttgctagcatcctcatttcattaatcagattaagacaacaagcctcagagggagcgtcttgttaaacaacaatatccaatcagggtccctttgtgttgcccgcctctgcggctgcgtttcctttcagaagatgaggctttgcaggtccccttggaaaacccgcatctttgctctccgatcacccacccatttataataattactcgtgttctgaggagcagggtgtgctgaagggctggagtgatggaggcaccatctgctccttatcgctcacctgagtcagagtctcctgacatctcttctccccggcaacatgagccaagcggagccagtgaagaggctggggctgtgccagagaaatgatggatggaagcaggggagacagcagctctgcttccgggcagacagccctttcctccaaagggtgactcatggcaaaggcagttttgccccagttacaaaggtcgtcccagacctaatcacgaagggctgatgtttgtttctgtgcgcctacagcttagacagatcccgttacacctaggggaaatagaaccctctgtcctacttcccctctgctttttcttctcgtgtcatgcaaggtttcagggtttggtttgtcaaggagtttagatgaccgccttttcaataaacacttgtttatgtttttaaagcaaacctagaacaaggaataaaaacattcatccattggtatccacgggggattgattccaggaccctccgtgggtaccaaatctgaagacgctaaagtcccatctcagccttccgtatcctcatctccatatccatggattcaaccagctgagtattgcataatattaattgaaaaaaactccctttgaatccacacaattgaagcccatgttgttcagggtcagctgtataaacatgcaggcaggacataagattcatctaactctttaggat

SEQ ID NO: 37858 - DNA, 806 bp, Bovine  19866880850165
  misc_feature (1)..(1): n is a, c, g, or t
ngtccagtggttaagactttgagcttttaatgcaggggtctctggtttggtcagggagctaagatcctacttactgcacagtgtggtcaaaaggggggaaaaaaaagaaggagaggaggaaagacgatggtttgcaagtttaaaatatattgagttttcaagtgataactttaggggaaaaaaagcctgatgaaagaagataactcatatactggtaagggtattgttcaacctctccaaatataaactaggttaatcaaattgagaagttgtatttatcagactgttttgaggtcatggaattaattcatgattacaattgcaaaacctcaacatgacgtaaatgctctttagtagcacttctataaaatgaagatatttaccatgaaataggacttatgtgctatgaaataaaactttacaaggctcccagctttacagactagaactattagcattttatatatctatcaaattggttaaagagttttagcttctctgccttttctgaaataaaaagttgtaatttttcgagggtatgtctaggcttcctagggctttttgcaaatatatgaaggttcataaaaaacaagcaaattcatcgtttgccttgatggttgggtttcattaaagccgatggcatgtgtttatttactttcttccccctggattgcaagggcaactgaaaggagaccattggtggtagtgggtgttgattcaatgtaatttattttctcatatttgttgaagtagaaattatatttacatatatgctatattaagagggcactctatttaagttccaa

SEQ ID NO: 37859 - DNA, 1212 bp, Bovine  19866880860461
  misc_feature (1)..(1): n is a, c, g, or t
nactggactcagaaggcatttgtatggctacacaagaggcaagaagcagtgtcctcatttctaaaaggttatcaatggtgattctctcagttgtaaaggattcacagagtgaggttctgtttctttctttctcgagcaggcaatggatggtgcagttggtagaaaaagtcagagtaaaaaaatccacagaaaatagcatatgtcagtggaaaatcatggtctgtctggaccagatcaaagtgatgatggaggcaatgattaacgccagaatgaataagtttcttcatagctatattttactgttcaaggtgggaggtagtcctgtaaattaaagggccaaaaatggatggattaagagagtctcagtttagaaactgttattaaggacttttttttaacagattttttttccagaatctagaaaagatatggctgtagagtcaaggattgagaacaccggggcagcagaaaaaataggaagcaactcacagttcaagggtagtcgtggctcctctgacattgacatatgtggccaagaaagagaggaagggaatgtctggcgcccagctagcactgatgcttattaataaaagcaaatttcattcacaattttaaaaaatctttggtgagttggacaaatgattgaacagatatagaaactgtattttatttttattattttttgacagtgctgtgcagcatgtgggatctaaattccctagccagggattgaacccatgccccttgcagtggtagcccagagttttaacccctggacttccaagaagtccaattggtgacagttttcagtggactatggcaaatagataaagtgatggaaatgataatcattttaagagacagaagaaaaatcgttgtgacagccccagccataaaatgcttccagacatttcagctggaatgaacttgacagtacagtttatcctgtgcatttaaaaagaaaatgagaaaaattgaggtttagtggtactgaatgattcatgcaaggtttcatcctttctggtcaaatcaagactattcacaaaattatccacaagacctggggtttcatcatgaaggcacagaaagagctgacgaattggaacatcattttaaaaagaagagagagagaaagaagatagggttaagaaaatggatggattggacaaaccatggattcctttcatggtctatttaagaaggaagtgttcc

SEQ ID NO: 37860 - DNA, 995 bp, Bovine  19866880877592
  misc_feature (1)..(1): n is a, c, g, or t
nggggtttgtttgttgagcatgaaatcagaaaaagggaagctggttgggtgtttgatggaatcgagttaatatagcctcaggtgtacatttcccacaaaatggagaacctggcaacgaaccaagattcctcccgattcattggtcgagtttctccttttcccctgacagctcttgtttatctctgggtccctcttttgtctgaacttctgtggctgatctgtacctttatcccaggacactgttatttagtcagaacatcaattaacatgaacatgattgcatgttgtgctgatctaaacactattctctctttttcttgtaacttttaatttctacttgagtcctgtaaaattcattaacagtttaattctaaaagataaatcttatttcattaaaatcttagagagggtgtcccaaacaaggaccacagtatcgacacctctctgagttgaaagataaagtgggataacatatgtaagcttctggcacttacttgataagcattaaaaagttctttcgtttccttccccttacttaatgaaaacaggtgttgaagaaaacacatccattttttccttgtgtgttccccacatgagaatcgtttttgtaagttttttgctggccagaaaagcaagggtcctgaaagcatttttcaatcacaagcctggatggagattaaaagacaaaataaaacaaaaacattaaggctttcaatgaccaattctcgttcacaagaccctggtaaatcagaacctgactcccccaaattaatatcagtgttaggacatcatgcattctgccttccatccatcacaaggagatccaagccaaggatcttgggctttatcctggtggtgaattcagaaactgggctgccaattttctgtgtaaaacaaaaaaattttttaacattttttaacgaagtgatacaggaataggggatgaaggaggagaaagtatgtggggaagatttataagtttcagaaaaggatca

SEQ ID NO: 37861 - DNA, 1059 bp, Bovine  19866881323431
  misc_feature (1)..(1): n is a, c, g, or t
nattacttgtcccacgttaccgcaaaaatcaatcatatcgtaacaccaatctatcatgtaaaattcagcctccaggctcgtgttttcaggaaagaaactggcagttaatactcccatccccatttacttattcagaagaaaaaaaaaaaagatctgcccaatgagatccaaaataacttccttaagactgctatcaaattctaacaatgaagttcatccatcctgacaaagttttcattttataaattacaatttgtttcaataaaaaacagaacagcagacgtccctggtggcacagtggataagaacccacctgccaatgcaggggacacaggaagatcccacatgccatgggcaactaaagcccatgagctacaactactgagcccctgtgagctgcagctactgaagcccacatgccctgagcctgtgctctgcaacaagagaagccacaacgacgagaaggccaagctctgcaacaaagagtagcccccactcgccgcaactagacaaagcccatgcagcaatgaagtcccagttcaaccaaaaataaataattaaaaaaaaaaccaaaacaaaccacgaaacagcatttcccaaacttcatttgcgaaaacccaagaaacacatagtcctttgggttttcattgtcgcaggggaaacactgtgcatgacaaatttcacttacttttcacagcaaatcctagaaacataaccctttaaaagtccaccactaaagtccatttaagttggttgaatccatttcccactcatatttgaccataagatcctcctgccctcataacacccacaaacactagagaagtaccattacagggaatatattttgctggcagacttcaaggatttcaaaagcctttcctgttggaatgtgatagtagcaaacaaaaccattgctttcacaaaattccatcttttatttttgaatttggtgcctttggactcaaggataaagttaaataggcttcattctcagctaggtatgtggagggtccttccaacggtcatggtgggaaagtccagggaaggtcgaaccag

SEQ ID NO: 37862 - DNA, 1114 bp, Bovine  19866881338098
  misc_feature (1)..(1): n is a, c, g, or t
ntctctgtgcttagcccttcttctgtttaaaaaatgaatacagccacaacctcacgaaagtctaggaagaattacacaagatcatgctatatacaagaaatctctcaattccttcctctctccctccccacaacctttacatgcaagtgtgtgcatgactgttgctgccttcttcgtgaccaggttatttctagggcaataacactggagcccaaggagaaatgaaaaagtgagaaacagaaaatgtagatcagataatacgtttccctcagtcattaggaccttgtgtatctttctgtgccttttttgcccacttggaaaatagaaaacggttgctaagatcttccctatgatgtcttctcctacagaaatatcatggcaagttgttgttgaagctcatatctataaggaaggttaaaatgcagtctgaagtagtataggggggcttccctggtggctcagacggtaaagcgtctgcctgcagtgcaggagacctgggttcgatccctgagttgggaagatcccctggagaagaaaatggcaacccactccagtattcttgcctggaaaattccatggactgaggagcctggtaggctacagtccatagggtcgcaaagagtcagacaccactgagtgatttcactttctttcactttaagtagtgtagtgagcctgaatattaaacacagttattataatcatcttagagccagggggaaaaaattgattccacatttgaaaggcttttataaaacccaaatttgtactaatttagtaaaaagtcaactatcccaaagtatgtatttattgcaaaccattataatgtttcaactgaaaagtgtattttctattaaaagcaaaaaaaataaaaaataaaaaagccaaggcaattaaaataaggctttgtcagcctgtacaaatgtaagggtgaatgcgtaattttcctgacatgttcatgaacataaagtagttcagagagcttaccacctttgtgctcctcttgaggttagagaaccccaagttgagagccatttgcctattaaaaccctgagtcagtgctgatcaagcaatagtaggttggtccgaaaatgtataagcaataatgatatta

SEQ ID NO: 37863 - DNA, 1735 bp, Bovine  19866881378700
  misc_feature (1)..(1): n is a, c, g, or t
nactcccaagatcatcagcaagagctagaaatatttgttgaatgatgttgaatgaatgggaagactgtgtggcaattagcagcctaattaattgaagggttgccaacccagctggactggtcctcagctctgctacacagaaggctggctatgtcattttctcgtaggatatagcaaatgagatgaattctgtaaataaaggggaggctctgcttcccagaaagggaaaaataataggaaagcagctctgtagttgagggaaatgtcctaaaactctctgctccaagaggaatagttgcttggcttgctccaactcattgagatgagctcttaacctgcacatggactctctacttgcccaacctgaaaagaagtctgtttgtggcaatacccccacccatccacccaaagaggactgaagcatgcttccatttggggcagggatctggggtaggaatggtaccttccacaatttctcgggagtcagtggagtgacccacagtgatcactctcatctttgaatcataattataggtggacaagcaggccttgaggaaaaacagaccattaaaaagaagcatctacatagacagtggagcagatgatctctaagatattaacaaaggcacgagaggataacttaacaactcaagtagaatcagcaaaaatacatgatgaatagtgaataaatagataagtagatagatgatggatgatagatgaataggtagatggatataaagatagataggaaagcttattttgaaaataaatcaaatgatagaatctgagaaatttaaaaattaatttaaaaattgcttaaactgttacagtcatgggaatactacttagagctgaacttagtaaactctgataatcaattttcctttcctgcacaactctttacactgcctggaagcaataattatctttttgttcattttttttttttttttgctcagttttccacatatttattgccagtttaatccatattctctagcaatgatctggatctcttctcaaccaatttctacgtattaggcattgtaatgctttcttttttttgggataaatttctccgtgacttgttgcagtgtggaaagattatcttctgcaagggttatcctagcttctctgatcttcttcaccccctggagattttttttcacttctctcttgctggatactccgttccttcaggctcctgtcttctttctgagtttactcctttgttttggtgcagcacttccctcccagtgactttccttggaaggatgtataagaggtaaatgttttgagaccttcaatttctgaaactgtttatatattttacccatcacttgattgacagttgagctaggtttccagttttaaggagagaaataggaattggaaaatattgtttgcttttcttatagttttcaatatttgctattatgaaatctgaaatcactgggattcttgatctttggtataaaactggtatttcattttcttcctgtctaggagactataaggtgtcttctttgttcccagtcttttgagacaacacagtgaaaggcttgaagtgtgtctcttttccttctttctcttagtcactcagacaataggtctttgaatctggaagttcatgtattctgtcctgccagatattctttaattatcttgatcatttcctcccctccattttatttgttctttctttctagaattctcatgatagattattgga

SEQ ID NO: 37864 - DNA, 1956 bp, Bovine  19866881383666
  misc_feature (1)..(1): n is a, c, g, or t
nttaaaggttgatttgcttctataatcgtccagccttctaacagctcattcggaggagtaaatggacatcatgaagaaatttacagcttcggaaacgttgagataagcatgcatcccatcccttgaaaatgactcatccagtgagggctgagctgcctggaaacgatggaaatcttgaactgcgctggttacaaactgtggttggtatcaaccctgaaatgttaacatggggactggaagggaatttcatgttcaacagatgctacctgcattatggactagggtgggctatgcttgactgggaaggcttgtccacgtttctgagaaaatgcccttaaaatcatttgctccgattcctctcagactgctgggtttgatttcgcatgatggtttactgactttctccattggaatgacttaagctcattttaaatgtaactctctgctcaatgctgctattattttacttgaggctgttattaatttgccctggagtgatgtgtggtttggattgtgttgtgctgatgtggtttgtcatatttgattcgaaatgtaggacagaagcttggaaagaaggaaaatgagaatgtggaaaaagagtcagtgaatgtgactgtggctttgaggaatgtgtcataggctgctactttttggatgggttgtgtccattttttaaggtgacatggtccaaaaagtgggatataatagagaaatggggcttcccaggtggcccagtggtaaagaatctgcctgccagtgcaggagatgtgggttcaatccctgggtcggaaagatcccctggaggaggaaatggcaaccctctcccagtattcttgcctggaaaatcccatggaccgaggagcctggtgggctatagtccatagggttgcaagagtcaggcatgactgagagcacgtgcgtgcacgcacacacacacacacacacacacacacgggaatagtcagctggcctgtatcaagctgcatcttcgtgacacggttccacttataagaggctgtggtcttggaggcaccacggtaatcctgtctactacaataccctccagttaggaaactgtacaggacataatacaacaaaatgctaaattttgttaatatataagtgccaagaactataaagaatctgggagtctatcctacttgtaggctcttaggcaaacccatgattagttcatggatgttggcagaagacacgagattcttgggtcagagacaaaggtcttaaccatagtctagcaagcagcatgagcttcctgtcatgtccattcccctggctccctagtctcatgggagggtcacacggatgaacctagaaggatgccttcatacccagtgggttgcataaaagaagaggaaccctgagcttggtgtgagtggtaagcacagtcgctctctggccaggagggattgatacttcattgctcaagcttacctgttgcaaacacaatcttgagaaatggattaccaggcagagagtggtcgggatgctgctttttaggtagacagagttagagcatgcaggaacactgagcccggggagtggtgaattgcctctcccagaaagaaattactctcagccaatgattcaggatcaaatcccagtccttctcttctgggtggtttctcagtcttctatggaatatacttggcaattccaggtgcaaagatcatcttcttcggctggaaggcaggtcactttccaggggttgctctcaaactggactggtggtagagctttcctgcgtgcatgctaagtcacttcagtcaggtgtgactctttacgaccccatggactgtagcctgccagaatcctttgtccatgggattctccaggcaagaattctggagtgggttgtcattcccttttccaggggatcttcctgacccagggatcgaacccacgtctcttatgcttcctgcactggcaggcggggtt

SEQ ID NO: 37865 - DNA, 1476 bp, Bovine  19866881391241
  misc_feature (1)..(1): n is a, c, g, or t
natgaatgcaggcagtggcccgtataaacatggcgaccgatggtggaaaagtctcaaaaagtaaaacccacttcataaggggatggccgtctggtcttctgatcagtatggccctgaatttccaatctgtttgcaggaggactgtgcttcatgtggaaaagccagcacttgtctttctcaattccgttcttcatagttaaggaataatccttcaagtttcaggcattgtgttgcttatagatttcagacatcctgtttcttgtcatttttagtatgattgcaaattttttttttatttctgagttttcagctattttggtgggttctcttgaaatattatttcaaattgaaaatctcaagaaatgcttattgaactgattctaaaagtaacacatcattaacctcttttatctaaaatgtaaatcagaaaagagggagaagaaagagaggcacaaagttagttttatattagagtattattttggataatatggtaacttttccacttgtcatggagctattaccaaagatgggggtgggggagggtagaattaatttcctctaaaatatctcttactttgatttttttaagtaccagtgaactgggctacaaattcattccaccaacattcagagctctttgctctcacaactgtcctgctggaatcaataagctgttgattaaaaaccttgttacttaatacatttagtaagcttaatctgttttttagaaacctaagcactttcatgtcactagctgcaggggtagagacaaaagctgtggctaattattaacaacttcacaaagctgatattgaatttctaatgtatcccaaatgccccttcctcccacccccacccccattagttcctgtgtcccaccagctcacacattgtaagcttggtgaatgactttcagtttaagatcctaaagtttcagaaaaacttgaaacaataacaaattctctggtcattttgaaacagtcctgtaccgcagcaacatctggatacaaaggggagtcattgctggctggaagagggccaatggcatccttccgctccacctgcttcaagatgggtgactcccagctgctgagtaaagaggaggaatggggtcaggatggccttgtaaaacaggccaagctgggttagacgtgtttcagttctcagatccctattccttcccctgcaacctctcctgagcttcagaattgcatttccaactgccaaatatacaaacatttcctgacttgcagaagacaatagctaaggactatactgagagttggggaccagagacagatttcaaaccgaaaactagtcctcggtttgtccctggggggtgtgtcctggtagggaaggtgacataattaaggcacccaatgaagctggggcttagtctgtggggtcactgtgagttggacatgactgaaatgccttaacaatgaagctggcatttattggtcagggctctga

SEQ ID NO: 37866 - DNA, 1357 bp, Bovine  19866881466711
  misc_feature (1)..(1): n is a, c, g, or t
ntttaaaagatttttttccccctgggacattctaggtaatacagcaagtcaagaaaaatagaaacgatattactattggaaaaagagagacaaaaacattgttggatgtaaattatattattttccacctaaaaatagaaggttttgaaaaggaagttttgataaatgggtcagttactgaaaaattgtacaaaaatcattaaattaaaaaattaactgtaaaaatcaactttcttttatgcagcaattagcaattaaaataaaacaacaaaatatactccatttacaatagcatacaggaatgcttaaaaaacatgcatatggcaaatactacaaaactttcttgaatgacataaaaatctattaaaaaagaaaagattactttcctcctggatggggacaaaaatacattaaatgtattagttcttcccctaattaattaaaaaaaatttttttaaattttaatgatagtttaacaagtgtcacaccagggtaattttctttccaaatttgaagactaagtggaggaaaagaggcaagaaaataagaatgagagactctttcattgttaagtagtctgtttataatttatcatgaacctacagtaattacaaaagtatagcactaactactcaaggaggatcataagaattcatatataatatatttttaactagatattaatgtgtgtgtgtgctcagtcctgtccaactctgggactctgtggactgtagcctgccaggctcctctgtccatggggattctccaggcaagagtactggagtgggttgccgtgccctcctccaggggatcttcctgacccagggactgaacttgtgtctgttgcgtctcttgcattggcagatgggtgctttaccactagcaccacttgggaagccctaaaatattaatgcatgtgctgtattatttatacattcatatataatatactataagatattattgtatatatgacttagtacttaataagctagctctctaaattattgaataaagaatggatttactcccaaattatgtttatttaatatttctttaaaaattaacatagtttcctacaatgaactctattgaaaaatataatacaggtagattatagacagaaatgatgaaacataaatatgtaagaaaactaaaagtatcaacttaaacatttacataataaaaacataaagaaagtttttaagtaattgaagggggaagtattcatatacatgattgaaagtgaaaagtgttcttccggttgtgtcctactctttgtgaccccatggactgtagcctaccaggctcctttgtccatggggattctccaggcaagaatgctgcagcggggttg

SEQ ID NO: 37867 - DNA, 744 bp, Bovine  19866881522355
  misc_feature (1)..(1): n is a, c, g, or t
naccaacccacctctcctgcattagcaggtggattctttaccgctgagtcaccagagaagcctactaagtatatagatgagcctaatcaattcacttactttcactgagccttatagtcatcagctgtgaaatataaaagctaaggattttaaccacccagttagttccatccccattctctcttctgggcagaggagaagggacagcccccacagggccctgggtaaacaaaggacccttatgagagatgagtctcagcttcctctcatcccaggagcatcccagtctctggcccgttagcctggtgtttcaggtcagggttattttatcctcaggaataactgcagccttcggatgatgaacgctaagtctttaggggccatttttaaatccactgttaatatggagtgacactgaattccctgataatcggattagtgtatattgctcaagctgtcattcagaactcaaacccctttatctctttgctgatatgaagctaagcttcttgactcactttgctgctgtctcttcggagtcatcaagaatctgacttcttcgagccaacaattttatttgcttaatcttgggtgaagagattagggatttagagaagatttttcaacatccctgccattcctagagagaaggcaaattccttcctcctgcacctttctctctctgccaccagtgcacacacagcaactagagcaatgcaaacacccaacacacgcaacgctaca

SEQ ID NO: 37868 - DNA, 725 bp, Bovine  19866881881528
  misc_feature (1)..(1): n is a, c, g, or t
ntgagtgactaacaacagtgatgtatatacacactcacttgtacacacataattattattactaattgtaataataacctgaggtactgaggaaagaaaaggtcgagcttccaaaaacacaacgtgtggatgttgagagcaccattagctgaaaggaaaaaacacatttactctcatattttcaccaagttttttagagtcttgaatagcagaaaccattcttattgattaaatttcataattctgaatttgatcaaatcataaaagacccatcagactgcagtttttataaccattatagataatgaggggaaaatggaattagtaagtgaggggtcactgagtattcaattatcccagctttatcttgttaagaaaaattagaaattgtgcacgcatgtgtgtgtttgcaatcacaggaagcatttcttctaaactcacagaagctgtttccagctctctatggcagcatcttacaggcaagcagcagatactcttttttttttttttttcatatatatggacacttgttggtgaatagatggagaaaaaatgggaacagtgacagactgttttcttgggctccaaaatcactgtggatggtgacagcagccttgaaattaaaagacgcttgctccttggaagaaaagctatgacaaacctagatagtatattaaaaagcagagacatgtctttgttgacaaaggtctgtatattgaaagcta

SEQ ID NO: 37869 - DNA, 953 bp, Bovine  19866881906949
  misc_feature (1)..(1): n is a, c, g, or t
nagaaacccttcatagaatcgtaaccttgtaagtcggttacctgttgatggtcaaatatatatgtgtatatatttatatatatatataattttaacagtgcccattacacacaggcttccattataacactatttccactcggtcatggttttatgaaaaattcccctattggctcaaactttccaagcttaatcacactcttgaggtgaactttttcaattaaactccacttaagccaattttgagctctttgaatgaaggaaaaatatatatgccagactcttaaaaataactgtcaagcaggttcctttttaaaatatttatttaacacactaacattcacacttcacaagagcactaacctgcccacctcataatttccagatgatggaggcagaggtgctttttttgcttagaaatccccagtaagtcttttaattatctcctttgccacagggaattatagatagtctgtaaagcaggttattttgttttaaacttgtgaggccacttaacatatatgaagctgaattcagttactacacagcatcttccctccttgtgagtttggccaagttttccattttgggattaatgagaagaaaagtcatttggattattgatccagtgtgagtcatacagaatggggaagaatgggcaatcaccactattttgaatgtcctccatttactgtctctaaactttattttggaaggtgcagactttgattgtattatttctatagggaaaacaacctctgatctctctctcagaacaactggaaggcaaagtttcctgggtttgggtaatggctctgatctggttggttttctttccctactaaatcgtttgtgtcccctctgtatatcttcatctggttgattgggaacagggagcctgccaggacacacacagccatactactggggtacagccagccaagggcaggaca

SEQ ID NO: 37870 - DNA, 1788 bp, Bovine  19866881917721
  misc_feature (1)..(1): n is a, c, g, or t
ntgggggtgaagaaagagaggcgggctgggctatggacctgccagcagccgatgaccatctagtgcagcggaagccagcagaggtttctcttgggcatgcctgctttactttctttttccacaccttcctcaaaggatcaagttttaatagtatggggacagcctggaataatgggaaaacagcatctcaggcagcccagggcccaggacaatgggcacccccccaccccgctcttgggtgcgggcaccctgctttcagatgcaggcagcccaggcggggaccccggcctattctgaggatggccaagcctcagagaaaaagaacaatcagagggtaaaaggattggaaaacagggagtttccagcggccatttctttgccttgcgtgtgatgcattttgacaaagtgtgaagcagggaaaaagtcgcgggattgcaggaccgcctggccgggcccgtgcagtggccgacagagctcgcccgcttcagagagtgggctctcgcctccggttttgaatttggaactgaggcatgcaaaaagagattacggtttagcattcactgcatgcattcagtgaaaaaataagactgtcatgaagctgggactcaatctaccagaggatgtgtggatgagggagccctggcttctgagcggacggtgggcagaaaatgcccaggctggaggcttagggtttccatagctttgagtcagaatttcttctttctggctattaatgccatccttccttgtggctactccacgatatttcttttcctttttctaccttcagttttttctcctttgaaaaatctattacctggttataaactaggtaaccgaaatgaaggaggcccttacaggtctgggtcaggaggaagagaaagacatcaaataaattcgaaccaagacagtaccttaaaattatgttttgttttggttttttttggaggggggactttaagactgcttcagaaatagacatagagaacaaacatatggacaccaaaggggaagggattaagggatgaaatgagatcaggattgacacatacacaccactatatgtataatagataactaacgagaacctactgtgtagcacggggaactctactcagtgctctgtggtgacctgaatgggaaggaaatccaaaaaagaggggatatatgtgtacatatgggctttcctggtggctcggacagtaaagaatttcttgcaatgcagggcacctgggttcaatccctgggctgggaagatcccctggaggagaagtggcaacctacttcagtattcttgcctggagaatcccatggacagaggagcctgccagctacagtctatggggtcacaaagagtcaggtaaaactgaatgactttcactcactcgctcatgtgtatgtatatgattcactgtggtacagcaggaactaacacagcatcgtaaagcaactatacccccccccaaaaaaaaaataaaagaaagaaagaaaagaaaaatgataaataacccaaaagactgccccattccagaccatccttctagagactagagagcagagcctagaagagtcgagtggcttcctccggttcccacggcatcccggttggcagaaccgcgatcagagcctaagcctgtgaacttctgtgccaagattctttctgtgacccccacagacttattgtcctgctttatttgtggggacgctcgagttactggcagagtttattcagagcacagactgctggagcctttggtgtgctaccaagctttgctccttcccagatgc

SEQ ID NO: 37871 - DNA, 977 bp, Bovine  19866881942252
  misc_feature (1)..(1): n is a, c, g, or t
ncatcatctttacatataggccaagttcactgtcatttacaccaactggttcaagcctcgcctcatagccagccctactggaatttgaacaaaacccaggccagtggcaagaggtggtccctgttgtttatctggtcaggtgtaacagcaggggctggacaccacctctgccttaggaaggttcacaagaagaggaagtctgaggtcacattaatacaacctcgtgtcctcaggggtccctctgccctggtcctcacccaggctatgaatagctgccggctgatgttaggtggctttctggtcactgttctttgggatagctctcctcctgtgtcccactgctgcccaatcactgtcattatctctagacaccatcctgacttctttccaaaccttgtgggaaagtttctcactgagccctctttcactgcatcatctgctcctctcttcacaggtgttaaagtggcctgataaagacaatatggaggaaaacacaggggcaactatcggctctgattttcttgttgaggtcttgtcccttctgtggtgtgggctgtgctctcacaatctttgagtttgtttttctatggaagactagctgggcatctccaggctgccatataacctccaatccttcctcttgcattgtcctaatatacaggataaaattacaaattgtctttttgaataaccttaaatatctcatggttcaccagggaaattagaagaaaagtatttctgctaacattacagacttaattacgactgtgcaattggggaagatgactcagaaaccctaagaattgtcttagattatccatcaatctaatcatgttgacatcactgaaatagcccataatgaggaccaatgtgctatttgtaaacctaaaaatgaaaatgtagagaatattgatctgagaataagcaaaaccatccaaagtttgaatgcactatacctggaattacacaattgatat

SEQ ID NO: 37872 - DNA, 1811 bp, Bovine  19866880369973
  misc_feature (1)..(1): n is a, c, g, or t
ncttctctagactgctcctcttcatagggtttaagaccctcctccctgggacctgcccctgcttcccacccctccacctgattgagatgtttcttcctggaccacggtgaccaccaccaaaccgtcttcctgggccaagcctctattctaaactggctgcccaagtggccttaccctccatcctggtggtgctggtccccagcttaaacccttccgtcacaccccagcctggcagtagggaccttgcctggcgactcattgctttgtccctggactcccttccggctccttgaccccatgtttctgttcactcatttgcctggagggtctgattctcctttcaaagcccagcgtgacttcacctgctctgggcagccctccctgaccgcacagaacaaacctaaccccactgaggtctgtggtctttctcccctacaccccgggtgtcctccgccctgtcctcaggtccgtggagtgttgcagagggagggacacaactcaccgcctccagctcctggttccgggcccggaagcgctccctctggctggagatgatggacagcagcgagtccacctggccctcggggagggagctggcaggcgctgagggacctaggatggagggacagtggcttgggggtaggggaggcccagcccagcggcgggccctcaggtcaccagctccgagggggctctggtcgagtgccatggggcggaagcaaagggacactgaggggactgggtggctctgccaccgccaacttgtcctggcctcaacacctggggggcacctctgttccagcccttggctgcctctcatggctgggcctcacccccaccagggagctgatcaacacccaccagcctgcgacaggcccctggcagggctgagggggtcagggttcccacggtgggggtgtcagactgaggtctagaggggcaagtggggggctcacccttcttgtgagtttctgctgccttgctggcccgggggcctggctcctctgatggaggtgtgtgctctttagggcccaggtgaccccacctctgctcctgtccccctctcctgccagcccatcacagcatgggcccctcctcaccatagaacagggcggtggcctccttgatgggctcgggaatcttctccaggccgagctcggctgcgccctgcaagtgggagggcgaggtcagcggggcgcctccacacttggcagtgaacacagccatccagggggccaagcacacagagggcaagaagcgggtggggtggtctggcggcaggggctggacacagcagtggccacaggagggcccggagagggtgccctacgtgggccaccaaagcgaaggtggttcaccccgaggctggagttcagcgtggggctcccacccagccacttggccctgacaggcctcggaggctgggtgaccccaggcctaccagccagcctgccatgtcaccccagtccagcccgtttctctccctgggctccgtttctttgtctgtaaaatgaggtgggcgatgtgataataacccctgaggatcctgggactccagccttccctaatctcagggcccgaggtcctctagctgtgagatgggtgggcagtcctggccttgcttctgcccagagctcccagggccgagggccaagccagcgcctggaggcagggggctttgtgcccttagcctgtggcctggtgccccgaatagaggctttgtggtgaagtgagcagacagaccctggaggttgtaggtgacagtccctgtcaggcttagtgtgggcccagaggacaccggctgcccaagg

SEQ ID NO: 37873 - DNA, 1217 bp, Bovine  19866880479959
  misc_feature (1)..(1): n is a, c, g, or t
ncctctgtgtcgggcatctttcactgagcatgttctccgggttcatcgctttgcaccctgtatcaggacttcattgctttttgtgactcagcattattccatcgcatgaatagaccactctcggtttaccattcaccggctggtggacacggattgtttccactttctgactttttaaatttgcctgtaccgagtcttaattgcagcatatgaacttagttgcggcatgtggggtctagttccctgaccggggatggaacgcgggccccctgcattgggagctcgcagtcgcagccactggaccagcagggaggcgcactgtttgactttgtcagtagtgctgctgggaacattcgagtacaggtttctgtgtggactgtgtttccattctcttcagtgaggctagaagtggaaccacttctgggtcctaggggaactcctcctccgtggtcttgaagcccagtgttgaccagctgggtaacactgccttgggcgggcccgccctcccgcgctcccgcctgccctgcctggccgctcctccttcacagctcctgactcctggccacggcggccaggggatgccacccacacacgggcctcctgtctccagctctgcttcctgcggtgcctgggcggagacgtcctccgacactccacatccccttccctgctctgtttttctcggtggcgtttgctgccagctggtgtgtgctgttcgtatttctctctctggtgtctgtctccttctgccaaaatgtcagatccacgaagtcaggcatcgtggattgtcttggtctctgtgattggattcttccgctctggcgtgtgatgccatttccgtaaactcagccaatcccccacttccttttcatcctcatcctccaggactacggccccaaagtcaacttccggaaacagaagctaaagagggccggcttccgaggcctccccagcttcagccgagaggtggtgcggcgaatgggcctgtaccccatcctggaggacttccggcccgtggagcagtgcaacctggactactccccggagcgcggctcggccatcgacccgcacctggacgacgcctggctgtggggggagcggctggtgagcctcaacctgctgtcccccaccgtgctgtccatgtcacgggaggcgcccggcagcctgctgctctgcctggccccatccggcttcccggaggcccggcggacagcgcg

SEQ ID NO: 37874 - DNA, 2948 bp, Bovine  19866880590987
  misc_feature (1)..(1): n is a, c, g, or t
natcctctgttgcccccttctcttgccctcaatctttcccagcatcagggtcttttacagtgaggcggttgttcgcatcaggtgcccaaagtattggaccttcagcaccagtccttccaatgaatattcaggttgatttcttttaggattgactggtttgatctccctgtagtccaaaggactctcaagagtcttctccagcaccacagtttgaaagaatcaattctttggcactcagccttctttatgatccaactctcacatccatacatgactactgaaaaaaccatagctttgagtatgaggacctttgttggcaaagtgatgtctctgctttttaatacgctgtctaggtttgtcataggtattcttccaaggagcaagcatcttttaattttgtggctgcagtcactgtctgcattgattttggagcccaagaaaatgaaatctgacacagtttccatattttctttatctatttaccatgaagtgataggaccggatgccataatctttgttttttgaatgttgagttttaagccagctttttcactctcctctttcacctttatcaacaggctctttagttcctcttcactttctgccattaaagggatatcatctccatatcttcatatgcatatcggcatatcttcattatttctatactttttaaatttttgttccttccagattacagtgacacttgtgttcatgcctgctcaggaaatagtaatccacccactctcacaagggaacaaatgcttttgtaaaccagcaagattataggatatggttatcttgtttggggaacaaggtctatctgcttctcccaaagtattaaaaccccaaatttccttttcatagttaagctttgtttgttgtgtcagtaagatttttttaagtccatatctttcatttaaagtttggtaacaaagtgctctccctgccagcaagaatagaaggcgacatgcagtctgatacttcggtgtaagaagtaaaagggaagggggacacagtgtatttgctcacattcttttcaaaaataacaatggggagacacactaaaagctactaaaattggttacctagagaaagggatggaatagagtagatacagaggctggaaaggaaacagtacttccttgaatactcattttattgctttgattttgccatcatgtgatgttagaaataattgaaaaagcataattatagcaaagaaagaaaagatgaccatcaacacaaacaattattattttaaataacaaaaaagtattattttaatgaaaataccaggtaggatatacacatcttcaaagcaaaaagaactgagtaattttcttaaactgctttccatagttctatggttagtggtcttcttgtatagttatttcaaaaccattatataggtattgtaggatgacactaataaccaattagttaatgtctttaagaatcaagattcattaaaagtgggtcaagcagaccatgggcgcctccggatacaatgcactggacagaacccaacgtccactctgcagtattcttgttaccagagaacaaaaggaaaaacaaacctgaatatcacgtttgtagatctaccttcagacttgcaggaaatacaagaaacaaaacaaatgaaaggaattagaggaaacaagaatgtgggaccttttacatgacagatgatctgttttcttcaataaattagtggcatggggaaaaaagaagaaagaactattgctgattactagagatattagatattagtatggaacaaccaagtataatatgtgaaccctgtatggatatcaacttaacagagccatatgtaaaaaggcatttttgaggcaatttggaaaacccaaatatggagtaaatatggagtctatatatatatctgaatgtagtcagtcctagacgatattcaggagttattgctcatttcattatgtttcataggcatttgcactgtgctgtgttctctgtcaggggctttccaggtggcgcagtggtaaagaatctgcttccaatgcaggagatgtggattctgtccccgggtacagaagatccccttgagctgttgttgttgctgttcagttgcctcagtggtgtccaccccctgggagtaggaaatggcaacccactctggtattcttgcctgtgaaatcccaaggacagaagagcgtggtgggctccagtccactgggctggacacgactgagtgactgagtacaatattctctaaaaatgccgtttcttgttaaagatgcacagtgaagtatttaccagtaaaagtaatgcaactcccgagatttactttctaatactcccaaccaaaggtggagaggagaataattaagaaaattggcaaaatattcattattgtttaagctgaataaggggaattattatatactctcacttttgagttatgtgtaagttttttctataataaaaatgttttaatgctataaatgccttttcttcttgtaattagtaggcccatctagagatttcatttcctaagaaatgagaatcaagtctgtgaagttatttttccttcttaacaatagacaattctttcatcttggaacacacagttagactgtctatctactgttatgagaacaatttctctgtctttttataattgtttggcttatggtttcttgtattcattcttctcttggcaaagaataacaaacaaatgcttattattaaaatgggcatgtaaacaggctgtccttgctgggcaggactgcgtagtatgaagccatgatgactgcaccataaaaaaatgctgaaaccatgcaaagccctcttaactatcaatgaggaaaattgcgattgtttgtgatctataaaacatttttatcaaaacattaaaatctctctgactagcagttataactataggaaagaaaaataaagggggaacacaa

SEQ ID NO: 37875 - DNA, 1666 bp, Bovine  19866880791258
  misc_feature (1)..(1): n is a, c, g, or t
nctgatggtgctgtgcctgaaatgtcgcaatacccacccacccagcaaaaccaaagagccaacaccaagtggccttactctctctcgaagagagagctacactggccgccagggcgaccgaggaattatcaaagtaccctctgatgctaaatgtctttgggttcaggtcttgaggcagaaaaaacacaaatctctccagtccttttaggtacttatctgcagatgactgtcaaaatatcctgcaccctgccacacagccccttggtcactgatcagtatccttcatcagctcagtgtgaagatcagtgtccctcatcagcaacagtgggtttataaatgagaaagcaacgggctggggcgggggcgggaagttacctttcttttccatccgtttcatgtccatcagcttctccacattgttggggtcattcagccacagctgcatccggacaaagggctcccgtcccttcagactgagcttgtgccagggcttggggcgagcaaggaggtcagagacagagccttgggtgagccccaggatggtctccccaaataagcgctgacctggagaaagaacagaaccaagagagatgtcatcgctgagactcagggagctggcaggacaagtaggtgtcagagtgcaatcagaaacgggggttcgagacccagagtcttatcagtcctgggtttagcaaaagcaggttttgtttttttttttgccaagctgtgtggcatgcaggatcttagatctccaaccagtcatctaacccatgcccctgcattgggaactctgagtcttaaccgttggaccactgaggaagtcctaagcaagcacttcttagaagcacttcctcaaccagacttgtcacgacctccgtgggtgatggagtcagtactcctcttacgttctgcttacgcacaaggtttctctagaaagagtctttgggttttggatgaaccaaggcccgcacaacacctgctgcgtctatcagaggtggctaatcccaaacctgagctcgggaggttaagtagctcatggggcgacctctctttcagagcctcaaaccgggccgtctgcactggctcctttcacgattagcaaggttatcaggtcttgctgagaaaacaggccacttgacccaaggtcacagcagggaagagaaggagaaagagctcctcagctttattttcctgacaagcaggccatttccagctctgaagtctgtccctgcagttcaagtagcctgctccctgggctgatcagagggtactgcgctctggagagcacagtggcgttaggtctgcagtgttcatcagaggcttgaaaggaagatttctcttctctgagagccattcagttgcaggtgaagaggggccagcactttgaaaggcacaaatgagaaccaggcacaactggaaggatctgacgggaggactgaaaggcaccggacttcgagtggaggtggagaccgggatcagaggccggcgtctggtaccatgaagcctccggaccgcgacactggctctgcccctcagtgtggggtgacccagagtgcgagctcactcgtgttcgactctgcgaccccacagactgtagcccgccaggctcctctataccgtgggattttccaggcaagaatactgagggattgccatttcctcctcc

SEQ ID NO: 37876 - DNA, 1796 bp, Bovine  19866880803754
  misc_feature (1)..(1): n is a, c, g, or t
nctgtgtattaggggctgcacagtgttgtgggtgacacactgcttgaggcctggaggttcaaagacaaaagctagtgaaagaaaagaggccacaggttctgaacagagacccaaaaagggcactgtggctttacttccatgaaccacttcctttaagatctttgtttcctatgactaagtcacattaacagtatttgataatcatcacaaattttcactttaatttcaggaaaacaggtctctggtaagagaccatctttgctaactagactaaccccgaagcttggtgtggggtgctccaggtgctcccgtgagccaggcacccctatctagcagggaacactgggggaccagccactgtcacatcaccaagtccatggactaaatggcttactgtttctgctcatttatttgccagccttatcagcctctttctgtaggaggtaagttcctctctcagcaactgactgtgctcctaacaaatgcagctcacagtactgggcgacgtgaaccctctcatctaatttcccaaccccagagggtgacaacgatagacagacatcaccctgacggacgtgtgcccggcattctcctagtgcagcgttatagagagcactgctgtgttgagactgcaccaccatcctgggcttcccaagtgacccagtggttaaagaacccacctgccaagcagaagacacggtttgatccctggattatgaagatcccctggaaaaggaaatggcaacccactccagtgttcttgcctgggaaacgccatgaacagagaggatcctggtgggctacatacagtccatggtgtcacaagagtcggacacgactgagagactaaacaacaccgtcccaggaggtactttcttagacaaggaccccagttcagatatattgagcaccaggccctgggccccacagccagagcccagccaccagctcaggaccaacctctccattccccattggcctgcctcccgggagggcagggacagggctgtcagggcagagatgctggtctgagctggattcggtgtgctgtgtgtcagtgtttcccttcagaggtccatccagcccagatgagagcaggtcactggcccatctcccttcccattacagggggcctctccccagcacagggctgacaccagggactgaggcacacacccacatggggggtggccaggggacagccaagggtgctattacctcagtggtcccttcttccccagcgcactgtcccaggataggtgcttggcctttcaaggggaaatgagcttcatttgattcagtctgtgacttggctctggtatgacaggatgactcagccatcctatagatgtgtagggctgagccaagattattattcctccctccttcctcaaaaaccaccccctgcaaggaagtttctggatgcccaaacaacagagccctcatccctccttctctgcctgcagaagaccctctcagaggatgcagtggggtccaacaggttctgtcaaatcgctggaaaggcagggaaaattcttgacaaatcggcggcgtcagaaaatcaattcccaaatgccatgtaattcaccgacaagcccaccggggcatttggattgaatgggaaaggatttctttccttaaaaaggaccaagataagagcaagaaaacatatttacattttgtctgccgacccgagctcttgagctggcgagcaggagtaatgagaacagcgcgtcacaaacaacccgggcctgccagcgatgaaaattaatgggaaggtaaagagcttcttttga

SEQ ID NO: 37877 - DNA, 663 bp, Bovine  19866880813554
  misc_feature (1)..(1): n is a, c, g, or t
ntgcagactccccaagagtgtaaatcactttattttataaagtaatttgatctcttacaaatatcatttacgttcctctgaggagccctgtgagtttttcccatgttggaaatgggactgtcatatgaatgttccagcacagtagcgagggcttgctataacaataaaaagtaaaaagccactcttgaagaatttgttcagacacagagaaagttttggcatcgatcataaccgacctggaactgtaggcgatttcttgttttatttaggaacaagggagtttgatctaaaacccgtcagattctgccaagttgggtactgactctgatggggcagcaaatacttggagagtttaacaggaggccggctttctgttcaagcaagaggcaggcctaattttccatgcaaacgtccgggaaactcttagcacaaacaactgtgtccattatttccctaatgtgtcttgaatttgagccagggctgtgttaaggtctccagcacttgctaattagattggccaacccagaaaggcagggaggaggaagtacacctgatccttctcagagggccaaccgctcctttcagaggtgcagcgaaggaagccaagagcctgggttagacacagccttccacccctcaagaggaacaccccaaacagaagaa

SEQ ID NO: 37878 - DNA, 1609 bp, Bovine  19866880815567
  misc_feature (1)..(1): n is a, c, g, or t
ncatccataaaatgggttttcacacggattctggaaattactctgagtaaggccagtcctgccacataatccgtcatctgacagacaaccttagtggcgagtcttctgtggtcagcatcagtgctctggtccaggagccccggtttccaagccagctccatcactatttcacgtccagtgatgtaaactcaggtggtaacacttaccaggcctgagtttcctggcatgcggagtaaggaggaagtgatcctgaggacctctcagctttgacggcctgtgatgggtgaatcacacttgtcggagtccttttatttatttagtttttcttaagtgtttttttttctgacttagactagttttaaagttttcattgactttcttacaacattgcttctgttgttgtttttttttgttttttttttttttttgcttctgttgtttttatgttctggttttttggccacaaggcatgtgggatcttaggtcgccaaccaaggattgaacccacgccctctgcactgggaggcaaagtcttagcccctggaccaccagggaagcccctgtccttttacttaacagacagttggagagcccttgctgtgagccgggacccgcagtggatactgggagagccaggagggacgagcgaggccctccccagagagaggacgatccagtgggagacgtcctgctgtaaaaaggtgacacatcactctgacagcatctctgccacccagcccatgaagggcattgtcatttctttatatagatgaggaaatggaagctccctagacgtaaaccccttgtcccagaatgttcggccccagtgtccaagccagggctcgagcgggggccacctcccgccccagaccagagctttaaaattattccccaggaacagatccaaagcaaagctttagtgtgaggaccccttgtaagacgagatttttgtgttctttctttaagttcacatttaactaaaacatgacttaagcgtttcaggatacagagaaaagttttccatttaaggcaccatcacagcctttgtacttaatggactctggtattaattttgtccaaaacgtcctctcgtccaagttcacctggatgggacccagccccacggccatggcgggaggagctgtcgaggatggcgtctacacggcttctcatggcttctgtggtcgcttggggtccttgagagaaggccatgcatcctgtgtccacatggggctcctgagctacaagttgtgattgagagggtttctggcaccgtcctggactgtagcaaccaaaacatttcggaaggaaatgagtgtttgtgcaggtagagtaagttgtggatcctcggggtgcttaaacacttcatcatcggctaagtgcagtgtttacatggcactgcttcagtctcccgctagcaaccctgccagggctcccctcgggggtgcgttcccacgtagctcggcagctccagccccagccagtcggggagcgaatgagcaaacataggaaaccgggccagcggcacaagtctgttaggcttggctggcagaacccagcagagaaacagtcgaggctatagatccagcaaaagccaaagatcccgggc

SEQ ID NO: 37879 - DNA, 1404 bp, Bovine  19866880841552
  misc_feature (1)..(1): n is a, c, g, or t
ncaagagtactggagtggggtggcattgccttctctgatatagaacatttctagaacccaattcttgaagtctcttccattctttccttgttttctttttttttttttaattgagataaaattcacataccacagaattatttcttgtttttaatcttttctcaccttctactgtttgaaggcctttgtagtacaaggctcacccttgaaggagcaacacctctgacagtagagaaataaagaccaacagagcacttaaaatggtgataatgacagtcaagaactgacctgctacttattggagaattgggaagtcacttcttattcaaagagctgggattcttagaaaagttatatactgtgtctcttcttggttatgtatataaatcattaaaaacatccatgggaaataaaaagagacaggctttccctttgaatattttttcaacaaagaagaagggaaactgcaacttccctggtggcccagtggtgaagacacggcttttcaatgcaggggggcttgggtttgatccctagtcagggaactaagatcctgcgtcctactgggcatgaaacagaagcaatattgtaacaaacttaataaagacattaaaaaacagtatacataaaataagtctttcggacatttaaattaaaaaagaaaaagaagagaaattgaacttagggtattgtagcagctttagaaggaaataacatacaatgttctgtctcacaaatgaaagcaagttggatcatcaaattgcctgagtcacctgagaagccacctttcgatacccagagctcctatctccaaatcaaattaagcagaaaaacaagtttaaaaaaaaaaatccttaaataattatggaagtgggcagagtttctttttcatgatcgaaacggctgataacgcttgtatgaggagtgaaaaacatctcgtataaaaatttaatctgagtgtttttgttgttaaaaatctcatgtgaatcatgaattatgaaaaacacgactggggagagctgtgaacaagttgattcaagtatttcaggcatccgatgatctcacgccccagtccggcttggcttctgggatcgtcaggattttatcaggttcagagcttgttgatggcctcatgttggctccaagccttggctggctcctttcacaggctcagggaatcatggaggaccagagctcaggctggtcaccagtgaccatggtggttggtggctggtattcctctgctactgttaaatatgaagaaagcgaaaccctggaaatgaagggcatggtaagatggacttagacctcatgacccttgacctttgactcttaactcgggagtaagccaggctcattccttccttcatcatacattcattcaacccctactatagtcaggcc

SEQ ID NO: 37880 - DNA, 1264 bp, Bovine  19866880841795
  misc_feature (1)..(1): n is a, c, g, or t
natgtataaatgagggaacaggagcctcttgtctcattaatagcaacaggccaatggtttctgttctcactcaagagatattaaatgtccttgcacttcatgaaccagtaactgaagtcctcaatagccccagctggtgcagacttcaggctatctgcttgtatgtataacatcagaagatgcttatttcacaatcactgagcagttttctctgtaaaaaattggtggggttgcttaatttcctggggtcactctcttaggtcagcaacaaacttgggaacaaatcaagtgtctttgtccccatccccctggttctgacccttggtacccctttccgtgagtattttctaccgaaactggggcccatgggaggggtcaggctcccagcccggcctgcaaaagccaaaactaccgagttgctgtgcaaaggacccagggggttgaaaggtcacagcttcggaggctcaggaagggcttgggaggggcctgtgggtgcctgtgggctgggcaggggcaggaagagggagggccccatcgcacctgtgctgctgctgccgctgccgcctggggactccagggtctccaggaaggtctccagcgggacgtggaccagggattcgccaacggcctctcgagcgcggctatgtgggggctgtcaccacggctgccagttgtctctgggggccggggcaggtccactgctggagaagcagcaggttagaaacacgcgtgtctgtctggccaccttggagcgaccgcagtctccagccctgccctccactgctccagccagttctgtgtccacctaccctccgtcaggagctcacagctgcaggaggccacgcggctggccagacagcctccccgagcacaggacggctccgtgtcttcctcgctgtccctgcgaaggcaagaaagcccaactgtgttcggccgtgcgactcggaccctgaccgcggtctgctcacgcagccaggcagaggctgactgtcccgcggccagcatctgctctgtctggctcgcctgggtccctctgcctccgtgtccctgcgatcacaccctcagcttgctcagtggccaccacgtgagtgactgggccatatggataggtctccaagtgcgtgcagccctccctgaggtcacacgaccccttacccgctaacccccaaaaggggctggcctcctctgaggatcccacggaggaccccttctgggggcgggacacggggtgggtggggcctgggccggcccctcccctcccctc

SEQ ID NO: 37881 - DNA, 1682 bp, Bovine  19866880871737
  misc_feature (1)..(1): n is a, c, g, or t
natggcttgctcacaataactactttatgacttcctatctatcagtcaacaccaagtctaggaaatttacttctcatgagttcttaaattaccatttgagcatacaatcatttatcttatccaattacttatctcatgctttccatcctggcaaagtatactaccaattatgtttgaataacttagtccctaatggttaagtacctggtataatttttcagactcccccaattttcatggttagatgatataacatttctttctacagaacatttctgttatattgatatgagaagacttttaccacattgcagttcattattctccaaataaaatgtcagcctatccctgtctatcctatgagtctgacatctggaagggagagagcagacaggaaaacaagggaaagcaaatcctctcaatcacctcaggctgtggagacctgactaaaggccgagttgatcctggctcaaccaagatcacatacgtattattagtttcattccgcttcttttttttcctattgttacccacaaaggttattcaatttgcacttaattttcaatcttaattctttaacagcaacaacaaaaaacataattgtcttacctggattccaaaatcggtgattttatcacactcagacacagaaagttcctttaattttctatgtctggaaagtgtcatcaaaccctaaaaatgtttaatataaagattatttgataatacattagtatagaaggtgtatttccaataagataacaacagtttatgcaactaaaaatatttagcttctgttttatatttctttagacttaatcatacaatcactttggttaggcaacattattcaataaaattttcaggttatctctaatgttttacaaaaagtattacaaatcctagaaccagaaaacttcttatcttgcctcctgttttcaggtaaatgttacatgaatcaatgtaaagaaatcttcagttgcctaagtttacagctttattttatttgaagacacttcatgtggctaatgaatctatttatcaataaattcttatttatgcttagcctaaaatctgaaaatctttagctcattttattatatttaattgcttggagggagaagaaacacatctttaggtaaaggcccatagacagataattattcactagtagttcatttcttttttcaggctaaaagttttgtttctttttatttaaaaaaaatggatttcactttcagctcttcacttttttaatgtgtggttttgttggtgctcaaatgataaagaatctgcctgcaattcaggagacccaggttcaatccctgggtcagggagatcccttggaaaatactggcaacccactccagttttcttgcctggagaattccatggacagagaggcatgatgggctgtagtccatggggtggcaaagagtcagacacaactgagcaactcactttcgctttcactttcgtcggttggcccatttctcagtacctattctcctaagctggtacaacattcagttaaggaactgactgttgtgccttataaatgccatccttctgttttgcattcaggatcatgttacttttctatttcctgtatatgcttcctagactatatagactaagagcagtttctcctccttttatggtcccagagctggctggcaggg

SEQ ID NO: 37882 - DNA, 780 bp, Bovine  19866880876034
  misc_feature (1)..(1): n is a, c, g, or t
nttttcagctttaggattttgtgtttctataagatgattaactaagataactaaagaaggagtatgagtggggaaaaagaataatgaattttattttggaaaagctgaattttagctttctgtgatacatctagttgtcaatgacaagaactgcttgaaagtggaagtccagtccttgcagcagagctgggaatggaggtacagatttggtagtttatcaatagagggtaattggaacagtaagagttatgtgaccagctaagccagctgtgaataaagagataatgtaccaaaatgaattggtaacagctaaattaaaaatttggagaaggcaatggcaccccactccagtactcctgcctggaaaatcccatggatggaggagcctggtaggctgcagtccatggagtcgctaagacctcactttcacttttcattttcatgcatgaaatggcaactcactccagtgttttcgccttgagaatcccagggatgggggagcctggtggctgccgtctgtgggatcacacagagtcggacatgactgaagtgacttagcagcagcagcagaaaattaaaaattataatttacttatattttaccttattctatattttaatgaatggtgactttatttaatccctggtgactcactggtaaaaaaattctgcctgctaatgcagggtttaatccctgggttgggaagattccctggagaaggaaatggcaacccattccagtattcttgcctgggaaatctcatggacagaggacagaag

SEQ ID NO: 37883 - DNA, 1029 bp, Bovine  19866880912868
  misc_feature (1)..(1): n is a, c, g, or t
nttaatatctgatgctaaagtgagctgtgaggtgcctgtgcccttgaagcctgccctacagattaattagagctgatcctgagggctgctgcagggccagtcccttgggccacacaagaccgccaatcccctatttggattagtggagatttgagtttaaattcacaaatctcgacagatcagcccttctgatcttcatcctgtgttactgtcaaaccacatgtgtactgggatgactcgaggggtctccagcctccatttcttgaaaagaataaacccccaaaccatgttcgtgtcaattgagcaatttttcattttgctaaaggtttccactgcaccttggatgtagcttcagcaagctataagtcagttattttcagggtgaactgtgctgatttaaattgaagtgagatttgagaaattagcagctgcgtggaaacactgatttcatggttggcacctggccgttggaaagcaatttggggtttttgggctccattgtcttgtttaagaccccaatagggtggagaaggcaatggcaacccactccaggattcttgcctggagaatcccatggacagaggagcctggcgagctacggtccatggggtcgcagagagttggacacaactgagcaactaacagggtgggcatgtctccacgtgaagatgaacaagttggaaaagtcaggtgttgtgtttagaatcgcacagctgggtcaaatccagaagtatcaggtcctagaagcttccaaaacgctacaactcccttctccttgaagataggcgtttaggtgctttcagccagccttggaattctgttcacccaagagccacgctcagttggagctttgagctcaggagaggagaccagataccagctttgtggagaaacactggacgctgcggtgggtcctgaagatgcacccgcttgagccctttcccacaaggtggtccctgcattcctgtgtggggacaagcctcggaggccaggcccaccctcgtgcaccctggatcctgtggccctggt

SEQ ID NO: 37884 - DNA, 1206 bp, Bovine  19866880958739
  misc_feature (1)..(1): n is a, c, g, or t
nccttgagtgagtggcagaatggggtatctggaggactccgagaggggccacagcggccttgagaccctaccctgacccagggctctgatcttggctgtggtgcttggcctcttgttcttgtgcaggcaggcgatgttgagacgctttcgtggtgacactgcgctgggccagcttttcccttcgggggctgtttctccctgtggctcacttgggtttgtgcagccgagaaggctgtggttcctggaggcttcccagaggcgatgagggcgacgcctctgatccctagagacagaggcgccacagaaggtccaggagagctgggctggcctgagcctaaacctggtccctcttgtgccaggtcgcaactcactggaagaagttcatggccgcactgagcccagaggagcaggcacaggcccaggcagactttgtgaagtcggctgtcaggaacgtccgctacgggcccatgtcgctcagcgaattcacccagtggcgggtatgccctcatgctgctgtgctgcccatcggccctgccagctccctcctccctggctcccacagcccaagccgccctggaggtcgctggccacaagaggacgtggggagtagggcaggtcagggaaggtggcctgggggctggaaagacgcttccccagctcttactggctgtctgggagaggcttgaggccctaggactatgcctggcttcctgatggcctgctcccacccaggtgcggatgatctctgaggagctggtggcctctggtggaacccacgcacgtgagacagacatgccagagggatcccacaaagccacagctacccagcagcccagggtgagtggggctcccaggctccctgggcctgccttggctcttcctgcctcaagaggcattagggaagcaggggaccttgagatatgcccaggagatggtctcctgtgcttgagtgggttctctctgaccctggtacctcttgcctcccataccccaggaggggtgaagttgagtctgtgacagggaggaggtaagccctaggcagatgggtgcctggtcaccatgcctcagcctgcccctgccctctcctccacaggccaggccggtggccttgaggcggccaggtgataccctactcagcctctctccccagaagcggatgtgcacctccctgttggcgccggtggagggcagccttgtgggctctga

SEQ ID NO: 37885 - DNA, 2052 bp, Bovine  19866881053715
  misc_feature (1)..(1): n is a, c, g, or t
nttcgcttttatgggacaggcttttgtgcacccttttttaccatgccccagatcctcttttgagaggtcaggaagtggacccagaagaggacaagtggcttgaccaaagcctagccacagcgcccggtcccctcaaatccacacacagcacactttgatctccaccctgcccctgcctttcattctctgtcttttacagattgttaggaagtgggatagcatattaatatttccaaaacttcttatgaaattggaagtgttgtgcagtgatgaagatagaaactaggaaacaagagcttttaatcccagcttacaggaaattctaactagtaggaaatctaattcaggccgtcctgggaaacgtcacacactcagagatgaaagtcagctaaattgggatctaattctataatctaaatatagatgtagatatattacaggttggccttttccgcttgggagaggatcattcactctaaaaagtaccttttgtgtcacagagcgtggccggccagggcgacagcacaaaaagccaaggagggactttgactttttcattccttagtcttcattgtcttaaatttcataagaagaatgtattggtacattacatgtgtagtacatgaatttaacaggccaaagggaagactctttacagagcgtcttccaagcggacaggagttttgcgtgtagcgtttgccttttctaccacggtgaccacggaccgtgaaggtgccagcttctgtcatccatcccggggacacagagaccctgtgtcagaagttgactagctcattagcctttgtgtggcaagggttcttttattttaaatacgtttgattacagaataaacatgcctataaaagttcaaccattgaagacgtgcaagacgtaaaatgtaaaattccaccagcccctccccccgcccccatcagattgggcttctctggtagctcagctggtaaggaatccaccagcaatgcgggatacttgggttcaatccctgggttttgaagatcccctggggaagggaaaggctacccacttcagtattctggcctgaagaattccacgggctatatagtccatggggtcgcagagtcggactttgattttcccatcaaatttcagaggtaaccactgttaacttacatagtatgtgattttttatttatttgtttttcttttttcttggttgcaccacttgcaagatctaagatacccaactagggattgaccccaggtcatcagcagtgaaagcgcagagtcctaactgctggaccagtaatttgtaattgttttgattcttgtttttccctattgcaacctaagggtgggcatatgctctctgtcttattaactgacatatctcaagcatggagaatggtattcttcttgaagtaggtggctcgtcaatgtctgtggggtgtgtggacacttaggcagatgtctgcacgagtccctgaccattcatgcaagagttactgcagaacggattcttaggcgtggtgttgccgggccaaagggtatgtgcgtgttttcctttcctggttctgccaatttagcatcccaaatggcagctcacttgtcactcagtcttccttgggggacagaaaggacagtgggactgtccttttcctcaccaacactgaataagttagttactgaatcttccactggtttttttaaaaagtgtgtattcctttaaattcagacttcctcaatcaacagtgaaattgaacgtcttttagtatatttattagccaatagtgtctcttgtgtaaattgtcgacgtcctttgctagttttttttactgggttgcttgcttcaccttcttggttctgctgggttttttgtgcatgtagtaataattctttctctcttatgtgttgcagatattttccccaaatctgtcatctgtcttgcaaatataaacatgtctttctacatccattctcttatagtattaaggttttcatttggcttttttccctctgacagcagtgttgtatatacggtttgaggtttgggatctaacaattttcccctag

SEQ ID NO: 37886 - DNA, 1028 bp, Bovine  19866881074508
  misc_feature (1)..(1): n is a, c, g, or t
nccccaattacttggtgtgacagatggaaccaatgaaagtactcctttgaaatccaagtttgggtaatcttaactaaagcagttcaggaagaatgagacccagctgaggtatggcagtccctagattgcaaaaggaaaaaaaatagagacatttgtgaacattgcaactgactaataaaatcaaattttcaagttttttttttttctaaactatgaaagtatgataacacatttacaggagacttggaaaatacagagcaaagttacatatagttctactatatattacaatattttaaagtacgcaaattaagatttttttagttggggtttcaatatcaaactctcaaaacttaatagaatagacagaaaagtagaaggaaagagtagacctgaaagacactatgaaccaattcaacataatcaagatttatacaattttcacccaacagcaggatacaaattctattcaagttcccataaactctaaaccaggagacatggaactcaagttattttttattttaaggcaaaagcattccaattattataataaaggtacatgtagaaagtggtgtacaaagctcgacaccctcctgcttgcctggtttcatggctaaatgtttgggctctgaatgtgaatcacggctcttctacttgctggactgtgtgatctcaggctaattacttaacatcatcttcagcatctgtgaagggggactgatgatacctctagtatttggggggaagatgaaacaggctcaccgcaatgaatacttcacagttcctggtccaggggaagaactcagttaaactgttaggatttagcattatgaaaactgaaactggattcaagaagttaaagggattcttctcacagctttgagatgtgcaaacaagagtaggactccaacggatgttctgctgaacttatttttctgtttcctttgctgtctcacaatcatgaatcatgttgaatgtgggctctagaaatgctcagagtaaattgccagctgtccttgccatct

SEQ ID NO: 37887 - DNA, 1336 bp, Bovine  19866881112374
  misc_feature (1)..(1): n is a, c, g, or t
naaatagtttgaagctgaatttttaagcttcttttggcgggatcaaaagaaaccccaaacttctaaaaataccaaattagctttttaagcacagtttctatctttagttgaaaaatgtgtgcagtgtgggctcctggaacctccttaaatgtacccattgatatcagcatttaccttgaaaaatgaggtctttggcctgcgctaataattaagtcactttctctgcccttgaccttccccctcagtgtcaggattgcaccacgtagacagagcctcctcccttccctttctgacttcagccccctgtcttcttgcagtttgttgtggtccaagttatattcttgcaaaccatgatgaatagacgtgagattgaactttgagttcccatgtcagaaattaaagtggatattcctactcagggcataatctgaaatgtttgtgtttggttgaaaatgtgttatatgatgctctctgtagcagattggcctttctaattgctgagcttgttaaaatttaaattggttttcactttcttagcaaatgttgactgacagtcacagaaagtggcccagaatcctggtgagtgatgggaggctgggtggcctggggtaggaaacttgaggcagaccatttgaagtagttagatttgactttcagtgcttccacgatggccagagctccaggccatacccagctggccatggggagcataggagaggcaactcttcctgctgtggtccttgagggaagccccatctcagaaaccggcttcacgtgggcaggctagacctcagccaggcaggggacaagggaagcgtggaccacacacccagagtggtagagcccaagttccatgagtaggccacggtcccccaggcccctccttggagtgtcgaggtgcccaggactgtctagggactttgggtgggatctctgccagttttgttaagaggagaggagacaagggaacagtaccagggaaaggaggagaaatgacttttctttttttttttaattaatttattttaataggaggctaattactttacaatattgtagtggtttttgccatgaagtgacttttcttaaaccccaacttggtgccagacaccaggctgagcgtgttcacacgcatcagatacttttatcctcacagcatccctgaaaagatactttcccgttttgcatctaaggaaactgaggctcagagagtttcctggcctgcccggggtggtgtagccagtaagtggaagtgttagttgcttagtcgtgtctaactctttgtgactccatggactgtggcccaccaggttcctctgtccatgggatttcccag

SEQ ID NO: 37888 - DNA, 1002 bp, Bovine  19866881152812
  misc_feature (1)..(1): n is a, c, g, or t
natggaagggcggttggggggggccggctggtgatgctgcattctgggtgtttttcaacactgaagccgggcataaaagagtcgagtgtttacaatgcccccacgtgtgacccttaaaccggcataactaaggaagcctaacttgctcttcgctgttagaagtctcctcgttaactgagagcagaatccccagactcctaataaatggcctcttgtcctctcctggctgtgttaatccagcacgcccaggagtggccgagccttcaaggtgtcaaatcacaggtgtctaatgtggaatgatgtggagttccatcctatcactcaagaggacagagatgggcagaggaagtctgacaccccactgaaaataaaaatgaaacccagacagtgccctacatggtttacttggtatggattcagaggaagacccagaagcacaagaggcaatcgggtgggtgcacggggggaaaggaggctgccctctgggtaccacataccccccacacagcagcatgggtgtgacctgctttgtaccacaggcagctcagagtcctccacggagcctggtggcatctcatttggcatctcattcctcacgtggaccaaaggctggccttaggcataaaggacaataccgacagctcatgagagatcagtgccggtgggtcatggcttgtggtctggtgtgaatgagtactttctccccgtaaagacaaagaggcaaacagaccctctgaaatggggagggaaaaaaaaaaaaaaacatattcagcttgttagggacaggctccaaatttccggcacaaacatttatttttaatcgagccaattttttttccccccattttaaacctgttaattccatgactgagaattcatcaagtttcagactggaattaattttagcaacggctttataccaaaaatattagtcgacagagatgtggtaagtggcctcgcttcacacactgtcactggaaagtctgcatgttcttgttcctt

SEQ ID NO: 37889 - DNA, 751 bp, Bovine  19866881213939
  misc_feature (1)..(1): n is a, c, g, or t
nccctgggcggcgtgtggttagtcgggcaggttcctgtgcgcagccccccgtggccctggggtgcggcccagccctctggcgtgaaggcgccaagaagtatgagttgttccttctacagtctcggtgaccgcagcctttggccttgataagtagatgatgttgattcatgacctcggacttctagtcacaaaaccacagtctggctcaggatatttcaccagggacgggagagatagctgatcaaaatgcacctgtgaatctctctagtctaggataggaatttgggattttttttgaggggaggaggagcatgtgggatcttagttccctacagtggaagtcttagccgctgtaccaccagggaagtcctttgaatctccctagtctgaatcgtgagaaactctgtccagttggtactgggttggttcagcctgagagtgctgtttttctgcttggcttattgggagcaagtaacttttgcagggaaagagcggctgctggaggcaggagtggagctggttgggctgagcgggtatgtggaggcctcttcctcccctgaggctgcaagagcgttgctgctattgtgtgtgttttatttttcaaataattttatttatttatttttgtctttgctgggtctttgttgctctgtgggcttttctctagttgcaaagggcagggcttactttgtagttgtggtgtgggtcttcttgttgactcctcttgttgaagagcacaggccctaggtgt

SEQ ID NO: 37890 - DNA, 1768 bp, Bovine  19866881239985
  misc_feature (1)..(1): n is a, c, g, or t
nctaacctatgggtaaaattccttagtgatagaaaaccaattatgttagcaggaatttgaatattactgaactgttaagtggtgtctgagtatcttttgttataaggagattttggacttaatggcttctttgtttgcaacaaaatgtaacacatctacatctcaagagctgaaatgcatactaaataaacttccacggggtaagaccggcataaaatttgaataaagactaagaaaaagaaaaaaaaagaaaaccactaactttggaatttcttgcaggtattctgcaaaggctcactgaccttggaacatctggatgtctcttattgcccccaactatcagatataattattaaagcattggccatttattgtattaatctcacatctctcagtgttgctggctgtccaaaggtatgtgcaggagttagagctcagacatgtcagattgaagtactgccaaagaacacaggcagggtagcaattaggtgttggactcataatagaacttttctttgccatatctgaggtattcatcaagagttctccttccccaaactgtaagtagctttatgatttcatttgtgtaaaagtagtacctggaaaaagttaaagacaattctcatacaaatataaaaatgtgtcaaatatttatttaattcactaatgagagaaccagcaaaatgataagggtcagttcactcagcatttgatcaaactgagcatttacaggaactgaagaaagaatgttggaacatgattgttaggttaaatcccaaatcggttaaagtcctacaaggtaacaaatcaataaccttggagctatagtttctaccagaaataatctgcatctctcttagacaaaaatacaacagggagaatttgagccctaatcgataataaatagtatgtccaaaaagcggcataattccttgtataattttctcagttggacctgttaaaataatgttccagtaaacgtgaaagggtaggcaaccgtcttttgtcttatttttcaagtgtttgacaatttttcttgacgtctgtttttgaaaggaatatatactcattacaaaatctttgtactgcatatattaaaagtatgaaagtaaaaattcaaagtcataccaccatccaggacgtagaattcttttctatgtacagagattacagttaaagaaggtttgtcttgctttttaaagaatagaatcatactttctaaaatgcactgtaacctactttcttttctcttaatatactacagataatatcaccaggtcaagaaatagaggtctctggttctgggttaatttggcatattaaatataccctgataattttgttccctcttgaaacgctaccaaaactgcagaagaaggataagggcccacaatgatagggaaaacagtaggagacaaaagcaacaaaattttggaaacctgaaaatagatgaattaatttagcataccagagacaactttgaatcctaaaccaatagtagagaaagctggggaaagaatggatttacaccataaccttcaacttggcaatactgtatacttctgtaactgggttaagaggatggctaaagtaaggaagactgggttaaaagttcttgagaagtaggtacatcaatagatctccttccctattctatgctttcaggcaactacccctcgtcatcctcaccagatttgagatatatttcctagagccagatttctcaaccgtggcattactgacatttggacaagatcattctttacag

SEQ ID NO: 37891 - DNA, 1348 bp, Bovine  19866881322217
  misc_feature (1)..(1): n is a, c, g, or t
ntcctagggagagaggggcaggcaaatggaggggaggggccccctccccccagggtcttgatcctgccaagcctgcagggttgtcgccctgacaacccgaggaggaagcactgaaaccacgttgctctttgcctggtggcgccaggaaaggccagggtgctgggggccaaggaccccttcagataaaccaggagcaacggatgctggcgggactcgggcgtctgtctcctgtgctgacgccgggccagcttggcatttagaaaggtcggctctctctgatcacatcgctccatggtaggggcccagaggtgagctggtggcgacagaggagccagcctgggagtggagctcagtgccgacggtcgacaagttgcacgtacatacccgacttttcttatgctcacatatggccatacatatgtatgggcacaaacaccccccacaggacacagatgcagcccagagatatttaggggctgcatccgatcactctttgaaaagttctcaagttccagaataaactgcgctcatgggccaaacaagttcaatgctattaagtctctgctaaatttaaggcatgagcacaaatgtctatttaaatgttctcaaatgatatttttacaacactgaactagaaatttcaagggactttaaattctcatcctcattcctattcaccccatcaccttttgcaagatcgtgatgaagagttcacaactgtatcgaaaggatgcatgacacggtatattgcaaacactgaactcaaggcaggacctgggaaggtggtggaggaggcccccacgggcctctcggaggccagggctgacccagccctgtgcccctcaggaagactgtcttgtatgggactggagcgcttctcattctgcttagccagtcgttatttaatctaagactatcctggagtattatgtttatcttacattttgcaggcctggtaaatccccattaaccagaatcttagtgaccaggaagcaccccgaacagaaagtgtctgggagctcatccacagactgggcttttcatgagccaagaagaacgatgagaaaatgagggccttcagggccggtcctgggcacagcctgggccctgaacagctctgcccgtgccacctctagctgtgcatccctgggcaagttgctttgcccctctggccggacaacaccctagcaccttctgactgctgtctctaccaagtgcctttggctctctctgggcaggtcatctctctctgtgatcagatcctttttggccaaaacagcctacagaaggtggtgcctctgggctccgcttggccacagggacagggcttgacttagtcatctgctag

SEQ ID NO: 37892 - DNA, 1016 bp, Bovine  19866881373055
  misc_feature (1)..(1): n is a, c, g, or t
nctcagggatgtcagagagagggtcccacgtcagcctatgaccctgaaacacaggagggcagatcaggctgccgttcacctttgacacagagaagctcgttatttctaaagagggctgtcagccataaaccctcaagtcgagggttcctttggagaggagccacatgaaccttgagtgagtcctcacgtttcaattcgggttccgtgtccccagcacgattccacatctgaactcggccgggaagcgttctgggctggtggtcaccctgcggtggcttctgaagctgtcaccactgtcagctggaagggccctgaagctgggcagggtcctcctatgccaaggctcccattgcccctccagctccgtctccaccctgtgcctccctggcacccctcttcctctgctctttgatttctgccctcactcaaccacgtttccatgcgccaggccatgaccttactgctcccccaaccttctccttccctctcccatcttccatacttgtctttctagtcacttggaatttcctggcttggcgcgggctcaaagcctaaactatggacataatgaaaagtggtgcatcagaccagccgccagttaaataatgtttgggttcttgtcagaatgtcacagagtaccctgtcattttgtttcagcaacttgtccttctgaatgcacagttcgccttatggcatgccagcagtaaaaatgtcacttacaataattactttttggtgaagaatgcttgctgacttcctaccttcaagctgttttttacacagtggggagataataagaaatgactttatcctgactgctcaaatgaacactaaatggaatttgggttattattactgcagatagagggctgggtatggaaatttaaacagtggatcgtgtaaactgcagagagatttgtctctgaaaattatggcgggtgtgcattttcaattggcttccattgaaaacttaaggcagctgttgtttgcctgctgttttggaatataatattttt

SEQ ID NO: 37893 - DNA, 759 bp, Bovine  19866881495873
  misc_feature (1)..(1): n is a, c, g, or t
ngttcctgggaactggagggacctcctcacatagtacacagcaagtcagggacagagctgggatggacattggtctcccacctccaagctctgaagtggggtgagctctgctctggccacccttccgcccagcacacccaccagatctgtggtttttacatttttcaccttgacctatagtaagaaatacatttgacatggtgacccagtacacacacctaggtaaaaatatctctgaaacacacgtttcaccagataatatttactctgactgtgtgtgatagagtgtgacactttctattctagttcattaaaaaaaaaaaaaaatgctcgtctcctccttcagattagatttaccacaatacagggttggagaccctgatgcagaatgggattcctggaattgggcagggccgtgttgccaggtggaagaaaagaggccagtgtgggatttgacagaggtaagctggcaggactctctgggagggccgctctgtgcctgcccccctactctgccccagagttcctggccctggcctgaaggcccccgggctggcttgagactgagattcctggcagagcttgagctctgggacagggactttcttaggaggaaagggaagggccccacgttgagtgggcaggcgggtgggggttcctggcagcactggctgccatccagcaggcgtccggctgggcttggggtggtgactgcgggcttgctgaccacggcaggcccttgtgccagccagccaggcg

SEQ ID NO: 37894 - DNA, 851 bp, Bovine  19866881545257
  misc_feature (1)..(1): n is a, c, g, or t
ncgggatgtgtgcgtgccagtcttagttgtgtctgagtctttgtgacgccatggactgtagcccatcaggctcctctgcccactggattctccaggcaagaacattggagtgggttgccatgtcctcctccaggggatcttcccgacccagggactgaacctgtgtctcttatgtctcctgcactggcaggcgggttctttactattaccaccacctgggagccccgtttagaggatactgtgtgcctattctgtgtgggacacagtgctgggggtactttccacaaagcaatgtgacgactaagaatcagatgagagggccccttggctggaagccttctccagagcaagtggctcaacccattagaaggtggaggcacagactttgctgcagggttaacatgttggtataaactctgctgcataacagctgtcacgggagcagtgtagagacttaagagatggatgaaggaaaagaaaaagcatcaccatggggtgcctgggatgcagggaccgtatcagagactttcgcaaggaaatcacacctgggactgcttatgtatacctcgtggcatcagaaaaagcatcaacctgacttagagagaagcctcttccgtgaggaccgaaagggctatgctcttgtgattttatgtctgaagccatcaaacatcctacctggtttgctctttcaaggtccgtcatgatcatttcaatttcgtcggccctggggaggtgagagggagagagcaggttagtcgatgggcgaggcaggctcaggggccaccactgttcccaacttggcagcatggcccatgggcacgcaggccaggccagtgtccggggcgggaggc

SEQ ID NO: 37895 - DNA, 646 bp, Bovine  19866880362183
  misc_feature (1)..(1): n is a, c, g, or t
ncagaaaaaacaacagcagatggaccacaatatttaaaaatgttttctacctggtcctttatagaaaaggtttacacagctttcgtgtagagtatattatgtaaaattcttattcttgggttgacatgatgaatacatgccatctctctccttacgaatagatgtgaagtgtcaggatgattaccgaaaattcacacgtgatatgttaaccagtaagtcttatcaagtacatgctgttgctactataatttacactattattgttactggtgaatgttattggacatttatggtgtgccaagcactctgtatgtagtatcttatttataccaaaaaagaaccttgggaggtaggtactattcaaatttcaatttttgaaatgctgacattgaagtgaatttgtccaaacttactcacaggattaggtagggcaagagttggaaacagatctattcaactctgtcactcacattttaaacaactgtattcactgcacaccaccagaaactagggcaatagtagactcagtactactgcatcgagcttctaaccacgttgcaggcaaaacattcacaccatgaacacctggacagtgtttgtggtggggtgcgggccctcaaacctttacatgtgttatctcattcaa

SEQ ID NO: 37896 - DNA, 1938 bp, Bovine  19866880608404
  misc_feature (1)..(1): n is a, c, g, or t
ntagcagaccctctgtaactggagttttatgtcatctaatgtggcacctcaaaccctcatgtatatgttacaattgtactctgggggattcagcaattctgcttattgaacatgaggctacatgcctatgaatgtaattaatgactaacatgattgttttgttcttatttagaaaatacgcaggttcttaataatcgcagtctataataagtcaaaaataagtcaaaggcatataaagtgacacaggaatcccttgtaacattacagactggattaaaaatatccaaacatggtactcagtatttctctctctctctctctcttttttttttttttttggtttttctacagattgctgcaaattcctggggaaagtcctggggagagaatggctattttaggattcttcgtggagtaaatgagtctgacattgaaaagttgattatcgcagcttggggccagctgacaagtgcagatgaaccatagcatatcattaaatttccatcaggccaagcattcaagtcaccctttaaattggaattaagccatgtgaggttctctgtgacagtgcaatctttgccttgtcaccttgttatcacaaccttcttgttttcttgtttcaccccaggccctaagctcccatttcctttatgtcaccgaatatgtaaaaccactaacagaggactgcagagggactaaatgccttttaaattccctggtagtcttcatttcccttgcatgacaatgttccttttgactttgatcatttgcaaacagtgtgatggcatttgttttaaaagttcatagcatttgtttgtggaaatgatctggtctctgtctttgaacaatgaggatgtcagacaacaaaaagcactgaaaacaccagtttgcaatcatttgcaatttttttccacccaataatgctttcttaattccgacattgcttatgatttgctaaaaagcagtggaaatatattgtttctctcagtaagctgacattttggttcttttcattcttctaaactgaacttgcaatctaactcaaagggagagtcactatcataggaaagaactactctttaccctacaatgtaattgcttatgatgcggggaagatggtaagtaacaaaaacacttagatgctggcaatggaagtaccgtcttaatgtgtatgtaggacacacactcctgtttttggaaaccagtgcacttggtggaaagtctattaaaatgagctgcaaagctgtattgggtgagatcacatatttaccccccaaaacagctcagatgtcacaaatttgcatctgatttcagttctcaatagtcagagaaacaaaaatagcctccgcatccttgttgggaaaggatgcaatcttctaataattcactgacatcttaaatgacaaattaataaataaagaagcgaagctgatctgtcagtgagcctggcagattataatgacgatggtgggacacccatgcccttcacttctgggctctctgttgtctggatttccagtgtagagctcttttatgtggtcgcacccaataataccctggctaaatgagccagatgtgtggaaaatgtgagaaaacagagtacgaaaatgtgaagtgctgctgcaatggttgttttctccattaatctctgctgtgttatcagaagaagcatctattcacttagttctcccctagaaaccatacaggaatctcattcaccttgttgtggttggttgatacatatatgtgtatgtacatatgtgtgtatgtacaaatgctgtgctgctgctaagtcgcttcagtcgtgtctgactctgtgtgaccccatagacggcagcccaccaggctcccccgtccctgggattctccaggcaagaacactggagtgggttgccatttccttctccaatgcatgaaggtgaaaagtgaaagtgaagt

SEQ ID NO: 37897 - DNA, 2183 bp, Bovine  19866880632635
  misc_feature (1)..(1): n is a, c, g, or t
ntctaaatgaccctgtatagtctacctgggttttcttggcattgctgaaaaaagaaaaaaaaaaaaaaaaaaaaacactttatctgttttgttgttgtgaaggaagggtctgaacttcagacccagtcttgggaaagttcactccccctgacctggaatacctgaagttcatatgaatgcaatatatgtaaggaacaatttggaaatccatgctgcaggtcatttgagtgtattatgggagctaatattttctttcatcttttcaagttcttctctgcatgaccaaacaagtgatctgggtgtgatgctgataattatttctggagtttagagccaagacagagagacatgtgatattgaaacctgactttcttctctgcttctaaaagaatgagagagaggtgccaatttcactaagatttagcccaaggagtcttgcaaaacaacacattacagatgtctgcttttttaaaagagcatcacttgtagaatgtgctttcaagttgatgtcagtagtttcataaatttaggaaaactaagcttattttctctgaagccttatggaaatttgacattggaaatgtttagaagataatatttttaggtcatcagagtatttgttctgaacatttctcaaggaaaaatgattgtccattgttgaatatctttattatctatatgtctttgctttggttgaaatttgtgtcaggtattttcatcacaagattttccatacctctatcctgatgctgctgctgctgctaagtcacttcagtcatgtctgactctgtgcgaccccatagccggcagcccaccaggctcccccgtccctgggattctccaggcaagaacactggagtgggttgccataacctctatcctaggaatgagtaaattttatatgtggatgacaaagtgtcttgttattaatactacttttatgtatacattaaactatgtcaagttatcaatccacaatgcaattctactttctcccctttcctctcattttaaaattgaacttggcatattaatagaaaacagcagctacactaaactccttagaaagcttttcatacctcttgaaccaaaaccctgctttctccaagctgagggtggtgagtgtggctggcattaagtcaatgtattgcaagctgaagttctttttccaaaacacaaacctagtatggaaagctgtggctaagacttcaggactccgctctaccgaggtgcctcaaaccatagtcatggggagccttcttcagcagtcatgagtttctgctgttacagaatcttcagactttcatctgtgattgtcacaacgttatttctattggttacacacaggggcccttcaaacacacaagcaaaatgagttgcagcatttttgcccagactactgcggacagaacatcgctgaactacaacacttttgattcccactgactcagatcagaatatatattggcaacctgtttcagccttaaggtctcaataccaggccatcatccaatcccaacctactactcattatgaagaataacctggtgagggaattatataacactgaaaataaagcctattttaaaactgtttaaacaagtatttgcatgagagattcttgacccagaaggttattcactctgttgtaggctcattcctttgagggagagacaagcatcattaggcagaatctgtaaagacatgtttagaattctatctcaaattcgtcaggatgagtcttcccccaatttcatctagttattcttctattctggaatgttccatccagttctgagggagcttacctgctttgtccacttgctgccaggaaattgcaaatgaaactgaaaacattgctccgaagactccatgtaaaaaaaaaaaaaaaagaacatccttggttcactatattagtatgctcagttcataaactgtaggtcgtgtccttttcattaatatttctaaagagcatggacaaaggtgtcatgatttatataatcacattgacgaaaaattgcagagctgagtagatttgagacttttagagttggaaatatatgttaaaaatctctggggaagctttaggtcttaatttattatttgtatgaccttggggagtcacataacctctctaagttaaatttttctcttccatcatgggtaatttataataagtttca

SEQ ID NO: 37898 - DNA, 773 bp, Bovine  19866880813927
  misc_feature (1)..(1): n is a, c, g, or t
ntgcttttataagaagaatataatctttatagcatttcaaggattcatagatttgtatttattaattttatttttgccagttgtcacttacaagttgttcagaaagatgttttcttttctttttcttttgcaaatttgattatttgagaagtttcctatgagaaaatccagttgtaggtagtaccttgtgccctaagaggatcttatttttatttattggctctttgttaacctccttctatttatgttactgtatggttgacataattatatttggttcaactttataaagtctgatagtgtctagcaagacttttcccaggtaattatttggctctcaagaagtgttcccaagatgatatctgcatttattcctaattaccatgaatacctcttatgaaaatgtctcctctaattactttgaaaagtcatctttcattaaagtcacttttcttctagccactcagtggtagatatccataaagtcatcatttttgatcatcttgaatatgtaaatgtttaagcagatactgctggtttttgtttcctaattctagcctagtgtcttctgtgggatgtgactcttactcttgtgaaatatggagaagtcacataagcaaaaatctagtgagaattaggccagcgtgatccccaaggtgctcagacctgcatctcctgagttaagtcttggttgctccctgagtcaccgttcctgggtgtgtctgttaggcctcaggatccttaatacaacagaaactaagtaccgggggccc

SEQ ID NO: 37899 - DNA, 1463 bp, Bovine  19866880837565
  misc_feature (1)..(1): n is a, c, g, or t
naactggcagcctgagggtcaaatcttgccaactatctggttttataagtaaagttttattggaatgtagctacatccattcatttatatattgtctaaggctgcttcccctggaggaggaaatggcaacccactccagtattcttgcctggagaattccatggacagaggaacctggtgggctgtacagtccatggggtcgcaaagagtcagacacgactgagcgactaatgcaacacaaggctgcttccatattaaaaaaacagatctgagtagctgtgtcagaaaccacgtgaccagcaaagtctaagatgtttgttctctggcatttggcagaaaagtttgcccacctggatgtaatcttaaaattcttcttcctcctgggtatacactctggagaaactctcataaacactttccaggagacaactaggaaaatgtttacagtaaaacaatctgtaatagcaaaatcctggaaactgtctacatatcatcaaacaggagaactgatcaaatgtggtgtatgcctacagtacatattatacagcagtgaagatgaatagcagttggagaggttagcatgggtgagtctcttgtaatgttgaataacaaagcgtcataaaaatacatgcaatatagctccatttgtagaaaagatcaaacaataagtgtgggaacacacgttcactaaatgtgtaaaggaaaaacaaggacatgataaacaacaaattcacaacagtggacttctataaggtgaaaagaacggagggatggcctgggaggtacatatgaaagcttcaacagagtgggggattgttctattatacaaagaaggggtgtccatgggggatgtattattgggtgtattttttatttttatttaaaaaataattccattcattatttctagctgtgctgggtttttgttgttgcacaggcttttctctagttgctgtgggcaggggctactctctagttgcgggcttctcattgcagtggcttctctagttgaggagcatgggctctagggtaccgacttcagcagacttcagcagttgcggtacgagggctcagtagttgtggctccaaggttctaaagcacgggctcagtagttgtggtgcacagacttagctactccgtggcatgtgggatcttcccaaatcagggatcaaacccatgtctcctgcattggcaggtgaattcttcaccattgagacaccagggaacccctgtgtatattctattttagtatctctgatatcaggatggtttttatattgctgtcagccaggtggcagtaactaccttaaaaatattttaaccaatgtatttcacgtatgtttcccttttaatatatgtgcaagagataacaaaatatctaagtctggaaaataatctttcaataagtataaaatttaaaaaatctaagtgacatactcactatccaggaacacaggaaagg

SEQ ID NO: 37900 - DNA, 1020 bp, Bovine  19866880838917
  misc_feature (1)..(1): n is a, c, g, or t
ntagagatatatggaatctgttacattctttgaaatttctaaatgttagtttattagggaacaaagtgtttgtccttgtctgactttctcaaggattttaaacctcattaaaagaactatccaatgctttgctctaaacaagttttaaatattctttttgacaatgtgactcagagaattcagtcagtttagaaattctacagactctagaactcctctttgtaagactcactaaatctttactcttgtgcatctgacaacattttttcagttctagctcttatataattcaacacttcagtcttatgtgaactcatgccaattcatcccacacatatttactgacaacctaccatgtatctgggactgcgtgagcaactagggatgaactgtcctaatacttgagtctggaactgaatttccatgggccttccctcatggctgagtgggtgaagaatctgggagacacagtagatgtgagtttgatctgtggattgggaaaaagccctggaaaagggaatggcaatccactccagtatatttgcctgggaaatcccatggagacaggaacctggctggctcctccatgggttcagaaacagtcagatatgactaagcagctagctcaaggattaaatttttgaaagaattactcattccaattcttatcacattctcttctgctaccttttattcttcaacattcttcaaaaagaacttaaaataattaatattagatgctaatcagtcagtctagtatgaggaaataaacagcaaatggtaattacagacgcagaatcaaatgccagtaacttaagttcacatagagataaaaataattatgtatgtaaatatagaagagagtataaatgtatttttgtttgaaattattttcttctcctattgggcttgagataacattgtaaagcaataattataaaactgtgaatctttagcttatcatgtatgaagatgtaattcaaatgaaggagggaatgaagctatatggaacaaagtttt

SEQ ID NO: 37901 - DNA, 1143 bp, Bovine  19866881127044
  misc_feature (1)..(1): n is a, c, g, or t
nctttattatttctgaatttctacaaatttatgacaatattgatatttgaattcatttgttcttggcaaaaagatgactctcagtttctgaagatggcttctaaattctccaaggctgggaacgtttcttgggtattaaatagctgttataaatcatggataaattaattacaaacgtgttaggcacaataatattgaacttcactcccagtgcacattgttttcatgaagataaaggaaaatatacttataagatgtaatctgaatgtatataaacttgaatgacaacatcagaatgacaaacttcagagataactttggacacaaattgtgaggacagctattactattttaatactagcgcaataatagatgtttttgcacttgatataaataataataatcaattgtatttcaaaaaatctgggcagccattaacatttagaaagctttgcaattccagttaattttacaacagaagacttttctacttcctacaagttacaagtcaaaaaaaaaaattctgttaggttatgtacattagctttcaaatggcatggagcaaaattatagatttcttttcagaaacaatatatgtaaacacagaaaatactgtcaatttaagtctactctgttacattacgtacatagtaaatgaagtgcaaaggcgtgaaaaatacttacctccccaaattcaagggggtctcttttctagagaactattgcaattaaagagggagtgaattactctgtccactttgccacatatttctataatctcaaaatttctttgtaagttttggagttataatgctttttaagtttttcatgaaatgtatttctagaattgttgtatgccacatgtgtaacatcatgtcacgtgtttaacagttattttatacatttaaagcgtcttcatgaagaaatttcttatccaatctgatgtgattgtgtcccaactaccatgaatgatgctgcttaggtagtttttaagtaaaaaccatactgagaattctataatcacattcacaccatcctctccattgtatgaaagatattggttgttggtcattagataagttggatattcactcataactactgtcaaatctctgcagttaaggattgaattaagccctctgg

SEQ ID NO: 37902 - DNA, 2331 bp, Bovine  19866881153438
  misc_feature (1)..(1): n is a, c, g, or t
nttgtaccgcatttttaagattcccaaataggtgatatcatatatttgtgtctgtctgacttaaagttcatatacaaaagacacaatgaagaaactgtggtacatccatacaattaataccatgtagccattaaaataatttgtggtagaatagctagtaaaatgaaaagatattcaagaagctacagtgaaaaagtcagctcacaaaagaatgtatgtgctgtgcgtgtgctaaattgtttcagtcgtgcccgactctttgcaaccatatggactgtagcccaccaggttcctctgtccatgggattctccaggaaaggaatactggaatgggttgccatttccttctccatgtctttagaaactttagttaaagaatgaatttagttaaaggaatgagaaaatacaaaaagaaaggaaaacagtgaagcaagacaaaataatactttatgccattaaacaaaatccatggaaagcaagggagatcgaaccagtcaatcttaaagggaagtcaaccctgaatactcactgaaaagacctgatgttgaagcttgaagttctaatattttggccacctgatgagaagagctgactcattggaaaagaccctggatgctgggaaagattgggggcaagagaagaaaggggtgacacgggatgggacggttagatggcatcaccgattcaatggacatgaactagggcaaactccaggagatggtgagggacagggaagcttggcatgctgcagtccgtggggctgtgaagagttgggcatgacttggtgactgaccaacaatgtactcagacgaactgaaaaatggtttctactgcattgctattttcagctcacggaagacatagctggcaattgaagttaagttagcaatgagacagccataagtaagcagatgtatcctccggaatatctctaagagtaaaagttttaaactacaccttggtagatctaacatgatacatctacgaaaatgttgataaataaatagaaatagaagcatagaagtaatgtaatattaggagatagaacttgataaaaaatatcttttaccaacaaaattcaagtagaatataaaagcttccagagcaaaaaacaacaacaacaaaaaaacctgtttcttagaaacaaatgataattgatttgttgttaagcttttcatcagtggcgtttcacattatgaggcaaaggacggatgcctttaaaagtgtgaaagaaatggaacattatttgatctttaaaaggaaattctgacacctgctctgacatggattaatcttgaaattgtcatactcagtgaaatatgctagtcacaagggaacagatacagtatgatctcacctagatgaggaactagagcagacaaattcacagagacagaaagcaaaatggggcattttatgggtctgggaggggggaattgggggttacataggtgcagtattaaaattttgcgacatgaagacattctgaatatggataatggtgatagttgcttaacaatgtgcctgtgcttaatgccactgaactgtataaatgcttaaaatggtaaatattttttattccccctcaagacagtaaattttgcatcatttatattttaccaccattaaaaaaataaaataaaataaaaatctgaggaaaaaacaaacaaaaaatttatcatgaaacttgaagacatgaattaattgtcactctcctcctgaaatatctaagtttagtgaatcatagaacccaaggaattatacgagacatattactgcaaacaaatctgttcagaataatcaggaataaataactcatctgtgatgcagcagatgtctggggcatcctctatgacactcatttttaccaaaaataaactttgaagctgctggacttgcttccagttccccaaagaagagcccagtgaagaactgcattgattttttttttttttaagagcctgttgtagagtcagatcaatgtcaggaagaataaaaactgatctcaccttgaatgtcaaggaaagcattagtcctgaaataaataggccttataaacatccttaacacccataggcatttttcttactaaatatgggtctaaatatatgaagccaactcaagtattaatgatgagaatacttgctttgtcagccaaggatggagtgttatgttctgaactacttactcttcctgaaattcttacggtatatttatcccagttggtttattctattctgtttctgctagtgattgactttttggctcaatattaaaatatacaataggcttttttggtttttctgttacgccaggcagtctggcagaaaa

SEQ ID NO: 37903 - DNA, 1364 bp, Bovine  19866881167197
  misc_feature (1)..(1): n is a, c, g, or t
nttacacctctgcacaatttttgagggttgggcggggggagtgcagtggcgagatggtggctgtggtgatggagtttattagggcagctggaagccgacttttttaaaaaagcagctttggaagggagggtggactacacatgaattgtgaatggaaggagcgtctaccttgatgaatggagagagactggaggtgtttaagtgcagagggcagtgtggagggaatctctgtggaaaatgacaagagagaagctaagctaggagaagatgctcttgattacaaaaaggcggagaaggtgagtgaggtggaataggctgggaggcactgaaatccaaaacatagactttgtaactgcaatggaggctgataagagacttactaggctctcagcaccagcttgattttaaccttctctccccaagggtgtcagtctggtaagaagcatccaatgtagtccctcacctactcaggggcagagtagctgataggtgactgaaaggcattcctcagagctggtagattattatttgataagaaagataagaaccccctgaaaactttagttgaccccgtctacatgttctttcagcctgttttaattttgctgctgtttttaaaggcaaacataaaggaaatcttttgaggatgcaagttaggtggatggaagtggaaatacacattattagggctatctgttgtaaggataaatctgttaatcataatgctatgcttttcttgtttcccttcttattatctatccttaaaactacaacaattaggatatatggctactagcagagcaacattttactgcattatgctaacacttaatgataagtgaataatcaaaattgaacatctattgagtacctactgtgtgccagacaccttcacatatactgtctcacttaaagctaagagtaacctgcatttgacagaagaagcaagacttagagaaatgaaatgagtttttaaggaacttgattcagatttggtttcattccttctgacctcggtccagaattctccactgttattctactctagatttagaaaccatatagagaatgaattctttgctcctggtatctgcaaacttattgaatgcatttcctgttctcctctgcatttaagtccactattaataaattaccatgaagggttaattattctgtcattctctccaacagaaacccacccggagaggaactttattgcattgcagtaaaattttgacgttttgcagaatggctacaaatcacaactaattttctttcaggcttaacctctgtggtaaaatttgctcctttttgctgttatgttactctagcttgcacagacctgtgatgcattatctttgtat

SEQ ID NO: 37904 - DNA, 790 bp, Bovine  19866881187892
  misc_feature (1)..(1): n is a, c, g, or t
ntgtcctttatcgagccgacccaaagggatggtatggggagggaggagggaggagggttcaaggatgggaacacatgtatacctgtgacagattcattttaatatatggcaaaaccaatgcaatattgtaaagttaaattaaattaagttaaaaaaaaataaagccagagccgctcaaaaaaaaaaagaaagaaaataaatgttcccttggtatctctaattttcttgaagagatctctaatctttcccattctgttgtttagaaataacagaactttagaaatatgttaatgtctgagatttcagttaaatagctgagcaaaaatcaaagcttttgactgagtgtacatgcattattgattacacctacatctgtttttaatcaaatattctaagagaatcacacagcacttcaaatactgattggcccataatttaatgcttctgcttgtagcatcaaatataaccttaattttaaaatgttgtacaaattatatatttgaaatttcaaagtgcttgtagctaaataaatgctatctttttctacccaagaagattggaacagagaacctaaaaaattcactgtgaaatgtatgatcttgttttagaaaaagagttaccttctaaattttcttgattaagaaaatattaagttttgcattgcattgcctgaatatgcagtttctggagaagtcatgcatctcatttgcattgactaagtggtctatgtgacagaatttcatttagcttcatgaaacagaaaaacagcttgaagtatttaaccaagtgt

SEQ ID NO: 37905 - DNA, 1427 bp, Bovine  19866881240383
  misc_feature (1)..(1): n is a, c, g, or t
nggcactttttaaactttgactaacaaaatttaaatataagttttcagtgttttaatttatggtaacaaaattagacatgtatggagagagaaatacacttaaaaaatttttttattggaatatagttgctttacaatgctatgttagtttctgctgtacaatgaactgaatcatcaatatgtatacatatatcccctcttttccaggtttccttcccatttcagtcaccacagagcactgagcagagtctcctgtgctatgtagtaggctctcgttagttatctattttatacataatagtgtaagtaagaagaaaagcgaggaaaaaatattcatataaaagtatacagtggaccatcttcattttaatgagtaacaaaattaaaagaaactcccattttcatgactataagtgtcagggttgttgatttctaaacaaatgtctacttcctggcttttcagttagacatgcatgaccctgttacagcatgttttataaagtattgtttgaacaacaacaataacatgaatgaaaggaaaagaagaaaaagtaaagatcgcagccattacgggagattgccaagacttgcaaaattgtgagctggtgaatgataaaccaaagacaagccaacgtgagcaattttgacgagacttccctttagtaaatgctgcctcatcttaggcaagtttgtccatttaatcatgcattctgttctcgtggctctaaatttaaccacacagcatatttctgatggatgttccttaagcacatcacatttaacctgttccaaatggaactcataatttcctcacctccactctgctcttcctactgattaatttctccatctttgttaattgtccaccctcttccatagaacagatgtgtcctaacccattttgcatatcaaattatttcctttttacttcaaagagctattctgacggaaacatttggcctcagcatataattaaaaacttaacaatactaatagctgttttaaagagcatcttctctttgtcagtgtgcaagtatttacaataatttgcatgtaattcactttcatatccattcaccagggtatgaatattacttagtcaaatagacaattaattaatataatctttacatagtcacttattaaaatgcactacacaactgctgtttacttgggacttctcactggatccatgggcatgtgaatattgaacaactgccggctgtttataacattggtcttcttgtctaaaggagccaggtacacattaaaaaaaaaatttttttttctctgaattgagaataaaagtctcacattcttcaatgtgttattgataaagatgtccccttaccttattcagtgtgaaccctaaaactaggaaatgtttattgatcattgattacaggttaagtttatctaatgagtaa

SEQ ID NO: 37906 - DNA, 1597 bp, Bovine  19866881342659
  misc_feature (1)..(1): n is a, c, g, or t
nagcatagcatgaaaagtgataggggtgggggaaaataagtcagagtaggggcagaaaacatgtttgaaaattttatttaagagttcaaagaagaaagttaaagcctggagaactaataattctcagtcaaaattttaaaggatatgagttttacaagcaaaaattaaaatgtaaaagttcactatgtagtattacaggatttggtcactcggagcttgtgaattcagtctgtgagtgctgtttcacagcatatttaactcacaatgtagatgaaaatgtacggtgtcctgcaccttatagtccatgactgctgagaattcagggtctaaatatttattatatctattcttttccattggaaccatagcgacttcctcagtaaatggctaattataacttgataaacattataaatgaacattataggtgtcacttttttgcaatgacaagttccattgttttgcagccatcagacaaatggcccttgagatctcatctacatttcatttttctgtcgagatctagttcaacttgctgtatgaagtggaaacaactttcttagacaataagttcttttgtattcttaaaccattttggattaaacacttcaatttctttatctttttttctaaaataactttctttaacaataaaatagccgaacacttttcaggttttcttcattcgaagttctgtagtatttagatctagatgtaaacaagtactaagatttaacaaacataaacttaataaatgatttgtttttataggtggtatttgcactaatatctctaataatactatttacaatgaagtcaacaacagaaaggaacttgagatccttgcaacctcattactattggtttatagaccagcagtagtaattacctaatacagaaacgtcaaaatatttttcaaaatatataatatgaatttaaaaagagttcttgcatgaatttaaatgaaatccctgtaaatgaattaaaatgaatttataatgtctaatataagttaacaaaaaaatgagttaggggaattatttctcctggattgatctattccagaatgtggagggggcaagtattgcaggaatgacatcagaacattttcccatcaactaccatagtgactgacatctattacttctttgtaagtttctacttaatatgaatgtgtgcaagatatacggaagcagatgaaaatctaaactgcaatacatagttttgtattttttcacaaaatgaacaattgtatgttaaaacatgtaacttatttttgtaaacaaaacttaccttcaataagtatatattgaaagaatgaattaatgagtacaaattcaggcaaaaactcaagtgtggctcagtcatctcagtgtcaccatccaaagaaacatctcaaaggattcctttctagttcatgcctagccagccagcccaaggtccatactacctagtagcctgtgtacttgccctgtttcagaaccagctcactgcttacccaccttcagaaggtatgcctggaatgacaggaaattcacttctgcacagcatcttttattgggggttgagtcagtgaggaagaatcggtcttttaata

SEQ ID NO: 37907 - DNA, 678 bp, Bovine  19866881426704
  misc_feature (1)..(1): n is a, c, g, or t
ngaagcccatttctcacctttattcagtgaattctcattattgacatttattgtgccttttctttttgctatcataaataataatgtgatgaccttccttatatgagagtcttggttgaaaggaaagatattccaataatgaaaatgtgaagtagaagaaaaaataaattcatacatggaaagagttggcttgagaaaatatgtgaaacagcagcaacctaggcatgatcaacatactctatgaagttgggtttatcagaccagggtcccctgggagagaagttcgccatcaggccacagtggtgagaccgggtttgtcctgtgagcctgagggctgcagagtctgtattcacttgagagttggtagattgaaagtttccctccagacattttttttttccacctgcctctcagtaacatctagcatgatacttctgattttttagcgtgattgccagggaggtttagatatacaaaaatatttatgaaaatagtactattataaaagatttggtttctaaaaaaacaagattatttactaggtttttgcaaaaaaattgcagtgacctcatttcggtctggaatggtgaatagtgaaattttgacctttaacgagctgagaaccagctgaaagaaagggccaaaaatagatctaataccatcattgacgctgacagg

SEQ ID NO: 37908 - DNA, 1498 bp, Bovine  19866881580633
  misc_feature (1)..(1): n is a, c, g, or t
naaaatgcatttaatgaaaacataacttaatttccaaaagtgattttaggtgtaataaaataatggtatcacatacaatcaagaaaaatgttaaaaatgtttgcttacactaatattctcatagaatattactatctatcatacatctatctacactaacagtgaaaccaaataacattttaaccagctagggaacactttttttttttaagtaatccatgtaaaaatgccagatgtctccatggtgggtacccagctttacctgattccagtgccaaggcactgaatattctaccttattaccttggagtgatttgtactcaattttctaagcatgacttaactgagcttccctataaaataaaatattttaatgagagtgatggagtctgctgctatagacctttgagaagctctgtgatggattctgaaacatacactcttgcatgcacctcaccttggcatcaacactttctaagattaactggtacagagttgatacttttcctctacaaggaatcctggatttcatgacctctccaaagtgtgtagtgcagggtctagaacatgatggacacatgtacacccctggttgattcatgtcaatgtatggcaaaaaccactacaatattgtaaagtaattagcttccgattaaaataaattaatttttaaaatgtcacctcattcccctccattttaaagtgtcttgtacttaatgtgtataatgctttaatatacagatacatgtctctttttatataatttctatcttttatatattaattcagggattaaggactgtgtatcttctatttcttttcaccgtgtgcaaatagtctcttaatgaatactttatagaggagatggaaatattacacaatattagttgtcaagatgaaaagacaaattctgtcatttgctcaagcagattttgccttagggagatttccagtatttttattaaattatcgttaatgtaattcagatggaaaaaaaaactcccaatgaaaaacaacttcttcagtgagagtgttaagactttatcatatatctttcctgcaaaagtgcttatatctggagcaaagcagaacggttaggttttaaaatacaacttatgtccctgtacaagaatcctcaatttgtgacaggtcttaaaactcctctatttgaaaaggccaaagaaggtgatataaatactatttttttcaattaattttgctcaatacagatatatacactggaaagtgagattatattttgtcaattataagtgtttagggatttataggaaattatgttttttcatatgtataagctccagaaagtagtgaaaaaaatgtttgcttggaagaaatgttacctacttttttagaaacaaaacttcaccataaacatgtttaagtgccagagaatattcacaaaggtttgatatatattaggccataaaagtaaatgtaatacattctatatgcagaaaatcacacaggaccacattct

SEQ ID NO: 37909 - DNA, 971 bp, Bovine  19866881936278
  misc_feature (1)..(1): n is a, c, g, or t
naaggtggctgtcatggcttttggctgaaagctgcaagtcggctcatgaacaacctcaacagtcagacaggggagagagtcaggcagaacgcaacacctaatattctagacttggcagcacgcagggggacaggtggctgaaaccttccatgctgaagagcagtctgaaaggtgacattgaacgtggtaatagaggaaggtttaacagtccaactctccaatttagaaatgcggctgagaaccaaatgttccatagggcagggatcaaaattctcagctaaggagatttgtatgtagaaaagggcattgctataagtatcagggggtttactgcctaccatgccagaaggaagggaatggaggcagtgtcagattctctggggatgaaatgaatctagggtgcatgcctctgctagcatcccagaagtgtggtcatgaaaatataaatgtgggggtctctatggcacctgactccagtactcttgcctggaaaatcccatggatgggggagcctggtaggctgcagtccatggggtcgctaagagtcggacatgactgagcgacttcactttcacttttcactttcatggattggagaaggaagaggcaacccactccagtgttcttgcctggagaatcccagggacagaggagccctggtgagctgccgtcaatggggtcgcacagagttggacacgactgaagtgacttagcttagcttagactatagcactgacaacagcagtttataatatagggaaaatgtccagattctaggacactggtagggatcatctcctggtctccatgttggtgattctgctattcagggactttgaaaagatagctaaggaaactaaaaaaaagaaagctaaagaattggcaccagtgacccaagagagaaaggagggatggggcagaacacagaagtcaaggaaacagactctaatggccaagccatgcagtgtctc

SEQ ID NO: 37910 - DNA, 887 bp, Bovine  19866881943955
  misc_feature (1)..(1): n is a, c, g, or t
ntcttgtatgtcatttaaaagaaagacctatcattgtattattgtgtataagtaaaagaaaaatttccagttcagactatgaacatatatgttcttacctttgatgataagatttcccttatcaatggaaaaatgccaaaacaaaatcagtgtatctttattcaaagaatgtcatataaatcaaaacacttggcataaaaaaagaggcagcttcccaagttgtgctagtggtaaagagcccacctgccaatgcctaagaagacttgagttcaaatccaggatcccctggaactattcttgcctggagaattccatgaacagaggagcctagtgggctacagtccatggggttgcaaagagttggactcgaaaagcaacttagcactcagtcatagtacactttttatatttaatgggaaataggtaattctttttattgatacatttctaatattatttgtagccgattttttttcatttttttaatagaaagcacttgaatgaaacgtcttttgacaactttgaatctggttatctgtgtgcctacccttctgaaacagtacaaatattgagagacatccatgtaacagctggcgcttccctgtgctaccttccttctttctttagaccgtgtcggtgtctgtctctgtcctcacgctgagctgcattgccttggaccggtggtatgctatctgtcaccctctgatgtttaagagcacagccaagcgggcccggaacagcatcgtcatcatctggatcgtgtcctgcgtcataatgatccctcaggccattgtcatggagtgcagcaccatgctgcccggcttagccaataaaaccgctctctttaccgtctgtgatgagcgctggggaggcaagtccagtgtggt

SEQ ID NO: 37911 - DNA, 2799 bp, Bovine  19866880395902
  misc_feature (1)..(1): n is a, c, g, or t
ncctgggataggatgcctgctagagcacagaaacagacacgacctagcagccccaggctctgctgatcacaaaggctttctgagcaatggcccttcaaagaaacaaatcaagacagacagcctgccaaaaacatgccgacccagcagactcagaatcccttacccactgagaaacagccctcccagcccatccatcacttagacaactcaaattagtgagaacatcaaagaagtagcgaatgcttccgtggctgtgggaaagctctcctgggcaaccttgccccgtgcactcccctccctacctctcagggagcctgaggaataaataccttcctcctcctgtcagatttctatccatcctccaagacccagatccaatgccacccattagtgatgccttcgctcatctccgaatggcttattgttaggtcaagtgtaggttttgatgttgttctgggcaagagtccctgcactgcccaagttctaatcttccgatccctttaccctgaagaggtccatgcaaggagaagctttatggggaacaaacaacccctgtgtaccccaggctctaatgcagagctctctaaatgagcataattgaattacaaaactgagctcaaaactcaaattgggcttccatctcctcccagagctagcatccaagtcctggggtcttagcccctctcaacatggcaaggatgagtgctcagatgtgtggaagggaggaaattttgtcagtctcaagcaggttccgagttcactcatcaatcctgctacatgggaggggtgggcaggagaggggagagattgattgattgattattgcttattttttcaaatcaattgatagcactcataaagatagaactatcatatgacccagatcttccacttctgggtattaccttaagaatttaaaaatagtaatgcaatatatatatatatatatatatatatataatatataacaaagcatatatatatatatatatatatatatatatatatatatatatatggtttcctatgttcattgcagctttatttacaacagccaagatatggaaatagcctaattatccattgatagatgaatggataaagatgtggtatatcagttcagttcagttcagttactcagttgtgtccacctatttgcgaccccatgaactacagcatgctaggcttccctgtccatcaccaactcccagagcttactcaaactcatgtccattgaatcagtgatgccatccaaccatctcatcctctgtcatccccttctcctcctgccttcaatcttccccagcatcagggtcttttccaatgagtaggttctttgtatcagggggccagagtattggagtttcagcttcagcatcagtccttccaatgaatattcaagactgatttcctttaggatgcactggtttggtttccttgcagtccaagggactctcaagagtcttctccaacaccacagtttaaaagcatcaattttttggtgctcagctttccttataatccaattttcacatccatatatgactactggaaaaaccatagctttgactagttggacctttgctggcaaagtaatgtctctgctttttaatatgcagtctaggctggtcataacttttcttccaaggagcaagtgtctcttaatttcatggctgcaatcaccatctgtagtgattttggagccaaagaaaataaaatctgccactgtttgcaatttttccccatctatttgccatgaattgatgggactggatgccaagatcttagtttttaaatgttaagatttaagccagccttttctcattcttctttcaccatcaagaagctctttagttcctcttcactttctgccattagattggtatcatctgcatagctgaggttgttgatatttctctcagcaatcttgattccagcttgtgattcatccaaccaggcattttacatgatgtgctctgcatataagttaaaaagcagggtgataatatacagccttgatgacctcctttcccaatttagaaccagtctgttgttccatgtctggttctaactgttgctttttaacctgcatacaggtttcttgggagacaggtaaggtggtcttgtattccatctcttttaagaatattccacagtttgttgtgatccaaatagtcaaaggctttagtgtagtcaatgaagcagaagtaaatgtttttcaggaatccctttgctttatatttgatccaatagatgttggcaatttgatttctggttcctctgccttttctaaatccagcttgtacatctggaagttctcggttcacataacgaatactagcttgaaggattttgatcatgtgaaatgagctagcatgtgaaataagcacaattgtccaatagtttgaacattctttggcattggctgtctttagaattggaatgaaaactgaccttttctagtcctgcagtcactgctgagttttctagatttgcagacatatcgagtgcagcacattaacagaatcatcctttaggattttaaatagctcaactgggattccaccacctccgctagctttgttcatagtaatgcttcctaaggcctacttgacttcactttccaggatgtctggctctaggtgagtgaccacactatcatttttatccacatcattaagaccttttttgtgtggttcttctgtgtattcttgctacttcttaatatcttctgcttcgattaggtcctcaccatttctatcctttattgtgcccgtctttgcataaactgttgcctta
